United States Patent Application Publication US 2014/0057251 A1 - sequence listing, part 169

SEQ ID NO: 327618 - DNA, 1223 bp, Cannabis indica
aagtctactccacttggggggcaactatacctgtacaaagcatttggtaaagataaaacaaacacaattgtacaatgattataaacagagaatgaaattcattatagataactaaagcacgtaaacctaagattaaaagcatcccagtcagcctgttgtctgaaaaatgaaaaataattccaattttaaagactgcttggccggtcacgatgtcttaagaaaaggccttatggctagacagataaaaaaaagaagaagaaagataaacagataagtgttcagacggctggagtccaaggctccttgtacgggtcatctgggttggtaggagttggaggatctattgtttggatagggggcacgtcaacgttcaggccggaggtagaagtggttgccttgaactctctataggccacttgggaagcacagtactaaagatacatgtctttggtctcgcccaggtaatcaaaattcacctgagggttagccttccaaaagtcataaaaaatctcaagaccggctgtctctaaggcgttcaccttccctttaagcctctctacctcaagctcatcctccttggacttcttctttgcttccaacctgcagaaaatagctcttcctggaagtcatggcagcctcaagttgatcagaatcctctagatctttggtcagctcggccactttcttcttggccgtaggaagctttttgttgacttcacctagttccatttagacggctccaagttgaaccctagcttcatcagcgtccttcctggccaaatccactttcgccctcatggtgttgaacatggcagcattcttggaggcagcaaacttagttgtgtaagccatcctcagaccagtctacacagacaaaaaacattagaatctgagccaagtaaggaaggattaaaggaaactgttaggaaagactcaccttcgtaaactccttcaggactcctcccatcaacaactctagagaaggctcgttgtcagctctggccagctgctcattcacttcaggggccgaccaattcatatagtgggagagcatctccttgcctcttttggtctccgaatgcggtgatggaggtggggtagagcccgtatctgctcagatctgcccttcgactgctcgagcctatccgagcttcctccttgagagaccttggacttagcagtttttggagcagaaggatctaccacggttagctcctcggata

SEQ ID NO: 327619 - DNA, 1049 bp, Cannabis indica
aaaaatatacatatttttttagaattttttaaaaataccatttatctttatattaagggtccaaattttttttgcttatggcccatttcaactcagggccgacccttgaacctcccaagtattcgttcaacatagttctctagtgacaagcataaccttagagaaggtctatcacgaatgatttttattcttaggattagtttaactgcccacaaatctttcatatcaaagactcctcatagtttgttcttcagtcgatttatcaccttaccattttggccgactattaacatgtcattgacatatagtaataagataaaaaaaaaatcattagaaaatttcttaatatagacacacgaatctataactaatctcttataacttcgatctaccataaatgaatcaaattttttgtaattgtaaagcctattgtagaccatacaaactctttgtatacaaattttattgcacacaaaactttaaacaattacatacagttggtaagaagtcctatcactacaatattacataatttttattaaaaaaatagaacagaacacattcgatattttttaacttatttttttagttatagcatgcactctcagcacattagctatgaataacaaaaaagaaaaatgataacgtctcaatcaccacaaaatgtatcaaactgctattcgtgcaatttaatattagatttcacatttttttatttaataaataatatgagcaatgctattggacacctgtggtgtgtaacaccttttataggtgacgtttcatgattggttagtgatattttctaaacactattttcttatgttatatgggagtcgatacttaattacaataatgatggtatgacacctaggattgtaaataggtcgaagctgatctgactatgatccgacctaaagatcatgtaaggatatgccctgcccgcccctcttgatcatatacttagattggatctgattcgacctatttttttaaaatttaattttatatctaaacttataattttaaatttattttaattttttatt

SEQ ID NO: 327620 - DNA, 777 bp, Cannabis indica
ttttttttttcatattcgtttatgttagagctatttaagatatcttacaaaatttgaaaaattcgaattaatttacaatcgtattaaataaattaaccacgcatgcaatacactgtttgaactctattttcgacgtgttaaactttgtacatcccttttaaaagggcaaaataaaagttttctatattaaatagaaaaatcaaattttccaactaaaaattgttgaattcaaacttattaaactacctttttctttatttttttgctctgccatagaaatttctgatttggctccaatcaactgggaacttaattctttttatcaaaaagtctcctcttttacttttattcccacccaattgagttttctttcccaagaaaacaaaatcattagttgtttagaagaaagattcaaactttttagtcaatgagtgctttttcaaacgggatcagacggagtgcgtgaaagaggagatcgatagaggaggaagaagagtcgccgacgcctgtaacagaagaatgggtatcagattttggagccattttcgttgctccgattctctcgggttttgagaagcaaatggtctttggatctcaactccactctttgtaagtgtaatattatatagagatattagcggctaaaccacctaaattttatggtttgtaacacttaactacaaaaattgaatttttagcgactaaactaccttaaccctggttccgtttttctctgcacacatccgtccaaaaatcacagttaagtgtcacggtgga

SEQ ID NO: 327621 - DNA, 1308 bp, Cannabis indica
tttaaagttgttcggtagattttctatctattctagtatcaagtagagttttctcatctattactagtaaaattttcaaaaaaaattttaaaaaaatttatgatgccaaaaataatgtttgaatagtttgtacacatgcgagtattgttttttcttacatgcatgtacggtaagtaatagtttgaactttattttcaacactataaaatatttagaattttttcaaaatttacagatagttctaaataactacaatgtacgcgattataaaaaaaattagactaaaaaagttttttgaattctaaaatatataggtgggtctacccagaacatcccttttagaatgtgtactatataaatttcctaaatatatgtatatgtacccaaataactatagcataaaaaaaaattttatactaagtactcatgacatgtacttaattatgtagtatttggggttgaatattttagcataaaataagtttaattggcttttctcctaagacatatttgttttaatttacatataatatataggttaatcaagaatatacatttttgtattattattttggggttaagagaagaccaaaacatttggttgaacaagagtggattacctaagattacatgtgctgaatctatatgaccgttgaagatcaatcaccaactctgataattattattattatataacaaaattaaattgtcttatacatttagagtaacacacaaggaaaattaagatgaagagttggggtcagaagttgagtttacacccaatttaattattataagaaaattgaaattgattaattattattaattcgttattttggagtgttgagttgtgttgttaattcctactaattattagaaaggaataaatacgtagtgaagcccaaattaatgatgagatatatgtttggtaggtaattggttgctgattttaactataaaacaaatattaatgaacaataatcatgaatctcatgtgtgtctattcatatataaatgttttttctttttgttgaaaaaaaaacaaggaaaggaaaattaattaggaagagactaattaattaatcaatgaaatgaaagtgtactttgttgtagattttggtatagtgtgtgcatggagttgacatttttaaataaaatgatataataaatagatgaattacctaacctgacaactttgatacagatttcacagcccacccactattcttcttctcaaagttgttattatatttatatttatttgtatttgagtagcttataagcaaaactaattatttttaatttacc

SEQ ID NO: 327622 - DNA, 547 bp, Cannabis indica
gggcgaattcaggggcaacaaacaccaaccttcatgacaactggtccaagaggaacaccaagaactgaatcttgtggatcatctgaaatgaaatatccaacaacaacaatattcccagaaccagtctaatcaaaaaggttgcacttttggccttgaattctaatatcaccctataataatccaaatattactatagtttgaaaacaataaatcaacttagaaatatataaataaatgataataatactaaaatcttacctgagtaggacaactattaggacgactatgttggatttctctctgctcgagttagactgagactaagcatcacaaactaaagtttagatacaataaatttttcccattaattacttgagtagtatagctgataatatacttgaatgtatataatagttaaaatcaaaatactagagataaaataattctataaacctacataaatactccacaaaccttgaaaaatcaatttaataatttaccttggaatttatgaaagatgtaacgccctaatgctaaggcacgctac

SEQ ID NO: 327623 - DNA, 1066 bp, Cannabis indica
cgctttataaaaggtcctggaagcagggacctctaatctttctaggaggcccagatgtgacaaaagttgagtagtggatggctgccataaacaaaatattaaactttattggagtcatcggtaatgaccaggtgacttgtgcaatattttaattacatgggatgtcctggtgtggtgggagatggtatctctcactcgtgatgttacaactataactttgaatgagttccaagacttgttcaatgctaagtattataacaaggtagtatgtagcaccaaaagaagagattttactcagttggttcaagatgaatctacgtcagatagactcgctagggttggcctcaggtattgtgccaactgatttcagcaagatagataagtacttggcaagacttaatgccaatattatatatgatctattgatcactaccaacgatactataacttctgctcatatgatagacaaagctctctgagccaatggtgttctggagtttatttaggagccctgagggacccaaaatgttagtggggttactgctcctcctacttctagtttttgtaggggtagtggtgactcctcttttgatcaaaaaagatgagatccatctgtatctagtggttcgagtcaaaatacaaggttttgggggaactagtatcgggatggtcatcagggaggctctgaaggtcgttacacctatccagaatgttaaagttgtaaaaaacatcatttggatgagtgtaaaggcagggcgtgtttccgtttgtgttagaacttattttactaggatctagatttactaacatgtatgtttgattaacaccctaaatatgaattctctaatatgatgaaattaaacacataagagtttagaaaaccttacattgatggtagttgaataatatgactcattccgcacaaatctctaacccttgttcctttttgtcgcagagtaatacaagatctgagcttggatctccttctctccttcagtttggttaaccaccgtcttccgcactatgattgagtcttaacttgctatgtgtgtgcatggtactctat

SEQ ID NO: 327624 - DNA, 1644 bp, Cannabis indica
attcatatgacaataaagatattcaaaatagttcctaaggtgaattatttaaaatattttaagtttgctttaaagaaatatatttatatataatagattaatactgcttgcgtataacagggcagattaaaactgctcgcgtataacaggggagattaaaactactcgtgtataacaaggcagactaataactgcttgcaaaagacatggtaggttactacttgtatatctcaaagaaaatgagattagagctgcattcaactgaaagtatcttaagctagatcaagaaagaaatgtttaaattgtgaaataagatgcaatagataaacattttaaaacttgaaaagcaagatatgagacataaagagtaaataaataaatgaactatgtttgccgtccaacatagcaaaagtatcttacaagtgccacaaggggcaaatattgtctcggccaaagggccatttttctaaattttaaaaaatatatatgataaaataaaacccaagtctacatggttggatcttcttcttcttctttggaattcactacttcgtctttttaggtctgctcgcaataagccaacatctatgcaacaccatcattcaggaagcttaagtccatattaggattggctagccaggctctgtagataaagcattttgcaacgttgttgcacctctccttggcatcagcctcaggaccctcaagctttttattggcttcattgagctcttcctaaattttttggcggggcttgcgatgatctttggcttccttttgagcactttcaacctcagccttgtggttcctctttagctcctcggcatccttggtcaagtgagtgttctcttttttggcattagtccactgcttcgcaacaaccacacattgttcgatggatttgcgaagctcagattctaactattggatttgctgaaggccccattgttgtgccacgtgagacagtaaagatgcatgtaataaaagtaaatttagaagaagtataagaaagaacattttataaaataagaaaatgaagaaaggaactaaccaagagactaaagttcaggctcctctcaaacaactcctcaaagttgtcgctgttcatcaagtcccaatcaccagactgaaaagattgaaaatgatgccaacttgaggtagcatactgtgagcagatctacgaaccagtaattcctacttctctaggcaagggacaggagggttccaaaaagaccatctcaggtttgaacctgagaatttgacttggtgtgttgaacccaaggcttgctcttcagtgcccacagtggctggggtttgggaatgaacctgatcatcagctggctcgataattatttactacgaatcatgttttttattagcagtggttttcctcaatctcttcacgggttctagatttgctcccaatgaagtctctgaggcggcaaccctcttcttccccccttttgcctgaagtattgaggaagttctcaaaatgcatatctgcgagtaaaatagaaaatgaatcaacacttattaaaaatataaaaaaggtggggaataaactcccacttagagaaatttattataattatcagatgatgaggaagaaaaacttgataactattaaactccctagacccagtg

SEQ ID NO: 327625 - DNA, 770 bp, Cannabis indica
atctaataaatgtaatggtggtggtggtagtagtgactagtggtggtttcaatgctggtggtggtgttgatacttgataggattacgatgaatggaaaagaaggaggagaaaatctaagaaaaaaagaaaaggaagaacgaataagcataaaaaagaaaaaaaagatattaattattaattattttatttttaaaatgatttaatttttattttaaattaattaaattatgtggaccaataaaataatgtcacatgtacactatatccatgtggacaattcatattgccattaacggtcaaaaatggataaaaatagttaaatattaacagaatatgaattttggaagttttgccatcaaaatttagattttgagagttaattgccggtgaagtgaaagtgttgtgagttttgtaatattttattattaatttaattattgcattaaattataaaaaatgtacacttattttttattattttatttaataataaaatgattatattatacttttaattgaaatcttaactaaacattgaactttgtattaagttttacgagcatcgtttattctattgtaactttgtgttttatctctagaggccatcctcttgggatgtgatgttagtgctggactctagaacccgagtgtgagattgggttaaatttttatggagcttgaaggtaaaagaagtggaggttcaaaaattatttctgtatgctgttagacttttatttgggctttacattaaattttattggttttatta

SEQ ID NO: 327626 - DNA, 1119 bp, Cannabis indica
aactgtcctactaaaattactaattaaaaccattgtgatatttttggcatccgatcaagtctctaagatcgcctaacctaaaaatatttttattccacgaataacatacatcactcatatattccaataaaatctttgtaattaataaattaagcttatttatccacttatagaaaaaaattaattcccgctgaattagattagtaaaatcataatcttactcattatacccttaatacacctataactccatattttataaaatatgctctaattaatcataattagatttttgggatattacattgactgaacgtccattatttactaggatttggacactcttttattgacgacttgagcctcaatcaccaatgggtcgttgtggggaaagcgaacatgtctcacatctacttctgtgaatgtgattggaaaattcaacatttgaggctattgtgctggtgtttgtactagttcacacatttccccttcctgctcaagctcattgagatatcttttttgtgcgtttcttgtactttcggcaatatgtggagccttcggatatcatggaaatgtgaccattgactaacggtggagtagcccttggtgggtaaggatttcttagtgttggagcacgaacatttttgagcggtcggacatttaggaccgcctaaggggcttggattcttggagcttgatggtaacacactctcagaggaggggtttatatctccttgctatatgggaatgaccaattgtccttgagccagcgttggtcttgcgtaaatgattggagtcctcacccacgtcatgcaggagtccattttgatgaggtttttccatctcatctttcaggtatccacactcgttggtggtatgtccaatatcgttgtgggattcacatctcttacaaggatatttcttatgcatgccccccttgtaaaatggtgagagcttctggtagtgaactgagttgcacataaccttgcagatattctttcttcagttaataaaattagtatacttagtatactggggctcgtatccttttcttacttttttcaaagcctcgctccgggcttgacttttttccattcatcttattcaatgactggatta

SEQ ID NO: 327627 - DNA, 663 bp, Cannabis indica
atcagattgtaatgagttttatttagggcataaaacccaacatctttgtcttccagtatgggtagttagcaccctctaacaacagaggtctcgtggttgatccatcttccctaaaaatttccattatgcacagattaggtaaaaaaacaaactcttgtactatagttctctgaaaaagaactcagagagggttagtggcaacaagatcaactattcaaatctttaacacgtatgaactgactttttcaaaattaagaatcaaacaagtcgaggatctaacacaaaatttttagaaaatttcaagctctgatacgaaatgaaagaacaacttatccaaatttcatgattcaagttactgagttgttcaagattagattgattaatttaaacttatgcattcaagaatcggattgaagagaaagcagtaaagaacacaatgacttacaagcttcgtctacactgagaacaaatcttagccgactagtgcttagattcctcgaaccagggtaacaacatccactaaatccaaaagattcatattacaagctccagttcacaattacgaatttaaaacaatctttacagtaattagtaatgaattacacaccaacaaccaagattccttgtgttgggttttgtgccctaaataaaacccttttcaat

SEQ ID NO: 327628 - DNA, 2395 bp, Cannabis indica
ttttgtgaaaagaaagatgagttaaataaatggaaaaattgaaactgttggggcctataatatggtcggcaacttaacttcaataaagccattattttatcctttttaattccatttaaattctaaacctaaccctagaatgaatcctataaacagaataatatgtctcttatttttataacctacatgagacacttttatctaacaatgagaaaataaagagagagcatcttctattcgaattccttcttcttcttcctcataatttcaaagctcatagtgaattgagagtatgccaactaatgtcaaagcattaactagaatagtgaggaagactgtatttgaccatattgaaggagagaagatccagtttcaaatcttcataatgctctgctatagacaggaatcaagggctagagatcttaatggaatgagtcattattattctgttgccatcaatgtaaggatattttaatctcttatgtgtttattttattgtttcaggaaatttatatttaggatgttagattatagattataatcaaacatacatgttagtaaatctagatcctggtaaaacaagttccaacaactggcctcggagccatggtaataatttatttttatgaaatatggatttaaaatgatatttttatgatttggatgtgttcatgttagtttatgtgcttaattgatgattgaatgtgtacatgaaaaattgagcgagatatgagtttttgaaaattagttgcaaggctggctgagagacccaacttgcacgagcagatcagacacgatttgtctaacaatctcggccaagcacactcagatagccctagtgcgcgcacagacagtccttttggcctcttttgctctgtcatgtccgagttgtgtggcctcacttgcatccaaacttgattttatcatatcttgagttttaaaattatttttaatgattgaaaagctaaaatttattagtttttttatgtagaatttaaattttaatttaaaaacgaaaatatcagaataaaaataatttttatttattttttaaataataaaagtagttcttagatattcaaaggtttacaaatttgaaaattgatttttccacataaattattgacttttttaagttttaaccaaaacaggtaacaatattataaaaatacttctagccgaccaaataaacaaatatactgcccaaataaaaaattacacaaatacaacttacacacactttcaacccactatccatgctccctaggattgcaaccttcgtctgatgcaaccttcgagcaaccacccagcaacccaacacaaccgaaacaaaatccaaccagaaagagaactaccattaatttcggtgatttcacctaagaagacaatcgaatcagcgactgttttgcattcatggaaaaaaaagtgcaaaaaaactactacgaaacaaaaattcaaccagaaatccaatttaattcgtataaaactaatgtcctagtatcttggtgtattttgttgttttccaaatttgtaatggtgaatttgttcatattaaatcgcgaagagacatgtagatagagttacgtacgttaaaaacactgttctaaattttaatgtttcataacagttgcattatagttgtataaatatttgctaacagttatttctccacatattactattatggtacaagcaattatcgatcagtgaacaaaaaaaaacacagacaaatagtttcttacatttaacatttaacatttttagctgcaattaagttacatgtaagttgaataatggttttgcttctacaatatcatagtattataaaaacggagctcgaaattgttatttaaacgacttgaaaagataaaacatgattgttgtaatatatttatgtattatatatgtggaattattagttgttatgtagttttatgtttgttagcttggaacagatataactgctgcattatagtttcatcactgttgccttgaaagttgacttcttctttcccttctggctatcaaagttgaaatttttttttcaggcaaagacactttcgacttcttcttcactggacaacgatcacctttaggcacgggggagccaaattggagtcaatattacaaaaaaaaaaaacttccagccagccaaataaacaaatataccgctcaaagaaaaaaaaaattaaacaaatacctcttacacatacctttaacccacaatccatgctgcctggaattgaaacttttgtcttatgcaatcttcgatcaatcacccaacaaccttcgtctgattatgtgtgtaagtgatagtgtaagaggtattttggtaattaaaagtacataaaaggtataaatattctccacaccttatggaagtatttttataaat

SEQ ID NO: 327629 - DNA, 676 bp, Cannabis indica
cattgatactatttattttttttaataaaaaattattgtagctaaaaattagaatatatattaaataataatgtgtgagatgataattataatatttttaaggaattatatatatttttaaaagtaagaatgccaaaaataatgtggaaagaatgctacaaatactctaatgggtcaggagagttcgataaagaggtgatatgccaaatccattatgtaatattcaaagatcattttggagaaactataataagacattagagaaaggatcataaaggaagaggatccacttattgaattgctattttcagtaattctcatccatataaaatttcaacataaataatacaaaatacttagttgcccgtccataaataaatcaatcatttacaaacttgtatataaacataaatatgatgatatgaatataatttgtaaaaatattgatacaaatgtatttattatgatggtaaaaggaaaacaattaaatttgcattaaattagttaaagagaagagaaggggtataatataaataataataatatttaattaagatccaagaagacctttgtggcgagcatatgaaagtattgaaagaagaatagaggcacacagtattccggtgaggatgaccacctacaataataaatttattaattttatttatttaataaa

SEQ ID NO: 327630 - DNA, 558 bp, Cannabis indica
aattcaaatattattgtggagagtactaatactgaaagtggggttgaagatatatattgaactagttttctatgacaggctaatgaggtcatagaaatttcgatattgttatcggaggagtagccaaagtttcgtctttacagggggttggaatcgttttgtgaaggaaaataatttgaaggccaatgatgttataacattttatacatgtcataaatgctacgtcgcaccacccatttcttccctctctcgccgtcttcttcccactatcgatctccctttcttttcgtctctctcatccattgatcttcacccacccctcctcccgtcggtctctctctcctctccgttgcatacgtcgaaccaccaccaccttccgtcgatgtcccacttatctccgtctcatacgttggaccaccaccaccacctcctgtccgtctctctctctctctttctctctctccgagctcggtataaagacatttatttatttatatacttttttatttattatatatatttattttattattgtataaatttaatgtgttttaaagt

SEQ ID NO: 327631 - DNA, 1063 bp, Cannabis indica
ttattatcaatttcctaggaacccaacactcctaatcggtaagagaaagaagctaaaggcaaatataccagatgaaaacgaagttttttagagagagcaggtcccacaaattctttaaccctatcaacagcttcaatgaaagaattttcaagattatcaataattgaaactgaaaaactttctttgaggagttgaactcttgtgtggcttccgataaatttagtgttgccggtcacgagaatcctctgctccaccgaacctattattgatattttcccaattcacaatcgaaacaaaatcaattcacagtgtcgtcgtctttgtcatcatcattggtgttgattgctaaaccagccctcaatcgcaaagaagcggctattaaaaatttcaattgttgaagttctttttcttgctccctcgatcatattcaatttcaaatgaaatttttaacaatagtgaaattctgtttttataattactaagagaaattatcaaaccattttaaaaatgcgaaactttaatataattgtttgaacagtaatttaatctgccagaacagaaataaaggctttctcttggaatttattagatggatctcaagtgcttacaaaaccaacttgacttatgcaaataaagactctctcttgaaatttgttgtagctgttgtaatctattcttctgatcaaatttctaaagtatcaagaattttaactcccttcaaatcgtagcacttgtacatttcatcccgaagagtgactcatgatatcttcctctcaaagagtgtttaacttgcaatcttcctcccaaagagtgactcacttgcaatcttcctctcaaagagtaactcacttgcacttttcctcccaaaaagtgactcacggacaagacttctcccaaagcttgatgaacaatattcaaagtgttcaacctgcacaatttcaacaagaaacaatacagaataacaaaattgtaaagtccttttttggcaagttagttgacaaaataattttttcatttatggtaagattgctacgcattcatattcgatttcttgccttataaa

SEQ ID NO: 327632 - DNA, 956 bp, Cannabis indica
aatacaaaaataaaaggtaagaattaattgatctcttcataataaagtaagactctttacaattacactaaataatctttattatattttatttacatattaatattttttttttcataattttgagatcctaagtgtgttatttatatatatatatatattgaaaaaaaaatagatactatagtaatataatatgtaccaattaatgtgtactcatttgaggtgacacattgaggaaactatcgttataagattatttaattgatggaatacctaactatatatttgaagagaactatatatatatataggtaggataagaaatgaaagtgatcaggaaattttagaaagcgaccatatagtatcgtactcaacaaatacattttttgatttaattattctaagactctcttgatcgatccaaatatatatatgaaacaagtacattaattattattgaatcctttactttaaaccatagtttagcaacaacgtagtacgtaggtacaataactataataataatgataaagagtaataattaaagccctagagagatgattagattaattcgaaaacacattccaatgatatgatgatcattagccatttaatcatataaaaaaaggagttacatacaggaaatttaattcgagaggtacctaattattttggggttctcagtcttcctcaaatatatttattgtatgtctagttgatgtctcaatacaaattttgacatattgtcactaagactattacagaaactaaaactctagttggaaatatcaacttgggcactggctgaaactctaggtgtccaaattaactttcggattgcaagttcgtgtaatttcacactacaaaaaatcttacttttagtcacaacaaaatttgtgattaaaagtaaaaaaattatgactaattatacatcatgattcctatgttgtgaataa

SEQ ID NO: 327633 - DNA, 1338 bp, Cannabis indica
gataactaatcagattgtaatgagttttatttatggcataaaacccaacagatatcctctcacttccactcaggaagtgtcaatggctgcaataaacctactagtctctgatgttcatccttgatctgttgacaagttaggcaccgggatacaaattctatcacattcttattcatcccactctactaaaattaggggttaagatctttatacatcttagtagtgccaggatgcaatgaatatggggtggtatgggcctcctcaagaatctcatttctaagttctacacttcttggaacacaagccctagtcttaaacaacagcatcccactatctgacagtgtaaaatctttggcttgaccagctgaaacttcttcattgatctttactaattatgaatcatttaactgagcagctttaattcgttctaacagatcagattgcaacgtcaatttatgaagtttgccaacaacaaacttgatggttgatctaaccatgtcttctgctaacagaggtgaaatcataatcatactagttacctgtttgcgatgcttccttctcagggcatcagccactacattggccttcctaggatggtaaaggatttcacaataataatccttaaccaactccaaccaacgcctctgtctcatatttgaatctttctgagtaaagaaatatttgaggcttttatggtcagtgtaaatgtcacacttctctccatagagataatgtcgccaaatcttcaaagaaaaaaccactacaacaagttctaaatcatgagttgggtattgttgttcatattcttttagccgacgggaggaataggcgatgacccgctcagcctgcatcagtacacaccccaaaccctatctagatgcatcacattagactacaaacttttctttctctgacggtagaggtaataccatagcggtaatcaatctttatttcagctcctgaaagcttgcttcacatttgtctgtccacacaaacggctgattctttttagtgagtttggtttagggttttgaaatcttagagaacccctccacaaactaatggtaataaccagccggacccaggaaacttctaatttatgtaactgtcttcggtcatggccaatccttgacggattcaatctttcttggatcaaccttgattccatctttactgacaatgtgtccaagaaaagacacctaagatagccaaaactcgcacttcttgaatttggcatacagtttatgttctcatagtcgctgtagaaccatccaaatatgttgctcatgctcctcttccgactgagagtacacatggatgtcttcgataaatacaata

SEQ ID NO: 327634 - DNA, 1001 bp, Cannabis indica
attggaaaattaactataattaattacctgattgatcctgggcatgagcgacgacaaagaaaaccaaaaaataataaataacaagaattgtgtaggagtgaaaatgatctatcttcatgctaacttcacgttacgtgctcaaactttaaaacacttaaaaaagatataattaagttccttttaatattatacaatatattgttataaatatatatgtattattttggcgaataaaatagagagttgggtttgggtagtcaactctttttttaagtctgggtgagcggtcccaaattaaagaggtatataataagttaaataagtgagatatatgttagaaattaggatcgtgtataattggtgcaagtggtcaatatgtattgtctttattcctacgtacaataatcaggcaagcttcttttttgtctttcatgcatttggttgcaaagtttgaacaccacacccctgcagcgtttacaccttaccctagcttttgactcttgactctattatctcaatccgacgcggttattgagtataaagaaaaaataatatccgaattattaagccgacgttgaacctatgtgttacaactcgactaaaaacagttgaaaagaattaagaatattaccagcaaattgttttatttatttattaacaatcatgaacccataatatatttattgcaaaaactagaaataattaagatgcatttgtctattaatgttataatttattgattattgatattgcccgagattgaaattatatacagtgaatttaaacataataaaaatctctcaaaagaacataattttaactagctagtttaataaaagccaccattgatccaactttaagattacattatctttctcaaaaattacatttgaaattattaatagggatattggcggctaaaccacctaaactttacggtttgtaacacttaaccaccaaaactgaatttttggcggctaaactacctaaactctggttcc

SEQ ID NO: 327635 - DNA, 553 bp, Cannabis indica
ttgaaaaaataattaaaaaccgctccacctacaccgcgaacactcttactatttttgattgacatgctattatttagggttttttttggcaatcggttgagttgaattcttttcatatattaattaatttttattaatatttttttgaacaattaattctttataactattgtattttacattgttgtattttatatttattttttaattttttttaattttatctccattttgtgggcaaagtaaaagatatttaattttattttatttgaatgatttttttttacatttattacttttaaaaggtgtttatttaatttgtttgttaagcgttttgcgaattgtgctgtgcactttgttgcccgatactctgtttttttagctgaacgtatattttctattaacagtgtttagtagaatgtatgatattattagcattattttttcgtatttattgttattattttttttatttaactatatattaaactaggtgattgttacgtgccaagccacgtagtgttaattttatttaatattttagttttttatt

SEQ ID NO: 327636 - DNA, 940 bp, Cannabis indica
ttaaaattaaataatattataaaaaattaaattataagattttacaggctcattattgcgctgacaaaagtcaaatatccatctatcaaaatgacttttaccagcgcgttaatgcactggtaaaaataatacttctcccagccacatttttgttggcaaaagttaagacttttctcaacgcgttaatgtgccggtaaaagtaaaaaatttcccaacgcacatttttgttgccaaaagttatatttttgccagcgcgttaatgtgctgggaaaggttagactttcgtcagtgcatatttgcacagacaaaattctaacttttaccagcgcatttatacgctaaaaaaaatcatatttttgccaacgatttttattttgtgctagcaaaagttccaataccaaggcggattggccaaccctttttgtcagtgcaaaaatgtgttggcaaaaatagaatatgttttgtcagcgcaatacccagcttttgtcggcataaaaatgtgctagcaaaagtcttatttcttgtagtgaattgacattccaaatttagaaataataatctcattattaataaacttaaacggactttaccaacacacttggtagatacttgtgctccattccccacgcgcatagtcacctccccatcagccagctcccttgacaatttaagtatctgcatagaagaataaatatgattagtggctccagatcaacaatccataaagatttatcatcttccattaagttagcttcaagaataaataaatcagatttaccttttttaagctcagagagatactttttacagtttctcttccaatgtcccattacgccacgatagaaacacttgcattaagccttcttgtctttggacttggggctgactttgttcttcttggccttttaggtgacttggggttgcctaaatgtgatacaat

SEQ ID NO: 327637 - DNA, 736 bp, Cannabis indica
agaggaggagtttgaggaagttaagaaaaacaataaagaagtgatttttatgagtgggttttgtctaaaatggtgacatttttttaggaaagaatgatcagatcagaagggtcaggtcagatagagagagatatgtatatatatatatatattaatgatattttgaagaaggggggaggtgagaaagtgtgttctcattcatatgaaattatttgggtttgttatcctgtctctcctcttccccacaactccacaactcactcactctctctctctctctctttgagtttctctctctataagttgttgtattgaaaatgagtatttgtactctttttttgcttttatcttttgtctttggagggagtgaaaattttcagaggatgaaggaggaagagaagaagtgtgatatgaaattacaaaaatgtccttgagatttgggaggaaaaaagtgagatgaaataagggtaaaggtagtaactttgtcagataaaagagacaaagaatggaagaaagaaagaaagaacctgtttttgaggatattttttttttactattttcttggaaaatatgattgattttagataaatgctaaaatggattagtaagcattgcaattattaaatattgaatcttatataatttaaaatattactgtagtggtgttcaatattttctacaagtgacatcttacaattaattagcgatattttattaaaattatttttttaaatta

SEQ ID NO: 327638 - DNA, 1072 bp, Cannabis indica
atttagtacatgtcaaaattaaggggaaaaattactaattaaccttttatatataacacatttacatatgatgtatattaatgtgtagaaaagggtcaattattgtaggtgaagaatgggccggggggccatggttggatatgttggtacttagtagctagatatatacaatagtgtgaagatagagtcttgtatggtctcatcaccaaaagatagagaaaattaaagggtttctaaattgggtcaaaatggctttattggtggaagaaagatgccattttttgttacctatatttgaacgtaaagaaaggctaaaagacaagtcatgtgattgtaatgagaagaaaggtaaagatagatatatattcaattaacaacattattatttttccataaaaaaatatgaacattattatttttctacaattctagattcatcggatgatgaatacaataattgtgagaaggaaagatgatgatggtgatgattgtacgcaacaccgagtatttgacctagcgatagggtttttttttttcgctttgtaacgaagaatagaagttcgagtaggaccagagttaatatttgtacatattgttcctcttatcgttgaggttccattttttttttcttttacgtagtattcgagttagggattgtgtatatatcggtgcttattaacaagttgtgtatagtatattttaattgaaacataaaatgttataataaattgaaaaaaaaaatgaaaattaatgaagatattatagtaataataaaattttacacccaatgtttaaatgaaaaaaaaaataaagaaataaataaataataaacttgtgttgttgtattagtgcacgcgtgtttgtggggtggggaactacctattatcctaaggctaaaaactatgattggattgactgaaaatgaaattcatacacaaagaacaaaccatcaacaatttgtattgagtattgtttttagacactagtggtgttagtatttttttatagataaagtcttacaattgattaactatattttttaaaattatttttaaaattatataagattcaa

SEQ ID NO: 327639 - DNA, 1155 bp, Cannabis indica
aatttaatttatatattatgtattattttttttctaaaaagttagggggggccatggccactccatagatatatggagttccgccactgtgtaggagtgttttgaagaaaaagaccaaaataaataaaataaagtacaaatatcatgagaattgtcattttttcaatgctataataatagtcttaggaataactgaaataccgaacaaagagcatccataattcatgtttatcttcatcctctttttgtttcaataataataataataataattgtttgttgataaatgaagtaattgatggcttcaattacgccgagtaccacgtgcactatttgctcacgccagcagcaacaacaaaaaagtagagagcatagctaattcacatgggaggcaaggcaaccaaaaaaacaatggtcaccatgggccatgtgggaaagccctaataaacatccagcctcctaaaggagaatgtttacattgtttatttatttttgtagaaattatacggcaaagttttaaagttgtatttttatggcatatttttgtaatgcatttaggttatgattttttaaaaatatttaattttctatggtttaaaatatgtcatatttttgtaatatattattatgttctcatattttatttttttggtacaattatgtttcgacccttttctttttttgtccatacatgagaaacgatgaaattatccagcacaaagaaaatttgtcggtcctctttggagtcggagaccacttctatggaaaaatccatctaataaacacgataaatactttcaaagtttcaggcaactgaggtcgtggagagtagaagttcctgttgggttttatgccctaaataaaactccaatttcaatgtaatctttatctttttaatatcaataaagaaacaaaagtattttcatcacttatttgtgtgtcatttggttcacatttatattcttgtttattgtgtcgtcaacacagtggaaagttatcaagattatgtgattaaatatatattcctagatttatcagtacacagggtttaactgacatgtgaatctacaacatagtttacttgcaccttggataagtgctatgttctttccagggcatttgttaaagtaaagtttgggttggatgcatggagta

SEQ ID NO: 327640 - DNA, 1081 bp, Cannabis indica
taaagaaaccaaacacttgattgagctttcttaaggaatagcaagtccattccaatgctcattcatgtgaaccaaacaccaccttagtaaaatatgaattcatgaaatcatgaatccaacacgtaagctttagatcaagtggcccatcattcattttccaagtagttagttggctttgtcttttatctaaatctaataaaatctttcaacaaaattacctaattatccttcttttcatttcttatttcatcttcataactctacaaatattttcctaatttgaaaccataccgacattgatatagtattttttatatatattatgctgacattttaatatttaataacatatattggataagtttctcattgatattagggttaatgctattttaaattttgtttgtaaaaattattattttttttattttattaaattataaatttgattttttattttctaaaatagtacaaaacactacattaaactcaactttcgatagatatatttttaatataactaacttgaagataatttttaacacgaataaattcaaaaaatatttatataattagttttgttatataacaccttaatatcgttttattacttaattttatttggacaaaaaataactcatgttactattttgtttcattttaaaaaatataaagtctaattttttatttcaaaatagaaaatttcatcaataatttttataaaacaaagtctaaaataacatttacctttgttattaatttaaagtgtctaacactatgtaaattagcattttgtgaataattttgtagttagctcttctcaaattattttcttttaaattttagttatctagatcttaggtggtgtttggttggaaataatgaaataaaatgtaatggaaaggaaaagaaacaatttttattccatttcttttgtttggttgcattttaaaatattggaatgccctttctaccattttggtggaatgacttattggattaaaatcctatttgtgagcatatatgtataatgtatatgctattataaagtgtgatacaaaattaagtgaccaattatgtt

SEQ ID NO: 327641 - DNA, 572 bp, Cannabis indica
atacgtgcctcccacgtagctttctgctagtatacatatagattctaacatgaactcttacaaacttaataagtaataaatttttttacgcacaagataatgttaagtaggtgaaaaacttaaaaacttttgcagttaattttctttacataaatagttaattgcaatagatgaaaatttattaaatttattcttcctattctgataaatattttttgcatttttgtattaaattgtatagttatctctctcaaatcatttttctttttcttttaataatttttttcagttcaataataaatgtactatgtacataatatcattcatattatcggagtatatattggtgttgtgttggtatgatgactgtttaggggttctagctaaacatttaattataaatatataacaaataaataagtcagagcttataatataatgcgtaataaataattataaacttaatataaatattgtaaataaacgtaattatagcataatatgtatgtaaatgaacgtaattatagcataatatatatatgtaaatgaacgtaattatagcataatatata

SEQ ID NO: 327642 - DNA, 1001 bp, Cannabis indica
ttttaatcatcatgttaggtgtttcccttgcttattgaaagttactctcgtaaagagcaggcctctttggtatggcagttcttgaatgacatgcccacatatgtgctagcgaaggtactttcatggctatcttcttctctttcaattggtgaataccaacatctgcaaaactcattaaccggaattatcccaaaggaaaagcttcttcaacaggtaaaatttcaaaattatcccctacaaataaatgaaattatttcatattctttattaaagcaaagagctaattatgtacattaatggtttgtgtgaaggccattttcaactggattaaaagaaaagattttgatcatgacaccattttgaataataatactttaatggaaaaagcaaactgtgaaagtgaaactagttcacatccagtagatgatttattgctctggcatagggctatcaaaagagagttgaatgagacattggagaagatcaagaggatgtatgtttctggcgatttttctaatcgatcagttttcgatggaaggctaaagtttattgctgaaatttgcatttgtcacaggtattcttttatttgtatatgtacatgcttaagatgaggattgttggattgggatttcttctatgaattttgttctagtagtttgaaagtattgcatcttttgttgtagcgttgctaaagaaaaggtcttgtatccagaaatatatggcgaaacttcaattttccatcagcatagtgaagtaaagagtaaattcaatgagttttgtgatttgattgaaagtggtggagaaaactcttctacttcagctgagtttctttcaaatctatgttcttgtgctgatcagtataaacagaaaccataaacaaacacttctacattgaggaagtacaggtaattttaccttaaagactctaataattttctaaaatagaattaactttccatggtccaaatagtaatggttgcgagtgttcaaatagattgcta

SEQ ID NO: 327643 - DNA, 2302 bp, Cannabis indica
ttagggcgttacaattttggtatcaaagctgccactatttgtctaccgaagcttgaccaagacatgtacaatcttcatcagaaaaagctcgattcacggttcagtaagcacgtacttgtttagtattttaaatgattattaaagcatgctaggaagcatattagaatataattatttattttaagtgtgttgcctttaagtccataagaacagtattaagttttatgattgctatctaacctgcctcgcttatgggttcgcaggctaagtcctataaaatggacgcctagcgaaatacaagaagttagggtaacatggttgagaccggaggcggtcagggaaatcaaaatccctagaatccccgtggtcgcggccctagccgtggcagagcttaggtacggtctcagtatcctcctctcgggtcttggcatgggccataccttcttcttctctaacaccacccgtctagaggtcagaggtgtgggagtcggcctcctccatgactgtgtctagtgtcgctttcttactagtattcttttgcatgttcaccatagttgaaatgagacaacaattaactagctttcctcacctctcaatgaaatcattaaaatgtttaccaagatttttggaaacggattaataagagcttaagaaaatggaaaatactaaataatagataaaaaaaattgtttacgtggttcaggcgttaatgatccttagtcaacgagtcagtagtattagccttctttggcaaatgtttgagtattacaagtgtttacaatggcaatctctgtattccttttatttctctataagtagaaagctctctaggaatttcagcaaggcttttgtaagttaaaattgttctctctttgtacataagaaatggagatatttataggcccattcttaccccactagggttccttactcagcacgcaaatggggctgtgaaatactacaagactatctaattgttgatttggtaggtagctcttcaatcgtgcaatgctcaattcacacaggttatcatgtgaggacatggacacatttcgttcaaaggtttctcctttaaaattaatattccagacaagtcattggacaataagcactacaaaggcatgtacacacacacctatggtctgatgtaggagataagatctgacgtggtgtcaggcgagctgtaaccgtcgagtgtatttttgggttaggtcgcagggagcttccatgaagtgaactcaagacctgctaaaataatcaatttctaagggctccctaaagtcttaggcttcgaatatgcctccgaataccgaaagtattaggttacaacttcaaggatcgattcctccttcacaacggatatactctcttggatactctaatgccttccctgattctatcttaaaagaaagagcaattcgggatattcccatacgatttgacgtggcacgctttttgccacttctgtgtagaagctatccgggaacagggataacatcaatagatcttaatcctgagatggttaggttctagcttaattgtgttatttgtgttctttcaattgtttgtgaaagctgaccatttggatgagcccaatacttacatcttacgaacatggtagtataattgagtgggagcgctaatcatagatgcggaatttatagcttatataatgacatagaggtgaaatgatgatttcctttgagcttcgcttaatagagataaatagaagagcttttatttcggtaataatattagtttactaaaatatcatttataggaagctaaatgtttaaagaataaaataagtagatcatcctaaatcctgagttatcacaaactcttgttcatgttattaatttctttgattcactcaattgagtttctcagagaagataattcttacaacttatatttcgggaatctaataatgtgaatggctgggaacatgatatacaattatggaatcctgactttcctaatggatcgaatgttagttccctttaagtgttaattttagaattggaatgttgtgcccaaatttaaatgaaatctaaattatacttccactagtaaattaatggtactaaaggatatagaaaaaattagaagggtaaaatagtaatttgaccaaaactaattacgaaccaacacatggagggataatcactggaattgattatatcaatggacactgtaataaaactcagtaaatataattttataattactaagagttcaattctatatttttagtggagtaatcatagaattaataaacaataattatttggttgatgag

SEQ ID NO: 327644 - DNA, 2319 bp, Cannabis indica
aatataaaattatttgaattgaacacaaaaaataaattaaagtgagtgcgaatttttcgcctaaaaattcgagagcagtattttataaacttgacacgtggatccaatccctgagaaaatgatgacatgttaattaatgactctcaaagagttaacctcacttgatctgaactcgcgagatgatgcgacattgacaaggtctagtcgcatactatgccttgcatagtcaaagacaagcaagaccgagagaatttaatacaagtcgcgtatatatagaaatatatgctacaactaggtaatcttctcctgcgactagtaaatatcgcttctttacacaaatattggtccaaatgactgatcgtgttcgacgatttgttaaggactcgcatgtcctatgttgtcaacacgtgaggtgtccatctatgcgatttttgttgaacgcagacatccaaatgataggcccatgagccaattagcaaatacaagatgcaccaaaagcctggaagcttgtgcgagaatacgaataggcaacttgggctaattagcaagtcgcataagttgccgtacttaaagcaagaacggattaaactgttcttcatttattctttaacgtttattcttatttaaattctaaaacctatcagttatgtaaaaccaaaaggacacttgctttttatataaaggattgatccaaatcaaataaactaagcttgcaacagtagactaggcggaccgagatctgactaaaccacaatactttctgtatttttgttatttctagtttttgttttgtttgttaattagtagctaatgctttgagtactcgctactctaagtgagtactgacaagttttatctgagtattcttaatagcattaaatactcgcacgaatttcgatattgtctaaattcttttgacaacataaagtatttaaaataaataaaaatcaataaaaatgtcaatatctaatagtagtgacttaacattgctaaaaaataaaggtttagggatcaatttactaaaaaatatagtttagggactaatttgtcaaaatttatataatttaaggactaatttgtcaaaaagtaaagtttaagaactaagttgccgaaatttatataatttaaatattttatgtttatgttaatttattttgatttggattatagtttaataaagcacaaccataaaattttcaattttgttggaaataacatattattgttatttgttaaagaacaataatggtaactggtactattggagactataatgggttggtgttatttctaataataagatggtcaccttagacacactacaatatatgagaaattcatactaaatattaattttttttctaaattttatatttatagtttaacaagtaaatttttatatttatactttcactacttaatttttttttctttttactaatttttacttattaaagattcaaaaaaaaaatttctcttatttatatttttttttggtcagcttcatttttaagttagttgctaacttttttttcactataaaaaattgctacttttagtgataacattttagtcataacataaactttttgtaactaaatatgacttttagtcacaataaaaattgatacttttagtcataacatgactaaaagtgataacatttagtgataacattttagtcataacataaattttttttaactaaatatgacttttagtcacaataaaaagttacttgtgactaaaacatagtatttagttacaagttgtcactaatttagttttaattacaacaaatattgtgactaaaaacacatttagtcacaacagatcgtaatttttgtgactaatacttttagtcacggatctttcagtcacaacataataatgagaatttataattagccccaacttttttatctttagtcacaaattttattgtgactaaaagtaaaaatttttgtagtgttttttttttcttccccctctctaatatttttgtttttatttttttttcttctttatatatgtgcattttttattgtgtatatttttaaattattttcagtacaatatttttgttatatgtatgtgtatttattttgttaattttatatatatattttttttttttgtttttgtagtttattagtttgttttattactatatatcactaactcaaaaaaggaaaagaaaaaaaaacttaaaaagaataaaagtgtaacaacaattttaatgaaaaaaaaaaacttgtaaaatagtacaaaaaagtataaaatcaatgtgttcaaaatacaagtaaaaaaaactaacgt

SEQ ID NO: 327645 - DNA, 602 bp, Cannabis indica
atgcacttagtttattatttttcatttataatggtattcataattaggctaatgtaaattttattaattcttatatagattctgttatcaaaattaacattcaaataatttattatgtcttctttctttgttatttttccatacccttgtacttagttttaattatttcagttgtttgagttatgatatttatattaattttatattttacaataatagtattttatcattactttgatagattagtaaagatcaataaaatttcagcaattggagtggagttttctctttaatggtacatcgatgtttcattgattagattaatttgcttcagcaatgtgatatctttctctttctcagccaaatttatctattaactctttgtttcgtggtgttcaatacttttagatgtctcgttacagttaaccatttgaatgatattattatatctcaatttttattgaaagatcgttaaacttgattatcattgataatttaattctatcacatatttatttagtctagaaacctaatttttcttcacttttttttaatattttttttttttttgaaacatttttatatattagattttttttttt

SEQ ID NO: 327646 - DNA, 536 bp, Cannabis indica
ttttttagggtttagggtttaggtttaataataaattttttaaattttgtatataaaatcaaatttcccttctcaaaatgaaaatttattagaattagttcctagcaatgtggaaagaaaataccatatatatataaaatgaatggggtacttcttttattgttaattgattttgagataaaatctcatgcaccttatcctgaattctaatatggtatgagagttgtcttcacctttaacttctatttaggacctttcgaccaatatgtgtctatttcgatcatgtggtctcttaaaagttgttcattatactcacacttttcaggctcaaacgtgagaagggtgacgccctaagtcctaggttgttacgaatatgtaatatccataagtggtcagatgtcacactttaacttttgttgaaaaataatacttaccaatgatcccttttttgtaaggttacgaattgtgacagtcagtagtctcgtgatccgtaaggagaaataccgggtaagctgtgcaatctcacatcgcctggg

SEQ ID NO: 327647 - DNA, 835 bp, Cannabis indica
gtttagatccattagatcctaatagggtacctaaaacttgtgaggcagctaaaccgcccaaaaaaaaggtcgtagttttgctagtaatataccattggagactcaaaggagggcaaatcagggactattgccacatatatatgcttgatcttgcaaggggaaaagtttttggcttggagaactaagcttttattcaccagttgggtgtcaaagtgtatgttatttccatggaactacttagattttggtgatgtaccattttaagggacaagttgtgcagagaatgaaagtaaattattgatggtgaaataatttttgtttataattaatcgaacatccaactaatgatcaatttcattaaatgtagtatttttatgatattcatggtcacccagaacccaaaaaagtgacgaggactctttatcatgagatgagaaaaagatatttaaaaaaaaaaaatattaggcatacttactttcaacaatattacgaaggtaaccctactaatattaaggtggctatcaatgctaagcctgagtatgtaacaagggagcattggaaattattgatatgttttttagaccaaaatttacatagccttccaatcaaaacaaaaaacaaacaaaaaacaaatgaagtacccctcaattcaaggaacaaaatcaatggcagctcagcgtcatgaatttgtaagtgaattatcaattaatttaataaaattttatttttaaacacactaacactaataagaatagagaaggagccacataaatatgtcctccattcttggaaagatagtcattctagaaaaaaggacaaagcttaggtcaatgac

SEQ ID NO: 327648 - DNA, 352 bp, Cannabis indica
atcagcccatgatctgtctcccgttggctctctatttgtgatgcaccgatctcatgttatataccagtctgatcaaactcaaaaagtctgcttcctcgtggcacaattgtttgagcaacttcaaatatcgcatttgcctcctattgtgtgtgagcactaatgcaattggggactggatcttcgtctttcagccaactaccatattttaacactttccgatcgtcaccaatatctcccgtagtggtaatttagagcaatcatgttgttcatgtccccagcaaccacacttgtagcagatcattgggaggcactcaaatttaaacttaatccaacttttcatttccccgctggg

SEQ ID NO: 327649 - DNA, 1320 bp, Cannabis indica
cttaaaacttactcatatgtaatataatattttatgtaaataattaattcaataaaacttataatatttttattattatatcacttattttaaatagaaaaaataaatctacaattgataaatccatttagtggaacaataaatggtcaaataaatatattgaaagtgtttctaaattgttatcaaagtgttgaatactacaaacttaagttgatcaaggggaaatgaaaattgaaatgtacaaaaactttaattcatactctattgaaaaatcaaaacaaaagattgttaaattttcttctttgagtataaattacatataagtaataatttaaaaactataataaaaaattatgtaattttttaatatgaaaaattttttaatatgaaaaaaaaaattccaaaagaaaaacacaaaaaaaaaccagacaacgtactttgcatgtagttgtcggctagtttatatatatgtattgatatatattcttttcatatatataggcatggagtggggatatttgggttattggtaaactaagttaatgctgtcaatttaaattaacatagcaacctaaatctctaattctcctataattagagactgagcacgtttatgagtataattgatctattaaattataatccaccattaataatacatcctaataatctcattcacctcttagtttggctcttcataggtccctcccttacaattgttataattgcgtgcttctattagggatgtaaacggggcggggcatgtacagggattgttcccccaccccatactcgcttcttaaattcatcccatatccgccttaatacccgtttaaataaaagcgggggtagggcggtattacccgacgggaaaagaattcccatcgggtacccattacatatatatttttgaaaaaaaaaaaaaaatgtcttaaagagaattaaaaaaaaataatcataaaaacttagtaaaataataaacttaagtggcatagtgtgtatagtaaaaaaaagagtatgatcaataaaaagtttaaaacataaagttattttaattgtagtagttattattttaaaattaaatatatacatatatcatatcgggcaggttcggggcgggtatttattcccccgctcccgccccgtttccgactcgggtatgaatctttaaacccatacccacccccaccccgaaagtcaacctccgtacccgaacccccggtataattgcatccctagcttctattgattatatttgagtaatctttaactttgaaaatataaccgaatatttttgtaattttaaatttttttttttta

SEQ ID NO: 327650 - DNA, 594 bp, Cannabis indica
cgccttatccattaggccacgggtgctattgttgtcggtgagaaacgtttattaattatctttcaaagaagatgctaaaatatattagattttttttctttaggaaattaaaagaaagttttggttacattgaaaatatcatgaatctttgaccgtgaaaagtttttcttaggaaaaaaaatgttgacgtaagggaaaaccttaattacataatttgttggtgcaaattacaaaatcacataatagaaaattacaaagaatatgatattgtttgattatttataattttatgagcttttttccccacttatttgtaaaattatttgtttacaccatatttaaggtttttcattttctcttatagttttttgtgttttccaaaatataagttgtattataaaaaattatgcgtggtatcatgttatgtttgtaacactttattattagcttaagtgttattgtgatttcttaacaccgtgcactcctttgttaatcaaacaatttatagaaaacgtaaataatttaaattttataattaaactttaacactacaaaaataactacatttattaataattttttagtcacaatata

SEQ ID NO: 327651 - DNA, 825 bp, Cannabis indica
attatttaaatttatatatttttttaataataagtatatttataattttatggggtgtaaataaaactacccaacctaacctaattagaagtcacacgccattaggcagagggaaattggtttggattttaaaattttaaagacataaaagcacaccgaactgacacatatactttgggtcccgtgacgtggcactcttaccttttttttctaaattaaatataaataaaaaggagctacgcagaccacagtcacttccatccgtgcttttttttgagtgtagcgtaatggtattcttacaatcaactaatagcttatagcttaaaggtcttgggttcgaacccatgacctctcccttttcccattcctccctcaccactaagctagccttagtggcttcacttccatccgtgctagcctttgctttttgtgcttttatttttattttccacttttcctatttttttctttatttatcggataaataatcaatatttttttttgacaataaataatcaataattttgtatctacagaagtatggaaagttaatgggcctaactgggcctcgtttaaaaaacattcattggaccccaaaacatgccacgacgtgatcatcatatctgccccgtaccattttcattgggataagttgaaaaatactacttttattaattaattaattaaatttacctttaattttatatttaattgaaatatacctctttttatatatattgtacctaaaataccctaacataagagagtcacatagagagtacttgaagtgacaagggcaaaattagtacaatatttaaaaaaaga

SEQ ID NO: 327652 - DNA, 896 bp, Cannabis indica
tttttttacttaaattattaaaatatttgtaacaaaactccttataattagaaattataacacattaccttaaatttgaaattattacaaatataatcttataatttaaaattattatatataaaaccttaatttaaattattacacttaaatatttattttttagtttttatttaaaaattaaatacaaactagttaaaaatctaataaaaattaagaaagtaattataaaactaatttataatttaagattggcctaatacagatcgcacgagtgtaattgaatggcaaacttattaattaaattgtgtgcattgtctgtgtaagtcgtatcctattgtagtaattcacaacctaagccctatataagtgatttgtgagatttttggaaaccaataaattatagcttaagaaagatataaaacaataaataatagacaagtaatttttatgtggttcatgcgttaataattcctagtgcacgagtccattgtattaacctggcaggcgagtgtttgaattttacaatataaaccctagctttgtagtcctattatttctcttgaagaagatgaaagctagtaagaattttagcagaggttcggtaagtatgaaaattgttcaccctttgtacatgaaaagtaagggtatttacaagcacacatgtgggtaagggcatacccttcacccacctaagatttcgtactcaacacaccacaagagttgatactacaacatgatgatttaaaagtcggttggtatgaagatttcccattgtgtggtgtatgactgctgtaaggcattttgtgggaaggaggacactgttgggttttatgccctaaataaaactttatttcaatgtaatatttatcctttaaatatcaataaagagacag

SEQ ID NO: 327653 - DNA, 1011 bp, Cannabis indica
aaccactctcctacttgtagataaactgttttgttgactttagaactgggattctttcaatgaaatcatcttgcttataaaggctgccctctctcggctagatgttggtccagcctaatatgaggatctcgtatctagctacccaacctaaggaaaatgacagaaatgaaaccagaactatgaagctcaccttattattatgaaaaggggacaaaacggtttttaaggctgtggcgcaagagcgtactttcgttttccctttactagtagggggtcctgtggttcctatgctgttgcgtttcttggtccttttctgttagtgcttcgatttgaagcgatagtttctagctagttcaatggataagatggttgcactctagctaactcaaggacggtagtggtcggccaacgatctcattctaatcttgaatgttgtacattggaatcctaaagcaccaccacaaacgctactgcgcgtttgcctgcggtgcagtaaagcaccatcctcgggactcatacccatgaatctctcaatttgttatacactgggtcattcagtcattccatcactaggttcacaaactcaaaattttaaatatttacagcaaatacctctttaattaatggtatttatctggacatcatgaacatgagttttgcatgtatatggatggacccacgtgatagttatgcactaaaattataaatatgccccataaataaatttactaaaaatgataatagtttgtttgaaattgacaaaatgcccccataactaggacaagtgatttttttcccacttgtattgagagtagagatacagggtgaggtctggattaaggcaggctaggcttgtgcttagggcccacccaacttaaaggctcaaaaaaatattttgaggaaattacactctatactctttttatattgtcctcttgtatttttaccctcttttttaaattctatcatttttacctctttttttaaacattgtaccaattttgcccctgt

SEQ ID NO: 327654 - DNA, 1705 bp, Cannabis indica
tgattataatataggtataatataaatattttttttataataaataagcccccacaaaataaaaattctgagttggtcactggataacaccacttaagagcaacaaataatatggaaattctcatgatagctttttttattttattagaatatttaattataatacaaaattatgattatttatatatagtttttataattattattgtatataataaaattaaattaatgctaatttttttcatatatattttcataaaaattagttaaccattaaattttgtctcaagatttataattatgcattaaggtacaatgcttatttatttttatttttattttattttttactaaagaaaaaatttcattaatcaaagacaaaataaaaaaacaccaaggtcacaaccaaccggccccaaaaaccaccagctacaactactcaattaggcacaaatacatgccttttttagcttgaataaacctcctattccttaaactatacaacctatactttattatttctttaatatcatttacaattttcaaaatagtataacaataattattatgcacacaaaaattcctgtttttctacagcatatatacagttgcagcaaacagagagagattatcacaccaggttttttgctagcaaaccaacacttccatctattgtagtccaaaggctaggctacaaccccacactagttaaaaatctactgcaacacagcccttgagacactgcaattgaagaaccatggtcgtgactctcttcttcaaggctacacatcgaacaatagcttgaatcaagaacaatatgaaacttagagaagttgtctctagtgagcaaatgaccatgaaccagctgccataagataaaccgatgcttgggcagagttatattgcaccagacagatttataaaggctttccatgttcaactaaagtgtccccatgtacagacgagcagcaatgaacttccccttttttttactgtaatagccacattaagcttgctgaatttcttcctcaaatgacagatttttctccaataccaactaacatcctccttcaattcgtactcccaaaaatcagtacctttcgtatagatgttattgacccatttaacccaaagaatatcatgcttatccatgattgtccaaatgaacttaccaaggatagaccgattacaagtaggaccacttttgaaaccaagacctcctaaaggtttaggtaaacaaaccttatcccaagaagccaaatggattttgcttttctctcccttaactccccattaaaaatctctacaaagcctctcaatctctttaatgaaactttgaggaagaataaaaatgttcatccaatagttacgaagaccaagtaacaccaaatgaataagctgaatatgacctgcataagacaaatgcctcgtagcccaagtgaccagcctcatttttatcttcttaatgattgcatcacagtcttcacgtctccactttgttggtcttagaggaactccaagatatctgagcgggaaagaaccctctccaaattgcaagtcttccaaaatcacctctttatcaaatgtgtaaacacccccaaagtaaactaaagatttatctttgttagaaaataaacatgttacctcagagaagctttccaatgcaatcttaggtgatggacagctgtaatacccggaattaaga

SEQ ID NO: 327655 - DNA, 884 bp, Cannabis indica
tacttttgagtattttagtcttgtttgtgtgacgtgattttgagtgttttagtcttgtttatgtgacatggttttgttttgttttgttttgttgttgattctttcttgttcttcaatggctcgccattaaatcgttgttactggttgggaataacaatctttttgcgactaaaggggttgttagtaatttagttacgtaccttacacattagttgagagttcaagctacggagttgaacatgctgcaacaatttatttcttaagattaattgtgatgttgtaattttttcatctgattttattttaatttttttgtcaaataatttgggaattatacaactaaatattttatttgtttctctaattctataatcctagtcatgtctctaacggggaagatgtcttggggaagatgtctcgattggattacagactattattttaaataattgttattaataaaattctataatttattaaaaaaaatattagaaaaatctttttaaaaatagttaagttgaatttttgtttactaaactttgatgtgtaacaaattatgttttacagattttacaagtcattaaaaatttctttaaactattaagagattgtaaaattgacagacttctgtctaattctgcttaattttattgatatggagattatacaaaattgtagaccctgaattttgatgtaccgaatcacatatgtataaaaaaatatatttttcaacttctcccaaaaaattttaatagcaatttatctcaccactaaatatggattttaaaaattaaatatataaatacatgacataataaataaaataatgagaaattactctatttattattttttttaacttttttttttaaaaattttaatta

SEQ ID NO: 327656 - DNA, 1182 bp, Cannabis indica
agttcctggtaaaataacttccaacacaaaggaatatatgtttctcaacgccttttcactttacaaacgctaaaagacacaggtacttttggtgctaaaccagcatcctctaccatggaatgcaacctcaaactcagcaaggataaaggggcattacaaactgatcctactacctatcgaagcttgattggcaaattaatatatctcaccattacacagcttgatatcacctatgttgtcaatcatttgagtcagtttctacaagcacctcgtgtccttcatcttcaagccaccaatagaatattacagtacctcaaaagcaccccaggataagggttgttcttcccttgcaacacctccccaacagtctcagcctatgcagaaaccagcttatctcaagctaatgtacaagtttccttttttgctgatgttgactaggcggcatgcatgtcaggataccaagcgatccgtttcaggcttctgtgttttccttggccaatccctcgtctcctggaaatccaaaaagcaacaaatcgtctctcgttctttttctaaagccgagtattgtgtaatggtaaacgcaatatcagaagctacttggatccttgcccttctccaagactttggcatatctcctaaaatcccaacaatactctattttgaaaacacagcagccattcatatcagcgaaaaccctgtctatcatgaacgcacgaaacatgtcgagataaattgtcacttcattcgagaaaaaattcagcaaggctccgtcaaacttcgacacatatcttcacaacagaatttagcagacatatttatcaaagcactaatgccttctcctttttccaacattgtatccaagttgggtgtcataaatatttacactccaacttgagagggctattaaaaaatcgaattagtgttgtataatttctgttttattttttctgttattaagtcggttaaggctgagctgacacaagttagttgttccaactaacttgatcacttcctcaacctatataaaccaacttagccattgtactcaattcaattcaatagaaatatattcaagcttttctctctccctcaatttctcttagggatattgttattagtaggatagagccaagattagatagttgggagctatcaacaggtgcatacgaaaagtataaattt

SEQ ID NO: 327657 - DNA, 1000 bp, Cannabis indica
tgaatgatatattaaataacagtgtatgagacataatttttagagttacttagcattggagtattttttagtaggaaatgaccaaaatgatatagaagaaagagaaaataatatattatattttagagtgatatgaaattatacgacaactttaaatattgcttgcattggagatgctcttaatataacaagacttaaatcttgaatagttgaattttctactaggcgacaaaactatatggccacgcctaatcgaaataccaaacatgccttcttttatcatatctatgagacgtagtcactactatatatagtcttaacatatttctattctcaaatcatatttacatgtaatagaacagagcagtatacatacactggattgtgttttcgaaatctgtgctttgattagatttttcatcttatttcaattttgagagagaagtgaaaattagtctttctatgaaagttccatgcgtactttctaccttttggggcttacaaaacgatgaagatttgttcgtgtatagtattgctctctctttcatattctaagaattatactctatttttacgtgacctaataattaagagtattgttatgagataccaagatgtctaatatctttacagtatgacgttttataattaattagtggttttttataatttttattaaattaaaataagtaaaatctgatattaaattgtactaatactgatattacaccttataatggtactaagtaccgtgagtgccatttagtatttctctataattagttggcgtaaatttatgagagatcataaaaaagcacccgtggtgcctagcatcctaaagtgtaatatggttattggtacaattaagtattaaatctcatataattaatgtaataattttaaggagatatcgctaataaattgtaaagtaacacctctaaaaaatattaggcaggactagtacccaataataatactctaaggtgccgtttggtaacac

SEQ ID NO: 327658 - DNA, 655 bp, Cannabis indica
ttttgtcgccatcctttattggtttcttatgttttctctcgtttcaacatggatgatttcttgggtctttacaattctctcgcggtggagaatgatcatgtgaatgagttttgtcatgatatcgaccctaaattgcttgaggaccgtgtggaaaaaattgcgcattttcttatgggtagaattataagtacgaaaaagatttctcatgatgtcgttattggcatggttaagttttattggcgacttcagtggactcttgagatggaagcccacgagcgaaacatcttcctgtattgttttcaattgcttacactaaagatttttttctgaaagtggcccgtgggtatttgatgattacctttaggttttaaaggaggtcaaaggctttcatagatccaggtgatatgaattttgattttgcttatttttggatttaaatacataagagttatttgatttttgagcatgcgacacattacatttaaagaaagcaattaacctcataattcccttaattgaaactcctcgctacaatcatgtcctagagaagcctcctggaaccaggaacaagttaagattgacgagtatacgaaagtccatttggtcctaccttagcttctcagatgcgaaaggcgtattgcctctctctctctct

SEQ ID NO: 327659 - DNA, 950 bp, Cannabis indica
ttttagtcacaacaagtattgtaactaaaaatatatttactcacaataaattatattttgtgtgattaatatctttaaatacggatattttggtcacaatatatttactcacagtaatatttttattaattgttgagtaatatataatttagttttacacatgtaattttctataactacaatattaattttacttctagtcataacaaaatttattacaatatatgtatcatgagtaaaatatcctaactaatctaaaatatatatatatatctaactaaaatattcgtcaaaaaatatgtgttgtttttggttgttgtatggataaaatagttatgtttactattaaattaatatagattatatgactaatattacatcagtcatgttactaaatattagtttttttaatttataatttgatcagcttatgtatgcggtgaaaaggagggaataatcagagaaagcattcgagtttggtgaaacgctaacaaaaactttcaccaaacttgattttaaaatagaaatagaattggtcacacattaattgtctcaactttgagaaactaaagcttccgaagcagccattaatgccacaatgagagagtttggaactcgaaaggtaatataatttcttattatttaaaaattataaaatattaattaatattatatatatttgactataatagagatgaagaaaattcgaaattaaaaactcttacttttttagtggtccacctatagtagttttaaaaaataaattataaaatattttaaaaaaattaaaaaaatacaaaaatttcttctttcttcttctttttctggagaaacattctttctctctctaacccctttctctttctatatacatatatatacacccctctcctatcccagccctcacatcaatcaacaacttctcttaatcaacgccggagcgagcttat

SEQ ID NO: 327660 - DNA, 1039 bp, Cannabis indica
tgaaaaatacaagattcatttttctgtttaacaaaacagatagttcaattagtaacttttacaaaacacagggtctaaattagtatttacccatatatatttcacatgctaaaaatacattagttaataaaatattcacaaagaacaggtcttcaagggaacatcttcaataggcaacttatcttgaggatatgaacaatcaataatattgttggagttatgaggcaacaaatcccaagtctcaactttgaaggaagttttcaaatcagggaacaatgtcatggtagtgttggagatgcaaatacccgtgaaggtgtttccgggtagcacttcgtactcggccgcgacggtgacattttcggccaccatatcacggcagttgatgttggaaacatcggacaagagagtggggtcataaccctctgcatgtgtcttgtaaaactcattgactcgaaacacaaattgcatggttttaaggataaatcttcgtgtgaagatgtctttgatgtaaccaccacgacccggtgcagttttgatcctcagtgcagcttgagtgtcgatggccgtaacatcttcagctctaatgtctttgattccacctgacatttcacttcccagagctatggttgcactatctggagaaatgcatgtaagtcgtcgaattatgatgtgttcgcttggcattcccatcttaattccgtattgatcgaaaccactctttattgctatgcaatcatcacccgacacaataaagcaatcctctattcgagtgttgctacatgagtcttcatcaaatcaaatatatttgttattgtttgttattaattttttttaataaaatatatttgtcttaatattattattaattaactatatatctctcacctgggttgattccatctgtgttaggaatatcgattggagcaagaattgttagcccttggactattatattgctgcaatgcaaacacacagtcactcgtaaatgtcaataattacttttaggggtatttttattttatacttttaaaatagtttt

SEQ ID NO: 327661 - DNA, 948 bp, Cannabis indica
gtataaattagtaaatttccttgcatgcatgcatatatagtacatttattaagaatttatgtgaggtttgacttaatatactctccaacaactaataaaatcttctaatttgtaataatatattaattatagtactagtatactgtatatatactaactaatactactaaatactaatattgtttgtattgtatataaatattcattcaatttttcaaatgtgtttcctagctatgagagatgctaaatagagggaatttttggaagcagttattcctttattaaaagtgatttcttttttcctttcatttttttttatttttatttttatgaataaataattattaagtgggggcgtttttattctttatatgatgagggacttataagtcccatactttgggataatcactcttccactataacgatttttattaattattaagaattatatatatatagtcaaatataaaaagaaggatttaaagaagattattaattatgagaaaacaaatttaaaaaatatataaataatataaggaacacgatgaatttgtttatgaacttaattaattagtgtgtattatacttttgaatttggtcgatctcgattgcccatgttttcactaatgtatgtattaaatagtataaatacatatttagtgaagaaaaatattaaaaaaatctaaattgtatttagccccctccaaaatataatatcgttaattaatagaattaagtatcagtaccatataatttagtttaataattacaattggatattacaagacctcattttaaggtgatgttaaataatattagtgtctactatctaatatactattcagaaaaatattaaggagtcagcatgacataataagcgatataatgttattgatacaatttaatatcaatcttatatattttaatttaattaataatataaaa

SEQ ID NO: 327662 - DNA, 866 bp, Cannabis indica
agtagcgaattgtgtactggtaaaaatgacatttcttctagtgatccaagtccaaacatatcattcataaagcacattaatatacatagcatgcactattcaacttattaatgagagctttttaattaaacctttaattaattaattaattatgttgtaaatttataataatcaaacctaaataaagctagtttgaaagcccttcaaaaaaggtacaaaaaagtgattttgaaggcataatatatataaataaattatgtcattgtataaattgacaacctcctttatgccattatatattattttctaaaacaaccaacaaaaccagagttaatttcatgatgatctatcttttggttaatcaatttaattaattaaacattttaattacaaaaagtggtctagatcatagagagtacatttatttcaaagatgaaattaattataaatatatatatataatattatggaggttggtcttataaatacatttgaaatgttattattaattatatgtataatataaagacagttgaaggaatatgtgcagccttataatcccaatagaatttggaattttcaaatattcattaattgttcttcccctccacattgactattctaaaaaaaagcttgacatttaattcctataattaatcattaagatcttgattatatgccattgttattttagatatatgatctcatataattagtcgttattagtattacttgttaattatagtttaggacttagaatatatattatatagggtaaatataagtacccaaagttttatgtttttaagcggtataaatttaatgtttatttttagtcggcataagtactcaatgtttgtaaactg

SEQ ID NO: 327663 - DNA, 1145 bp, Cannabis indica
atatatatatatattattataaacgaacagaataagataatataaggttaattttactataatatatattaacattctcatttattttatttagaacacttatattcttaataatcccatataattttttatatataatagcttaaatataaatataaatattaaaattacaaatatatatatatatatattaaaaaaagtatttttcttaatatataattgaaaagagcaagtgacgatataagtgatgaaaaattaatgcacctatcatatataggtcgtatatatattgacaaataatattaatagtggtttcacatggtggatttcattaacatttgttttttatataatagtctttaataaacattattatgcatgtggcaaaccgagccaaatatatatgttttttactttaagccaattttagagatagtaacagatgattcaatatatattagaggggacctcatatatatatatatatatatatatttatatattatatatatatatgagatttgcaattcgaggaagcttccacaaatttgtatatatgcatatactcgatatttttggtcatgacttgacttttggtgtagccaaaagggtacgtaacattttaataatatcattaataatgtaataataataattaggtcgatacatacaaatacaaaatatcagaaagaaataaagaagaagatgtttcatataaatatatatatatatatatatatatgccacttgttaaataaatagtggtagatgtagtgatccaaacctaatattatcaaacttttaattttttgacaaattatttcaccaaattgtcggagaaatttagtctatatatgcatgatatgatcatttgtggtcctcttagtcacacaaatatgtagttaataaatgaaaataaaaatgaattctacagtactacgtgtagtgtgataacctcactcactcatcactctctctctctcttccattcataatttcatatggagagcaaacaattcaccataggagattcattagtatattatatatatgctaaagggatctttttattattattattgttaattttagtatgcctaactaatacccaatttactcctggacaccaactaacataactgttt

SEQ ID NO: 327664 - DNA, 1180 bp, Cannabis indica
aaaaaactagttttttcatcaaatggttttgatgagtaaaaaacaagtttctttatgaaaaatccaatttcttgatgagtgatttttggtgattgattttgatctcatgagaaactaagcaatttgaatcccaggagagagaaaaaaatcctgtgtgactagagagagtagtttgaatttttgtgttttttttcgagcacctctactttattggggttgctttaaaactggatttatatgatttttttattattataaattttacttttatataatcaaaacaaaactagtttttaatgaagaaactagttctttgatgaagaaataagttttttggtgatttttccgacaacaatgctaattttgataacttttccggcactggcagtaattctaacgacttttttgataccaacagctactccgatgacttttctggcactgacatcaaacttcagtgacttttttcggtaccaataataattgcgacgatcactgtaattttatttattttaaaaaactatataaagagtattttaataatttttatgttaataattttttattttaaatatcatattttttatttacgtaaattaaattttttattatcatacttatgtgaatatcccaaaatttatagcagaccaataataactataagtgaacctattaaaccgtactccactatcactaatattatgggcccaattggcccaacaagggtagtgtctctagcattttttagatatcttattttgtaatttgctagtgatatttttaaaaattattacattaaactatatgttaaattatatgggactctatatttagttggatcaataaagatattgacacctaaaaaggtgaggaaattccaccgtatacctactatttttatctttatttctatattttttgagatatactcacttttatagataatgttcccatcataccccttaaattaataaataaaaattaggtgctaaacttaagtaaaaggagagtatattgcacaatccacccacaaaagtaagtacattttaataaaatataatataaaaggaaaaaaaaaaatatatttctcaacttatccctataatggcacgtttattatacagtaatcagaatcggaataaattaaaggagaaaatgtaacggaataaatgaaaaataa

SEQ ID NO: 327665 - DNA, 841 bp, Cannabis indica
tattccaagaagcccaggatcatggtgctgaaaatggatcacactactcaagtaagcccttatctttgaatagtcccgactccaacaatttctgccatatacatcaaattatgtcatcaataaaaaggacatagacttgcatgtgttttccaaccttcgtacgtgttggctagcctttgtacgactttccttacaaatggcaagcttccttggtcgaacaggcccactttagtctgacaatcacctttttggacggccagcttatgctcaaaccctggccgtccatacatgctcctcctggccagccaatttacaacctttggccagctagacatggttgcgcaacttcttgaaggcttgattaactcctctctcttgttgcttaacgatttgctatgccttgtaaggagactttgtcctgctaatgataaggttgtattctacgtgtcctcactcttggcttatgtggacttgccatgtcaggtggacaaaatttgagataacaatacacaacaagatcaacaaagttttagaagttctacttgaaattaataccatagattgattagaaatccaatctcgagcaaaactcctcaattttccacaattttcatgcattttttagttgaaatctccatcatacctgatcggcctaataacgagtcgcgcacctacctattaacccagttcaaggttgaagataccctttcccaccaaagcccacttccggtggtggcgcgtgggggtgtgtgcagctcctcctggcatcatttttcaacgaattttttttagcatccttagaatttaatttataatttttctatgatttttaattaatttt

SEQ ID NO: 327666 - DNA, 1226 bp, Cannabis indica
taaccacattattatagataaaaaattacaagttcggctaataaaagaaaaattacaacaattaaaaaaatcgagagagtctattacaaaaattagcatagttctaatatctcaatggaactctagatcgttgagcaaattgataaccaccctataatcactctctattatataaactttcagctttcatcattagcaacttctagagccaagcgcagcagactgtcgcttctccacaaaaagcattagagaactctaatctagttgtatgcaccccacacaccactccaaggtggtttctaaccacaactgcaatgcacatactttctattccaaatttaacatcacagcttaattcactctagaggagaaggaagccaaccaactacaagacagaaagagtgggaaataagatgcactctataattttcataagagtaataaatatagtcaatacacataatttactctcacacactgcatttatttatatatgctttgtaatgttatatatcttcattttattattcttaatagtatatgtatgccttagtctaaacacaacctataccctattttatgcatattgttaattagtatgaaaatatattattaaagcatgaatatatttatatgtagatatgttgtttccctatgctatatacgtactggggtatatattaatcatatatatatatatcttctaaagcatgcataccatttaaatagattattgctgtaaggcatatgcatgcacaacactttttatagtgcgtttaattagttagatatttttttttaaaattattttcttataactagttatataagagtcaatacttattaattatactataatagcagtatgacaccgatgaatgtactagttagacactagtgatgccttttaacaattctcatatatatagaaagaattgctaaaaggtactcggtgtcatatcgttattagtgtaattaagtatcgtgtatcatataacttaagaaaataacttttaaagaatatcactaactaattatgaaacactgcttatagaagatattagatactactaatgctcaataacaatgctcataaatatatctatataatatatattatattataatttttgattattgtacacattgtatcaattatatatgtacttgtaaagtcaccacaaaaaaagttacactacaaaaaatctcacttttagtcacaacaa

SEQ ID NO: 327667 - DNA, 1125 bp, Cannabis indica
gagtatacgaggtttcattttcaattttttaaaaattctattttagattaattaaataattgaaataaataacttatattaccaaacaatccaaagaattcatttataaaatcaattgtaaatgaattggcatcttataagaaagggcaagtgcatgggcatgtacccttataaacaaaccacccatgatttatccctcactactcccattcccatacatacttttttatttctttctttctttccaatatataataatattcatatctagttaattttattttatatttttgcaaaaattcccaatctaattggtctttttacatttagatcctcaatgtcaaaaatttagtattgaaatccataatttcaaaaaaaaaaattgcattagttagtccttttcacttttttatccaaatattttatgagacgagtttcgtaatattaattgttcaaaatttatacatatacataggggtggacatcatttaatccaatccaattgaactgaaccgatccaatccaatccaatccaattacaaaaaattagatatctaattacaattagattggattggatgctaaaagttggattctaattggattggatcggttattggatgtcaatctcaaaattcaattaaaaaccgatccaatccaattacatttatctatattaaaaaattatttatataataaaaaatattgaaaaatatatatatttattatatttttattagatttttttttgtatgttgaatttgtaatacttgattgttttgtgtatttatattcatgatgctttgttctactttattacttagaaatattattgttttaattatttaaaaattttggctatattacatttgtaagaatagtatgtttataaaatattaaacttaaataaaaggtaatacttaatttttacgtatttttcttcataattttaaattaataataaaatttaggtgtgtaactagatatttagttaaaaaatgattgaattggatgtccacctctatatatacatgtgtgatggatttgactcaattgttccctgccacatcagcaaccagctatcctagtggcatacaggtagttatttcggttggagcctacaag

SEQ ID NO: 327668 - DNA, 557 bp, Cannabis indica
tctataacgaggacaaatgtcctcggtatcgatgggttcgttaggccaaaataaaagtttttaccgacaacatatcgaagcttgtcccgacaacaatgtcctcggtagaccctttaacgagaacaccactattgtcctcagtagaaaccaatttctgacgacaaggctctaacgaggacttttaatttagcgagaccttttaccgaggacatctgaagttctaacgaggacatttgtcctcgttatagatcttggtttttgtagtgatttttttttaaaaatttttttagtaatgctcaactaagaacaagttctctgccttttaatgttttaatatattacatttttatatatttatgctttattaatttgtctaaatgttctaaatacataatttttttaattatcaagcaatacataatttttttaataactaaacaatacacaaattagtttcgcatgacttatatatatctattctatataaagtgtgcctatataactgaaattcttggtttatgagaaattcatgggtgacttttattttatttaataaa

SEQ ID NO: 327669 - DNA, 785 bp, Cannabis indica
gcttttaatcgctcacccaattcacctaatttcaacttatccattttctcaccctaatttcactgaaaaaaaaaataaagacaccatttttagctttctctcttactcaaaaactcgtgtttaaataaaaaattcaagaaattaaacggaaaatataaaatcaaacatgatatgtagcatacaattcgatctcaacatcaaaaataaaataaaatcatacaatgaaaagtgtactttcccgggaaaattggtgggaaaaaaacaccatttttagctttctctctagctcaaaaactcatttttagagaaaaccctaaaaattaaacggattatataacattatttgaagcacgatctcagtataaaaaaaattataacataccaaatcatgcaatgaaaagttttttcccgggaaaattggtgggaaaagaaaatgagatagagataatatatgtcatatacacacacctgaacttcgttgatgcttcgatttgaattcgaaaaaatacagagcttgaaatcaaagagaggagaggaagaagagagctttgagttgaatgagccttatttcagtctgaaaagccgagcgaaatgttgggaacggtcgagatgatgatacgtggcagtagcgtatgtaaatggacggttgagatttagtggtgagtgtgtatacgtggcggcatcctatgatagtggtgaatggtgattttgtgattctggtggggaaatttgacaatatatgcttaaatatagcatatattgttttaatatactatgtaaaaaaa

SEQ ID NO: 327670 - DNA, 1281 bp, Cannabis indica
gcatgtggggtcatttgtcctttttgttcatataaattttgtgtataaatttttgaatattttacattttgatctcataaaaattattttttttatttatgtccttacatatttttatatttgttcctataaaatttatatattatttttttatttttatcttattatttgcattcttataaaatttatatttttcatttgtattctcacatatatttatttttattctcacaaaatttgtatttttctcaataaaattatattttcattaatgcttcaaaaaattttttttgctccactaaattattgggattgagaattctaattatcctattgttaatgtttataattgtattctctctcaaaaaaaatgtatttatttggtacatgatagaattagaatctaatatttattatatattaaaaaacaaaatacatgtctattccataattttttaaaataatttatttttatataccaattagagcaacaataaactccgaaatcaagcacaaccaaacaaccacacatcacaaaaagccaaagaaagggttcacactgttatttgtttcgagatattttgtaaaattttgagaaattgaaaaaatttaacacgttgaaaataagattgaaaatatatagtctgttgcatgtgagtttcttttattttctatgcatgtgggatagactatttaaacttattttcggtgtattatgagtgataggctgcccataaaacaatgcatatcttgttagtaccctattaatttatttaagtcatctataattgtgtaatttcatacagtcttaaaatcatcatacttaacttgacacagacaatgtgaaaaattgtacatcttacttggtcttttcccttacgaatctcgacaatgtgactatcacaaataatgactcataaatatcgaaaaattcgaaagatactctttttgtttctattggttggtctctatttttaatccttggagcattctcattaagtgttttataatagctaaaagctaaaaagaaaatagctaaaggcttaaaattgatccccatcaaatgctttaaaactttagttattatatctcattccaattccaagaaatctttatttacatatagctcaataaatagtggtgagctaaatatattttataattttttttatccttttcatttctttaattaattgtatttattttacttttttggttcatttttttaattttaattattaaaatataagtaaagatataatatttaaatgatataaaaaa

SEQ ID NO: 327671 - DNA, 1384 bp, Cannabis indica
ctgacacagagcaatagcggcggggtcccgccgctattgctccgccgctattaacagtattagcggcggaaccagtttttggccgctaatactattagtagcggccaagcaatagcggcggaccaatagtggtcgaggtccgccgctattgccctttagcggccaaaaactggagcaatagcggccgaggggcccgccgctattgctcctgaatgttgtagtgtccatcgctgcaatttctattcaaaaatgaccgtgaatcagaaaaaatgaatcccactttcgttgattgaagtcaacaagtatcaaattctttactcttggttactctcgtcaatggccaaaaattcttactcgtgtactgagctgcaaaacatcctcaaggttgcagtctattcttgaacctaatttgtatcacagattgaggccaagatcgatcaatatgcaatagcgttacaaaatctcaagaaaggttctcttactctcaatgaatatctcctcaggattcgttcactcattgataaactcagctctattggtcacaccacctccaccaaggaacatatagctacaattttttgtggattgccttcacccgactatgacacgtttgttatctctgtcaactcacgtgttgaacttcttagagttactgcccttgaagccctctttttggctcaagaacaccacattgaatgaaaacataaggatcttgattcaacttcggtgaatcttgtaaattcaaatttcaaatttggtaacaactcttcttaccaatctggaaaagaatattggaactcattttttgtttgtggaagatcaagcaataatgttaacaactaccctacaaacaacaataatttttttgttggcttctcatctcaacgacttgcttctggaggaaagagcaacgacaacaatttcaattcttttaggcatgtaacaacaacagcctcccatagcgttctatatagcaggttaacactcaagttcaaagatgctattttaggaacagcaaaaatctcagaacccacttcttatgctcaagcctgcaaacagaaagtatggaacacaacaatagatgttgaaatagatgcattgaaaagaaaccacacatggatagtagtgactttaccagatggacagtatgccatagacaacaaatggatatacaaaattaagtataatccatgtggctcagtcgaaagatgtaaagccacattggtagctaagggctacatacaaaacccaggcattgactattttgatacctatgccctgtttaacgcccaaatgtgacttccactagcggtggttgtagtatagatcgggcggtcaattccacaggaaggtgattatggacaaaagcgttagtagaaaaata

SEQ ID NO: 327672 - DNA, 771 bp, Cannabis indica
tttttttagcaatttagtgtcataatattatttaacttattttgcatatttaatagaaactaaatattgattttattttaggggaattaccccatatactgttttttaactttttctttttaaaatttacggtttgagtttctaaagtgattgcagcactagttgcaataggggtttctatacgattttttgttgcaatttaagttgcagcgctagttgcaatagggatttctatgtagaattccgtaaaaatacaaaaaaaaaactatttttaagtgtaaaaataaataagcccatttattttatcaatcaatgtttatgaataatttgttttattaggaacattttttatagaaaaaaggaatttttttatggaaagtattgaatattatgtctatttacagtaaaattagatttgattgattccttgattgatactttgagtgttactatgtatatagaagattttgtgatctttttagcctcgaattaaggacaaaattgtgatcttagctttatatggaaagttttaaagattttgtctgatctgtcagattttgtcgttgtagattagggtttatttaggaagtatcttacagctgtaaaaatgtgtttgtggccgtctctagagtttctataatttataagtagaacctagagagctgccaaatgtttttatctcttctagtttcatattttcatatctatctttgtgagaagagtgtttcttttgtaaaaacctagattgttttgctaggtttttgtgtcttt

SEQ ID NO: 327673 - DNA, 1194 bp, Cannabis indica
tttttacaccctttagcttccatttttataaaatgggttgaaaaaaagaaagctaaagacccattttgtaatactgaaattggcaccaagaaaatccagcagatatgttgacaaagtatgtcactcaaactaagtttcgactatgtttgaacttgctcaacatagttactctctgataatattaagaccaattcaagtacaactcctaataagggttacaattcttgatatgtggccaaggtggacaattgttgtctattggccaaatattactcactccctaatttacccctgctgcaacctacataaccgaattaactaactgtctgttatgacagatggtgctcgagccacacaccaatctatataaggctcaatcatttggctaggattgaactcatcaagggaaaatagattaagtgagagagaatttaaggaagttgtttaaggaaagaaagaatgagagaagagtgctcttgagtgtttgtaatggtgtgatgcattgtcaatcatcatcaccacaagtgagttgtttagttgcagaaactaagcttcttgagtggtgtaactgaacatgttgtaatctcttattgaacatcagctaataaaagactctcaaaggccctgtttgtggttgttttctggccggggatgtaggcaaggtgattcaacaatcaaggcccggcccaaaaaaattggggcccaaaagcgaaatcaaaattcggggcccctatatatagattaactattatgaaaattatagctcatgcttagtttaaaggtaaagcttttaacaactagagctccaaagttcaatccctcataactacacattaaatatttttaaagaaaattaaaatgtagaggttgggagttgatctcataacctcttaaagagaagctaaaccttttgccaccacaccaaacaatttttattataatttgttcttatttaattttttatctacatattaatatattttttttttacaatttcggggccctgagcgttcgggagcccgaggcgcacgcctagcctccctaccctcagggccggccctatcaccattaccttgttcgaacctcgtaaagttcatgtgctctttgctgtcattctctacattatcctaattagtttccattgatcattcttgtgtttgtgtgtgttcttgctgaggtattgttttcacaaca

SEQ ID NO: 327674 - DNA, 1851 bp, Cannabis indica
tggttaacaaaaatatgtgttaatagtttggtgctttcattgagagcctctgtggaaaagctcagactaaaccctcctttcttttgaagaaaagaccctctcattcatggctgaaaatccagaaaatgttaatacaccacatgaggaaactcatcattgttctgggaaagagcccatggtctctagaaggtcaaccaacccacagtcccgacggaccacccgctccaggaggactcaacctgagggtggccccagcgccagaccacacgttcacggagaacccaacccgacgttggtcctagtatgtggacaacatgctcgaggagaactcagcgtgggagtggccagaaccctaggacgagggatgaagatcccaatcgtggaggtgcccagcttatgggagaagatacttatgaaacgtaaaaccgccgccttagacgccgcctggaagaggcacaaccgtgaaacgttgaattctagcattacgcggctgcagctagggcaacacagggaactattgctcaacatcaacttgaacttggagtgagaagaccacaaggcaggcctcgtggctcacgaaccaggagataggaaaatgcccgggaagaacaacccagggaaaatgagataccccctgaaaattagaatgatcaactagaaactgatgaacgagaaatttctcatgaaaatgaggagaatcttgggactcagcctggagaacgaagatcacttgtaaggaaccaccaacgttcttcccaaacccatagacggagggctcatacagaccctaatggaggaaatacgacaaaccatacttaaagggaaagaactgagcgtgaagaagcaagtgtgacctcgaggcagtcaaggacccatagttggtcaacttgaagaggagaaagtactaaacgagctaatgatcgagaaagcatgagtaccagtaaatccgcgagtcactcaaagacgaagtccatgagcgggacgaggtatgtgagtagggcgcaatctgtgagtaagacgaggtttgtcagcaattactcccaaccgaatctacgagagcacttgaatcaaaagaaacctgaccttcatcaacaactcagtccaaagcaagaggatcccatacaattgcgaatagagagttggaagataagtttaggagatatcaagtgggggaactagggagacaatttggatacaatttagatgaggagcttgagtcgtatcacccagatattatgaataccccttttccttcagttcaaaaacccgcatgtcttgtcgtatgacgaaaccactgatccgatctcgcatttgaacaattttaatacaataatgcgagcgcgtaatgtgacgaacaatttacgctgtattttgttccccacctcgcttgttggaacgcaagcagctggtttaacaagtttactcaccattcaataactttttgggacaactgtctagggatttcaagaaacaattccaggctactagggatagatgacccaaagcagcctcgctaaccaatataaagcagcagctcggtgaaacacttagggcatacttaagtcgttttagcacagttgcagctagggttaggaatttggatgacagtacataacttacatccctccaggcatggatctgtattgatccgtcaaccgcagggggtgagctgtggcatgacttataaagttgtccagtaaaaaccgtcactgagtttaacgaaagggctcaggtattcgttcggaatgaagaagcccaaaaggaaatgaatttgttgaaaacaagttcgagaagcaaacccagtaacgtttcaacaagtactgtttccatgagaattgataactcgggggc

SEQ ID NO: 327675 - DNA, 536 bp, Cannabis indica
atatatataatatatactttgattgaagtttaatgtatttttgcttcaaaaaataaataatttactttaaatttgatttgatagactttattatttaaaataattggtcagttttattagtggcaatgattcaagagtgcctgcagaaagttaagagaaacatcaaatattattacacctgataatacgatcagcaatcaacgacaaaatagaatgttcgagtcaaaaagtgagcagcactatttgcagaccgtcaaataaaagtaacagaaacatcacacaactctactaataacatcttattacaaccagaaataataccccaaagtaagataacataggtaagaaatttcgaatcaatcccacaactgtaaaattatcggtttcaacaattaccccctgccaagacttctttttatccaactaaggcttcccttacttctattgcctctgcaatttcgggagccatatgacccgaacgacagcaagaaatcgcatccaccacaacaccagcagcatctctagcaacacatacg

SEQ ID NO: 327676 - DNA, 807 bp, Cannabis indica
tataatacaatacaatacaatacgacctaatacggcgttccaaacgagccctaattgaatatcattaaacctaaaaaaaaaaaaaaccattttcatagtcgaagctctaaatattttggattttttttttaactaaataaataatatgaatatagctaatgagttaattaatatcatgatatatttagggatgcacacggggtagaaaatttacagagagtgctcctcatttccaatccggcccgttaaaatttttaattctcgttcgcttatttcctatcaggaacggggcagaaaatctcctaataggacggagacaggacaggaacaggacgaggaatctataacgtaaaaataaaaattattttaaaaattttaatgtataaattattatggtgatcctcattgccgctctcatagtgaaagatctcgtctgggatcttcattatggtgatcctcctgaggttaaggaagcaattgcccatgttacagttgaggaagctccgagggctgttaaggctaaccaggaatggttaactgattgcagccaaaaattctcggaggctctaagcgaagaagaagagcttcaaattcgttttagggatattgtctgaaacgaaggtacacctagagcgagtatgtccagaagtggtaagatgcccttctatttagtttgtgctccgtccttggcaaacttaaaccattttaactagggatgtacatcggtcggtttgggcagtttattctatatagtttctaacccaatctaaagttcgggttgctaaaatttaagtgcaacccgcctaa

SEQ ID NO: 327677 - DNA, 713 bp, Cannabis indica
ggactagttagcaattgttaatactataatgaatactattacacaaatggaaatcaatgaatgaaatgagaaaaattaggataattcctattggagtttggcactgactcgaagagtgcaattcgatacaattaccaaattgtatcataattatagctctgttcatatctgtgtatgtcatatcttatttgactgtctttaatatttggtgttagatgtttggcctgtttttgatccgcatttaattatctcaatcttatgccaaccgtaaaagattgtattgtgtgtatgttaatctgttttactattattgaaggtggaatgtagagaaaaaaataatttatatatacctatgtatatattggaatataattgagaaaaactaagaagtaaatataattgtaaaattaataagaatagtttaagatatataaataaaaataaatatattaatattattttttatagaaaaaaattcaaaacatataatatttttgaaatagttgatgataatatttttctttcaattcaaaaaaacttatacgtgatgtagtttttttttttaaaattcaaaaattcaaaacataaatacaaattaatacaagatttttttggaatagaatatgaactaggtgatatttttaaatgcctggcttcgtgaagagaattgtttttctatcattcaggaacaatggggtagttgcacttctaac

SEQ ID NO: 327678 - DNA, 590 bp, Cannabis indica
aaggaaatttaaattaattatgtattatcttttcttacaaaaaaaaagtcgtgatcttttttttttttaataatatatactcattatatgtaattacaaattatacctttttttttatatataattgatactttatattaagatttttcgtttttaaatttatacctcgaagttttttttttctttcggctagacgtgtggcttttcctgcacataagtgtgatttggttagggttgtattttgctattgcgattcaattactcttatctgtatgacatggttgtgagtgttttactcttgtctgtataacatggttgtaagtgttttattcttatctgtatgacataattttgtaaattatcattagtaatatgaatggttatttacctcaaggatttcactctctttcaatctttctttatttttaaaaggttaattaggatttttacttctaaactttaatatgtaccaaatatctcttgaatttttgtggtcgttaaaatttttacatgaactattgtgattgttaaatttaaggacttttgtttaatttcattcaattttattatttcaatgattgtttatatac

SEQ ID NO: 327679 - DNA, 589 bp, Cannabis indica
tcaccttgagttgtgtattcacccaagacttaatttacgactagttaagagtcgctatatatatgtcaatgtggtcagcccatactttgtgtgcttgcttgaggccagtcatcagggcttcatatttagcctcgttgttagaggctttgaagccaaacttgattgctgtgtgcacctgtttccccacaagtgttatgagggcaatgcttgcaccggacagttggttagtttagcttccatcaacatgtagtttccatgttgaatcttcaggttcttgctgctactcttgctctcgcttcttatatggctcttacatttctcttgaatcttgagagatttcaagaggcatgcttgtacattcatctagaaagtgtacaagggtttggccttttatggccactctcaattgatatgtgatgtaatatccccataagtctaatagtaaataattacggtttatatttatattatgtgttaatacaagattatccgattaaatcatcgacttaccttattaggcaacgtgatgttatgaagatggttgctctataaggtagcaaatatattatttatatgattaaatgaatat

SEQ ID NO: 327680 - DNA, 761 bp, Cannabis indica
cccaaaagcacttgtttcctcatttttgatggcaatgaagaaaagactcaagacaattcttcagtttaatgcttggaagtgccccaatttgacagtatgtcaaccttaattcatgtcttagtataaattttgacccatttgcactaagacggtccaaaaaattgaaactctagttgggttgtcaacttggatgttgggtgaaaccctaggtgcccaggttgattttcagggtgttgtttcgtgtattttcaggtttcgagtgaaaccttacgaagaaactagtttcttaattaaaaagaaaatcaatttcttgatgaaagatctttggtgagcaatttatttaaagattaaataggagtttgaaaattaattttacatatacatgtcatagcaattaccataaaataatttaaaaacaaaagaaatgccataatggtcaaacttaaaattttcatatttaaggaaaatatctaatttttaaatccatgttaagtgtaaatttttcttttcattttcaccacaaaacatattattatatatatgggtaaatatcattttggaccttgtgttttgtaaaagttattaattggaccctctgttttgttaaatgacaatatgggccctatattttccaaaatggtaaaaataagaccctgaactcaattttttaacaattttatttttaaatataaccaactttaagataatttctaacaggaacagatatataaaatataattagttttgtcataacatctcta

SEQ ID NO: 327681 - DNA, 572 bp, Cannabis indica
ctcccgaatcaaataacacggtatatgaagaaccatttatagataactgacttgtcaccactaatggactagcatcagcataaacctgagtcatagtaaatagaagtccaaggttctgattagtattcttcttcagctcttctttcttagcttgtggacaatttctgataaagtgggccaccatgccacactgaaaacaagttttggcccgaacctcactctgatggtatttcttacattttaagcactttggatatgatctgaatgaaaatctgcggccctgacggccacctctttttccccaaaactatctattaccccctgatgttctgaaagcatcagccttctacttgttatcagggttaccaccgacggtccctttgctaacattaccactctcaagaggattcgatgttgtggcggcatcctttacagcctgctccttaatcacatattgttcagcctcctcagctatcaagctaattcgacaactttcttatttaaagtgtcgtgagcagtggtaatcttcaagtctcgagtcattgtggcattcagtcctctcacatatttct

SEQ ID NO: 327682 - DNA, 864 bp, Cannabis indica
taatttttatttttcagtttttattattttttctctgattttttggattaggtattctttttaatttttctatttatattttatcaatttagtttttcttgttatttttaattttttattgatttttgtttttcattttgttagttgttctctgttttttcagtagtcggagatatatattttgtttacattaggatttgtttcttttacatttacatttatgttaggattagggtttgtttatttaagttttagttttttcatttttatttttgtatatttagtttttttattttgaattcttgtaggtgtttaatatgtttatatatttttttgtatttgatttagtttactttttttgttattttgttcttgtatactttactattcctacagcttcataatacacacatttagaaagctagcacaatacatacaaatgcttgcagtagttgttcgagacattggttccgttgtttttgtttctttttacatttacatttacatttatgttaagaaagtaagcacaatttatacaaatgcttgtcgttgttgttaggtgattaatatgtttaaatatatttttgtatatgattttgtttactttttttgttaatgtcttattatatactttactattcttacaaatacacagtaatgttttgttttattcaatattgttggcatggtaactggtttgtttacatattttgtttatttgtaatttttgtatgtcaatactgtttctcattttttaggagtaggagttatatttcaggcatgaggatagagttggtggaagaataattttttttcctaatcatgaaaacaatgttattgccaatatcaatagtaaattgactc

SEQ ID NO: 327683 - DNA, 1621 bp, Cannabis indica
tacaaaatgtataactaattacaatttaaaaattatttttatttataactagtgaaattaagatttaatttttcataacagattaaaaattattcttgaataatatatttttagacagaaattataaggtatatcacatattaagcttttgtagcaaatataatacaattttttttggtttggaaatgatcttacaattttagctataaccaagtagatttagccaaagaggaccatattctaccatgcaagtctcgtatattaattaggcgaaaatattgaaaactcatttaattctgtgggctatatatgactattatattgatattttttaggcagagttattatgataattactaaaatttctaattttaatgtgtaactatttacttatatataataaaaaattattattataaatatatttccgtcttcatatgatctacacattgtaagactatgaaaaatgaaaattcactaaaaaatttatttttttaatgacatttattttgtgatttaatataaaatttttatattaattatttttttctcacaagttattactaatgtaattttttactcacaattaaaattttatagtaattgttgtacgaaatggaaacaatcaatgacttacgatttaatttacaataccaataaatacacaacacaatcaagaaataatataccaaaagatcaagatttaaataataaatttagtcgtaaaagagaaaagaaaaacaccaggtttaacgagtttgagtcatgtgcaacgttctacatttcggtatgaacagtagcaaccatatctttattgatatcaatgtccaaaaggttacaagaatcctcacaaactttcagagattacaagatgaagtttctctctctagtttcgactatctgcctcaaccttacactatcacaattttaactcaagcaaatctagtctaattctcacacaagttacaaagatttacaactatatatagatttgtattgctgtaaaaattatctcctaaattatcgtggtacatttatactaccttaaatgatccaactcgtcaccagcaacaataatccacgccaacttaaaaaatacgctttcagtacagacaatctggaagctctataaacacacaagccttctggatacgtacatagcttccttcccggatggaccttcaagactgacagtaagctattcgggagtgtacctccaaattaattataagctatccaggagagacattccatatacgatacaagcttatctggaagtaccttctaaattctacaagacctttcacacagggctttttagatccacactaagattctggtatctgctctctagataacagcttccaatcttgaatgaaaaaacttgtaaccataaccaacaaatttttaccttgatttcaagttgaagtcacttgataaattattgttttaaatactattgtcccctcagccccctccgggctcagctgattctaatcagcttcaggcattgctcaaacttactacttggcactaccttggttatcgtatcagaaggattgtcttcagttagaaccttggcaatcttcacagcttctttctccacgatctcttgtatgaa

SEQ ID NO: 327684 - DNA, 609 bp, Cannabis indica
taaatgtacaaaattacagctttcgtttacgtgtgctgtgcattactatattaactacaacaattcatgaatttatgaactacttactaaatgtacaataattattactttacaaatttgcaataattaataataataatatattattagggatttttttttatttttacattttaaaatatatatatatatattttttttttgcatttttacgaaattccacacagatatcccatagcaattaataacaacctggatagaaactaccagaacaactcaaaccgtaaattaaaaaaattaatgtatggaataatttgttttattatctatacaaattaatttttgaaaaaataaataaataggagaatggcacgtgaaaaattaaaattgtatccaaacacggcttttgagttgcactaagactaataacacatatttgtattattatagagacttttacgcgttagtgaagaaaacagagtttagattgataatttagtagtacgtagaactaggacaaggcactatatataaaaataaaataaataaatatattattacaattaatattaatataaaatctattaattaattattcttatcataaga

SEQ ID NO: 327685 - DNA, 2958 bp, Cannabis indica
attgtacaattttttaaactaaaattatttttcataaagaccgattcgtttaagtataattcattttatcattaacttacttgaggacgagcaacaattaagtacgggggaattcgatgagtccatatttgtctttcacaaatgtcatatcttccaattttaatcctttaaatgtcaaaactatttatttaataattataattaattatcaaataaaattgttgatgagtccatatttatcttatatatatgatcaatttatgtattaatattcttaaaattgattctttaaattattgattagggtgattttaattgtttaggatattttaaagactaatcatgcatttaaagtcatttggaaggatgttagcatattttagtggaaaatagtgaatgtcggcgagctcaattttacaaggcagagcttaattacaaattttgacaaccttagatgcagaactggacttagagctccacatgaatgttttatatctccttcttagctttccggatcatcttgaattgtccaattttgagttatatcgaagaagttatgaccaaaatactaatcaggtgtagaaataaaaattgtgctgggtgctataacgcccaattcctgtgctatagcgccgacttatctttttttaaaaaaaaaaatcctaattttaagggaattcatctatcttttcaagcactataaatagaattttttaggctacaaatttgagaaccctagagctaccaaattgagatagaaacttagagagagagagagagagagagcaaggaagagacagaaatcgcggcttcgaagtgttctttatcatagttcttttcttcaccttaaatttttactatttattaagattatcgttataatgtgtagttctgagtagtttccttttagttaaggattatttcaaagcctgagacatgaattcttaatttcattattaaatgttaaattctagtttccatcatatatcaaattgcttctattcttctatgttcaatgtcatgattattgttttaatcttttttagatggccactaaattaatttttactttaatctatcgtcatcttaggattactattcacctaatagtctaggattctaagtgtttgtgataaattataatttttaattgtaatgaagaatagaactaggttaaatgaattatatgcttcattaaattgttgcctagattaatctatctccataaatcttaaagccttatctaagttaaataaattacatacttcgtggatttactgcttaggtaaaagagttaattactgagagcttcgccttgattatatgtaatatggagattgggataattgactgctttagcgttatctacaggattaatagttgattggaaactgaaattacattcattaataggaatatgattgtcaagggtgaaaaataatctttaactagtttctcatatcgtagtctcaattataatttgtttttattttttttatgatatttaattataactcaaaactccccttcaatttctgtttgatagtgaataataaattaatcatagtcctcgtgggatcgacccgtacttgcttttatactgaaataattgaaactattagaattaaaaaaacatagtaaatttgatacgacatacgacacgcatcaattgtcatttaatttatttattaattagacttaataaactctcttaatttacaaataaatacaaaaatctcttttcttcacaattaagcccttgtttagtgaatattcataaataagacatagtctaattttaaaattataattgattgattataaccaattaacttagtcttacaagcagtattgtctcaactagtgtggtgaccatgggcctatataatcaagcttccaataagtagatctagaatttatagagtaaattctctaacttattaattcctccttacgccactatacatttggaattgcactctttattatatagaacactctatatgttccaagatatagatacgctatgcattatccatcgttctaatctaaataatcaaagattctctataaatgatttacaccaagtaaggacaaatttctttattaacagaaattgtatattaaaccataaacatgaataatacatgttaacataaatgacttctaatattctattgataacaaataagattatattgaaatgaattttatttaggacataaaatcctaacaaatgatctagtattggagttcatgagaagtttgtaactggttctaatattagtattgtgttggtattagttttagtaatgcgttgataattatgtttttgaacatacaaaaacaatgtaaaatttatatgagctttagtatttgtatagctcgatttttcattaaaaaatagttttgatttaatgaaatatattattttcttaatttattgcattagcaaaattatattactattattttagcttttgtaggttttttttttaataagcttttatagttacaatgcttttgtaaatagatggttatttatatgaaaatagtagtaaatgaccatttatctcttttaactgaagcttaatgtccctttttaaaaatcatataacaaaggactttattattttttagtacctaaaatacccttagttatataagggtattattaacattatatttattctccaaataaaaatagaaactctgctccaaaatctaaatgacaaaagcctctctcatcttattttttccagttagtttggatttcttcaaattgttttggtaaattatcgtgatttctcccaaaaggtgatgaaatatttttctctcatccatttattcgattcattcgttggatccaatcattttcccttaattcctcacaatcgaaaacgatgaagctctgctcattttcttcttcttctagttttcttacatctccaaattaca

SEQ ID NO: 327686 - DNA, 2223 bp, Cannabis indica
ttttttttagctatttcggctacatgtatgccctttgaattaatttgattatatatgtataattaaatccaagtaagatatcgtagtgaattgttgtgtgtctgattgagtaaaattatcttttattttaattcaaagttaactaacaaaatttaaaatgtggttaaaaatatctataatattttaagcattttaaatttgaattaaaattttcttatataaaatatctacatattttatttttaaatatatataataatattataatattaataaaaaatattttgctaagtaataatatattctgttaaagttaatataaaaaactaaaaaaataccgttaaattaaaaattatattatatagccacattttatatagaattgatatataaacatatgtatataattaaaataaaattatttttttgaattaaataataagatttattaaaattaaattattaaataaaagtaataatcacgtcccaatttgggctaattataagtaacaataacttctaaattgtacttatcttccaagtcgcttattaagaaagtatgtatttatgtaaaaataattatagcttaataaaatataaacatatggcttataaatttatttatgtaaaattaataattttattctaaattgtaatatatgtataaatattatatttactaaaaaataattttattatgatatagtattaaagattatttattattatcgttgttacattgatattttttggtgttttgatttttttttagccgggggaaacccaattagttataacctctcaattagaatataatttgtttggtctcaattatattcttaaataaaagttcaattgtatatatatgttatataacacacacatatatatatatatatatatattatattaaatgtggctatctaacaaaaattgttagtttaacgattctttttaattttttcgttaaagttaacggtgaaaactaacacaccgttaactcaatcaattaattatctttttttaaaaaaataaatagttttaaatatttaaatttaatttaaaagtatcaacaattagataattatttttttatatattaatcttaatttaaatttgaattaaacgttaatttaattaattaatcatacttttatatctctcttatattaaatgtagttatttaacgaaaattgttgttttaataatttttttattatttttccgttaaagttaacggtaaaactaacattgtaaaatcaatcaattaattatagttttaaatatctaaatttaatataaaagtgtcaataaaattagataattattattttttatataaatcttaatttaaatttgaattaaatgttaatttataatgaattaatcatactttataataaatttattagttattttgtttaaaatatcacaactataaaaataagctttttattccagttttcaaaggtattttatcccaattttaactaaaataaaaatcgagatatatgccagtgggataaaaagtcttattaaaagtgacataaaaaggaacttttaatcttgacttttatgtaaaaatcgggataaaaagagtccttcctcccgatttttacatataaactagaattaaatgtcaaaaatataataaaaaaagttatatgaaaataatcagagaccgaaaatctttttattagtccaaattaaactttacatttttttcgtaaaatattcgaagcagtgcagccaaattttaagtccagaataataaatacaatcaaagccaagaaccaccttctcggcaaccataaacagttatcggcaaccacaaacacgatcataaagttctgtccaccatgaaacgccacaaacctaaaagtaccgaggttgacaaattgtcacaaacctccatccacctgagaaaaaagaatagtagagagatccaaagtatacaaagaacaagatcgacatttcagcaaaaaaacaaagagagatggaaatacttgggggtttcagagggtgtggctcagatatgaaacttcgttggttcatacgtcacccaaaaaaataaagagattgggtggagtagggttgctggcatgggctacttcacgaagacggtagaggaggatcgaagcccgttcgagagagaggtcattattccaaatgtaaaagtgggatcaaaagttttatcccgttttttattttttttttcaagtg

SEQ ID NO: 327687 - DNA, 1064 bp, Cannabis indica
tggtaaaatattcccaacacttgcgacagactaccgtttgtagaagaaggggactgccctctttgttttcaatccaaggaaacgattttacatctgtttagggactgtcccctagccataacagttttgatggctggggtctttcctatccggagtaactttactccaggtaatcaatttgttgagtttattgaaaacctctacctatccacctaggcaaaggatcgggagcattttctagtgtttactggctatctttgtatggaaatttgggctctaaggaattaaagactctttaagagtagagaggttgattgtggcaaccttgtgaaagcagttcaatctaaagttgctgagtttagcagcttgaattttgagagatctccaaagtgactaagggatcactcttatcgatagagtgagataatttcgaatgatacttttgatctcttttacgtggatgcgtcctggaaagatggtgtcgctgatttagcaaccgtgtgagttggttctctaaaaccagtagatgcccttctggctctacgattgaagttgaggctcaggagatttttttggctcttgagtgggctgccgaaaacaagctcaagagaattgttgtttgttcagatgctcaggtggtggtctaaactttttccaaaaagaagcgactaagcaattggagttgttttaatgtttcaattttagtttgtaatgctttaaaaaactttaaattatgctactttacgtttattagtcgtgaggacaatgttattgctctggcaaaaagtgctagaatttctagccaggttgctggtattatccagggggagggaccccctctttgtggcttccatctttgtttcatagtgctatgagcaattagttctttcaaaaaaaaaaaagttagaaacaaaaataataaagggattatttcacatatatacaaaaacaacaaaaaaaataataaaaatacagtttcgtagaattttaaatatttttacgatttttatgattttatttacagaaaatatggtttttttatgttgtactattgttaatttgtt

SEQ ID NO: 327688 - DNA, 1815 bp, Cannabis indica
tgaggaaacaagtgcttttgggggagaaacagtccaaaattgtggccagaatggggggcccagcgcctaggttgacacctggtgctggcccagcgcctaggttgacacctggtgctggcccagcgcctaggttgacacctggtgctggcccagcgcccaagttgacattttgtcaatctaagctatttccaaggagtttttttaagaattcttctaagaatattctccattttcttcaatgattaaggtacaagtatttttgggaattaaacagaaccatttagtggcctgaaactagacccaacgcccaggttgacacttggtgttgggcccagccccgattgaaattttgccaacctgggctgtttttaaataatttcttcaaaaagtgttttgagcattttttccgtcttcaaaaataataaagatacaagtaaaattagggagaaaatgagaatcccaaggggcgaaaaattgagctcagcgcccgaattgactatcagcctggtgcgctggcttcgatcactcaaatgcaaattatgctccaagcatcctctccggcatggtcaaaaaaatggtaggagacttcgtcctgaattttaagaacctaagaagtatcaaaatgacagcttagaagcaccagaaagagcacccaacgcccaagttaacgtatgacctggtgtgttgtttctacttatctaattttgattctgtcttgagaatttgtctagtttccaatagtaaacgagagctataaacatagacaagtcaaattcataatttcatattttcactttttcggcaaagtgacttagttgcaaatcaagtagtttcgagtctcacgattctgtaaaatagcagcatctctgagaactggtaaacgacttcaccagaacaaagaaattgacaaagtgatgtcaaaatatcacttaggcatcaaaaaatacatccctagcatgatttcccgctcacccagcgtccaggttgatgttatatgtcaacctgggcgctggtattagagcaaccttcagtaaaatgactgtaactcactcaatattgattcgattgccgcaatttaacttgagttttgaagatatttcaatgctatatcaagttatgtctctcacttcaatcacaattctaaaggtattaagtccaaattttgtactcaagagagttgcaaatttaagctacaacttacccaaagtgggcttgtggaggcgactcaagctccagaaattgacgattgacctccagagtcaatttcacagttagatcatcatcaacggtcaaaaatagcttaaatgtattttccataatttttggaatattttattattattttaataggaccttattctctataaaaggagagcttttctagtttatttttcacaattcagaaaagacctataaggtgagagtatctctctctagaaattagaggtttcacacttagtcatttctcttgtaattcttgcgagaaataaaaattcgaagtaaatgcagctccactaccattgcgacatgtggagtgaactactatgaattctgtgtgtctctctatttactctactcatctctatttttatctcgttaatgcataaggatactagattaccagattactttttttaggccaagaggttgatagcgagatctcaaatcaacttattggtcttatgttatatatctcagtatagaggatgataccaaggatctgtatttatttataaactctcccgacgggtgggtaattcttggattagttatttatgatactatgcaattttttcaaccagacgtacaaacaat

SEQ ID NO: 327689 - DNA, 626 bp, Cannabis indica
aattctaagtaatttaaaatataaaaaaagatatttgaaaaaatagttacacatgtactaagtaaataaaacgacacacttgcaacaaactaattataaaatatctgcattatatgctaatgtgttcactttcatttatatatatatatatatatttatattattaaatttgaatctgtgtatgtattaatttattattttgtctattaattaagaatattatttgaaatagaagattagcattactcatctagctagtactacatttaattcatatataaaaaatagaaaataaaaagtataagtgagtcatagtcaataatgtgagtgaagaaaccaagagaaaaatgtcaaattcttagtcgttgggatcaatacaaaattcaatttttgaccacaaattcctaccatatgaccaccccttaaattgaattattattatataatttctctttcaaattgaacatgttgactacatataacttattcaattggaaaattcaaattaaagtacaacctcataaatacatatagaaatctccttaaaccaaactacattgtattttttttttttttttggaaagtaaagggagcccactagacagaaagaagctcaataagattac

SEQ ID NO: 327690 - DNA, 1199 bp, Cannabis indica
gcacgaatgacaaggtttgaacaacaaaacatcaagtgtggagagtatagtattttcggctcaaccttaccttaatcaatggctaactgctcatagttctaatgttattttcccgagtcctggtcttattccaggtgacggagctgagcagtggcagccaccacatgaagatagtattaaggttaatgtcaatgctgctttattttccaacacaactcaatttggaattggctttgtgattcgtaatgctcaaggagttctcattgaaggagtaaccaagctttttaatggctcaaccacaccagaattagtggaagcaatgggtgtcaaggaagctttgagttggattaaaagaaatcaaccttgcaaagttattcttgagaccgactgcttagtttttatacaagccttacgaagttcaattgaaatgattttcatgtttggtcaagtggttaaagattgtaaggttttattaaaagaacttaaaagtgtttctatcttttttattaggcgatcagctaataaggtggctcatagttttgctagagcttcgttattctatcctgattgcactttcaatatggggtctgtcccaattgatttgctacctgttttggtgaagttattggttaataaattgatgattttcattcaaaaaaaaagtgtattttactaaaagaggtcagagtagaaaaatatttggacaacaagcaatccgcatgcagagtctcttacacgcaaatgctggctggtccttttaattacgactttaaagttaattaggtggaattcgatagggtttttcaagtaattaacgataaagaacattagataacacagagaagaaaagaatgagaggattggagataaaagttggagcaagacaactctaatctattattttttctttctctcctcttttaatttctggttttaatgtattttagagatattttcatgaaagtttatttttattgtgattataaaataaattctatttagagtttttaaatgaatctctttaagtttattataaattaatacaaaatttctatttcttcttcatataaaattattatttaaattatcttaagaaattattttttacatttaaaaatattgacaagaaaaataataagatcatgtaaatatgtttttcaacagtcatctgacgaattaagtgttgagttttatgccct

SEQ ID NO: 327691 - DNA, 1035 bp, Cannabis indica
tcttgatcgacgaagacagggaggtcgagaagaaggaggaaggtgagattgtggtcccgctggaccagaagcgcaagggcaagatggtggaggctgagtcttccaagaagtctaggagggtggcaattccggctgttagctctgattctgggatccctcctgaagtcgaggaatatactgtaccccctagcatcacccttatctgcgctgatgaggaaaggcagcaacttcggattgccaagcacaactatgccatggctgaatacacgagggggaaagccgaggtggaagccctgaaaagctcctacgggaggcttagtaaaattccttacgcaaagaggcctttaggaatgcttggggacctgaatatggaccctctgacggactggttcaactgcttcgttggtcctactcttgctcctttcacctcggagttgacgagccattttgtctccaatctgacccaacttctggccaaacgatacccatcctgcgcttccacgaactcaatctatcaggtttaggatatcagtgctgctatgaccgcagtgagtctttattaatggtttatccttttcgtttgtgctccactctgtggcatctgatctctcatacttaaactcattttcttgccagatcgctacagagaccggtcgcctctcaaagactttaatagatcatgggtacgttatgtccgagttcgagggcatggacgaggccatgaagagtctgagggacctggcggctgagaggaaagcattccggaaggaagcccaatggagggaggcacaggtggagaggaggcaccaggaagcgtttcttgggttttgtggcctaaataaaatccattactatctaattagtaatcaatttaagagatttgaagtgatttatgtgtacatgtatttggtttaatatatatttaatatatgcacaaaatcagttaagtccggaacatatatttaatatatgcacaaaatcagttaagtccggaacatatatttattcacaattacagtattgtcaacacagtgg

SEQ ID NO: 327692 - DNA, 943 bp, Cannabis indica
aatcaatatgttacttattcacatgtaatagatcgataactgaatggctctacccaaaatgtgagaaaagagccatatatagaacttatgaattcaactaagaatggatgatcaacacatgtagctacacaattgcatgcacaacaatgattgttgctagtgtctttatctcaaagaaaaactcaatcacacaatctcaattcaaaacataaataactttttcatctcaaagaaaagcattgacaaaaaaaaaatatatgttagctttaaaaaaaaaaacaccaatatgtttttagtttttactgtcaatttttacgaccgacacccactactacaatgtaagccttcagcttccctttttttacaacccaatttataaaaagggaagcctaaagggggtgaaaatatatgcattgacatttagaggcggtttttttggtaaaaaccgtaggtatagaatttatatatatctatgtcgtcgggttagggggttggggaaaatcaaggttttttcatataaccctatggcgtcggttattaggtattaaccgacgccatatatgtgccacctttattcgacacgtggcacctatggcgtcagttaatacctaataaccaacgccatagggttatatatcagaccctttcagcttcgtcttcctcacttcctcatttcacaccttgctgaacacgaagaacagccacccacagcagccccaaacccacgaaaaaaccctcgccaaccaccactaaaacaacctcattctccctcatttcttaaccattttaccccatttttgtcttaaaatcttctactttctatacctaaacctatactgtaaaaagtttagtttttttcccctctatataccaaaccgaacctattataaagaaaagtggtgggtataactccggccacagattttagcagagaaaacgttaa

SEQ ID NO: 327693 - DNA, 1142 bp, Cannabis indica
caattctcatggggggcatgagaattggagagtgtaattagaacccctcaattacttccaattacacagttacagtgtaattacatggtcagacaaacatgtcaaattgtgtaattatctccaattacacacaaatctaattacattgtggctttccaaacgcaccctaagcaaaattttacaatcttaaattacatggctaaacaatgaaatcataacaatagagcccttaaagcttgtacaacacttaagcaatatgttttgatgatcacttgctatcgttaatgttctttgatccaactagaagcctctcaaactcctattgcttttgcaagttagcaatcatcccaaagaaaagttgtggccaccatcaaacaaagaaatatctacgttgatcttgatactattagtttttggcaaaatccactgctcggccccatcatccgcctgaaaatcagaccatgataaatctatctcagagttttaagtatacctccattgattaagatacatttttgcatatgcaacaatgtttttagcctgaaacaccttcccttttacactagttcattacatgcacctcatatggcctaatatacagtagccaccacacatttctgttggaagttattttatcaggatctagatttactaacatgtatgtttgattataaattataatctaacatcctaaatatgaattccctaaaataataaaataaacacataaaagtttatagaaaaccttacattggttgcagcaaaataatacgacttcttccgttcagatctctaacccttgatcctttctgtcacaaagtatgatcaagatctgaacctgaattctccttcagttgacagtatgaactacacaatcttcctcactatgctaggtattactttgacatgcgtggacatattctcaatcactataggcttcaaaattattgagaagaagaagaaggaattcaaaaatacaagaggctctctttattttctattagggttaggtttagagttaaaatggaattaaaaagataaaaaaatggcttttttaatcctccttggttgaaatcttattggacctagtggatttcaattttgccattttattacaatttatctttcttttcacaaatgtc

SEQ ID NO: 327694 - DNA, 1442 bp, Cannabis indica
tactaatccaagaaaactttggatttcaataactgtccttggccttggccaattcttaactgattcaattttcctaggctcgactataattctatcctttccgataatataccctaggaaagacactcgtgacaaccagaatttacacttcttgaactttacatacaacttatgatctctgagtcgtttcagaactatttagagatgttgctcatgctccacttttgtccgagaatatacaaggatgtcatcgataaatactataatagagttattgaggaagtctttgaacactctgttcataagatccataatggcagctggagcatttgtcaacccaaacaacatcactaagaactcatagtgaccatacctagtttgaaatgttgtcttcagaatatcttcctcccgaattattaactgatggtaccccaaatgtaaatcaatcttggagaaaacaatcttacccggaagttgatcgaacaagtcatcaattctaggcaatggatacttattcttgatcgtcaacttatttaattcttggtaatcaatacacatccgaagggacccatcttttttttttcaaaaaaaaaatcggagctccctagggtgacacactagaatgggtaaaccctagatccaacatcccctaaagttgtattttcagctccttaagttctgatggagccatccgatacggtgcctttgaaataggctctaccccgtgccaagttaataatgaaatctattccttgctgtggcagaatcccggtaactccttgagaaaaatatctagaaaatctattacaattctgacaacctcaggcccaaatgttttgggtcttctggagtcaatcacaactgctaaaaatcctatacatcatgtgtagtaaatctttagcctttaaaactaaaatgatcaaaattcgagaaccctgagcaaacccaacataaacaagtggttcttcgccctccagctgaaaagttatcatcttccgtttgcaatcaatactgactgaatacttggataggaagtccatcctaagtataattgtaacgtcttaatctatagggatgtcacgtgtgtgattttataaactagtttaatactaatagattaattatttagtaaaaatcgtgatgatatcaaaagcttgactaaaataaaccactaaaaatggacatcataacgacattaaaaatatattctcgggatccatgttataaaaagtttacaaaaagactaaatacaacaacaagtcaaaatactaaatcaaaatgcatggcagatacatcccaaaaataattcctggcaactcggcacacaggccagtagggtcaatatgtacattgctggagaagaccgccatctcatggtttctctaacttttccttagtgattgagtgcatgcccacccatagcaagttagtcctcaatcata

SEQ ID NO: 327695 - DNA, 1398 bp, Cannabis indica
gataactaatcagattgtaaagagttttatttagggcataaaacccaacactctttccatttaaatggagcaccatcagcttggttccaatggatggagaaggcaggcagatttatcgattggcattcctttcttcgtgctcttcggttatgtttcagtgcttcaatttatgaggatccacttgggaggataacgaagctcactgaaacgggcacagtttcttagtttcgtgtctaatttgaggaactaatgactcgagtcacgggagtcttagatcaaatgtttttaattttttttgtatgggtctaaagcccgagaatcgcagagagctattgatgtcgactcctttagatttggcagatgctatggccaaagcacagttatatgaggatcagaatgaggatttattcaatcgttctcgtggtggaaatcaaacgtccaggatgggtttcgaagacaggttcacctagtctagtatcagcttcacatccaggtacaacaatccctccaggttccctagccaattctgccactgtgacttcaactaaactaggtattacccttttactcatgaagcgtttaacgcctgctgagatgcgcgacaaaaggaaacgtggtatttgttttacttgtgatgataaatatagttttgggtataagtacaaaaacagggtcatgttgctatgtggaacaaatgagactgaagaggaaataagtcaatcagagggattagaagctcatgattcagaggataatgcggtggataaggtgagcttgaatgctttatcgaactcctcttacccgcaaatttttcaaattatggccaaccatagagctgagacattggaagtcttaataaatacacgtagtaataacaatttcattcaaaaatccttggtcacacaattacaatttccctgggaggagacaaaatgctttaaagtttatatgggaaatgagaatttcttgctctgttcaaaagtttgcaagggaggggagttggtgttatagggccacatctttattgttgatctgtatattcttcctatacatggcttggatgtggttttaggcatgcaatggatgcagaacttggggccttgtattcatgatcataagacactgactatggagttctcctagaaaggaaatgtggttaagttagtctttcttctatgacgttcattcatatccttgttattcttttcaataacttgaatgagtactttattttgttccattagttttttgaattgatcatcacataattgttttgcctttgctttttcacacctaatggtctttttgctagaaaagtatgttagaaatttattatgtataaactggaatatatatgtttatttataaaatgcggaattaaatcaaacatatatacac

SEQ ID NO: 327696 - DNA, 837 bp, Cannabis indica
accaagtggaataatgttgagcgtcaatggaagagtgagtagagattttctgccatacttgtctgacaagttccctatcaaaggtgtcatcaccatcattcccacccctatcatctgttatcatcactaatttattaattattatcatataatagaaatgttgtgttgaaataaataactgtcatatatggtacattatttttaaatattgtacctatatatacttttctataaatcatttatttgtttctaactagtgttaattataatcacatatgacaactttttacttaattggttcaaaattaaaatattagatttttttcttcctattttataatatttgatatacttataatattatctttgtaaatttttaaatagtttacagcactgaaaacaaaatttctcatattacttcagtttacagcacgtgtttgaaaaaaattcacatgtttatggcaatgtaaattatttgaaattttttaaaaatttacgaggatgatattagagcatctaatggtctactatttcaccaaattggtgtggaatcttcacacaatttcgctccaatggtataccaaattgtacaccaaattaatgtacaccaaattctacaccattaatagtgttggattttgaatctacaccaatttggtgttaaacttgtcttttgcattatatataacccttgttttaatttcttgtaaaaaataatcttacattttagttctcaaataaaaatttattacaaatataataattgatttaattaaaatgctaaaacaatacaaaataacaataacaaaaatactaatattaatattaaataaaata

SEQ ID NO: 327697 - DNA, 468 bp, Cannabis indica
agggcataaaacccaacaggcaacgctctaaatattatggcttcaagaaggtgatcagaatactaaatactttcatgctgctgctaatgctagaagaagaaataatgcaatagtgaagcttcaagggcctaatggagcttggtttgattgggaaaatggtttgtcggatgtggtaatcaattattttcaagatatttttttggcttcgggggtggacgattctgaagttataacttgcatcaaaccatgtattactaaggaacaaaattgctctcttcttcagccggttatagaggaggaggttcaaaaagctttatttcatatgcatcttgataaatctttgggtcctgatggaatgactctagctttttaccagaagaattggggagttgttggggtggatgttgtaatgaccgctttagtaatgtggattagaaaaggcaattagcactaattttattattttat

SEQ ID NO: 327698 - DNA, 980 bp, Cannabis indica
taaaaaaagttctattatatatattacttttttttagatgtatatttatacttttgcatatagtaaaatgcaacatttcaaccactataatttaatgaaatttattttattctaaagtgattatgttgtattgcatgatacattattagggaatatgattagtaaattaattaacattgaagcctagtttcggatatagacaaattagacttttgcttaggctcaaatattatttttttaaaaatatatatttttaactgattttaaaattattatattattttaataaaaatttaaaataattttttcttataattcactaaattttaagcctcactatatttggtacaaaaaaaaaaatattggttcctttgtaaagaaagtgatttattagcatggtttctagtttttatgaaatttatttcttttgattaaaaaaatattatacaaaagaaacaaaaaatgacatattttatttcttttgtttaaatttagaagaaaatttggaataaaaagcatataaaatatatagatacttgttgcaagtttggattatgtgaaatttggtaaataatttaaataaaaaaaaaatctcttctcaaaaaattaataatatattctctatcacagttcttatacagaatccacagttcacattccaagaaaacttatattaaattagagtattaccttaaaagaatatagagtattaacttcaaagattattttacttaataagttgatgtaaaaagagtactataatatataatattaatattacacttaatttgtaaggtagctactagctaccatttatggttaatatgtactattaataataataagggaacatattttaatactctttattttctcaaaaaatatgtgagagaaattttataatgtatctcttcaaaatagatatattgatattatttttttatctattttgatattcgaaattaattttttaatttaat

SEQ ID NO: 327699 - DNA, 977 bp, Cannabis indica
tttaaaaaaaaaaaagtaatatgaataacctagtaaaaatcttataattatttttaattatatatattatattacataaattatttttaataattaagttatttttgtttgagatatagattttattatgtataatttgaaatataaactttatatttattttgttttttttaataaaagaaaatttatttaaaattgagcaatacaagcacgctaaaaacagcacaaaacaaaggctcaacgagccaccaagggcctcctaataaaacaatagccaaaaaaacctgctaccaggacctcattacaataattagaaacatctctatttttttaagagtactacaagccatgctcaaaattctagattgagtaaccttcctgatttccatgctcaatttcaaaggagaggtacaagcaaaataaaaaatacaactatttctatttttccaaatcatgtaaagtcaagggggctctgagtacaccattgctggatattactaatgtcagttggccaattcacaatacccagccaactaccgatttcagcaaagattttcctggcatacacacaatcaaagaaaaggtgagtatgagtttcaatatccttcttgcaaaccgaacagaggttcgaggataagctcaagaacttgcaaagatggtctcgagtgaggagttgaacattgcaagcctgtcataatatgaatctatgtttggggacagttagtttaatgatatgattgtaaagttgaattttagaatttatactaggtaatgcattttaatttttaactgttatattaaataaagttatatggaatttatttgaataaataatattattatattagaaaattaaatgtttcatataaaattttaaataaagaaaatatacactagcaacaaggcttttccatttcacttatttgttgatttttttttgttttgacgtggtgatcaaaatcacacatgattaacaa

SEQ ID NO: 327700 - DNA, 813 bp, Cannabis indica
cgtgtatatatattaaggtttcagctactacatcaattgaggagttcccaatttatttcgcttcgttaatgtagaatgttcataacaaaaaaagctctccctcactcgttcacacatcaaacctcaaggcctgggtattagattagtggttaggatctgttgtgttagttactgaattataggaagttagttattatagttagtagttagtcctaaccgactctctactctatatatacattgtaattgcctttgttcatttttaccaagtaataaaatcttttctctgtttttcaataggttttctcctaatactggaccttcttctttaatcttttctcaagctgcaaggatttcattcgcagtgttgtgttgaatgatgggtacggagaggaagaggaagaggagtttgtttgacgtgatggatgagacctctgtctcagcaaagatcacgaaatcgaacggtggtttgatgagtaataacaccgggaatagtctgataaataggtggaacggcaaggcctacacgccgaggtactttcatatacttgagaagaggaagaccttgcctgtctggcagcagaaagaagagttcttgcaggtattgaaggctaatcagattttgattttggttggtgagaccggtagtggtaaaacaactcagatcccacaatttgttttggaagctgttgatattgaaactccagataaaagaagaaagatgatgattgcatgcacccagcctcgtagagtggctgccatgtctgtttctcgacgtgttgctgaagagatggacgtaaccattggagaaga

SEQ ID NO: 327701 - DNA, 1115 bp, Cannabis indica
atattataaatgacaattttatttgataattattttgattattaaataaatagttttggcatttatagggttgaaattgtacaaagtggtatttgtgaaaaatagacaaatggttgagaaaatggcaaaaatcttactagtgttgggcccacatcatggtcgtccacttaaggtatttttggtccatttttttatcacttttttatttcaaataattcaaccctaaccctaagagaagtagtacaaaaggaaaagaaagtctcattatccaactaatgcttcaaaggcaatagacatagctttctttctctttaggttttagctttcttctctttaggtttttgagacttcttcttcttcttttcttctcttattttcaaattctatagtgttcttcaacgaaaacaaaattcagtcattaatgattgagtgcatcgcccacacaaaaaaagttagtcctcaatcatagtatgtaagactatgaagaatctaaacaactgaaggagtttcgggctcagatcttggtgatactctgcgacaaaaaggatacaagggttagagatctgagcggaaggagtcatttaattctgttgcaaccaatgtaaggtttctcataccttttatgtgtttattttcatcattttagaaattcatattaggatgttaaaaatatacttgttagtaaatttagatccttgtaaaagatattccaatagaagtttgatcgtctagccaagttggcctcggatataatacccacggacttcagcaagaaggaaaagcacttggtagttttaaatgcaaaaattagacacaacctggtgattactacaaattaagcgacctcatatgtagaaatggttgataaggctctatgagccgaaggtgctataaaaattcttcaatagccccgagtgactccaagtgttggtggaaccctcgctcttcctactcccgtataaggtaaggatagtggagattccactactgattagaaaggaaaggctaccccggcatctggtggtttaggacagagcaaaggcttctgagggaaccaaggcagatgtggacgttagggttagtcttaccctgagtgcccacgttgtaagaaacat

SEQ ID NO: 327702 - DNA, 566 bp, Cannabis indica
ccaagcagccaagccacctctctttctctttgcttttattctctctctttaaaaagtgaaaatttgtaagccaaagttgatgcatctaaccgttaaagccctaattactttatatcaaaaaagaaaattacaagaaataattatagagctttcgtatgggcatgggtttttgtggaggggccaagccaccactctttttgtggaaaatgtacttttaaggagaatccattttatgaaaattatgaatgagactagattaatgaatttggataaatttttcctattgtcaagttaaaattacatatttgtagtttatatatctaagagaaaattgcaatattatatatctcttttaatttttactttttctttcaaaatttagtatatttacttcatttttcaactatctactaattttactcttatcactttaagatagtttttatttttttctaaacaaaatttacctctaacttttccataaatctacacatccatctgcaaaaaatacaaatatattatatttgaaaatatttcttaattatgtgagagtgtgaagataattt

SEQ ID NO: 327703 - DNA, 948 bp, Cannabis indica
cctatgcaaactaattaatatgtattttatcaacttacatgaatcaatatatacttaaacaaattaaaccaactcatagcaaataaaaaaattaagaatgcttaagattttttataacacccatttaagaaatatataatatacatgaagaacaataattatgaatcaatttataaataaaaaaaaaaaaataacaaaattcaaatctctacttaaacatatatagatatatatataccgagaactacaatagtttaaaacttcaacaatataaaagactattcttaaatgcatggtacactaaattatttgattttctccgttaataataaataaaaccccatataagtaatttaagatagataatatataatagtattttcttttaatgagtgtttttataggaaaatggtaattctagaagagaagaagagaagaagaagagaaaaatcataaatgtacaacagcaaaaacccaatcgtatttgttttagatttaatgtgatttattttatttattttattatatataaataaaaagtgacccatgaatttcgaataaactattttatttttaataataaattattttatttttaatataaataaaaagtgacccatgaatttctcataaactatttaatttttaataataaatcattttatttttaatataaataaaaagtctcccacgaatttctcataaaccaagaattcggttatataggcacactttatataaaatatatatatatatatatatatagctttgtaacatttctcattacttttctatgttgacaaaatacatacataaagctctcatcaaagcgatatcttcaagtttgttgctatcaacaatgatttatgataaaatatcaatatcttaaaaatatatattattttttaatcactacttatatttggttgtgttgatcgaatgaacaaa

SEQ ID NO: 327704 - DNA, 1072 bp, Cannabis indica
gagccttgtgcaatggcccaagccctggttcaagaattaggtaacatcgtgtaaagtttcagattatatagtttgatttataaaatctaaacggatgtatataattgaattgattttatagtagttgttactttactcgatttttgggaattcaagcactactcggttggaatgtatttctaatggaaaggaagcttgtaaatctgatgttcattgatttagctttctagtcttaattcttcgtaatattcatttaaattcaattacttaacttttggagatataagaactttcagaatatcatattttaatattctattttacagtgttattatgattattattctatttttatagttattcattatggactgataaaaaggactttaataaaaacatgtatatttgcttacattggaatatattgtttatgcacaaaatgtgtttgacaaaatgattgagtgaagcatagtgccggagggactgtgctttacataatttttcttttgatgtgttgtttttggtttaattcttcaacaaagtttcatacttgttagtggcattaaataagactgagattatatcattattttagtttaagggggtagtgaagacgtactcatctttcattttttaagaacactgatgtttcatttttgggtgaatggacgatttcacgtctggtcatttgagtctcgacaatgattatatatgttgatattattaagtagtcaatttgattgaaatcttggatatcatatacaaaaggtacttcaaacattaactacaggatacatgctacctctattactatattatatatataaatattgttctttatttgaattaccatcagtattggaaaggaggactaaactaggaaattttgttgattagagggtgtgtcatttattgttgattcttgttctctcatgtccctaaaagtggtcctgatcatatttatctcaaatagactagtgatagcagagtaatgcttatgacttgacaattgggttttttttttttttaagaaaagcgtgcatatattaaacaaaagcagttagacctcatg

SEQ ID NO: 327705 - DNA, 641 bp, Cannabis indica
gcaggatcataatcctactcattgctacctaattaaccaataatatatgataaatcctaattattcataattagattttcggaatattacaaccgtccttccttatagaatttttatcctcaaaatttacatgaacaatttgggatattactcccgtattcaccattctaactctcaagtttcttcgtcgaccttgctgtttctctatggcactttcttaactagttaaattgtcttattccatataataatttttcccatataataattttttctgaagcttaaaattatcacaactcaaaatatgggtcgagtgtaatacatattctctcaacatggatatatgaaacacattatacacttcggacaatgtaggagtcaaggctagctgataggctaccaggcctacttactctagtatcaaaaagttttaattactctaattaacttgtgatatatttcactctcacctaaattggacactgtatatcattcggctgaaaatctttgaaaataggaaatatgcttgtttttagcaatttttcccatatcttctttattttattataagttcaaaattttcttaaatatatgtgattagaattcatattaaacatagctattcattttctatttattgt

SEQ ID NO: 327706 - DNA, 676 bp, Cannabis indica
taaaaattttaaaaaaattattattttttattatccttataattaatttattgatcatataataatatatatttgctgtccaactaggaattaataattaattatacattattagtagtaggagtgggagtgagagtgggagccacgtgtcaaattcctaactgaatgtcaaactgataaataaacgacaactactacttcatatcgcacccacacattatataatttattaattaaatattacaaaagatcatataataggatgattataattaattacatagcacccatatcaattattatattgattaattgtcattagattagattagaggatatgattaattagattagtctatgaatttcactctaattaaacaaaatatcttttacatgacttatacgcacgccactctactctatactacttaatactttttttttcattcttttgggtgtatatatgtaataattaattatatataacacattgttttgaatcacttagtgcctattgtaaagagcaattaatgtatgttttcttcattttaatcaaaaattaaaatttatatatttttaaaaaaaattaaatgtacaaaagtttggatcgacactcataatattttttattcaaattttttttcacgagagtagtgttcgttatgcttacaacatc

SEQ ID NO: 327707 - DNA, 1032 bp, Cannabis indica
ttgagttatattttcatttaattttattacaaaaaataactataaaccctcatcggttcatatcttcactgctttcgtttctgaagaccgccactcagtgtctcatttctgcaaaacccttaaaccagtagcttctcactttctctctcttccgccatggaagaggtctgcgagggcaaggacttctctttccccaagtatgaggagaagatcctcaagctctggtccgagatcaaggccttcgagacccagctggctcgcacccaaaacatgcccgagtacatcttctacgatggtccacccttcgctaccggtcttcctcactacggtcacatcttggccggaaccatcaaagatatcgtcacaaggttccaagccatgaccggccaccacgtcacgcgtcgcttcggctgggactgccatggcctccccgtcgagaacgagatcgataagaagcttgggattaaacgaagggacgatgtgctcaaaatggggattggtaagtataatgaggagtgtaggagcattgtcactcgctatgttgaggagtgggagaagattgtgactcgtacggggcgttggattgacttcaacaatggctacaagacaatggacttgaatttcatggagactgtatggtgggtgtttagccagctttatcagaagaaccttgtatataaaggttttaaggttagctgtattctattctccggtactttccaagatatgattggtttgaataaggtcgggttgatgttggagttacgggaatatggtgtatgtatatattctaacttagtggcgggtaagtgtatctagttcttaggaaattgtggttatatgaatccaagagaaaagaattgaattcagggaaaaaaattagagagaaaatagttgttaatgtgaatttggtggatttagtttctgagttcaatccctcagtatgtcttatattattgaaattgtgtacaacttcttataagtcgttttttttttttttttcattttagtaatgacttaggttaagtttct

SEQ ID NO: 327708 - DNA, 658 bp, Cannabis indica
ctttggaggctacaatgaggccgaagaaccagtatctgagcttggcgatgtcttggtcgagggggaagattacgtcacccaagagtatgccgaggcgatccctaataggaaaaaaggtgccatgagggctagatgggtgtgtccatcgtaactgaggatcatttaaaagatttggagaaggttggttacctgggcatagatgaatgcttcctccctactccaaatcattgggcaactagtgcgagggaatgatactgggcctagtcgggtgcccatacaaaacaaggggcgatgctggctttgcacccatattttaaaaggattgcggactactaccacctttgtctgacccagttcatacccaagggcatcaagtattaattttccttgtgcatcctctacgatattcaaggatggggtgagccatctccgcacgacaccaactggctctttgatttgaagtctactctgaagcaaagcaagtcggggtacttctacttctctcacctggatggcaagtggcttaagggcactgtggacacaaaggttagtagaattaggaattttgttaacgagtactacttcttaactggcatggagactactcatacttggtttcaacagattgttgggttttgtgccctaaataaaacccttt

SEQ ID NO: 327709 - DNA, 812 bp, Cannabis indica
ggggttcttagtgtggaagagttgaagcttaagctcgccatggataaagctctgaagctgaggctgaagctgttagtggtagttatttttccgccacatattatattcgttgttgttaaatgttaatgggcctaaacgtattgggccatcgctagatttgttaggaggcccatatagataaagcccagctcaatatgcttgtactcactcctccgcctcatggaaacttattttattttttgttttttaaataattagataaagcactattttgtaatttttttacgttcttatgttcaaatatttgtgtggctgattgaaatttttatcttttaaattttgacatgtattaaattatgacttttaaaattctcaagctattaaaattttctccgaactattaaaatttttatatttaagaatttttgtccaatttcatttaattttgatattgtggcgattgttcatgtaccaaatgatgcttccaaactttaatatctactaaatcatgattcttgaactttaacatgtaccaaattgcacattctaaattttcgtccacatcagactttatttaataaaattagaaaaaaatttttgtatttattcttaatataatatatattttatttttagctaattagaatttttgcccttgaactttgacatgtaccaaatcatgccccctaaacttttaaggtcgttaaaaatgccccctgaactattgagattgttggatttaaggactttttttcaattttagtaaaaaagtctaacatggatgaaagtccaagggccatgatttagtacat

SEQ ID NO: 327710 - DNA, 1183 bp, Cannabis indica
aaaagctctgtggcagttagtatttctttttgattttaactgttttaattaagttttttcctcctactttgttgcttatccatcctacagccgtattcaatctttataacttcaaactttttttgaatttcccagtctaaaccgttccctccactatgcttaaccacctacctatcgtccctaacctctttacttacgaggaatcttcttgatttcatctaatcctgatggatagtttactcagcgatatgaatcacacccttgtcctcacagattatgaaaaagaggtgcaagttctaccccatcatgcacctccttctaattccacacagcagaactctgttctatatgctcgggttgttactacaaaggaaatcaataggaaaacctttcgaatcaaaatgagtggacactggaaaggccaataccctgttaccattactgatcatcattctggtatttttcttgtctcctttggctgtgttggagatctcaaaaaagtcttacttatggaaccttggcattttcaaaatcaccacattgttttatgctcgccaactgctctgcaaattgcctccccagaatcaatgtgtttttctcctttttgggtacaactccaccgcttaccatttcttagcaagtcaagaaccatcgctgaatgggcaggaaacattgttggtacttatattgatgttcatgaagattctttaaatgaaggatggggtcctttccttcgtttccgtgctacactagatatttcaaagcctctccttcgagggaaaatggttcggcttaaagactcgagagatgaattttggttagaattccgctatgaaagattgcctgaattttgttttgaatacggcacgattggtcatccgtttgaactttgtcatgcttttcttgaacaagtctacaatgggaatgatccttcactggcatatggtccttccatgataggttctcctttaccagattcaggttatgacagatacaggactgatttttctaaaggaggtgtttggcctttaatgcacgattggccaaacgatctttcactgctgcaattccacagctttccacaagatcgctgccttttcctaccttattggctgaaggagtaactcctctacattacatgcttcacatattctatcacctgcaacactatcgacttctccat

SEQ ID NO: 327711 - DNA, 783 bp, Cannabis indica
tttgtaattgagagcttagttaccaaagtgtagaaggtcctaagatcttgaccaccaatatgaactcgaggttggttgagaagttgagaaggtttgaactcatagccattgttgacctctctgttaccataatacactctcatagggactgatcttgtaaaaggatccaaaacatctcctattactctaccaacaacaagagagtccctactattattattattattattattattattattattattattaagtagtactctagccataataataatataatataatataatgatttattatatttggttggatggttgtagttatatattcacatatggaagcaacgtgtgtatttatactagccatagctaggtagataggggattatattgtttgttcgtagctataatattaatatcttgtctcctgctattatattcttatcaccttaacagcataacaacatcactatagattctgtcctttatctaaaatacccacacttgcaccactacatacaaactactctccaacactactttaaactacaataaagtgctcttttataatttatattatatattcacacacaaagtagaaattctttctaacaataacttatttaacatcaattataaataagaatatttttttaaatattgtagttaattatatatttttttaaattaaataagtatatttatataagaataagagaattactccatatactatttcttaatttcttttttaaatttacggtttgagttgctccaataa

SEQ ID NO: 327712 - DNA, 697 bp, Cannabis indica
aaaaatttaattattaaaataatgatgtgtcaaaaaaaaaggaaaaacttctacacattatatgggattagttcattaaacacaaattttttattatatttatttttgaccaattaattaatttttgtgatatatacatacacttatttgcattaaagctagatcatcttcgtggtcttgcagccttgcaacatgggattgaagcttggaaggtggtctttaaggaagcttaaaaacttattcattctttcatttgttgcaactttgattatgttttggttcataatatatatagctaaattaatggtctttacattgtaatgcttttggtgacattggtttgttttccatccctcgtgaggttcttagagcatctctagatgtttaattgatgaggtggacatattatgtggcaaaatattaagatgctatattattagagaaaaaatagatgtcattctaaaaatttacatgatactatggtataatattgatgctattcattattttttaattagaaatttaaagctataaaaagttatatattgtaactaaaaattaggatatatattaaataataatgtgtgagataataattataagcacttttaaagtaagctatatgttatataaattaataatataccaacgatctatttgtatataacatagaaacacaatagtagtatatgataat

SEQ ID NO: 327713 - DNA, 938 bp, Cannabis indica
agttaattctcttcccttttgttttcctctctatcctatcccatttttgtaacaataatatctcatatcttcaaatctcaacccacctctcgactctcctaactctccacatgttcactcatgatctgttgtaggtacctccatggctcactcatgatctctaaagatgtttctctctcaatcatcttaggtatgtgtatgttctcctcttaataattttctttctctttcatattcttattgtaagagatgaaaataattttgaaaataaataaataattttatgaaattaaaataagaaaaaaaaagctaatgttgtaatatagcaaaacatatagagaaatacactatttcactaacaaaagaaagcaaagtaggaagctcaaaaatagaagagcagaactctgaataagagagatgtcaaagcagagctcagaaaggaaaagaatgacccaataaaaaagcttagaaaatgagaaaaagagatgcaatgtgcaacagatgagatttagcgcacgtggacaaatcagaacaaaacaagaaaaggaaacatccattccttcctgcctataaatagaagatcccttttttggcaatttgttgttaagccaatttttgccatcaacagctagtgtcgtcatatgtgggaaccttttgaatgaaaagctaaagctaaggatacgaactaaaatgggatcgaaaaagatattggagaatgttgggttttgtgccctaaaaaaaacccatttcaatataatcagatttactaattaataaaaatcaaaaactgcattttatgttgcatggttcacatgatttatttcatgattatgtttgatgtataaattctattaagtccagaacatatgtatttgtccatgattatagtgtcgtcagcacagtagaatataatcatgagtatatgttcaaaagtttaa

SEQ ID NO: 327714 - DNA, 713 bp, Cannabis indica
gtgatctatgatgataagctatatcgcaggagtttcaatcagcctcttctcaagtgtatcaatggggatgaatgcaattatatccttcgagaagtacatggaggcatatgcggcaaccatactggcaaaaattccttgaatctaaagattatgtgacaaggttattgttggccaactttacgagcagatgcgattaattttgccaaaaaatacgacaaacgtcagtgaattgccacgtatgtgaataggccactaagccaataaaattctatcactagctcgtggccattcgcagtccggggcatagatttaattggtgatttactaaaggaaaaaggaagagttaaatatgcagtggtcgcagtagactactttaccaagtgggttgaggccgaagccttagccacaataacaccagtaaaactacgtgagtttgtctatcgagcaatcatttgtaggtttggtattccttacaagttaatttttgataatggaaaaaaaattgattataaagatatgcggaaaattgtgcaacgatttggggatacaaaaggctttttcagcagtcacatatcctcaaagtaacgggcaaactaaagcggtcaacaaaatcattaagcataccataaaaggaaaactcgaggagtggaaaggtgtttagcgagaagaactaccatatattttatggtcatacaacacaactcctcgctcca

SEQ ID NO: 327715 - DNA, 608 bp, Cannabis indica
agaaacttaattgttatttccattatagaagtcaagatttatttattattttgaggatacatctcatatagtgtattatagaatttcatactaggcctagagttcagagttatattttcatgccattaagatagctttgtgacaacttagctacaatatttatggctaaaaaactataatagttctagtcaaagctagcatatcgacatcaagtatttagccataaagaggcgtaagtggtcattaagcacggaatattgaattgaatgattacaatatccttactaaagacatgccaatttcaaggaccataaagtaaacatgtgattcagtttccccttttgcagttttcgtgtacagctaaaattatttaatgaaacacttatattttctcatattcatgtgcaccttaattttatctaagaaaattaccttcatgagaccaaaataaacatatgatttattcgcataagtattaaatactagggtgtacgttagtcgatttggtcggtttacgttacattttatataacccaatgtaaagatcgggttacaaaaatctaagtgcaacccgcccaattaagaaaaaaaaaagttttaacctgccc

SEQ ID NO: 327716 - DNA, 763 bp, Cannabis indica
tcttggataaagtttacaagttgcgtttacttttttaaactttttacatgcagtcattgggtagagaagaatgtatgttaagagttccattaggcttgtaaataaggttaatgtgaggttcaaattttttgtacatgaccaattagagcagaggtaatttaacattattcaaggtactaatattgtaattcatattaatgtctttttgcagatttcaataatgagaacttgattgctcaaaaaatggaatgtgtaagttttgtttgtataccaagcccaacaatgaatgagtacaaaatacacaaaggaatgagtgagagtttatgagggttgtaaaagagtgtcttgtgtgtttgatcaatagctctcacgtgagatatgatgtaaacgaaacttttgattccctgtacctcaaattgttgcactgttcttgctgattgatctataaagactcaggacaaattacgtgttttctgcccgaacaacacttaattagtttgatgagttggttaagtgttgcttagtttagctgttagcctgtctagcttttcggttactatttgtagctgttttctcttttgttctaagctggtctttaccattaccattttttgtataaaagtctcagtgacactttctaaataataacaagaaagcttttgttcattctatattagagaggaaattagagtacttattaatattttggtgatacttgctattcttctacactatctcttcatctaaatgaaatagttgtgtg

SEQ ID NO: 327717 - DNA, 691 bp, Cannabis indica
aatatttaattaattattttaagaaaatagttaattataattaattaatactaaaaaaagaatgtttacctattagtaacctgctattacaggtcaaagaaaaatgtaactatgatggttacaataaaaatgtaaccattgaatagtcacccatatagatatatatagttaggattcccaatatgcaatatacagaaaaccagtagtaatctcatcaaaaaaataaaacgcaatgcaaacacttggtgatcaaataaagcaagaaaagataaaacagataggaacacaaccagtttttacttggttcagattcgaatcaatgtgattttgcacacgcaagtgcacgtatcgttacaagtagtaaactcactgagagtgaggtcgatcccacaagaattgtagttaagtacgttaaaattaaacttctacttctatttggttaaataaaaattaagaaaagattaaaattagaaaataaaaatagtgcaagaataagcaattaaattaaataagaaattaacggttaataagaactagggatttgacttcaattgtttctattgattatggcctaatatgattatcttcctattatcaatttctatgcaatagcagatttactaaggtaattcatagtcttctcatatatataaatctcaattacatacaaactttctactctcgtgataaa

SEQ ID NO: 327718 - DNA, 830 bp, Cannabis indica
tccaactaatgtcaatagttcaggagaatttttaacgacctgaaaagttctggaaaatatgatttagtataatgctagagttcaaagtgcaaaaatctaaaattataacttaaaaaaattaaaaataaaagtattataacctttacaattaaacaattagattaagatacgttttttttttcttttgaaatcaattagataagatacttactaatttgtttattttgttcacaaatattcctaaattataaaatgagatgagaaaacattatggaatttagtccaatcaaattttttaaaggaaatatgtgtacttagcattatttatttcttttttacaaaagcattatttatttatatactcttttataaacaaatccttccccaagagtacttacctatatatatacataggtattctttaatttttggtcccccactctttttgaggacaataaattcactccttacacgaaccataaacaacaccttccgatattgatgcatttatattaattattttggtcaggtaaaatgagtcagtccactaaaaataaaaattaaaaattaaaattcatatattattataattaatgcatgctattaatatttgataatgactgaaaatctcaactctagcaaaattaattattatattagaaaagacatacatacaataattatatatattgtaacgtactcacatggcctagctgtacaactacaaaaatagatataatgatattaatacatgcacaaaacaattattgtaatatgtaaaaataataataacaataataataatgcattatatatttatttaaagtaat

SEQ ID NO: 327719 - DNA, 1114 bp, Cannabis indica
aaatttataagtgattctaatcagtaacttaaaaaaatattgaatggtatttttaatgtatgaaacactaccatgtcacaacttatgtaattaaatagaaaattttaaaaactagctactagaaaactcaaaatacttatttctaatatggatataaatcttatatttataaactattgtatctctaagaaagtataaaatatgggaatcctacaaaatgcaataataagacactaagatggcctaacaccacttaagatgttttaccgctatacgtattaaatttcatataatttaaaaaataatatttatggaatattatcgttaactatttgtaaggccctaccccatgaaagtgtatattagacaccactaatgtcttatagcaatgtgttaggttgcttctagtattatttttaaattaattttagtgtatttttaatttatttttactcgtgtttggagtaattttacgctttttatctgttatttttgcaaatttaaaataaaagaagcatagaaaatatcgaaggaaaaagatagaaaaaaaaaataaaaagaatcaaataaaggataagtgtgcacaagatgaggaccatgccgcaacatggaaaggagcatgccacggcacgtgtcaaattaagctcgaatccgtgtgtgaaaactcaacacgggtcgcggcatagggagagcatgccgcggcccgccctcctaattcaaagacaaataggactttttagcgtgggcttatctttcctatctatttcgaagctgaataagttttctgcatgtgctatcttatgctatctttttcatctctcattggctatataagaagtgaacttcagttgatttctgcgagcaatttagaaggaaattagaagcattcaacgaagtacgaattttggagattgaattcaatactggaggtatttttcagaggattttcagcattctttttcttcttttttctgaaactaatatgtgtgaatttgctacaatgaatatgagtagctaaacaattatttagggtctagatggagattgtttgatattgatatgtggttttaatatgatttaaattttctctcatttctatgtattctatttcatt

SEQ ID NO: 327720 - DNA, 653 bp, Cannabis indica
aagcaaaaaagtttttttttgaagaaaagtgtactttgtagtttttaaacgttatgaaaatattttttgtaattaaaaactttaagtgtaaattataaataaaacataaaaaaaatatatatatttttaaaagtttccttataatttcaatgtgcaaacctaacaataaactaaaaactatcattttgctgaaaaagaaatctatccgttctaagctcccatgtaaaatttatcaatataaacatctggataagacatgaggatcttgtaatgataatgaacataattaattggtccctatatacgatttaatggggaaatcaatagttgggattgaaataaataataatttgtaataaaatataatataaattgataatactttttaatgctttgcaatttgcatgaaaataacttgaaagaaatgaaactttattttcagaattaggaatgacatttattgagtgaaggaataaaaagacagaaaaaaagtatatcacaatgccatttattgatatcaattacgagccaccaaatagatgagtaatcccaatctatacttttaattaaaattgagagatctccaaattatttatacaatatgaagagagagatacaatatatatatatatataaatagagagagagagaga

SEQ ID NO: 327721 - DNA, 523 bp, Cannabis indica
aagttgagcaaccatgagtttaatgtctttgcagcaatgtacatatcagccgcgatgccatggctctagtggacaggatttcccttcttgaatgtattttgaagggtgaactcttttcgtaaagtcacttttggaaaagattgtaaatattttaaaaacaggaggtccccgtaaatattattagttatcttttataaaggtgtgtgtttgtttaactacaaatttttaactacccacacttttcgtataattaaaaaataataaaaaaattgtgcaaaccacatacgtggcctccctatggaacagggcgttataacatggtatcagagcagccaaggtttaaaaatcctaaagacttatagcaattatttaatgaaatgttaaattcttctcctttcgccttgtgtgagagttagggggccgttagtagtgcgtacgacatactgcacccaaccctccctcacatgaacaaccccaattgtgaaggcccatttacattatttaaataattgtattaggctaa

SEQ ID NO: 327722 - DNA, 831 bp, Cannabis indica
gatattagcctgccatgaccgcggtaagtctacctgctagtgttctcgggctttgttttatggtgcctgacctcccatacttatatatttctcttgtgtcactagattgctgtagatatgggtcgcctctcaaagactttaatcgacgatgggtacatcatgtccgagttcaggggcatggatgaggccatgaagagtctgagagacttggcggctaagaagaaagctatctaggaggaggcccagcatagagaggctcagatcgagcggagtcaccaggaggcgcttaacgccaaggttgaggagttaaaggcaatggatgatgccctgaggacccgagatgaggccgtgaccaaggcgaggcgtgagcttaaggaggccaaggaggcggttgaagaactgactggcaagctgaagtccctagaggagctgcaccaggctgacttgaaaatcacagccaaccttactgttgaggtgaatgagctatgtgactgcagggagcaggcttaaaagaaagtaaaaagagatgagctcctggccctcgttacctgccagcattgcaacaaatgttttaacgacgatgttttcatggcctggaagactaacgatcagaaccttaagcttgacttctatcccaagcctgaggaggtcctcgtccgcttcttggagaagaagaagagacttgatgccttgctcgacgagcgcaggggtccttgccttccacctcgaattgattagccagattttcaccactattatcattatcattatttttctctttcttttttttttatatatttaatccttctcccctctctaagacaatttact

SEQ ID NO: 327723 - DNA, 1193 bp, Cannabis indica
agttagaagttagaagttaaagctagagtgtgagtattcttcatcatcgttatgtctatacttccttcaaattgatctcacttgtttctttgtcatagttttgattgtgttctttttcatattccttttttgttccaactaaagattgccattttgctttttcttgttgaatgtgttaaaccatggtcaatcaaccctgaactatttgtgggaatatttttcatagcatactatttacctattttggtttattgaaattattggtgtaggtaatcaggaacaaatggaacacttaccttgatcttcttcaggcaaattgttctgaagggtgagtagaactcaaatgtaatagcttgctaaggctgttgaaatattagtcaaggatttgaaagtgttttctgcattcaacgaagagctctttacgtggctcagcttattaagattactgcctgtattcgtcgggtatatattattcctttgcttttcttatatatgaaagcgttaaagttacaaaatattaacatagaatttatactctaattttgttaatgctttattaaactggaattaagcaaattatgtctttaaaaagaggtttactctatacttataaagtaatatcctctgttacagtacaaatttgactacactaagtcctctgtaattaggaataagtattcattaatgtgatctcagtgaaaatatttgctgaatatctctaaacatttgctaatgatttgaaaaactctcttaattaggttgagcaattgatcaaagatgaagaagtatatgcaacctatgaattgctggaatgtttttgtgacttcattctcgtccaactctcatatattcgaaaaactaagtaagtaccatcaaatatgcatggtggattgcctttcaatatatatatttagtattaaaggtttttgttcatttggttcattcagagctgtccaaatgatattcatgaagcaatatgatataactatctaaatatggttatactaagtctgctaggggtataatgattgttgagctcaaaaagttgattgaagctaacccactattttgggagaaacttaaagtttccaccttgaagaactcgagattacgtacactgattaatcaaaggtcttgattagttctatcttatgtgttgacactattttttgtttcttttgtgttataatatt

SEQ ID NO: 327724 - DNA, 1146 bp, Cannabis indica
gattagattggatccaaaaaatgaaatctgcacttagtgcggagtggatgttgtttgaccaaaaaagtgcggattggatatgatgaacaaccctaattttcagtgtgtatatatatttctgtatatttgttcattaatggatggttcaatgcttgattttatttttaattgttttgataaattttattattatgattatctatattcattacttctagtatttccaatacattaaagtaattatttttatatatatacattcatattcatactgtactgtacataattttttgtctctatatgtttatatataatactcaatattttcataattttattgcatatattttattagaatattatattctatatatttatgatgtttttaagctatataaacattgtatatgagtgtatatatacgtgaaattttgtttcacgatcgatgttgtttgaaaaacattcctctttatttttctatgtgtttttcgattctctttgctttcatacattcatataagctatagatttatttttcatgaaaacgataagaaaattcttgaaaacttaaaaaaaattctagaaaaatccattcggacctgagaacactctttgaaattaaagtctaatttttatgtgttttcgatgcataaaatctatatgaatcttttaatttttgtgtttagattcatttggcatcaatttaggttgatttaatcgtcaaaattgtaaattctgttaagttttgggtcggattagtcggacctgagttgtagaaaaatggcttaaaaaacccagcttgaaggttgaagacaggaaaaacaacacatcatttttaataaattttcatttatttgacccagttgactcgtacaaagagcctaggactccagctgtctaaatgatcattttttctatctctttcttttttgttcagccataaggccttttttaagacaaagtgaccgaccaagctatctttaaacttggaatttacttttcattttctagacaactagctaaccgggcagcctttaatcccgcgtttgcatgcttttgctatctttaatgaattttattctctgtttataatcatcatgcaattgtgtttgttttattttttaccaaatactttgtacaggtata

SEQ ID NO: 327725 - DNA, 469 bp, Cannabis indica
aaaatcagttcaggatcctatttgtactattttagaaaatatagagtctattttgtcatttaacaaaacagaaggttcaattaataacttttgtaaaatactggatttaaatagtatttttttttaaaagataatcatatttgataatgatcaataaaaagatattattttatgaaaatggttgagaaatcttttaaattcgttaaaatttattgtctaatttaagaagaggctaactcattcatatatgaatatgagaaagaaataaactaaataataaagttttaacatctaaaagagaaaaacatctctaaaaagaagtggcctaatctattatctaatattaataaatatataaaaaattatatgataaaattgtatgtagagaaagtagaataagacttatagttttactatatttttattcttttggacaaaagacttataatttattttagggtaaatacca

SEQ ID NO: 327726 - DNA, 986 bp, Cannabis indica
aacttgtgtctaaatactatgttttagtcacaagtaaatttttgttgtgactaaaaggtacatttagtcacaaaaaaattatgttgtgactaaaaagttgtcactaaaaaagtagttattttttgtagtgttctcatctcttctagagaaagttgggtctgagtgtggttgatcatcctctcggaccagctactgatcatcgccttgctatgttattgcctcacaaagtagctaatcagaagctagctcctcttcggacagattcctccttttgcttctcagcttacggggtattagcagtcgtttccagctgttattcccctcccaagggtaggttcttacgtgttactcacccgtccggcattggaaaaacatcacttctcgtccaacatgcatttgttaagcatgtcgtcaatataactttcatccccattctcaagcatgcatgctttttagctcgtttggaaagattgaaaacatgctttagattggcttagtttggaattactaccaacccaaattgtatgatttgtgggcaccgagaacatgtttctcatcttttcttctcttgcatttttagtcaagagtgtcttaggcttgtgaactcttggttgggtcggaaaactcaaaatacgaatgttgggggattatttagagggttgagccatagaaaatgtttgactaatttcaaacggcaggtatatacaatgactttggcaacgctagtctaccgtatttggagactgcgaaatgaggctctttgggactttttaagttttgaaagtagtttgtagaaaaaagaattcagcaagatatttgttatagagttcaaaattttactcattgaaaaattactaatgatgatagggattggatgacagctttacatgtatagttttttactctcttgtttggtttttgacctctcttttgggagtgtggtttgatattagtggttgtaaaagctttgttggtgcaatagtagt

SEQ ID NO: 327727 - DNA, 1742 bp, Cannabis indica
ttgtgaatttgacttgtcacaagtcgtagctctcatttacgtatgaaaagatatttagatagctcgagataggaactagaatcggataagcagaacctagcacactaggccatacgtcaacctcagcgttgggtgttccttggtgagcttccctggactcattttgttacttctatagcattcaagaatgtgaatgaggccgtctaccccattttggacctggataaaaggaatacctagagcaaaatttagtgtttgaggagcgaaaacatgcgaaccatgtgaacgtcagcctaggcggagggcgtaacacccatatcaagctgggcgttgggtccttgtttcggtccctcaattgatcttgtttgcttcccaagaacacttctatctttgttatttctaaaaatggaaaaaaaaatcttgggaggcttccaaggaaaagtacttggaagtatcctaggttgacaaaatgttaacctaggcgctgagacctagcactaggtcaacctagggcgctaagtccctgttctagctcccagatggctcagtttgttactcgaaagcactcatatattaattgttgatggaaacagaaaatatgcccagaagactttttcataatcatcattgaaaatagcccaggttgacaatatgtcaacctaggcgctagtgaccaagcccagtctcaaccttggcgctaggtcatcagtatagccttctgatccgtttctttcttgaaagcagttgttccctcattttggatgaagaggaagaaaattattggaaaacatctccaaaaaattggtcggaagcgccacaggttgacaacatgttaaccttggcactgggttcatcatcaggctaacctgggtgtcgggtgcctaggtgcctcaaatagaaagtgttctgattctaattctagtgcttctatcatgtttgggacagatctcattcatgtgcaagtaaaaattttaagccatttgcactaagacagatctaaaacttgaaaccctagcccaggatggtcaacttgacgctaggtgaaacccttagtttttgggttgacttttgagagtgatttgactttttcaattctcaggcttcgtgcttggattattattgactttttggttcagaataatgaaggatggaaagttggaaacaacttggtaggatccaaacacccattctagagctctcgaagtcaacctgggcgcaggactaggggacccttcccagagttgacaggtctgactcggggcacttaactctaaaaatgttttccttcttgtcgtgtgtgaaatattgacgtccacctgatcagggtcagtttccaggtaaacaatcctaatcaacccacactgatccttgtgtggtggaagatctagaaaatcaagatgtgagtttttcattgccgttcttggatacaacttgcgaaaagaaacaaggataccattgttgggttttgtgccctaaataaaactcatttcaatataattagatttactaattaataaagatcagaaatcattttatgttgcatggttcacatgatttatttcatgattatgtttaacatataaattctattaagtccagaacatatgtatttgttcatgattatagtgttgtcagcacagtagaatataatcatgattatatgttcaaaagtataatttcctgatttgtcagttcactagatttagactggtatcataatcagtgataggtatacttacacc

SEQ ID NO: 327728 - DNA, 868 bp, Cannabis indica
tagcaattgcagtagcccacacaattttcttaagtggtcaagcaattaagattgcttttcttaaactgacaaaggcttgatgagtaacgagcattggaacggctcttacacgtcctatttctatctttgatacaagataaaaagtcaattgcttcctcatgttgaagcaaatttatatcatgtatataattgaacaaaagtgagttgaaattttatgtaaaagcaaaattaatataaagtaatgtgagcgaattagtgagagtatcccaaagggtaaaagataatattttaaaataaataatcaaatatatttttttaacaaacaaaatatgaattaatgccaatgtgtataatttggttttttttttaaaaaaagtaaatactatatatttctaaaataaataaataaatactaactaagtataggcctcttaacataatatattattgtattttttttttaaaaaaaactttttaattagttgatttatgtattttattttggtttataaaaatatctacaaaattcttaaattaaatcacattaaatcacttatgaatattcgaaactatttaaaagccaaagtctagaggaccatctctaatggttacaccaatttaatataaaatctatactaatttggtgtggagtttttactttcgttgaaacaattctagtgattttcgtcaaatattatactaaatatcacactaaataatatattttacttaaaaaatcttgcatttatattatttacattaataacttaaaataattaatttatgatataataatatcatgactattagtaagaatttaaaattttaaaataatttaataaaataaaatatttattaaattaattaa

SEQ ID NO: 327729 - DNA, 459 bp, Cannabis indica
tttttttttttatttttgatatatataactaaatacattcatagaaaaaaattatacactagatattaatattttcttttaaatatgttgatattatatacatattttttacttttttttattaaaaaacctaaaaattaaatacttcagcttgactatacgttaaaagcaaatgttacataagtggtttaaaaaaaaaaagaaaagaaaattagagaaattttaaactaaataaaaaataaagatgagaaaattaaggagagaataaataaaggcaaataaagtaattttatcaaacaaaaaaaataaaaaaaaaagagaaaattaagaagaaaacagatagagttaaataaagtaattttagactgacacatcaccttctcatatttttcttatatactaggtgattgttacgtgccaagccacgtagtgttagttttatttaattattttagtttt

SEQ ID NO: 327730 - DNA, 1180 bp, Cannabis indica
cacttttactagcacatttttgtgttggcaaaagttagtattgcgctggtaaaatagaatttacttgtgatgtgttggcaaaaggggtttggcaaatcaatgttggtattagaacttttaccagcataaaataaaaagcgctggcaaaaatgactttttccagcgcgtaaatgtgctggtaaaagttagattttagccactgcaaatgtacgctggtaaaactttgacatctttgccagcgtagtttgcgaaatgcgccggtaaaagttacttttaccaacgcagtagcgaattgtactggtaaaagtaacatttcttgtagtgatcgctcaatatcaccaaatgtcactgaataatacaaataccaaatcaacacgaacacaaaaactgctctaactaagcatgattactcgcacaaaatcacacataatgtcgcaaaaaacatacaaaactagaaaaaaaagtatatcgtgaaaccaagtttcttcctagattcttcttccacgatttatccggaaaaaaatatacaaaacatacaaaatcataaatttcagtttaatcatagatcattccacaatttattatgtatttaaaggagaaattaaaagaaaaaaaacctaattcgagtgggtctcgtggacgatggcaaggacggtgatcagagaatggtttgttgggttcgagtggatctcgtgggtcactggggtgagtatcgagtaggtcgctggcttaagtgagggtgtgagctcgaatggggttgctagttcgaatgggggcgtgggttcgagggggcgttagttcgaagggtggctggttcaaatggggttcggtgcactagtgaaaagaaagaacagtgagaatgtgagaaagaggagagaaaagggagttagagagaatgggaggaattgaaaagagaggagtaacttaaaaaacaattgaaagattagaatatctttttatgtgtaatatttcggcttaattaaataccatagctaattgtttagcatgacttatcaaatttccctcacaaaatattttttatcaaaaaaataagatataaaaaacaaaaaaaaaaaaataaaaataaataaaaaagaagacaaaatagacaaaaaaagtacattttttttacttgcggaacatgcattcttatatatatatattatagataatataattt

SEQ ID NO: 327731 - DNA, 820 bp, Cannabis indica
agtcaccataaattctgcttcaatgatggaaagagcaaccacagactgtaattgagccttccagcatatacagttctagtttgtcaaaaaaaatataaaaagtggttgatttcctagtatcactattcgaggcatagtccgcgtccacgaaccctttcaactctaattctccttttcctttctcataggtcagaccataatcacatgtgcccttcaaatatctcaataaccatttaagagcttctaatgttccatgcccagattggacatgaacttgcttaggatgcttaaagtgtgagctatgttcgatcttgtgctcaccatcacgtacattaagcatctaagaaccacagcatagggtacatccttcatcttttctttttcttttatactgttaggacattgttcctttgataaaatgaactgtccccctaaaggaatggatgtactttttgcatcttccatgttgaacttctaaataatcttcttgatatagccaaactgcttcaaactaatagtcccttcctttcggttctgtgagacttcgataccaagtaccttttgaactgatccaagctccttcatcgaaattctctcttgagcttgggtttacgacttttgatcactggtttatcttttctcgtgatgatcatatcatccacttagagaaataagaatacagttgtagattatttcagattcttaaaataaaggcagtgatcatatgcagatcatttgaacccaatttgatgcatatacgtatcgaatcttttattccattgtcttggggactatttcaaaccatacaaagatctattaa

SEQ ID NO: 327732 - DNA, 505 bp, Cannabis indica
tcggatggcaaaatccaatatcatataaataattggattggatcggatgggtccaaatccattggatatgatccaatgaacacccctatatcctagcatttttgacgaaaagccttcaatagtaggagtcaaagtcatcctcaaaattactgtttcaaagacaaaaactatagcaaaagaaaaggttaaactatgttagacatattcaaatatacaatcccctctgttttttcggtgtatacaaaataacacaaaatgctataattgaaaaatgtaatatatatatacatatatatgaataatagaatatacagtcctcaatttttcagtgtatctcgacatctctcatgctctctctcaggcatggttcgacattggtggcgctcgacatgattttagactggccagtggtggtgggtcttagattgtcgggttcgactggttgtttgatgaaacagatagagagaaagaatagtaaaatttgtcaaaatagacttttgacaaa

SEQ ID NO: 327733 - DNA, 1681 bp, Cannabis indica
taaaaatattacaaatataatttctgtttttgaccatttatttaaataatttattgatataacactaacataacattaatctagataaatttaagaagttcaaataaaaaaataaatacatagagttcaaatattttagtataaattaaaatttaacataatattatataaaaatatatcatttaactcaatttaatataatacaatacaatacgatttaataaatatatcaaatgagactacacataattatagtttaatgataaattatgaaaatatatgtatgtttatttttagagttattatttgtatgtttaatgtcaataaacttaatttttataaattaacttaaagttattaaataaatccttatagtgcaattatgtataactcatagttacataagtaatttattttaaaaaaaaaaatgagtaaaatgtaactggagagaaatatatttacaacgatttgtatagtttggaggaaattttcacgataaaaaaaataagataataaaactcgacaattatagttttaaaggtagaactattatttattattattgttgaatggctcattattaattaataaattaaattaaaattcctgctacatatataataaatttaagataaaatatagtgaagatatcatttttgttatctagagaaattttttatttttagtatgagtaaaaattataatttaattttttatgtggaaatcattgtaactatagcatgtttcttattaattttgcaaagtttttaaaaattttacggcattaaaaataaaatttaaataattttttcttgatttgtgtgtgttatccttgtgtagaggtcatgcaaattttctctttatcgttttagttctatttgatactcagaggcggaggtacactgagggtgggcttaaccccccaacccaaagtatattaattatatttttaatatgtaatctaatttatgaatttgttactaagtgatccctcttaatcgaagtaaaatattgactacaagagaatttgtgaaatatattaaaataaattcaacttgtagagtgcaataaatgttttaaaaaaaaataatataaataattagtaaaattacagtcgaattttctttttaaaagaaaaaaactaaaaaagttaaaggactttttgtttgaatatcaaaacacctacaataatcaaatatcatcttaactttttattttattttatttcaaaccaagttacactagctagtcaccattttataaataagataatcatatatcattgttttattattaaaatagaaaataacatatatatcattaattagtagtagtgagtttgatcccttacatttaaatttgattccgctcctttagtggcggacccagaatttaaagtgaggggggcgtttaaaatgaaaaatataaagtgtagttagtgagatttgaaactttaccctctaacttatttgtcatttatcttaatcattacaccaaagttactattatgtctatatatgttgtaactaattaaaatacatatacattttttttccgattttttttttaaaaaaaaattaatcccaaatgtcagatttatatatattttttttagtaaaagatttatactctttttagagatggatcgtaaaatatatatagctagtgtcggtctctaata

SEQ ID NO: 327734 - DNA, 1909 bp, Cannabis indica
ttcaatgattctttgatctgaaaacatgtacaagtcaccatcagaagaacaatggtctgtgtctttcacatttgaagttgaatcatgcttcttttccctatattctttgaatttattattaaactcaacacaaaatcttttgatgtgtccaaatttcccacaaaaatagcacctcctgtctttgtgatattttcctctaaacattgatcttgactgagatctatgctggcccttgaagtgatctctctagtaatgatctctacccctggtattgtcttttcctcgagcaatgtaagcttcatctttaatcttgtctttttctttggaaatctcctattctttggattttaatgctctaagaacatcattaagggtaagagtatcccttccatacttgattactgccttcagctcttgttatgcagctcgcacggatctaaggagaatgacagcttggctctcctaatcaactttgtaattcaagtttgccaaacctataagaatttgattaaaagcatcaagattattatctagagacaaatgagaaaacattttaaaatcatataaagattctaacaaattaatcttgttagttagtgaaggtttcatgtaaatttcttcaagtttactccacaactctcaagctgtcttcatgctctgaacgtttctcctaactgtgttggacagatacattatgatagtgcaataggttaattctttcatatcctcaacttcttcttcttcaaattgccagtgagttcttctttgggttttaaagccttggtaaccttttgatgaacgagtattctcttcaggctttttgtccacaggcgaaaatcccctgttccattgaacttctcaagttcaaaccttgttgttctagtcatggcttagtacaagtgagttcctgactgaatcttgaacttttacttcctcagtatggatcttgaacctaagctctgtttttttgtaaatttggcatcaacaacaccaagattctatagttaaacctgcaataaaattgttaatatgaacagcaacaaatcacaaacatttgaacaacacaatcgataagaatagaaattaacaagaaagaaaacaccaattttatcctggtttcggtcctagagatcaagaatgatccctagccatactccagcttagaaacaccatcttgctttcattaatggagaataagagagtttacaaacacaaatgacagagcactaagctcttctgcactcgagaactcccagagaacaatcacagttctcacccctttaccccgagtacaccctcaattcttgacgccataagaacttgaatacacaactctaaacctaggatctcatacttagttcctctcactctattctcctcccaataaatgaaaaggagaagatatttaaatgtatatctctctaccaaaaaccaggtgcaaataacaacacctcataactgaactaactaacttaattgtcagagttagttaaagttaggtgagttagttgtaggttgttttagaggatgagttaccacatatattgtaaattattctgaatttcttaaaattttgtagggtatcttaaataacaataaagtatacaaacatgaaaagcatagattaaaaaatcgtctagatgttgaaataggtaaaggatgcatcagtgcatccctttttgatgaggtgtattgtagaagcacccttaatttattatgattatcataagagaatttctaaaaggcatcgtttgtctaatatctcgataagtctaatggtaaataattagggttttatatttatattatgagttaatcaggtaataagtgggattatgatcctactaatttatttcagcataaaatttaaattttgctaaaagtaagtaaataatcgtaatttgttaat

SEQ ID NO: 327735 - DNA, 787 bp, Cannabis indica
ctgcccgcgtgccggagtacaaggcccttctcaatccgaacaagaaccctaagtttggcgccatggttcttttccccgaggtaggttggcctccatctttgtctactgcggcaacgagggcgacatcgcctggttcgctgccaatactgacatcgtctgggagatcgccccatagtttggcgccatggtcctcttccctaaggtaggttatttttcctttacttatttcttagaataatcgaaagatttttttttttaaattgatatggtgatgattatgagcagcatagatactatggagaatcgatgctgctcgagagaagcattggttgatttcgccgtcttgatcattgagttaaagcgaaacttttggtaaaggactgccatgtcgtgttatttggtggatcatacgaaggtccaccaaaggaagtaagtgttcttcaattagtaattatatatttatgaatctaaaatttcttttacttttttgtatgacgaagatgttgtgaattaaaaaaacagtgttggcatcatggaagaggctcaattatcctcacatagccattggagcacttgcttcttcggctccaattcttcagtttgaggatattgctcatgtggaaacattttatgacttgatctccaatggtttcaaggtttctcaacctctctttactattttattttttgttttctactttatgccagtcaacacttttgttattcttcaggttatgctatctatttcaaagatagcatgctttttttttcttctttgtattctacc

SEQ ID NO: 327736 - DNA, 1046 bp, Cannabis indica
tctaacataaatgaaagtttaagagatgtacatagcaaagttcgaagggcgtaatttgatagatatcgaaatctaaagaacatgatttaatacatggataatcacaaaactagtaaaattgaatgataaaaggatcaatgtcttttaatccaacaatctcaatagttcaaatgaacttttaacaatcttaaaaatttacgagcataatttggtacatgtcaaaattttttaaaaaaaatttaaatagcctttatttttttttataataaaaattcaatctttttttttcttatatttttaactttgtccatttattttaggaacatgataatttgcaagtttagtcattttgggagaaaaagctagaaacatcaattatatgatcacaaatttgtagctcttaaattaattttcacgaaagaaatttctatagtagatcttttaaagggtcattttgataaattttttatctgatttgtcatctaaaaatttgtagtttatttttttttataattgtatatgttgtacctacttaatactacttgtaaattttttaaaaattctaaataatttatagtgctgaagaataagatttaaaagagtttaactgtttaccacgcctataaaaaaaaatgaagcgtataataaaatataaaaatttattttttatattttaaattagtcaaagaaatttataagtgatccactagaatacttcttctttaaacttaccctatagtatatatcataactattttcaaattttgctaaaaaaaagtgcaaatcgttaattattgtattattttattaaatattattatttatttttgtggaatttccacgtcatcgtacggactgttgaaaaggatgtatgttgtttcattctcaaagtgtccaaccaacactaccccatccaccgacaaatttccttcttgggaagtctttttctttttattttaaaaattacaaataaataaagggaaatttgaatttatatccatattttgtacttaaattaattttttaaactaatacttatatctatt

SEQ ID NO: 327737 - DNA, 636 bp, Cannabis indica
gtatatacattttaattaattacgatatatatttataataaaaaatgatatttataaatataaatataaatatgcaagcattattttattttatttaccattgcatttgttttttctttcttcgtaattattggatttatttattagaaaagacagcataattattggtttcaatttactcacgagactcacgagaatcatcaacaaattatattattgtgaaaaatgctaagacatcatttaaaatgttatgtagctgcctattgttaggtaattggtgggcaaattttgaagacttttaagttcgacatgttctaacttctatattaaaaaaaacatggttactctctaattttcacaatcgttttattttagttattttgtctaatttagtctgttacagtactctaatggtaaaaaattaaagaatatttactgaagtaaatatataatgcgacaaaatattgagatgttatattattggagaaaaaataatgtcatttcagagatttgcatgaatcctatcaggacccgctctatgttaatttgggccttaggcaaaaataaaaaaggtaacttataaaaatattagattttgacttaatctttatacaaatactgccacacggcaaaaat

SEQ ID NO: 327738 - DNA, 600 bp, Cannabis indica
ttaataaataaaaaattagttgacgtacaaacttagattggtttaacacagtatctcgacactaggagatcttgattccacttccgcattagtagacaatgcgaaaactccaaagtggaacccatgggcatcttcgagatctacccccaaccctatccctcactccaattacctccaaactctgacccacacctaagttttaattttgacgacgtcacgaaaagtataattgacagagagttaaattgtaaaaaaattggtatgaaatatcaattcaaccctaatttataattcaaattccataaaactaatactcttaaattcaatttacaaattcataaaatgtagacttgtaagaaataaatatcaagttcttaatcattctaaatcagttacattctaaatcagttattatgaccaaatatgtatcactacagttatatttgttgcattaattttttttttttctagaattttaatacttaatttattcaattttgatcgcattcatcgttcctcatgccataaatttaaaaaaagactatttttttttataattagctatcaatttaattaacactctgataatagacgtatcaa

SEQ ID NO: 327739 - DNA, 1250 bp, Cannabis indica
gacaaagaaattctcaaagaaaaaatatggaaaattgatgtgttgtcagttgagtcatttcattccccaaaagaaaaacataaaacttttatttcggtatacacgacatggaatgattacaaaatttccgctattcttttatattaataaaataaagtgtatttttataaataatttaaaaaatgcgtatctccaagtaattttctctaataaataatcgaaccaaacagaatggcccatcgcatacgtggagcccattttggggagagtgggctacgagttcaatgtcagaatccatacattgggtttattatgggccccaacggaatggcctggaaacttcaagcttggcccaacataaaggacatcctcttccacaaatatcactactatgaattcgaagtagtggtaaaaacaccatgaccttggacttggtacttttagttttggaaaagggtcagaagaagttgaagatcaagtagtaaactaaagaaggatacaagttgcaaagctcatcagaaggtactttgaatttgtggcttctgctccataaactttgattcttttatgtgtattcattcctaatttattttatttaattttctggaaggcaattcttttgctttaccaagtgagtttgtgaatacatgattgatcaattctttgcagcccaagtggatttgttaaagacagccttccctatgagaaaagttaggtaaatttgttgactttactcttttagtacccaaacttgaacgtatttactattcttgattagtattagaaatatgtagtttatattttaaaaatctctacaaaagtctgtcttatgaaaagctgtgtctggaattggatccaaaattatctcttattgttttgagattacaagttcacttgtggagttcttcaaaacattgggctaaataaagatataaaacggtatataccttagtgttctatcccaaaaaagaaaaaaaaaacttaattatataaaacttaatattagtggagagaatatgtaaaatttgctaattatataaaatctaatcgtaatcacaatatttattttgtttattatatatcaaaacttgtttaattaatcatcaaagctttcatagctcagttggttagagcacccgtttagtaagcgggaggtcttgagttcaactctcaatgaaagcaatttttcatttatttttccaccacacaagttttgcccatctgactttctttttttacaaaaaaaaaaa

SEQ ID NO: 327740 - DNA, 585 bp, Cannabis indica
ttttttttttttttatttttggcctaatgtaagcaccatttatcaaattttccaatcaaaacttagagatatgatgtaattgtgcattcctcctattttgccaaataaaaaaactataacaaaatatatttctagagattttgtgtggtgactattttttttttaaagaaagtcttgtgaattactaggaccaaaaccacaagactagaaataaggcaaagagtcatttcaaacgaactcactattaagccaataccccatttagcaacattgtgcgccaaggtattataatttctgctaatatgaaccactttgaggtttggacaaggagataacaagttcttaatacaagttactagatcatttaaaatattacaactccgattacaagaatacaatttatcaacaatagacttgcaatctatttttaaaatattactagtgattttgtgtggtgactaattttgtgccatatatagtggctaatatgtaccttgtttgagggttgattgtgccatatgtttttttttttttttttttattttttttttaaatttttattaatttaaacttatttaaattttt

SEQ ID NO: 327741 - DNA, 697 bp, Cannabis indica
agtcgagtactcgccattctaggttgaatactcacacttgtcattacccataaaattctctttcatattaataaaataatataatttggtgttgcgaaattcactcgacaacaataatgaaattttactaataataataattcaacaacctaacaaactttaagcaaatacattaaaaatacaacaaattgaaaggagagggaaaaaaatgagtgtgataatgaagattgccctaaaattagagggctgggctagtatggtaaaatagaataattatatttaaaattttgatatttttataatagtgcggtgcagtattaacagtagagaatagagatgcactaagtttgagatttttctctgcttaagaaaataaaattatgctggtgacaaatcccaaatattgaaaatataacaattttcatatataaaacatctgaacttatccggtatcatacactattataatttataacaggtacaatataaaaaagcactttatcttccctcatatattattggaccatcgcagttgtcttttcctttttgtctgtttcacctcatcattaccatccatttcaagacattcaaatagatttttgttttttgtttttttcaaatatgtatatatatacataggcaaccgaatttgtgccctatcttgtaaaattacggattgtattccgttgtactgtat

SEQ ID NO: 327742 - DNA, 686 bp, Cannabis indica
acgggcagtgatattgactataatggcttcatattcttgtcccaatcctccaagaatgtacaatatgagatcatcattagagagttgttgtccagccgcagcaagcgcatcagcataactcttcatcttcaagaaatagtcatcaatggaggatgatcctttcttggttgcttgcaagagaccacggacttgcatgatgcgagctcttgatcgtgaagcaaagatttgagcaaaggtactccagatctcgtgagaagagttgcaattgataatgtgtccaagcataagttcagaaatagaattcataagccagtgcataaggaactgatcaaacctcaaccattgaagatattcagggttagaaatattaccttcaaggaattgaggcggtgggggaagagttcctaagatgtaaccatcaagattgtatgctctggttgctgcaagaaccagagatctccaaaatgtgtaattcgatctgtctaggcggagattgagcggaagcaaattgttgttgggtaatcctgctggtggagctcatttgcaggttggatcggatgttgagcagtcgtaggagcgccattgccgtcgacttggccttggttattggaggaatttgctccattcgacgccattgataggtatctgataccatgtaagaacagtggagagagagagagagagag

SEQ ID NO: 327743 - DNA, 646 bp, Cannabis indica
aaatagagttttattagggtacaaagttcaacactaagtaggcagtgattacaaatgttctccatacttaatgtaaatattctatatagggtcaattgttgtctgaattaaaacaatgtatatttcataatatatctatatttgagatattgagtgttgtatgtagtcaagaataaaattctgagtctatagtggagtcatgagaaagtaagaagataggaaatttacaaaggtaaatttcagatcaacttattcgagcttgattatataggcccatgttccccaaaatgtgttggataatatcatcttgaagaattcaagtaactaatttgaatagctaattaaattcataaacttactatgtcaatttttaagaatttacaagaagattatttttgattgagactaaaagagagaagttttatttattaattatgacactttgtgagtctaattaatatgtatattgaaactataatttatttaattattattcatatttattaaattaaaagaagtaggactgaattaataaataattttgtaaaaaataaatttatttctaatcatagcatgatataaaggtggcgtttggtaacacttttttaatcagttttctgtttttaaaagtaaaaaagtgaaaata

SEQ ID NO: 327744 - DNA, 1066 bp, Cannabis indica
acttgtttcccgtgacacgtggacatttcccatttgtgctattgtgttattacttggcagaactctcttatctttctagtttttactcattaaatttactaaatttccactcgagatatatattcaacaccaataccctacattacatattaaactaacacatttttttttccttgttatttaattttctcttcttctattcttttctttcttttctccttacaaaaaaaaaaagacaaaaacaaaaattatttttaaagcaagattatgtaatatgaatggctcttgatctaaagttattcgtcttatatttttgaacttattcagattcaattcaattatatattaaatgttaattttatcaactaatctgatttaacattcattaatatttaattggattggttctatccattaaatatatttcatgtatatttattgaattgatttagatttatctaatattttagacctatatttactaaatcaaattagatttccatgtaatattttaaacttagtttattgaatttgatccatccatccatccaataaaaaatataaaattttaattctaatttcatatatacaaatatattttttaagcataacaacataaagttcaattattttttcaaattaaataatatactaattagttcgattagatattaaatgtatttgaaaaatggcatcagatacaattataattgaatatctaatatttggtcgttagttgtaattaaattagatcgatttgtacacacgcttataatctaacaatttaatttaaatttaagaggaatttgctataattgtactatagggaaaacaaaaactctagaagaagaaaattgatatagtatttggtaaatataaattttaaagtgttgcaacttaaaaaaaaatatataaagagtgtttagtaaatatgacaatttaaagaaaaggttttgttaaatattcaagtaacaaaataaataccatatttattttattttactctataataaaataaagaaaattgcttatcttcaatcacaataaatgtctacacacatacaaa

SEQ ID NO: 327745 - DNA, 1049 bp, Cannabis indica
agctcttgctattgatagcattaaccaacacaagacaatccgactccaaaatcaccgctgtaggtcaaacgtcctcaaaagtcctaccttctccccaacaggatttgacccaactcaaagcctccttcatggataacttaattaattattatatatatatatattttaaaaagtaatatgtgtaaacatatttttatatttttattagccaatttattatatttccttatttttttaattttttaaaaacgaatatttactaacttagtttttaaatttagaattattttacgttttagtccttttaaatatttatgtaaaaaattaattatacaactaaaatatataatgaaaataaaattaaaaataaatctaagtataaatatatttaacgtagtattaatctagtatatataaatatgtatccggtagaccactaacaaataatataaatcatgatagataagatttgccttttatacaagcaattgcaagttgtagtcatatatgcttatctaattagttctccatcgtgattaatttcaacaactccccaccatgaattgattttggacggtggttttatcttaattttgaataacaagtcattatctatctattatatatatataacttaattaattttgtttgaaaataaaggagacccataaataggactaggtaaattgtaaaaaaaaaaaattccaactctccataatggctttaattcatctacttagtatatccaaatcatgcaccccgccaccattaaagctatatatacatttattatgttttatttttttttcacttaattcttggtttaattattagctagtgatatatacaaaaatgtttatatgattctaatactaaaaggaaaaagtgaaacttgatgagagatactcacaacaaatagatataatatatatggtattattattcattgtaatagtattgaataaataaaaattcttatcctaatgccactcattaatttatatatatattgataagaagagcatgggatgggtgtacgttgtctgaga

SEQ ID NO: 327746 - DNA, 717 bp, Cannabis indica
atgggctaccgaaaaacaagatgcaccttgttgacataggtagtaccaatcaatccatttaagtcctcttcaactgtgtagtcccatacctacacagtcttagaatcatcccacttgacctttcccaggcggtgtgggattgcacagcttacacggtattttcccttacggatcacgggactactgactgtcacactatgataaagtatttttacttttattttttttattagaattatatgtataataatggtaaatatttttaggattttgcagttaatatcccttattctaatatgttaaaattagaaagaaaaaataaataaaattgaataatttgagtcaaggatgggtatgggcccttggcccacatcccatgtcgaaggagggtggtacggatgattgatttcatggttagaactcatataaaccattttagcctctcatttctttttttcgtctacgtggtttccacaaattcatcaatttaaatattatacaaattcattttaatatttattatttatataaatatgagatttccaaaataaataaatcaattctctctctatttttcaatcctacgtttttattgtttttacttaggatccgtttggtacgcaagattggactggattggactgaaaaggattggactggactggacaagattggataatgctgaaagtaatcctgtgtttggcttaagaatggact

SEQ ID NO: 327747 - DNA, 640 bp, Cannabis indica
gtgtatttgtgaaataatccataatttatacctaaatttataagtcatatccttattacgtgtgttgaagactctcattttaataagttatgtggggtattatatttgatactttgattaaaaaagaaggtatttatcaattaaaattattttgcagttatgtttagttaatgtgtaataaaaaattgtagtttttaacttatcccgtgtaaaaattaatgttgttttaacactgttttgtatattgtaaattattataaatttttcaaaattttgtagaatgttacaaataactataatgaacacgtgtaaaaaaatttggactaaaaaatttttctttaaatgccaaaatagtacgagatacatagatgtaccttttttaggttcctttttgtgctagaagcaccccataaatatatttatgcatatataatacaaatgcaaaagttaagacttaagagaaatggtaaggggcaccttaaatacaaagttacatattattaagggtcaagatgcaaaatggtcctaaatctaacaattaagttaataaatgtccctttttaaaaaaaattaacaaaatgtccattctgttaaaagtttgataatgaaattacaattataaccttgaataattaagtgt

SEQ ID NO: 327748 - DNA, 1487 bp, Cannabis indica
tcatttaacaaaacacagggtctaattagtaacttttgcaaaagagagggtccaaaatagtatttacccttatttttcttatacttgtgccaagtaatcgtttaaaattggaataaaaaaaattctgtattgcttaaataaacagaaacaactattttgaaagtgtaccataaaattactctaaatttatttcgtccattttaggatgccaaccctcattatatgaaagaaaaaatgagacttgttcaaaagaaaaaggagaaaaaatgacgaatgagattgcactttctctcatggaggggttccatgaatctgaccccagaatcccaaaatacgaataatatttggagccaattagatatgcaagggggaatacatataggtggggtgtttggtctaactcactctatatcgcacaatccatctcctacccatatcacaataataacattctttatttatatattacatatatatatgtcaacatccttagattgtattgagatttcattttaatattacaataattattgaataaaattataaaaagaataataattttggggctgtaaaatacaaaaaaaaaaaaatggagctgtaaatgaactgtagctttcattatgtaaaggcactctcatcaatttttcttttctatcctttcaaatatatgattaaaattttattttttctattatatatcaaacgttttaaatgatattatatatcagcttttttatatttttactttatattatttaaatattattaatttatttaaatgaaaaataagataaaaagaaagaagttttttcatttttacactttaaaataattttttttgtaattttacgaaattctacatagtaacccatattgcaactagcgttgcaccctaaattgcaacaaaaattcgtatagaaactcctattgcaactagcgctgcaatcactttaaaaaatccaaaccgtaaatttaaaaaaaaaaaaagtaaaaaaatagtatataaagtaattctcctaatatatatttagaagatattaaaataatataaataaaattacttattatatatattttgaataaatattaatgataaaattaatttttatagctaatttatactttgtttattgcaacacaaatacaaaaaaaaaaggccaaatataattttatggtatattttagaccaaatttaatccaaaatgtacaccagagatggtctaatgagagaaaacttcaaaaaattataatcgattttatgagggattatgtgttaagaggttttttattgtataactagttttgttattaatttatgtttcagtgttttaggaattgatttcccctttattttttaattgtaatcaatttaaatttttgtgtgttacttgtttgtattcattatgctatataacctgttctattttagttataatcggttttgagttatttcgtattattgtatttttattctattatgtacactg

SEQ ID NO: 327749 - DNA, 825 bp, Cannabis indica
taaaatagagaaagtaaaattttaataatatattttaaaagatagtaaagataaaatgggagtggatttagctacaagtagagaaatattattcattgagttataaattttatattaattttttaaaacctctatttttacatgtaaaacacttttaatatatgtatgtgatattagtaattattttatttatttacattttttaaaatgaataaaatatattataataaataacttttaaatggtatagaaaagatacatagaagatttgatgtaatgtaaagatatgaagtaaaataaaaaaagtaaggttttagtgaagtattttgaatgatagagtagtaaggctaatgtagctgctctatctattggaacattttagaataaaaataccaaaaataatgtagaagagaaataaaataaaaggtaaatagcggcatatgtacctaaagttttgagtttgtaagcggcataaacccaatgattttttttagtgacataagtatttaatgtttgtaaaactataattttctctattttcgtcagtatagactccgttttaaatttattaaaaaaagatttggaagtaactgatactacatatttttcgtctagaccaaataatctaaaattttggtcttatatgtgtcctgtttaagacaataacagagtctgtactgatgaaactggaagaaaattacagttttataaacattgggtacttatgccactaaaaaaatcattgggtttatgccgcttacaaacctaaaattttgggtacttatgccactatttaccctaaaataaaatattatagttgtaaat

SEQ ID NO: 327750 - DNA, 908 bp, Cannabis indica
ttcattttaatttttttattttatttaagtcaggtctaggtacaaggtcaagtccgagtcggggtcaagggcttggttcggtgccagggccaaggccgggtttggatccgaggatctagtcagagtccaaaatattgattaagaaaaaaaactatttaacaaaatattaaaagtgattttttttgttttaaaattttaatttttaattaaaaattgaaaaataaaaatagttttgtacaacataattttggaatttttttaaattttaaaaacagaaaactgattaaaattgtgttactaacgccacctaaattacatatgcatatatatgaaagaattaaaaaaaaaaaagtctgaacattagttataggcatgtcattttgaaaacagacagaggatctattataactacagtttataataaaaaaattaggaatataaattcttaaagtaagaaaaataagaaattacatgtatatatacaatataacaaataatatactcaagaaacttgcatgagagcatgaacttaattactcacgtctcttatatatacacatatagataatttactcaaactagatatgattagcaatggattttggtatcacacgtaactactgcgcacattctctttgaagcttttattgaaaagaaattatttaatttattgcctatatgaaacaaacatacattgcaatacaaaatttaataaaattacttaatttgattacgaatagataagctctgctaattttatggataatgaggagtactaataaattggccatgtagcactttcaatgatatagcacttagcccatgttacatatatcttaattaatttaaaataatctatatatgaacactacaattgaaacaagaaagaagaaaaaaaaaaaacttaa

SEQ ID NO: 327751 - DNA, 500 bp, Cannabis indica
aaattgatgcatatcatatcatactaatacatggaatatctcatttgtgttataaaaaaggaataacctagatttataataatttgggaaaacaataaaacacattaatatgaatgctatgctgattttattttgatcattgttaacacacacatactacctataaatacacatgttttcatccttcaacatcacaaacccataaaagaagaaaaaaaaatggggtcttattttaagatttctatgattgcagttgtactcacccttttgtcggtgtcttttactttggagggtcaccgaattggagttgagaatgttggttccaaattagagtctaaagaagttggccaaaaagcaaaagttccatccggtcccaacccacgaaccccaccaagttctagttcgaatcttttacacgataaagaaaattcattaagatgggcccaaaaagcaaaagttccatccggtcccaatccacgaaccccaccaagttctagttc

SEQ ID NO: 327752 - DNA, 1899 bp, Cannabis indica
gaggaaaaccgtggagaaagtaacatttatcaacaaggtgacccggtttgagacaattggaacaagtgggtcgaggtttcttgctgcgagaaggttggttgggattaggtttggccgaagtagcagcaacaacgccagtattgccaagacagcgttgtcgttcttgttgaacgaccatggagaacaccttggatagagaaggcagtggctcataaagtaaaatctgagcccgaatacctcagtaagactcattgagaccaatcaagaattgaataatctggtgtcttgtataatagtcttgaaccttttgcatcgcgccgcaagtacaaccacaggtgcaggggatattaggttggtattcgttgagctcgtcccaaagagcttgcaattgagtaaaataagtggtgacggaattatcaccctgtttgacattgccaacggaggttttgagctgtaagatgcggggaccattgctttggttaaagcggtcatggagattagaccacatctcactagcggtggttttgaacatgatactagcagcgatctcacgagatacagactgaagaatccatgacatgaccatattgttgcaaatgtcccacgcagagcgagaatgatcatttggaggaggacggggtatggtgccttcaatgaagggggttttgtttttggcagcaatatttatagaggctgcacgcttccatgactggaaattttcttgaccagtcaagagaaatgaagcaatgagattgtttgggtgatctccagttcctagataaagcggagtacgctcatcatgggaaggtcgatcaagaacggcacgagaaaggccgtgattagcattaaacaaagagttatcattaaaagatacatggccttgatgtccaaggttaggaatattaccaccaagaagagcattcggtccgaaggtggtgttggggttctgttggccgaaggtggtgggaggggttggttggccgaaggtggtggcggggatagcggtggtgccagaaaaaatgggagtcgtctgttgcatcgtcggggtcacggtggtggcggagataggcggaagcgagtggtggtatggtgaagccgtgaaaggtggcgccggagtcgagtgggagtcaaccgcagctgtggagagaagtccgatcgttccactaatggggagatcggcaccggaaccagagccgaaagcaccagaaatgggaggatcggacgttggaggaggagctccgtttgtgtccgatgagatgggagcaaccggcggtagggcgggcgaagcttcgacggtggcttcggcggaggggatgtcgtggccggagatggcagagggctcggtgacagaggcggcggccatggaagatgaagaagatgaaggaagagggtgaaggaagaagatggaggctagggttcttgggttatttgctatctgataccataatagaaatgaaactctatattaatgctttagtaaaagttttacacggctgaagtgccaaagttgggaaaatgaatacaagctaagtatttaaagaggaaaagagggaagatgccctagagggaatgggccgaaagtaaggcccactggaccaataaatctaataaataataattaattaagacattaaaaatagttgacaatcaaaaactagtttaaagccaagttgatttagagttagattctaaacaaaaaaagaattaaaaatgaaaataaaaataaaaaattcagatagatcaaattcaaaaactgtggtttttcgaaatttgtaaacccgcaaaagaatcatattcttcttcatctaattttcaattcaacactttgtccttatgattttcagtttataaagaagaaaaacaagaataattactgataatttttaatttttttttttt

SEQ ID NO: 327753 - DNA, 1248 bp, Cannabis indica
aactaatagaaaacaaactcccactaaaattgaatatcatcaaataaaacaacacccatgtaatcaatatgctcttgaaagaccttgagtgtcaaaactttatttagtgggtctgctagcaataagtttggtccaatatactcgatagctactatcttactctgaactatatttttaacaactaaaaacttaatgtctatgtgtttagactttgataagcttctattgtcatctgaatatagaactgctaatagattgccacaatatacctttagcagtctttcagttccttacacaacctacagtcaagtgataaaatttcacagccatattacattattgtaggggtattcataaaagctgataaatcaaaactgaccatcaaaccgtaaccgaatttttggttccacgtcatcaccaaatttggcgattggtttccgttttggtttttttgacatggcggtcgctttcggtttttgaaatagaaaaatagttaaactaaaaaactaccaaaactgccaaaaaccgcaataaactgccaaaactgtccaaaaccgccaaactgaaaaactgccaaaaaccgtacggtcggttttatacgattataatttctaaacggttagtcacggttttcgtaaaataaaaaccgtaaccgaccggtcggttataaaattgtaaaaaccgaccataatcgaccgattttcaaccctacattattggttgtctcataacaagctatgaattctgttgcaataatagaatgagctatgagtgtctgcttagcacttttgcatgatatagctcttctagacaacaagtagacataaccaaaagtggatctcttagtttcttggcaacccacaacatcagtgtcaggatacctaatgatctctaatttttctaacctccgataagtgcgcatataatcatttgttctttataattacttgatgacccatttggccgccttctaatgatccatactagggttactcaagtatttgctcaatatagtcactatgtaccccagaattgaatgcgtacataccgagcatacataagaattctatctgcctaaaataacaaacaaaacaaataaaataatacaaaataaacaaaataagattaacaacacaaaatttatctacccatttgaccgttgtacatgtattcgcagaacctacttcactatggttgaatatttaagatattcaaacttaactagcatgcatattattacacccatcc

SEQ ID NO: 327754 - DNA, 674 bp, Cannabis indica
aaaataatatatagaataattcccctaaaataaaaataagttgaaaaatacaatttctaagtgtgtggaatcaaaaattaatactagattatatataatttatctattaataaaatttctatttacttgttatcaaaaaaaattctatttacttttttaaaaaaaaaaatgaataataccattaaatttgtttggtgaggtaaagtacacgtaacattactattgtttcatgtaattaggattagattcaatgaatctagaaaacataaaaaacaaaaataaatggtttgctatggagagagaaatggagaagacaaataatagaataaataagattaatcctatgaccttcttagagttttgtccatttaacttttttcaattgcaaaatttttccttaaattataaaaatcattacaaattttttcatggagttgtattttgatcttttatttaaataatttattgataaaacactaatataatgttaatttaaattatttaagagtctaaacaaaaaataaatacataattaacagtttaataataaattatgaaagtttgtatatacatatttacagggccggcctaagtattgggcagcttgggccattgcacaaggcccttattttttaggggtaagttgaaaaatactactttattaatcaattaat

SEQ ID NO: 327755 - DNA, 514 bp, Cannabis indica
tctacaagtcgtgtgcttcagttaaagggttgttcctctgaagtgcgttgaacgaatttattaattaatatcttataatttttattcaaaaaaaaaaaaaataacattatatcactatttaattaagacatgctcgaatggaattatatttcttgtcataaactaataattatagcaatatgaagttgaatttccttttcaaatttttcaaggcaagtttatatatatgataaaaaaatttacatagattaaaaatttaaaaaagaaattacaaaaatatgttttttttttttgttattttatattttgtttataattgatttatagttactatgaagttaattttcgttatgttttagttgtattcttactttttactgagaaagtatatttttgtagttttaaaattttattaacgtatttttataaataaaaaattttaagttataaaattataaataaaatataaaaaagagtatttttaaaaagggttatttgcggcaaaaccccctaa

SEQ ID NO: 327756 - DNA, 582 bp, Cannabis indica
tttttacaatttttgaagttgtatttttgtataataattactatattaaatagtaaataatatgtaatattttatcttttatctaatttaataatttatacatttaaatttttaaaataaattttatttttacaatggcgaattccccgccgtgtccccaccgcattaggggatttcccatcccgtccctaatagggggaataagcggggatgtgaattaaaattcttaacggggatggggacggggagagtactcctcgctaattctccaccccgtgtgcatccctaattgtgatgtctcaaagttgtgtctaatgtgtgtgttaatgcaagctaaaaaaagtaataattatgcttctcgacagttaaaatacatgataattttagttcattgtttgtcttaaatttaattctggatctcttgattgtttaccaacaaatcccaaaactagttttcacaatgtaaacatatatatcatataacatcaattgaagaatggattcccagaaaatcacaaaaaagaaagagttgtttttgtctttttataattttttttactaaatttgttttaccattttttt

SEQ ID NO: 327757 - DNA, 1314 bp, Cannabis indica
attttctaaattgatttttaagttcccatatcatttacaaagagaacacaactaaaatttttgaaattggataaatgtgcaaagagttatgcacattttgagtaaaaaaatttggacttttgccactgtcccttatttgggcttccagatggaaagcgggcttccggctgggacagttctagacttctagttcctaatggaacttttggatggcaactggaatttcgattgggataatttggactttcgaatgggagcagattacctagggaaagtgcccaacatctaaaaatagctaattttcttcccgtctctatgtaaactctattttctctcaaaaattaaagttgtttgtgttagtattgattatattacatgtctaaaaatgttctaaacttactttgcattattctttcataaacacactaaccacacacacttgagtcgaacttgttcttatcttctctattgtgcttacgattctctctatgatttcagattgtattttatcttattagagagagtttactttgtatttcaaattaaatatccattgtattgagaggtgatgccaacatcggtatttaaaaaactcagttgtaggtgaggctgagactaattttgtaaacaacccgagtagagtgagactgtcacttcaacaatatgagagtgagattgtcacttcaacaatctgaaagtgagattttcactactataatctggtataaaggtgaagttggcactagtaagaaaaaatgcgattagtgagattgacacttgaacaatccggtgaggttgatagtcattggaaagaaaaatattgcgacaggtttgggaaaaaacttggtgaaaattccttggttgtaagggtcagtcaagctcttaacttggctcaatacttgaactaaaagttaggtctataactttgaggaccaagggcgtaggtggcttagttttactgaaatttgtaaaaattaagagtttgcattttatatccctaaactctttacatttctaatttactatttgtttatatttatgtttatttatgtgattgcattaaattagtttaaatttctaattcaccccctttagaaacctaccttgggctaacaattggtatcagagcaagggctcttagttttggatagatttcacaatataagagtatgtcgtttccaagtaattcgcacaataatatgctagaaggtttgagcacaagtagagcaatattttttgatggggtacatttttcttattggaaaattagaatgaaaacttatcttcaatctattgattatgatttatgtcata

SEQ ID NO: 327758 - DNA, 552 bp, Cannabis indica
tttttttttttttttgcttcaatagaagttggttttttctatcgttttttcaatgaataatgctatctttttcttatgacgtcaatctctatagtttagatcctctcctattgcaaatttcgatttgggaaaaggtaatatgaatgtgatagactccaaacaccattgttgttaaacttgctgtacccaccaatattgggattccgttttttgattaagttggaaagtaaatgttaacattattcgtctcagagttgaactatttttgataattgatacaacatattttctcgaaattctatacacgagttgttgcccataaacaagacagctgttgtgttatagtattttgggacttgggtaaattcataatattaacaaagtcccgtgtacaacaaaccatgctaaccaaaaagattaaacacaattatagtgaaaattataataacttgagtcgcagtgttgtctctttttcttttccttttaactttatttgaaaagtgttgatgagtaaaaagagagaaaaaagattgtgggtaattaataaaataa

SEQ ID NO: 327759 - DNA, 972 bp, Cannabis indica
tcaaatgcatgttttggagaaaattgcacagtaatgggcgacatgtcgcctagaagatttatggaattacaaaataaaaatattgtcaaagtcctaggcgacatgtcgcctaatggtgattcgagctttgcgattttggtttccaatcacgtgacatgtccctctagtggtaagtgacatattgcctgaatctttgcatgagatttaattccatagttttgtgaaatccaagaaatgactcaataacatgattaagtgatctaatcacatggaatagtattaatgacgatccctacagtatataagtgtgttaagtgagccaaaatgacttgatcactcattttgcaatctctctttaaacatgttctctagttctatccaattattttagagttttgctaaccctaacaatttaaggcttgaagtcccaaatcttattcaaaaaagaagccattagcaatccatgggaggctttgagtaaatattttatggatagcattaaacttaatgtgcaagccttcttaaagatttgatttccccaaactaaatttggttatctctaacatttatttgttgggaattattttaccaagatctagatttactaactattgggaatattttaccaggatctagatttactaacaagtatgttgaattaacatcctaaatatgaatatctctaaaataataaaattaaacacataagagtttaaaaaccttagattgtttgcagcagaataatatgactcctttcgctcagatctctaacccttgtccctttctgtcacagggtattatcaagatctgagtctggatctctttctctccttcgagtttggttaccactgtcgtccgcactatgattgagtacttgacttgctatgtgtggtcatgacattctatcactatgggcgagttggatgaagaacaattaaggaggtttcgaaattagtatagaaggtgtctctc

SEQ ID NO: 327760 - DNA, 894 bp, Cannabis indica
tgttcgggagaacactgataccacgtacaaatctcttgtgtcaagttatttaaatttctgcaaatatttttatattctgcctgttttgttttgtcgttgcaaaactggtttctgcagtaacagaattacattctgcttctgcaggcgtatacaattgtatatttttgtatatattattgacatttgcaaaaactcggtttttcaatatgcatattgttttataataattaaaaaaaacatagacattagaaaacccatatgatgcttaaaagaaaattagtgcctccaatattttcatattttaatccttatagtataaattcttatatttaaatcctcactgttttactgatatttttaaaaacgagaataagtaagattttaagaaattaaatgagcgattaaataacggagatggagatttttactttattcaggtgtcaaaagatctctagtctacgagtcaatgtatattttcctttgcacgctttgaatgtattaatataagtgaagttttacaacttgaagaatcctagtttttactatagtatcttcccttctaggtttctcttagtgaagaagatttttcagaagtgtttctttttgtccctgaagagttaaagggatatatataagcttagactcggctcctcgcatacccgtgacccgctagggcatctatgcaaagatagacccactattggggtaaatacattgaacacatgacattacggtccactacaagatgctaacttttgggcggaggcgtttgtatggtggactacccatatgatcttaacattgtcacacatgggtgcttctaaagtagacaagaatattagagggtcattattgacggtgagaactcgtcaactaacttagaggtcgaaaaat

SEQ ID NO: 327761 - DNA, 1025 bp, Cannabis indica
gagttactctcaaatgaaaccaacatacagtcatatttggcgacctcatccactattgcttcttcatcttcttcctctaaacctcaagctttgatgtctacccttgtttatattcctcctggagccaaagcttctcggcccaagaagaggaaatttacagaatagaattaagctcttcgtgaaggtaagagttgcaagaagttttgtcgtccacaaacctgtctgacacaaagacgtgaaagtctttaggctactgaggttgcagctctgagctctgctacccctgtactaccattttctcataaggtttaattaccccttcatctgggttgctcaccattttccccatgaaaaaaatatcaatcaaatcgtgtataatcccatacctatccaatctgttccaactaattttgttattgtgtatcctagaagtcagatcagcgtggttgattatgaggttggcactgctgtgataatcactgagactgaagctttgcaaaagcaccttctaggcatagtaatgaattcccccaattttctcacttcaagcctggatgatagtgttggttaggacaaggatggtgtcttttgtcctgataactgttgacaatgagaactcatccactaacttattggctgaaaaaatcaaactctatttcaaactcagagctaagatgaagaaaaagaggaaatataaattcaagtgtctatctcaaaatagagagaaaataaataaaaaattattactctcaatatggtggttacaaaaatgattttccaacctcttctcacatctaaggaaggagtatttatagactctaatggcttggagtacatagtggtcctaaggaacaaggtggcaaacatgaggtggaggtttcaggtggaatcctcacgccttgtacctttgtctggtgttagttggtctcgagtttcaaggtagtggttgcagtgtacccttggttgggtggctaggttgttcggaaatggtgctccccgctgttgggttttgtgccctaaataaa

SEQ ID NO: 327762 - DNA, 2590 bp, Cannabis indica
atactacacttgatttaaatatcaagagacaagattaattaaaatgctcttgttttatattagtgaaagtggaagttggttgtgattttaagccctaaataaaatctattctaatataatcaaattcactaattaataaaatattagaaaacattttatgttgaatggttcacctgattattttcatgattatatgtttaatatataaattttattaactcttaaacatacagttattcatgatcatagtgttgtctacacaaatataatcatgattatatgcttaaaactatttactctcacgatttatcagtatactagatttacactgacgtgataatcaactataaagtttaattacacactaatatgtggaatattctttctagggcattagcaatgtatactagtatcggattattggctatacatcagattggactgaaagtcacgttgaaaaagatatcataaacttaccgttatgttcttttttaagtcaatgttaattagttgatctttggtcaattgatctcaatcttgagatcattaagttctatcttaattgtactttaagggttctttgacttatttgttaaagctgaccaaaagaatttgcccaatacttacatcttgggaacttggtattttaattgagtgggagcgttaatcatagatatggaatctatagcttttattagaagtgaaataataatttccttagagattggctaaaagcatttaaataattgaggcctcattttggtaattatattagtttcttgagatatcatttacaagtagctaagtattttaaggataaaattcattgaagggtaaaacagtaatttagtccctattcaatgtacaccatctatagaggatcattgactattttgattgtaataatggataattcatagtgtatgtatatttagtatatagtgcattctatgtaaattcttaatctataacggagtaaggaggaattaataaagaaactttacttgtaaattttggatctacttattaggagcttggttacataggctcatggtccccgcactaactaagataatattgttttgtaatctcaattaattgatttaattacttaagtaggattttaaataatgactatgtcttactatagattttactaatgaaggaaataattgagaagaaaagaaaaataaaggtttatttattaattagtacactttctaggtctaattaataaatatatttaaattatattttatttaataattatttataattatgaaagccctaagagtaagattcagccaaagtctttattccaagcccatctcatctaaacctaaccctacgtgaagactgtaaaaagaaagagaagagaactttgtctgatgatgttttctaagctagaaaaccctaaaaagctcacttcttcttctctttttatttttgaaaattcagaggctattttctcttggatttcttcgtgaaatttcgtgctccttggtgttgaaaatatgtccacacatgtcaaagcaatacaaaacatagtgaggaagactgttatgaacacaatcaaaggaggagaagatctaggttaagatcttgatcatactctacaatagaaagaatcaagggttaagaatctgaacgaaaggtatcatattatttagctgccaacactataaggattacttaattcctaatgtttttacttatcgtttttaggaatttcatatttataagaagttagtttatagaattataataagcatacatattagtaaatctggatcctagtaaaatatatttcgaacaaaaccatctattatattggtagggggattggcctcaataacattgcacacaatagatggcttccagtagtttacctcttccgtgttatcctgaaaaccaattttcactttagctctcttgcttgaattcatcttctcaactgtcgcttgagagtctaaaagagactctacatatttggttctatcaaaacttctcttcaaattgcagactacgttagatctcaattttgggggagtattctgcttcccaacattgacatcttgagtaacccgatttgccaagctaagtcttgatgaatttttactttgtcgtttgaagatctccttagtttcctcaggcgaataaattttttcatagtagttgttaatgcagatttttgttaactaaatttgagcctcacggttataattctacacataaaaaataaaaagctatagaaaaataatatatgaacacatggtttttttacgttgttttgcagttaaaattctgcatagtccacgagtcaatcttattcagatttctaattgtgtttttcttagggcctctcttgtagaagatttatcgtcccttttttgagcttgtctgccactattcataattacatactggacagttaattacaaagttgaccagaatatgtttacaataatcatccctaaaattatgggatttgaattacatatcacgtagtgtaaatgcggtttatgatttaaaaattgtatagctgtgattttcccgcttttattggctcaagacaatcgtgtattaaata

SEQ ID NO: 327763 - DNA, 1908 bp, Cannabis indica
aggtcttccccttcgcacttcttaggctatagcttgaaccacaagggttacaaatgcctagactccacaggtcgagtgtacatatctcgggatgttctttttgatgaacactcctttcctcactccaaaaccatttcttcaccatcaattcctactcctcctgtttcagcaagtgctactattcccactgtcattaaacacaataattctacctctgagattgatcaaaatgttgtaatagacactgctatacctactgtttcttgcaatacaggtgctactgacagttctggtagatgtgtttctgtggcaggtacaggtacagaccatgttcccatagaaaatgcagatgcaactggaaataactcaacagatatggatctgtctccagtgcacacacctgaaaacactgctgctgttgcaccaggtcctgcactgcccacaccagctgcctttgattcaatcaataacacaccaattgcaccagaaaccagtgtgcctgcccagattcttccaactacagcaaccacttcaaacactcatccaatgaggacttgatccaaagcaggcatacacaaacccaaagcttttcttttatctagacttcctgtcaatatcagagaagctttgcttgatcctcaatggaattgtgctatgacagatgaaatacttgcattaataaggaacaagacttacactcttgttcttctccctcctcgaaggacgagcaataggttgcaagtgggtatacaaaatcaaagaaaatgctgatggtagtgtgaacaagcttaaagctaggttggtggccaaggggttccatcaacaaccagggtttgacttcactgaaactttcagtccagtggtcaaacctgtaaccattagaattgttcttactcttgctctctctcatggttggatcattaggcaacttgatgttaacaacgcctttcttaatggtgatttacaagaagaggtttacatgttgcaacctcctggttttgaggttccaggctcagctcacttagtatgtcgattgcataaggctctttatggacttaaaaaagcacctcgtgcttggtttgacaaattgcagcatagccttctcactcttggttttatttcaagcaaggcagaccattctctcttcattcaacatacaccaacatccactcttctagtattggtttatgttgatgacattcttatcactggaagtgatcctactgctatatcaaacttaattctctgcctcaacaaagagttttctcttaaagatcttggtcctctctcttacttcttgggcatagaagtcactcactcttctacaggaatgcatctgtcacaagcaaaatatgccaaagatctccttaaccgtgctgcaatggatggtgctaaatcagcctcaactccaatgactagtggcttgaagttatcggcttatgagggggaaccagttgacaatgttcaacactataggtcaatcgttggagctttgcaatatttgaccataactagacccgagttgtcctatagtgttaacaaggtttgccaatacatgcagaaccctttaacaactcactggaatgctgtgaagaggatcctcaggtacataaagggcactcaacacttcggtttacacctgcagaaaccttcttctcttgacattgtagggttctgtgatgccgattgggcatcagatccagatgatagaagatctacctcaggacacactgtgttctttggagacaatcttgttgcctggtcttgcaaaaaacaacacaccgtttcgaggtcaagcacagaggccgaatatagaagcttggctaatatcactgctgaaatatcatggattcactccctgttttcagaattgagtattcatttatctagtgtaacgtccccgcttca

SEQ ID NO: 327764 - DNA, 670 bp, Cannabis indica
caccggtccaaaaagcccgtttgtgatccgttgtgagccaaagtgccgccggtccaaacagatacttccgctgtctcccctttaacctccatttgggacctttcggccaatgtgtgccaatttccagtgttggagtctttgacctgtttcaaaatccacaaatttcccgacgtgtacacccacaattcggtcctgtggtctcttaaaggtcgttcgttatacccacacttttcaggcccaaacgtgaggagggtgtattaagagttagtcccacattgctaatgtgtgaaaataaattgtgatatataagataaaaaggctactcctcccatcgccaattgattttgggatggaacctcattcatcttattcctcaaaattctaacatgaccaaatgcacttttagtgacaacaaggtttcatcataattctatgtagatatggaaaagtctcctcccaaaataaatctcacccataggagcttttacacaaattacagatttcattaattcaattcaatccacattatttattttgttcatagtgcatccgatttgcatactaagtgcagattataaatttcggatctattccaacccgcaaaataactcaaatcagatccaatccaatttgcaaatcgattattttagattgattactttttaatatt

SEQ ID NO: 327765 - DNA, 1035 bp, Cannabis indica
taattatttataatttattaaaaataaaattgatatttaaataattagatgatataagtggtacaatatgaaatgatacattgtttcatttaaataaaataaagtgcctaaaatctagggaaatttacaaaaatactcgaatttaggttaacttttacaaaaatactgtcacacggaaaagttttcaaaaatactgtgtttttataaaacaccagtagaatacaaaacaaaacaactcaaaacaacagtagaacaactaaaaaatactggtagaacaccagtgaaaacttaacacagtatactgcagtatgaaacttatagaaaaatacaataaaaaagtaaaaaataccgtctggcagtatttttgttaaaaaatgacaaaagttagtataccatgtaaattttccaaaatctaactctaaggcccattgtataattcagccctatagttgatttaagcctatgtattctatttcagcctatttcatctaacctaaccctaagtgaatgcctatataaaagatctaatctaacctaattaaatgtcagacaactttctcctgttcattctttattatgatgaacacaatctaaagagaagaagatccatattcagatcttgataaaactctgctacagacagaaatcaagagttagagatctgaatggaatgagtcataatattttgctacaatcactgtaaggatttgcacatccctttatctatttctttattgttttaggattttccatattaggacgttagattagtataatccaacatacatgagtaataaataagatcctgataaaatattttccaacagttatggcttgtggtggatgatgaggaggatgtggctcgtcttgattgtcattcgaatgagagacagcaaggatggagagagaggaggtggtggtggtggctcaccactcagacgagagagcgaggatagagagaaaggacaagaaagtgaggatggagagaggaggtggcggtggtggatcatcgcggttgagagagagagagagaga

SEQ ID NO: 327766 - DNA, 827 bp, Cannabis indica
cacaaatgcaaagcaactagagatttttttttctaatcgtaaatttttttggtaacttttcctaatgcaactaaatctcaccaaatgcagcttaaaaactttgcttcagtacaattccataaaattcatcaaaatttgtggtttacattttattgtactgtatcaaaaataaagaaactgctttgtcaaagagtgaaccaaaaaaatttctctgtaaaaattattgtttcatcaaactttgtggttcacattttagtccaaatgtactgctgaatagatttttttttttgaaacagtactgctgaatagattaataaggtacattacaccatctagaccaagagcatggacaagtacaaaagaaatctagactaagagcatcatcaagtacagttaagcaaaaaaataagtttcagtccaataaaattcttgccagaaaatttgtagtatatttctttgacattccaatagaaagagaccttattccaattatcagcatgaacaagctcatactcaacatgggaagagtatgccatcccagtcatttttgtataacatatgtgtatatatattatattgtgctcttcttatcttcactatgagaatgagatatctcaatcaccctagtattgcggatgaaagaaaaacaaacagaaagttttattgaatgaattgaatgaaggtttgtacaaagagtaggatatatatacaacaatcaggagcagtaactaacaaccgaaaagctaggaacagaaataactaacctaactgccaactaacacaacaataatttcaactaactaaaggcaataaacagagtaatgtgt

SEQ ID NO: 327767 - DNA, 337 bp, Cannabis indica
attaattttgtgtcactgggtttcacaaatgacgtacctgagaaatattctttattttattttaagcctcctatcctcacgatattaattaatttaaactagctagatagcttgctttgcttaattcatataaaatattcctcaaagactataaaaatatatttatttaatgatcatttgtaataatatatgaagttatacaacatttgaccccttattaaattaaaacaaatttattaggggtgggcatgatccaattcaatttttttcttcttcatttgattcagttcaattactaattagattggatcgttttttaaattggatatatatatat

SEQ ID NO: 327768 - DNA, 930 bp, Cannabis indica
ataattataataaaaaataaaaaataatgattccaaaccaatagtatgtgaaaattataaattaacttttaaaaactaattgaaattactatcttttgtcattgattacatcactctaaaactaagaatcgatcatatgtatattctacttatcaaaaaaaaaaaagaatcatatgtatattcttctatgaccactagagaaaaggagtttttaagatatatagattcattacctagatatatattaatgacaatgacacatcctagtgatgagtatacgacagcttcgtgtaacattgtactagctaggcccagcgagcatcaattgtctatgtcaccacttactactagtacaaaaatttgactatatttttaatatgttaggtctctcttaaatgccaaagacataggagctctacataaacatcgtttaggaatatactacatattttttttcaaaaaaaaaaaaacaaattttaaaatttattattttgttcaattctatctaatttgtttttgtcaattattctaagactagtaaatttagttgcacttagcacggttatataatagaataaatataaattttggttctatgttttaacaattattattcattctctttatttagttaaagagtaatttgcaacataaatacttaagtttaactctcagttgcaaataaatatctaagtttaatttttggcggtaacaatatttaagttatagttttggaactctgtaggtacctaaccgttaaaaaattatgtcattatccacgtgtcattttcttattggtatattttaattattttttttttaaaaaataaaaatttaatgactttgaccaattaggaattgccacgtgacaatttacttaacaattaacagtcaggtacttacaaaagtttcaaaattataacttaggta

SEQ ID NO: 327769 - DNA, 728 bp, Cannabis indica
atgtatcatgcctaacatttgagcttgtttgcctgcaggtgcgtttaaactgacttgctagctcggtgtgccagcaagtaccgcacgttccgcttacttaggagtgtctaaatagttagcccgtgacacaccacaaagaattcaaactgtatttttttttgtggtttgagcgatttgatgatcaaccctaattttagcaataaatcaccaatttgcatcaccattgaagatgctcatgcaaaatttgaatcgtgatttacttttttatttacatttatgttatttattatattattttattagtatatttaaatatagctttaaattatgaagtaaattgtatatatatatattttttttttataattttacatattaatataataataaattgatgttaaaattattaattttatatttttaataaaagtttacatcgagttttgtaattaattgtgcattgaagcacaatgctaaaatttgacgcacaactatcacaaagttattttttgtgccaaaaatatagcacaatttttacattaaactattagagatgatcttagtagcgtttgattgagatgaatgagaacgaaaatgagaatagtaatagaaatagaatagaatcaagtacataagaaaaatagataaaaaaaataattaaatttttaggtcatcttgcattgaattatcattaatccttccattttaatatgaaatagttattttac

SEQ ID NO: 327770 - DNA, 771 bp, Cannabis indica
attttaggattttcaaagtttgagataatctctccttagctttttctaggtttttaaatttaatctcttatttgggttctgggtttaatctctctgaaataagattttggtctttcagattttagttttccgatttgatttcatatcttgttttatgtaattttctttggaactagttccaacttttgcaaagtgttgcaagttgatcacaggaaacatattttttttttttttgtatcataggaaacatatcagtcatatataaatataaattgtcaaaagacaaagcatcactaaaattgtagcctaagaatttacagtgggtgatgagatgaaaggatgagagttcatcaatgattgatttgcagtggcaaatccattcttcattcttccacatatattggctctaaccttaacattatattcttcagagggactgacttgggtaacataaattattctcaccactaatctctagcaaatacattatgtgaatcaaccacaagcaagcacatcagaaactatatagattcatgcatacattcatgaaaagtaattgttattttgttttagaaattttatgaatagtcttatatttacatgtagatttaatagatggtaagaaccattagtgaagtgtttattatcgacaatggcgaagcttctatttggactgaaaaacatgaaagaaaaagacatatttcgtggcaaactacaagtgtcctttccctttttagttgttgggtaacacaacaaatacacttccaattt

SEQ ID NO: 327771 - DNA, 1866 bp, Cannabis indica
tgtccctctacggctgttgggtcaattctcgattggtctatgctattcgggttttaatactttcttcttctcctcctccgaccaagccaactttcttgatcttactatccattcttctgggtactctttattctggtttcatggtaattggcattggatcagctttagctagcagaacaaagttaaactccgtatacatctcaataatcctgctaagccttgcatggacgatgcttgttataagaaacacaatgctggcttcaatgtcacgtgcgaagtacatgttcgtggcttatatggtggacctcaaaacaagcttggctttgtgcgacacacttaagcacttgatgggaagcatctgcataggttcattcctagtgccgattctaggaaccatgtggggttcagccagatgtattgacttgttacaagaaggcccaaatgaactctgttgttcatgcgccaagtgctatacatgctgtgcttccacgctagtgatgtatgggaaccgatggggcttcgttcatgttggactccacaacaagagctttgttcaggcctcaaagtatgcttgggacattttcaagaagaatgggttggaatcagtgatcgattctgatctgctagctctttctgctttatctctgctgtgcaagtgggagcaatcagtagccctagtgagcggaatatggggcacttgtgtgcataaagagctacgcacagactttctcttatgctttcattattggttacttgatagtaagtaaagtacgagttcaattaatattcattgcttgcttcctctgttctattttcttgaagttaactatttgaatatcgttttcaatgttgcagagtcggatagcaatggcatggcaacaagcatgcattgcagcttactatgttgcttacgcagaaaatcctgaaaacatggaatttgactccaccattccagatcgaattcaaaggcttcagagacttcaagcttgcatataaccacaaacaaagactactgtccttcactattccagaaccagtcgtctaataactcttttttcttctcttttatatcctgaaaatgggctattgataattgtacatgtgattcaataattgagttacgaaatgttagaagacagtacattgattcattatgttctcctaaatctttgcagatttgaacgtatatgctaaaactgtaaaagctcgtgcatactccaattgttacggatctgaatccttcattttaatcagtttctatcttcctagatttcaaagtaattgtgcctcgacaattcattctattctggtattgaaacatgtaacagaaaactaataataattaaactttaagaaagaaattttgaggttttttttcttcaagaaacaaaatttttcctttttttttttaataaatgatgtaaaattattaataataacaatcacctaaatacaatagaatattttttttcttaaaaacatgatcagaaataaaactaaaaaaatatgttaaataataacaaaaagttaaaattaaaatcatattaaaaagattttagcaataactttaagaatacctgtatttgacaaaatcggtgtaagaagtttaaaatttggctttttgattgttaaaaaaaaacaaaagggcgaataaggcttatttctccctagtattttttttccttttctaaataatttggaaggctcggaatgatatgctttggaaaagtaaaagttgtagtactgctgatgttgtttggttggctcgtatcactcttcgacaatagatgtgtgctcaggctaacaggctggacttagttccctggcttctaatcgatctgacacaagagtgttgggttttatgcc

SEQ ID NO: 327772 - DNA, 839 bp, Cannabis indica
cgtacttgtgtataagagtcattgaagtgggggtgttacggtatcaacctagtgattgttgtagttttgacttacgagtatatatgtgtatatataaatatatttatattttcggctttaacattgaaatgctctttgttggttcaggtgttggaggatattcatgatcaagctttggaatcatggtcttcttgatgcttccactatgaacagttgtaatataactctggagggttgtagggataaggcaaaggcgcctgttaatgagaaactaacatgaattaagctttgttatgtttggcctcaaatccaaacatttttcattcaaaatagtaggaaatagagggttacccttaatttattgcaatagcctttaatttatttaagtttaattagagtagaaagttcggcttacccttaatttatttactcttaccattgtattattcatatgctaaataatattatatattcttataggctatcacattttctattttgctgatttatatatatgattatgaggttgcaactctaaggttgtttttttcctttctaaattagagtgcaaacacatttttttaatacatatgttttgacaccataaattatttaaaattttgtaaaaactgatggaatatttgctataattttttttttttttttagaaaaagtactgttatattaatcattcaaacaaaatgtaatataacagataaaattgaaggtagacaattcttcaatcaaaatctctatccaccgatagagtaaattaggccaaaacattaaagaccttactctaagggaaattggaaacaagattttaataactagactaa

SEQ ID NO: 327773 - DNA, 842 bp, Cannabis indica
taaatcagaacaattcaaaatctcaaatcaagaaaattaaaagtttagatttataatctttacaaatatgaaaaatttaaatagatctatctaccattgttattgccgttacttagttactgaattcttaaacaaaaactactaaaatttatataaaactaatatttacgtgggtcgccacgtaactctcatctagtatatatatatggatcaatatcaaccatgcatgcatgcatacaacttgaaattaaacagaccaggaccatgaccaattaaacatattgtatatataaaagaggatcattattaattgatagttcggcaaaataaataaataaataatcaagataatattcttaaatagtcaaattatctagggttattattattattatagattttttcttaattacatcacttaattaaataaataaactattatttttccgttgaattactgacagactagaatgatttgccgttggatcaaattcttaataacctaaaatcaattttgcattggttgttcgaggttacttaattaaaactttttatcgattaattcagttagactttgggtgtggatgcgttttcctaatcttactatctcctatatttatttttatatagcctttagaccaaaagaaattataattgtagcttatgtgggacaaacttactattttgctagtgatataaataatttttgatatagtatgaaaaatgagaaattttttcattaagtagttatttaaacataaaaattcaaattcttctttataattacttattaaatcaaatttaatgatttaatatttctaaattgatatttatagttattc

SEQ ID NO: 327774 - DNA, 585 bp, Cannabis indica
ttttttttactttcattacaaatttcattatgaccgaaaatatacatgtttcaaataaatattttttttaaaaggaaaatgtaattttactaattattaaaatttgctaccaaatgtggttacaagttaattggaatagactctatatcgaaggtacaataaaaaaaaatattgaagctctaacaaagttatgagctaccatatttactgatcgtttaatgaacaaaacagagatagtattcaactccaaccagagttgtttacaatcatgaatgggtatcaatacaagagttgtttacaatgttctttttacattcatcacaaatttcattatggccgaaaatatacatgttttcaaataaatattaaattaagtatttcatgcaaatttttcttcttctttttctttatttattttaaaaaataaaaacacataaaagactttcttatagtaaggtttataaaaacagagactactaccaaaaatttcatataggttattcaccaacatatatatatttatactagcaaaaaattacgtgcgaggcacgtatacaaattttatgctagtttttttctatgtta

SEQ ID NO: 327775 - DNA, 720 bp, Cannabis indica
ttttctattcttacttttaaaaatacaattttaaaaactgaaaactgaaaatacaaccaattacaggctcatagtttgtgacttagtttaatttgtgttttgaattttagaacctaaatctgatatttttaagagtattcttgagttgttttcactgtttttgaatttggtttaactaattagttgttattgtgtaatattagtttagatctgattatttttgtagtctaatttcgagtttaagagtttaagtaaattgattttgtgggtagttgttaattttggattggtacattaaattcttgtagaagagaattggtacaaaccaaagcaagcaagaaagcaagaaaacgaaaaaagagagagagaagaatgccaaagaagcttaacccaatctggttagatatgtaccttcttatttatagttaactaactaatttgttaattggtttataatcctgattgtataatttttgttcctctaatttaaggcgtttggtacgaggtgttcaaaataatttgataatagggaatattatgaaagagaatatgattataggaaaatgtgtaaactgtctttggttgtgtagggtaatatgtaatcatattcctattaattaaattatactgtttggttgagtagaggaatcttatatattattttaaaaaattaaaatagaaatattttttttattatatctatttaatgttaattacata

SEQ ID NO: 327776 - DNA, 1629 bp, Cannabis indica
aattataaatcaaataaacatataaatgatcacatgaaccaaatgacatactacataagtgatgaaaatacttctgtttctttattgataattgaatggtaaagattacattgaaatagagttttatttagggcacaaagcccaacatgtgtctcatgagttgagtacacactgtaatacctaaatttgttcatccaaataagatctaatagcccactctattcctaagtgttgagactggcttggaagatcaagatgtgaatttttcaacaaagttgttggattggatgatcatggatttatacaaaaagaaacaaggatgccttgatagactttaagaggtaattgattttcttttagtagtttagatttaatctatatacattatgttgagatccttgggattatgattcatattagatcaaaactattttatttttatcaaattttgcttttgcttttataactctgatatggaccataaaaaccaacagtatctaggtaatttcacatttcaaattttagattttttttcccaagagagtataatcattacaaatgggagagtacaaccatcaacacacggatgaagatgcaactttcgaggagaagtaataaattctcaaagatacgaagggacatccctattcacacgcttcatagtctaagcacgcatcaccccattcacctagcacgtgggtcgagcaagtccacttacaagcagaaagttcccacactgacttgggggtcaaatgtcatcccaatttccacacagagtgacatgacattcttttgggtgacacgtggagagcattttgtgacctggacgaactgtacactcctcggtatgtcatccagagtgatttattatcaagaaataactcatttgaagattggtatggaacatccgcacagggtgaatgaaactgtctgagcagcttcgaatgtcagagaagtcacacactccgaccagggtgaatgtgattgaggcacagttttagggatattatccatttacatttttcaattaaattcctattttggtgggatttctacatgttgtaaatataaaataggaaactagctaagtttccctttttattcctaattgtttttggaaaaccaaattgatgtaatttttccctataaatagtggagtcattccattatacagggattcgaaatcatattttctatagagctcttacgctgtcaaagaatcataagcttttcttagatatttttaagaaactcacttggctagttccttttaatcatatttagggttgggcatccgatccaatccaacattttccttctcatccgatccaattcaattagtaattaaatttgaaaaatcatcctccgatccaatctaattagacctcaaaatctaatccaatccacgaaacatcatgaaattaaatacacaaaacaactaagtattacaaatttaacacaaaaaaaatccaacaaaaatataaattaatatatattatggctctgtttgataacacttttaaaaattaatttttaatcaaaattatgaaacaccgtttgaaattagtgttcagtaactgattttgtttttgttttttaatttaaatcaaatttaaataaattttaaaa

SEQ ID NO: 327777 - DNA, 1300 bp, Cannabis indica
tgtaataatcaaataaatatataaaataactatgaattcttgtgaagtagattttttttttttttattattatttattaggctgggtagagtttttattgttgaattgtgtcattttcatatctcttgagttttaattttactcaattggtctatagtattattgataaaatactaataaagtaacaacatagagaaacatgcataaataaatgtattatttgatgaagtaactgtgtaattactatataattgtgtttggatataaagttgtaattacacatgaatttctaatattttatttggcaaaataattagtaattacatgagaaaataatattttttagtaactaatatttaacattgaaagtttttagtaattacacagtgaaattatattcaattcacatggagtcatgagaattggagagtataattggaacctctcaattacttccaattacacaattaaagtgtaattacatggtcagacaaataatatcaaattatataattatatctaattacagacaaatttaattatattttgactttccaaatgtaacctaaaagaaaaatgtataatgatatacaaaaaaaatatctatgtttgtaataagttagaataaagtgatatttagaagactgaccagttttgcaccttacgtgttagtattaaaggtacacatgagattccgtacagttccctctatttactttaagttaagaaaagaaaaagtgatctcaattagattgaatgacatgtcatcgagatcgattttaaatgaaaatataaaactcaaaatgctttttatcacagtgatttggagtttggaccatttggttgtaatgttacatagtagaaatgccacaaaaaaatgttacatagcaggaaatacaagtaaatgtacatctaatattaatgatataaattataattaataaaattgtataactcacacgagattttaaatttttaatatcataccgcttatttagattgtttactaccattgaagaaattttattaatagtacatataatacttttttgttggttagtatgcgattattctctgaattagataataatgtagaatttgtattttgcaaataaatttaatcaatattttagaattaattttaatcaataattttttaattataacttaatattaagtttgacttacatagtaattcttgaaaaattaagttagtattaatttattaaaaagtaatttgacatttttgaggttatggtattttttttttgagataaaatggtgacattttattagcaaa

SEQ ID NO: 327778 - DNA, 699 bp, Cannabis indica
attataccttagttgatttccagcccctctaggatctagctctcttacatcatggaagaagtgaaattagtaaaaatgaatttacaaattataattcaactcaactctagaataaagatgtaaggaccaattaaagcaaataaataaataactacaggaaaacaaaagtctcaaataattcttaattattgatgcctattcctataattcattaataacttgtgggtattattattattattattattattattattattattattattattattattattattattattatttatttatttttagataaaaattgtaagtattttaattctcaacaaaataatttcttgtatattattaatcttattatttttttcttacaatatttattataatttaatgagacgataataattcgacacgtgttaattttgaataagtaaacgaatttgttaaagttgagactaacggacttacaaaatatatgactttaaggactattaccgctatttttcgagattatgaattaatctgcattaaattaaatttttaaaagactttcgttgcaattatcttttataattttatgtaattttatatttttttattcatttaatatttgtttattattttacccaaaattaaactataatattaatattaggagttttttcatttttacacttcaaaataattatt

SEQ ID NO: 327779 - DNA, 997 bp, Cannabis indica
ttaaaaaaaaagttaaaaaacagtatatgagataattctccaaaaaattattattttatttattacatataataaattaaatgtacctcactctataatcaatgaaatgtcacaaaaaatacttttagtggtgagagcaaagaattttcctgaatattctatcaattttaacatataggaaagttatttagtattttttttcattgtgtatgtaattatttaagattatttataaattggagaatttttatttttatattttttttacaaagtttataaaaatatgatttctccttaagtgaaccatttatttttattatttttcttatgtatatttagatttttacataaattattaaaaattcataaaatatataattttacttgtaaatttttaggaaaaatactatataatttatagtgcttaaaataatatttttatcaaaattatccaaaatcataaaatatatataattaatgatttttcctaaaagctttagggtacttatccaaaatcataataatttcataaagagtttttatatcaatcaacttaataaattaattaattagttaattcttttcttttttttttttttaaattaggtagagattagttttgaaacatgtgcatccaaatattccaaatcacctccacgtgtgctaggacccacatagcatgagcccttttgtaatcatcttttattattaggttcatttaataaattcaaaattaaattgtatccccaaaacaaattaaaaataaaaataaatttgaaaaagaaataggccgacaaaacagagttctaggaaactattatttaaacccaataaatagattttccatataatgtttgatgacgtaaagtgagattctaataattaagcacctttaattttttatttttggaaaaatctaaggatctttaattcattagccgaaaaagaattttgttctatacttgttgtcacgttttaaatgatgacaaaatacaac

SEQ ID NO: 327780 - DNA, 641 bp, Cannabis indica
ttttttttttctttttgatttgatgttatgggtttcaattttaattttacaaataaatttatatattctctgtttcttttgttgatttgtttatttataattttattcataataattcaatcacaggttccgttttatatttattctctttttttgttgattttttgtttatatattgttacgggtttattcctgctataaattataatttttttataatatgtttttttatatatttttttaaaatttttgttggaaattttccatttaggctttttgagcaagaatgtgattgtttacatataattttattcttttttgttgaactatatgttatttgcttatttattgatgtttaaagttttcagtatatattttgtttattccttgttcatttgatgttgtgattttccatttttcaaatatatatgtatatactttatttttaattagtttttttaatatttttgtgtctatttagggttttttaagtttatattttgtttatttattgttctttgttattgtttgtttatgtgttgtttatttatgtatattttatagttgttgttttactgttttattgattttactattttatttttcaattatgggataataaatttagtaatgaagatttt

SEQ ID NO: 327781 - DNA, 533 bp, Cannabis indica
caaattgttgtagcagactcatcgtacaaaatactagacgaaatttctttagaaacttaatggataatccaagaaataacaatattattgttacgaatccaagcattataaagagaaacatcagagcgaaggggtttaggaatagaatcgtccaaaaaaacccaacttgttcttgacaaagatagtaagttccattgccccgttccaagctgtgtacttatcttggcctatgagtagctgtgaaacaaacacatttcttaggttatccccgtgatgaagatagtaaggatctgaaggattttcaattgggtttcttggtcttataacctgcagattctgatcactttgagcagtttgatttacattgttatacatgagttggtacaccatctcctgatcttgtcacttgatcatttgtcgacatagttgaacaaagaagaaatcaacacaagttgaaaagagaaatgcgaaagagcacgaaggattgaaagcaaagggcattgtcgatgaataatttgttggaaatattttac

SEQ ID NO: 327782 - DNA, 1073 bp, Cannabis indica
gtagcgtgccttagcagttagggcgttacaattagtgtcttcgactccctgtcgttcaccatcttcaatcaacacctagaacccaatcgtcataccaaaccgttgaaaaacacagaagcaaaagcgactgaacgccgaccaactggactccgggactcgacacgcctgtacgccgaccgactaaaccgaacggaagacgtcggcgacgctcctagactcgactgtgttatcgcagaaacttctggactctacgtgatattcccaaaagaactcgactgggttatcccaaaagaacgcgatattcctatatttattaaaatcgaaatgttacgtacgtttttactttaaacatcttagctaaataaacaaaatattctttaattatgatcatcaataatattattcaatattcttttatacttatatttattagttattgaaaaatgtgtttaaaaagataaacgaaattataattaaatgtggccttatgtataaacactatgtttatattattattgataatgtttattagttattaatctaatatatttgttatgataatatttgtgatgatatgatttttttgaccaagtgtgtgattatatgttaatctaatgtgtttattaaaattaaaatttaaatataaatttataaataaaatatgtatatttattatttatttttaccatatatagtttatatataaaaaattaagaatatgtttctcatagttaataaagtgtataaattataaataatttgttatgcacatataatataattaagtactataatatacataaaattataaattttccaataaaaaaagggactaaacagatggttgctgcattctagatgaccttactcattagacatattacatagtacttaccttttgtctgcacttttaaattgcgttagattagagcaaatcaacaaattattattttcttaaaaaaataataaaatcgaaacatttgctataattttttttttttatggtgagatgattttattttattattttattaaaaataatacttcaaagatcaaaattaaaaaaaaaaaaa

SEQ ID NO: 327783 - DNA, 924 bp, Cannabis indica
catataattacatatatattgtgtgtgtgtgtgtgtgttgtaattgaatttataatataatatatggtatataaaacatacgctggagaaagaaacattagcactgaaataatggtccctgcaaatgaaaaagaaaaagaagtaaaagagatagaattgatcagctttgatcatacatatatatttatatatatatatatatatatataaactgatctgagatctgttacctatgacttcaacagagaatatcaaagcttccatgtttatgggatgtgtttgatgaggtaagactggttgaaagtggtagctagatttttgttgaaacagaataaatagagagtacaatatatatataccttagtctaaatattttcaattttttattttttgaaaattagtcatcatatttgttgtataaggtgataaaagcttccactactatttttaatcattattgtttttttttataaagtttttattgttattattgttatttctattgatatttgttttcatagatttcttgatatgttgttgacaaacaaaattatacaaaattgactaactaacagctacagtatatatatgagagcccacatgtatctataatatcaatacaaaattataaaaaaaaacttgtgattgttttttttcacaagttgttttgtcattttagagaaattctctaaatggatttgataatttattttatccatctagtggttctttttaagggaaattatattaaatattaaccttttttaaaaaaaaattatatttattttttttaccaaataattttttaatatttatactttatctaattttttttttatttttactattttaagttattgaaacttcaaataaaaattacttctttatatttttttaatttttagcttttttttttttttactt

SEQ ID NO: 327784 - DNA, 699 bp, Cannabis indica
ttatattaccttgagtcttagtagtaattattgtaagtagtctcggaaaattttgaatggacaaaaaaaattaaaggatacaatttagtaatggtaatactttgggttaaaaattataaagtgtttctacaatacaaccgattaaaatgagttgttctccaggatgttatcaagtttttacagatgcagctctagatgttaagaaaaaggcttacaccactatattaaaaattatagtggtgcagaatgattcaaatcaaatcaggttgttgcaggattagctaagcctttatctagtatggttgctcctgtagttgctgaagccaagactgtttctcttgtagtcgcctggaccaattctcttgcagtcacttagtaattataattgaaataatagtatttttgatgatttgcttgtaaatgttaaaaattctttgtccaaactgtttcagcatttgtaagaattttttattccaaaattttttgtagtcgtgtacgttatagttatttaagatatgctataaacttttgagaaatttaaaaataatttacaatataaaaataaatgttcaaactacttattttacacgtatataaaataaaaaaaaagtcacgcctgcaacatactttttgagttttgttttggatgtattaaattttttttgaatttttgaaaattttatttaatgtctaaaataa

SEQ ID NO: 327785 - DNA, 885 bp, Cannabis indica
aaaaatgggtaatcaaaacaataataatcttaccaactcttgttctgaaatattgtaatggaggaatcgatctccccaaattggtgggtgaaattttgttgttggtcgaatgatgttttgtgttttgtcatttttttgagatgaagctaacacttgactagacattattcttaattaatgttttaattcacttagcttgtttaaggcaaatgaaataaaatggcattatatatagttctaccaaaagaaatattatgtatctacttaattactttattggtagttacaaactttattagttacttgccttcaagcattaattattgctattagataggttctttaccaaaaaaaaaaaatatatattgctaggtattaggtcattcaaaaaaaaaaaagaaagaaagaaaaaataattgctatgagctaatgcattatgtgacattttgaaaataattgtgaaattactatgatgtataattattaggatagtattgtataataattatattatattttaaaatataatgtgagtttgaatgtcaagtaataattacaagtaaattttattgttatgtttgacgaaaaaagttggtaaattataaatgtaaattaatattgtgtaatattattataataattagtatcattttgtaataaatatttaaaataatttttatttattacgattatctaattatttttgctacgtatttgccattcttatgttgataaaaattaataatacaacaaatttaagcatttcattaaattatgaataatactattagatatttgatttaaaagatgattcaaaaaatgatgtaaagaaaaaatcatatatcatatattcgtatatattagttttttttttatttacaaaca

SEQ ID NO: 327786 - DNA, 798 bp, Cannabis indica
atgtttaattatgaattttaaagaaagtttaaaacagagaataaatagaaagagtttagaacatcggatgtaacatatttttagtttaattctttaaatattttagagattttctattttaaaacatttgatctgagtgctcgtgtagggtttttatttgctaccaagctataactccatgataagattttggtaattggataaattcttgatgtgattttattactattggtcaccattggtccctaacaccatctagaggtaatgtcttgcgatttgttagcaataatctataaaaattattatattaattatataagacttgatacttaattgggctaatagcgatataatataggataaatctacagtgcacctttaaaaggttgttttgatagtccccttatctgttaagacatcatgggatttttttagtctaatttttttcatgatcgcatatgttgtagctatttaggtccacctgtaaatttttagaaaattctgagtagtttacaataccgaaaataagatttgtatattttattgcacacatgactatattcttatacatgcggtaagtaattctttaaactttattttcagtactgtaaattatttattttttttaaaaaaattataagtagttttaaatacctataatgtatgcgatcatgaaaaaaataaactaaaaaactctagccgaacagatagggagtctactaggaatgttcatcaaaccactcacactgcacaaattgcccgcacacataaaaaatacgatttgaaatcatttgcagt

SEQ ID NO: 327787 - DNA, 718 bp, Cannabis indica
agttgtaagaaatgccgtcctctttatacatccatttccattattaggttaggcaagctaatttcaactaaaatgaagttaaaatggtatatgtttgctgtggttacaaatacaatcatgtgtaagaagtaaaagtactctagttactagtaaagaacaagaaaaagccacactaatttcatttgtttctttagccactaccatgaccaaagaattgcttcctattcactgtgacaatgttgatttgcccctttgtagttatcattttacttgaagtagctaaactaaagctatctcatttcaaaaataatgtattaagagcacacttcacatttactttatatatttctagtccattcttctacttgatcagaaaatgtattgctcgtagttgtaaataaactaacacccattttccagcaaaataaataaataaattcacaccctacacagcatccattttgttgattaaatacctgtacgtcctctaaaaagtaatgatcccttttataactttctaaaatcccagaacacatcgaggtcatcaaccataatgaatttttcccaatgctcaatagcccatcaaaatcccactacacattctactgtgatatgttttcttgaaattttaacacaattcacttgcatccatttgggtaagttttgtgatatctttatgatgggatatcagtatatatgatatatcatcacttgttcc

SEQ ID NO: 327788 - DNA, 1380 bp, Cannabis indica
tttcaatttaagttcaaacactttgttttcaaacactgtaaattattgtttgaaatttttaaaatttttacaaaatgtttattataacagacccagttctgagcataagtaggttaggcttgtgcttagagtccacctaatccagaggcccaaataaaaaaaattctttgtttattgattttaagaaatattatattattttttttctaaataaatgcctaattttgtttttctataccgattatatttcagagtcggctctagttataactacaatgaatatatataccatcataattaaaatcattcttctctagtataagagcatttttgtgaaccccatttatatatttaagtaattttgaatctaacaaataataataatttcaggtaccaaatggattaggcatagtgtttggagtagcacaactaattttatatggtgtatactacaaaatcaaacaaagaaaattatgaaagagaagaagggcaaagaagtaattttgtcagatgtaatagtagtttcttctgttaataataatcaacccaacaaaaccacttcaacaactacattagctcctcctcataatgattctaataaggatcaattttccatggtctgattcttatatattatcatcatataatatatatcatattattgtatacaataattaataaaaaaaaagtatcactattctctagtactataggaagaaattaaaatattgtttaatgaacatcatcaatatgaatgatatatatattcattatatatttttatttgacctcaaaatatttctcctattaataaaaacatgtaataaaataatttctacccaattattataattaaacatatatcattctcaaagattttcagaaaaaaaaaaattatactcactagctaaacaaagatattttgaatttttgttcactctccaaaaatcatcttcccgtattatcttttttaattttttctttcatttgaaaaaaaaaatagtttttaataatgctaaatactattgtgtttgtagaatatgaatattatacaaaattatattttttttaaaaggtcttaacttatatgtttgttttcatggaataatatgtaaacatatttggaaaaaaaataaaagttcattattcttacaaaaagtcttcattgatggagaaattaattatatgtaacatatatatatagagagtttataaaatagagggtctaatcaataatttttataaaatataaaatttaaaataatatttgtccttaaataaatttgtggtatttttttttataaaatgaataaataaattaaattgcagattatcttgtattattacaaatatttctttagaaaaagataatttttggtc

SEQ ID NO: 327789 - DNA, 1563 bp, Cannabis indica
tgttggtccttatggaaagcaagaaattcagttgtttggaaagataaggcgcttactattgcaaatgttgtaacatcagcccgcatagctcttgatcactggcgtaaagctcaagataacacctctttgtcttacatttactctggtaattgtgatgatggagttgagctttggactaaaccgggtataaacacaatcaagatcaacgttgatgctgctattttttctagtgacaaccagtatggctatggaatggttgcaagaaacgactcaggatccctcattgatgctaaagcccattgctttaatggtgtcttcgcccctgaggttgtggaggttatgggtatcaaagaagctctaagctggatcaaacgtcaaggttggcaaaatgttaagttggaatcggacagcttagtttcaatccaagctatacgtagccactcacctctttcttctatttttgggaacttggttcagattgtatttcacttatgctttctttgccttttgttaaaatccgttttgttaaacgatcagcaaaccccctagcacatgttgttgctaggatgtcacggtccctctctggtcgtcttatttctgtgtctaatgctccagtttctatgctagatattttgtactcagaaagttaatttaatgaagttgatatttcatcaaaaaacactaaatttaaattcaaaatatgaaaatcaatcaatatataatttaaaaataaaatttacatcttatatatcatatatatttgtgtgtaattcaattagtatgtaaaattaaattagtaagtaattataaaacacttataacaattatttaacatatgatttcaaaattaaatttaaaatatacaaaaatatcatatagaaaaatatcataattatactctttcaataaatataaaaaatatatatataaaaatttaaaatgatttttacataattataaactagaataaaaacactaataaattaagttgaaaataaaataattaaaaaagaacctaacaacgacaacaacagcaacggcaacaaaaataataatatgtatataaattgtgattctcaaacaaataaaataacaagatttatagtatgtataaaaattaaaaattttgtaaggtaaaaatttattgggaacaacttaattgtgatattttgtccctatcatataagtacttttatttttggagaaatcacaacctaataatttttatataatgatgaataatgtagtttttataattaagaatcttattattattgcaaattaaatacttcacttatctattagatatactattatttgtaaaagaaatagatgatagaaataacaaaagattattatttatatttctatttatataataacgtttgtgttgtcgagtgaatttcgcaacaccaaaatatattatttaattaatataaaaagagaattttcagggaagtgacaagtgcgagtattcgatctagaatggcgagtactcgactgggaatgcaagaacaatcaacaaggctggaaaatatcaataagacaaagaattatagtggt

SEQ ID NO: 327790 - DNA, 906 bp, Cannabis indica
tgtttgatgtgtttgacatcttccaagtatcccttgacgaatggcggcctattcctagacatttcatttcttatatttctaactaaactttcaaatataagccacctctatttttggttaaaagccaaaaacagttagcctattggatggtttttgtaattgatcgacagccaacattcatcgtgttaaagcattatgaactaaagttcatctctggttattccgtaatttccatcagtatatatcatcttactaatggcaattcactcgtggtatttattagctgatagagcaactagaaacaaagaaagaatcagaatgaattcatcaattggaaaaagagtaattacatggtatttatactgatacaagagaatacaactcagcctaagtgtagctaaaactaatagtaacaaactctttattgttaatactcccccttaagatgggagataaatgttcgaaaatcccatcttgaattttatatactgaaattgagtagggtacaaggccttggtaaaaagatcaacaaattgatcagcagctagaacgtgcactggcttcataataccagcttgaagcttctctcgaaccaaatgataatcaatttcgatatgcttggtatgctcgtaaaaattggattagcaacaatgtgttcagcaatctgattatcacaatgaaggagagcaggtgtcaggtgtggaattgtgaagctcctttaaaagagagagaagccacacacctcacaagtggtgttggccatagaatggtgaatagaataaaatagtatatatttatatacaaaaccaggaaactaaatgggaaactactaaatacaaaataggaaactagaaaatacaagttaccctaatttttacaactaatatacagctaatatctaacact

SEQ ID NO: 327791 - DNA, 2250 bp, Cannabis indica
agaagttgagaatcatggagctagctttatgccctttacttcaaattacgtatgaacaagttgacttttgactttcatgagttgatcaacaatcttcagaagtttgagaatttgattagaggtccacaaaaaggaggtaacaaagctccaagttctagtaatgctacggttactacgacaaagcctaagacaaatattgcctctacttgaaaacctgcaaagaaaaagaagtggaagaacagcaagaagcctcttaaagttgttaacacggcaaataaggaaaaaaatttgctaatccaaaggtaaaggagaaagggaaattcttttattgaaaagaaaagggccactggaaaccccaatgtcctaagtttttggcaaagaatcaaggtattcctaactttgttgtaaattcaagtgttttagagaattattatccccttgggttattaattctagatctactaaccatatttatgttcttcttatttcagctccaaccacttaaacttgggttattatcctagcgagttagacggatagttggacagaaggttagagaatgtccaagcttgaagaagaagctcgtctttattattttgaattaattattttatttatcgaataatttagcttaaattttagtttgggaattttattccctatttcatattattgcagacaattcatttagagtatgagttgcttttatgaaattgagctttatatttatcaagctttcatgtgttttacatttattattgatacaaaatctatggtataatattcttcgcagtgaagtaataccacataaacacttgaagttaaattcaatgtttgtgaataattgtccaatcttaaacaattattaagattttgcttaataaaaaatcttatgatctgataggggtggaagaagttattgatatatgcagttcaaagatcttttacattgaactctagattatattcaaaacaccacagaatctctataactcaacatattatgatagggtggaagaagttattgatatatgaagttcaaacatcttttacattgaactttagattatattcaaaataccacaaaatctctataacacacatattttggtttgatatatatatatataatatgtaatttatactagcaaactaatagaacatattcttgatcctgtatgtgttccaatgtatgctacaatagtaatagctacccctaaagtccctggacatataatcacagtaccttatcttagtgtgaggattttaatcccttcatcccattattatttggatgacactactgattaatttaaaatgatatgttaaagcaaggaactttaaattaaaactaaagaatgttaatcgaaccattcatatggatagtaataacttatcagaagtataaggataagttagaaaatttcacaatgtttatttgaaagacttcagcacaattcttggtcctcgtgaaatattttatggtctctttagtgattacataatcttaatcaagtattttatattaatactagaatgctatattaatgacttagtctggaaggaatttattatttcctatttaagataaaatatcacaacaagatatccctaagtacaaatagtaaaacaaaaatgcacacctgtgtatgcattaaactagactcttacttttaaatgggagccatcaaagatgtaatcaaacatggaagacaatcaagaaataatctctaaaagtgacctatatgttaggtgataggggtgtatttagaatccttatatctacactaactctgaacttgatatttgaaatggttattactctggggtggaagaattattctaaaagggtgtaaaaacccatctataataatttagttccacgagtgaagctaaataatttagttgctattaaaagacctggaaagttattcaaactgaagaaagttcttgactattttctctattccatttttgatagaatgagagttgtatcttctatacattcaaatacacttattaagcagtgaagaattcagtatccctagaggagtatacatatagaaaaataatgttctataatgttttatgaacacaaaaggaaataataatgcataaactattgcttgctacaaccttacagttcttattacttgggtataataaaacacactacacttgatatgcatatcaggataatgaattgattgaaatgcacttctagttttatgttagtacaagtgggagttt

SEQ ID NO: 327792 - DNA, 815 bp, Cannabis indica
tatatatatagtagtatagtatataagaatctgtatatttatacatacgtatacgtacggatattattatttgcattgcactgacaaatatattaagtggtgatgatgattagtaatatatatattatcaagtaattattattcgtacattcgatgaataagataaagatccatatgtatatatgatcattttatgaaaaagagcattgctattaggcaccagtggtgcttagcactttctcgatatgtcgcgttgcgattggttagcgatactctctaaaagctattacattaaattatatgggacccgatacttagttggaccaatagcgatattgacacgtaagaaggtgctaggcaccactggtgccctttagcatttctctatgaaaaatgttatgatgattttcttcagccattatgatgatgtatcatatatatatatatatatatatacaacatttgaatcagtgtacgtagtactcactcactgatcacaatttcaaacaataattaatgcatgtatggtgaaataaaataagagtaatgatggtaaaatatttaagttacataattaatcttcattataaattaaaactgatatgatttctacttaaaattatatctatgagtactaaaactaaatgcatattaatatgtatgtgtctatatataaatattactcatgaataatcatttttattgtgtgctaattttttttaggtagtaaagtattttagttagttcacctatattatatatgattattagactagttttatttgtattctaaaattttataaatgtaatcttaa

SEQ ID NO: 327793 - DNA, 505 bp, Cannabis indica
aaaactattatttgtaccaaatagagatcaacttttgcatggtctaataacagaaaagaaactacttttattgtatttaaatttttaatgtgaaaaaaaatgagcaaaaaaaaaaaaaaatacaaaaaggaaagagcacaaaggagagagcatacctagaaaattaggttctgccttaggagaaggagatgaacaccaaccaatgtctttggcgtttagggttcctgagcaggctaagtaatttatttgcttactgaagaatttttatcctggtttttataaaaaaatcagaataaaatgattgttattaagtctcctttggtgtagggaagaggtaaatatttaaaaaatatacttttttaagaccagccaaacaaggcccttgttccaaagtgggataaaaggtcaatacctcacccatcagagttttgtttggttggtcattaaaaaactcatattgaactcatttattattgtgtattttttagagaaaattacattgtac

SEQ ID NO: 327794 - DNA, 787 bp, Cannabis indica
tactgtgatgttttgggaaagccccagggactaaaatacacagctccatgaatgacctaagtctggtaccgcaaaataaagggaaaaagagaaaacagtctaaatcatcaaccttgacagccatacataccacaacatactaaaagagtatctagatcaggactttaggagcaaaacttacttatatgcaagctcttttaaacctacattccaaccctggagatgctgatctaagagagctcgtgtataatcactaatctgaaaaacattaggtgatcccaaggtcaactctaagatcacaacaccaatgctccacatatcatacctgtcaatataccaagtgagcattttaagcagggtaagcacatataatcagatatgtgaaattatttatgccttgatatatcaactgaaagataaatctaatcccagttcagaaaatgccacatacttcaaagttttggtcattggtccctggtgccaactagaattcagcagagcttcaggaggagcatactcgttagtttgttcagctctggaaaatgcaaaaaaccatataccatgaataacacattaataaggaaatgtctatgaatcacgacagaaccacgaaaagaacacaacttacttagaaggtcctgaagaaccatataaatgcttcagtgtaaactcgtccatagcacttccaaagtcaattatgcgcctaagatttaagaaaaccaaactataaaaaaaagaaaaaaaaaaaaacgacagaaagaaccttgtgacaaaaagaaaaaaaaac

SEQ ID NO: 327795 - DNA, 630 bp, Cannabis indica
caaacctctgaaccatgatcagcttcaatcttctcttttctattctcagatggagaaatttttttgaggaacagaaaccttagatttctcttcgtagatccacgatcccgtttcacaacggggggagcgaagtccaagtcatcatcttctacgactgggcatttgcctttggatttatttgctacagatttaacacctagttttagaagtttttttgggcaatggagaaagggacgaagaagaacgagtaatcgccattaatatataacttcagacaaaaaaaagatagtggaaaagaatgtgggaaattaggttaaggggagttggagaagataatgatagaacaagctttggatcgtgggtatatatggctttgatcgtgggttgggatgagttttcagaaaaaaaatttgaaacataaaactaaaaaataaatattgaaagaaaactagaatgaaaatgaaaatgaaaagaaaaaaaagagaggaaaagatgataggtgtcaattaccgtcgaacatgcttggtgtgtatagagtgtgtgtaagtagtattttagtaaataaaaaatattaaaggcaaaaatattacccaagctgtgtggcagtaattgttggaatttattttatca

SEQ ID NO: 327796 - DNA, 514 bp, Cannabis indica
ttctttcttcttctttttctgcagaaaccttctgagccatctttttctctctcgtctcaccatcggagccaaagcacagtctcaccatcgtagacccaaaacctccgagacccaaaaccccgaaacccaaaacccccaagctcgaaacccaaaaccctgacctcctcctcgccccaatctctctctgtctttgacgaagtcttcgtggtggtcgactaacctccggcgacagcaaatataaaaacacctactttgacagtggtactgagagagagtgagtgagtgattgaagaaaatcagctttaatggagtattgaaccacagtcctctggaagtagaacccatttgtcatttctcacagtcctcactgtctcccttcaggggtcgtgaccttcattctcttaaaccccaaatgtacgttcatttatcttctacctctatcactctaagaaaccccatcaaacaccacaacatcactactactgaaagaaaaaggagaaaaaaaaagaaaaaa

SEQ ID NO: 327797 - DNA, 507 bp, Cannabis indica
ttgtttatggtttgtatgtggttttcctttttttttgtcttgcttttaatcactgtaatgttttattcagccataagtgaggaatatgtcactcatggacatattcttcaatactcagtagtcaaattactcttctctgtttcaacttttaatgaggaaatagtaaaagaaattactcttttctctttattgttcaatactgttacaaatgcaaacttcatccataaatgaataagataaaaccatatacaaattattttatttggtgttattggttatttccaacttgtctattttatgagctattcttcaatcctatgatgtcttttctgatgctacatattcgagtctcatgaatggttaatctctcgagcacaagcaatgataagaagtatgttcttgttgagaattatgaggttacatctcaaaactaattagtattgagtggagtagcccatgttcttatatatggctcaatacttttacatttaatacatgtgggacaat

SEQ ID NO: 327798 - DNA, 679 bp, Cannabis indica
tacatttaatacatgtgggacaatattctccaatagctattaacttaaactattcgccttaatcgtcgcctttgaattaagcacaaataagttaatacttgcagatgaaactattcctttatagagtcctctaagcctttcatccatgaaaattctcctaaattacatcaaaaaatttctttgtaggcatcattaattagccaaaacatagtttctatatttacttacattatcttccaaaaaatttaacaagcaactaggataatttttagtattgcaacaaaaacgtgggatttatcttttcaaacctaccggagtcaagttcatggcaattgcctctctcattttcactccactctcattcatttctccattaaaacccgaaagcttctccacattttcttcttcttctttgtcttcaacaacagtgagctcgagagttttgatcagaaaattgtgaagcaaacaacatgtaacgatcacaaaaggtcgaaactcaatgcactcttctttccactccttggaaagaatctgtcaccgattaggaactttttattaaaaaactattttaaaatgtaaaaaataaaaaaaaactctaaaataaaattagaataatttttttgcatatacatacttttttaataagtgagttctatttgcaccctataaaatgataaat

SEQ ID NO: 327799 - DNA, 1457 bp, Cannabis indica
attttttttatttgggcccttaaaatgagtgggcctaggcgcgggcctagcccgtctatgtccagggccagccctgcatgagagggactgagattcatgtactcctctgtgtcactatcgtcttcttgccacgctgatgattaaggacttgctcttttgttgccacttattgatgcagtaggtttgttgttgacaggtggagatatagatagtcccctacatatttcttcattagggtcattgagtgagaataggcagttacaagcagtatctgggtattgcaaatcctagaagattgaatcattaaagtcaatctcattttcctcagcgtagtattttttataatgattcatatcttcttctagtcgttagagatatactctggcggataatattcccatggtgtatcatctttgggttttggccagatggcatatggaatgaccatgttaatggaaaacaagtgtttttccagctgtcttgcttctgagctacctatcacgacaagtgggtgttcgcttgacttgtgtattttgacacttgctgtaaatgacaaatcatgattaacatgtagcctgagtagcaaaattgtaaagcagcacaatgggtttgccatgttttcagtggctgggcaattgagttccacgggtctcttgttgcggaccttttcccactcttgtgtaaggagtgcgtcccattcaggcaatggtttgaactattgcaacatagctattggatgttggtaggcatgtctgaggtccaagcattggatatagctacgaactgatgtccgaagccctattgtgaggatttcgaccgcaatagtgtatgaacttgacagataccagtagatatttgtcatcttttttggcatgaatatgttgtttttcatgtgtaacagtttggcaaatgggtagtttgggtagaatccaaattcttcggatattatctttccatatctcctaacgagagtggaatgaacttttagggctctttaaattgctttaacccttgagtttttacttttgacaattattttagcatcactggaaaatgtagggatgataagcgataagttggccatgtagatcagtgggattagattaatagtgtgtgagttgatcatgaaatagccgatccaatccgatccgcacgatccgcactttgcggattggaaaattcaaaatccgcatttgtgcggattggatgttgattgacatataaaagtaaccgatccaatccaatccacacatatttataacaaaattaaaaaattatatatacaaataacattttaatgtaaagaaaatagtaatttaaaagtctaatacatataatacatttatattgccaaacttaatagataaaatgtatattctattcttatatatttttatttctacatacaatttaaaataaaattaaatatttttttatacatacaattttttttcttc

SEQ ID NO: 327800 - DNA, 1153 bp, Cannabis indica
tataaataaaaaaaattattaagaaataaatgtttagtattcattttattttgaataattatattttaattaattttatgttgaaatataatattaaaattataaacattaacgtatataaattttaaaagtgtttatatataatttaaaaaaaaaataataaaatgtatattatatattattgtgattcatgttttacatgataatagtaattgctttatgtttattgtgacaataatttagaaattcttaataataaaaaatctttataaaaatacaaaataaataattttgtgaaaattttaaaagtaaatattaaacagttttaatatttataaagaaaaaaaattattaagaaatagatgtttattattcattttgtttcgaataattatattttgaataattttatgttgaaatataatattaaaattataaacattaacatatataaattttaaaagtgtgtttatatgtaatttaaaaaaaaaacaaacaaaatgtgtattatatattattgcgattcatgcgtgacatcataataataatgctttatgtttattttagcaatgattttgaagtttttaataattaaaaatatttataaaaatagcaaaatttacaaatttgtaaaaattaaataaataaatattaaacagttgtaacatttatatataaaaaaagttttaataagaaaaaaatatttattattcattttatttagaataaatataatttaataaatattctataaaaatataatatcaaaactataaacattaatgtatttaaattatagaagtatgtttatttatagtttttaaaagcatcaaaaaaccaataaaattcagatgtatgtttattatgttattctaatcaatgtttataattatattatgtagtaatatagtttattttatacattatatataatatcacatattcattaaaaaaatactaaacaaataattttacaagttagaattgaaatttaaaaataaacttactaaattttgttttaaaaaataaatgtttattatccgtttcaatatgaattattataatattattgttgaccgaggtttttggcaactaataaaatattataaagttagtgagctgtaagaaattgagagaaggatttttacgtggt

SEQ ID NO: 327801 - DNA, 2208 bp, Cannabis indica
agtatagttgaattgactaaatgcaagctatattgattattataaacattgttaatgaaaacaatagcttggtgtatgtatggaagtttgaaaatataatgtatgtatagatatataattgaatcgtttaattactagctagtaatagtatataattatttaattgatttttaggtgtatgattcatatttattataataaatataaatattttatatggtgactttttgattcaccaattaatttattttttaatttaatttccttatttgctgtaaaaatattctagaaattaattgtggcagaaattttaatgaaaaatctcacatatataaatatataaacggagtctgtactgatgaagtttgaggaaaattacaattttacaaatattaggtacttatgccactaaaaataaatattgtgttaattatcatttacaaacttaaaatttttgatacttatgccactattatttttttttatatattttttttgttaattattattatttttttttattaagcttttgcttattagtaaataatagtaaagcaaatcctatgagcttatatttaattagataggacgagcgatgatcttagcttcaataagtaaacttatactatactatgagcttctttaaaccataactttttttaatatttgttcaaacataattgataaaagataaaagtaaagataatacgattataactcacaatttaaatgggagttacgtgtttgtggcacgtcctccattctttatatatatatatatatatatatatgtatatatatcatgtatatagaaccttacaatgctagaaatagcttacagttagattagatatatattatatgaaacaacatattattattaattaggaatcaatatacagtgtctcatattttaataacaaggtgattagtatctaatgttagatataacaaagtttttcttacaaatagtaagcaatatttctcgtaataattattacattaaaatatataagaccttaatacttaattataacaataataatataataacttgtacacttacactactgctaccttttttatttctaattgtgcaaaaatagtgtacattttatagaaaaaataggaataattacataaggtgtctatttttgtaaaaaaattcacatttttacatttaaataatttttttttacatttttacggtaatttatagaaacaacacgaaaacaacaagaaaattacataaaaagtaacatcaaaataacaacaaaaaataacatacaaataataaaaaatcaacaacaaattaacaagaggacaacataaaaagaccgtattttttaaaataaaatcaaaaaaatcgtaaaaatatttaaaattccgtaaaattatattttcgtaattttttattacttttgtgtatttgtaaaataatcccaaaaatatatctatcgttacattaattacgtagccctacatatatttgttgtatatatttataagtgatctaaagaatttgaatcaaactaataaatagagaaattaaagaatatacatgacaaactaattaggtagaaataaattcaatcactgaggaccatagaagatttttcatattttgcacatgtattgatattcaaaagctacaaggccaatcatacaccataaaaaagagtgggtcacaaatgcccctcattccaaaaactcctgttatttcttatattttcatttcttatttggatacaataataatacgtttattatacagtattcaaaattaaaataaattaataaaaaaatatgacaaaataataaaaaataatcagaatcaatattcgtaatatattgtttacgaatttttttgggaaatagaataataataatttatccttttaacttaatcaagaacgtaatcagaatgcataaattgattaaatttttctttatataaactataatgtatggtagttattttataagacatattttaaaaaataaaattatcattgtatatttaatattaaaaaaataaaataaacataaataaaaaccattacccaatatcccctctcttttatcacattgttgatcgaggttttcggcaactgttaaaatataaatataatgatgagctgtaagaaagtgagatgaaggctttttacgtggttggggcgttaatgagccttagtccacgagccactg

SEQ ID NO: 327802 - DNA, 484 bp, Cannabis indica
ttagctcgttcttctggttcatgtcctgttcgtatttccagtagggggtttgtcccttctggtttggaagctattttgttagctaatttactttaaggaaaattgcaatttttatttcaaaaaaaaagaatgtcattattttcaagggaatatttgacaatatgtgcaatttagtatatatcttatcataaatttcccattttatgtcacaccttggtatcaaataatttcatttttctttttttttggatatcatatagattatatgatcagtgcctaaaaaagtatgtgtaattgctacttttcgtggttgtgaagtgaatataaaaagatcaactttatctatttatttatttttcaaagaattaaaaattttagagtataaaaataaaataaattgggggctcaaccccctcgtgctgaaaatcattttccaactacaataatatatgcaatgcaagtgtaattgataataataataata

SEQ ID NO: 327803 - DNA, 972 bp, Cannabis indica
ttaattaattaaaaaaataaagaaatatgcaaatgcacttgaaacttttcagatttgtgcattgttcagttttctttcaaatatatatattaagttacgtgtaatacacgtataattaatttttttaattagatttaattagatgatgttaagtgtaatatatgtatgtttaatttttttaattaaatttattatatatttttaaaaaaaagtattttttttggaagcttaggctgagtggaacctaagcgcatgccaaccttactattgatttatactgagtgttgcttttctaagaaagtaaataatttaatttttatttattgttatcactttatttaagtttatatgctaattataattctagttacttttttttttattataattctagttatttattgctcaaggttggcatgctattctatttttttacttttcaaagtttagctttgttggcatattgtcattttatgtggcacgctagttattttttactttagagaataaagaacacaaataaacaaagtgtacatagttttaaaatttgtttattttaaggataaattatattaaagcttaatgactttgatctatatcaagttacaaggtcaatcttatattattaaataattttataataattgaaattgaatagtaattaatctagtacatattaaacgtaactattaagttactaatcacacctatagttatttaataattaattactccgaatactcaattttaattaatattgatgctctatttagaatacttattttgtatttaagtttttaaatttaacttaaatattgatgctctatttagaatacttaaaaatttaaatattttcccactaattactctcctatctaattatcaaattaagtgaggatagtcataataaaatattaatttgccaaaaaaaaaaagaataaaaatattaaagcatgtttgatattgttttct

SEQ ID NO: 327804 - DNA, 903 bp, Cannabis indica
tttggtggttaagtgttacaaaccgtaaagttcaggttatattaaagaaaattgtcaaaaattgagctcaatgtcctatttttaccactttagaaaatacagggtccaatttgttatttaaaaaaacagatggtctaattgataacttttgcaaaacagagggtccaaaatggtattttcacacacaatttcctttttcttttatagttaaggaatagggatgcacattttccggtctataaatgggcaacggagcaggaacgaggactattttttgtcatcgaatatactcgtcccgacaaggacccgtttagtattttatcttacatttagtaatattttataatttataatttatttttacactttttttagtatattagtatttttttatgaattttaatttgtgttttggataatgtttagtatattaaataataattatgtgtaatattttatttttttatatagtttaatatttttgcatattaaaaattttattgtaaactgtatttttctattaggggatttgctgttctggtctcgttccattaagtgatttcctgctcattcttaataggaaataagcgaggattaacggtggtaggaacggaagagcactccttgctaattctccaccacgtgtgcatattaagaaatggaatgttgtccttagaaaagaaaaaagaatgaatgtcgagtttagtcgatttgtatacgtactgatttattagtcgtaattaattcacctatatttgtatgtggacttacataggacatggttttagtttacataaataaatatatgggtgactattcaatggttacatttttattgtaaccatatggttacatttttctttaacctgtaatagcaggttactaataggtagactttccttt

SEQ ID NO: 327805 - DNA, 759 bp, Cannabis indica
aaaaaggtcaaacttagcccatcatcaattttttctcttccaaaacatatgataaaatgatgataagtctaggtcatcatcaactccatttctctcttttacactcaatcttcatccaaatattagaagacaaaataacaacaataacaaaaataatattaatttagtttttgatttcaaatgtcaaatttaacattaatatttatttttataattctaaactttttttaatttatttttagtcattttatgtctctataaatataaacccattttaatagtaaattgtgtaattttgataataaagatactatagcaaaatccctcttcacttttttttttttctcatatttgtttttagatttttttatgagaataatgagcataatggtttaataatctgccttagaaagtcagagatgattccatatgtaaagaaatagtattttgtatgtttgattcacttgttgtaatatttatttgagtaatgcaattttttttttcctaactttgttcgtcattatgtttctaaccaatctgtactactatatatgttattatatataaaaaatatatatagatttagtcatgctctacttatgtatttttatttagttgattataataatggtagtattgtctcatttcttatcttttattgtttatggtttatttattttttgttaaattgatatatatatatatatttagtcatgctctccctatgtgtctaaaattataaaagtaatattaatattt

SEQ ID NO: 327806 - DNA, 830 bp, Cannabis indica
aacttcaataattgaatgatcgtctttaatgttgcaggtcctattttgtatttggtattttgttttttgttaaaaatgagaatatatttttttcttttttttgtaattttcagggtgtttgacactatagctaaataactgttctttatttttaaaaattaaaatagttttttgatcacaagtaaggatgtttggcaatattttcaaaaaataatttttaacatgagaacaacaaaatttattttctaaagtttttattatggtatagttcctccaaataaaaatattttcataagactgttctagtaatgaaaagttagttatttttcgaaagtgtgttcccgatttatagctaatttgtcaatttagaaaaagtctcgtagaaagataggtaccatctggaaaggcgttcccggatgtctattggttccactcggaaggattctcaggaaaagttagtcttcctccagaaaggagtttcagatggctagttgttcctcctgaaagggagtttcgtttagtcgattccacctgactcttttcctatccgaaagtcccttcagcatacactttaatcctctgtcccgatagcatatatctcatttggaagcactttgtcttgtactgacgtggagattctgttacgatgagtttgttgaatttgttacgtcgtaactaacttaacaatttatcaatgcaaccaccgaacttaggatctttatcatgagcctacaaataccatcaacacttattattttagtatgcggggttgagacaagtttcgaaaggtgatcttgagagagaaagattgagaggtagagagaggtata

SEQ ID NO: 327807 - DNA, 836 bp, Cannabis indica
ctgtgtttgttaaatgacaaaatagatcctgtattttctaaaattgtaaaaataagaccatgagcttaatttttaacaacttttttttaatataatcaatttgaagacaattcgtaatacgaacaaatataaaaaatgtgaagagttttgtcatagcacttttagatcggattataataaaattttatttttacaaaaaatcaattcagggtcctatttgtaccattttagaaaatacagggttcatttgatcatttaacaaaataaaaggtctaattagtaacttttgtaaaacacagaatccaaaataatatttaccggtcaaataattatttaatagcagtattataatgaaaaagtgtatactgaaatagatcaccataaatgataattataataaaaaaaatatatatttattgtgtattaaattaaatataataatataccttgtgttaaatttaacacagctattaacatgaataaaatttaatacactatttaacatcgacagctaattttcttaaaaaaaatttaaaatataacactataatattattttaattcttcatgctctaagctatgtactttaattgagaagaaatatgtctacaatattgtaatttaggtttaggatctagattaacttaattttgattaaataagactataatattaatgaccacaagactattatttcgtgatgtggcaaaatttactatttaaatatataaattgtagttataccatctattctcactcatttgtaatttttaattaaaaaaaataatttgtaaaatgaaaactattttatgtgcatattataataataataataa

SEQ ID NO: 327808 - DNA, 753 bp, Cannabis indica
gagtggggcagaagcgtttacaggctttgagcattgattcgtgacccattcctattggtttctatcatatatatatatatatggtgtgctctatgttataacaataacagttggtatatatgctctattttcatcatcaatggataatttctcattttattgagagtttagattgagagtttttaatctaaaattagggggtttccgaatgttagaagtttagattgagagtttttaatccaaaattagggtttttaaactaggttatattaagtgaggaggtttcctctgttatctacttttatcttgttaacaattttgaatcttgctagcaaactagattcacttaatataaccattgtgattctatttcttttgctggagtaatcatcagagcaatacaggtaaacatataattcttagatttacagtactttgtttgtactcttttccccttcatttatattaagaagcttgaacgttaattctgaggtttacaagactttaataatattgcccatacctctggtttagatgaggaatttaataatattgcccatacctttgaatttgaacctgtttctagtagaccttcagagtcaaaaatcaaagacattactactactactaataacagtactaataataaagttttcaatttgaatgttttgtccttagaataaaaaaaagctggaagttctgttttgctggacattttgggttgtttatgatttattttattttacttatctc

SEQ ID NO: 327809 - DNA, 1179 bp, Cannabis indica
gttgggcccgtgggttcccaagcccacggcaattccaactaatggtactcatggctcttggtgggcttggaaaccaagacccaccatatctgcgtttttttgaaattaccactgaatttgaatgatcaagctttttaccatcctctgtttccattaaatcttttgtcaaagtatcaggctcagcacgtgagagagtcatcagacgtttcctttttaaatcagagatttcaacaatctcttcactattaaattcaactgaggtgtcattgaccaagataacatgctcctttatagttgattgctgattcccaatagcacgggatggggaattaatatgagagatttgtggacatccgtgaggatcacaattagcaacattcattcccctgatttctgatgaagcattaactgtaggagattctgatgccgattgtctcgctggagttgctccttccttgcctgaacgcaaccatggagaggctgtcaagaagctttgccgctttgtcggagccttcatctctatgctgtaaggtttgacaattttctcgatgggagtatcgtatatcctttcacagaatctttcagcatgtcccataacgccacaaatgaaacaaaaggtcggaactctttcgtatttgaaataagcataaaaggcttctccacttcgactgcggaatttcattcgccttttcagagaatcatatacgttgactcgaacacgaaccctcagataatcacgccacacaccttggaaattattgggatcggactcaacatattgtccaatatagcgagcagcttcacgaatcgcccattcagttttaaaaccagttcttaattcatggatttgaacccacatgtcaagggtatttatattgatcgcccttggattttcacctggtttaagcctctcaataagaagttgtttacgatcgtacgtccatgggctaccatcaagcactctttggatgtctatctcatggtagaactgaaagaggaacctattctgctccaatctcttaataaaaatccctttagcaggcttccatagatcagccattatgttttgaaatatctggaaatcagatacttttaccagacaacaaacggcctactaggcaccatctatcatcaaagttcaggtcttctacttcttcacaatcgtcagccaatgatacc

SEQ ID NO: 327810 - DNA, 823 bp, Cannabis indica
ggcctgtccgactctagctgagttttatttactctaaaaaaaaatatatgcaagcccggataatatttcttgagtggggtgtggggagttagaaatttaaaatttaaaataaaagtggtgattacaatttacatgactagagcatatacgacatgtaatgaatttgaaaaaaataatgatgatattcatattggtataggcgtagtattttgaatggtgatttaccgacacccaattaaggagtaaactttaagataatgtttaaattaagaaatctaaagaatatatgataaggttggaattggaaaaattcaagaaaagagaactgtgtatgtcagatcttgaatgatcactgtatgtatacatttatatttatttctttcttgagcaattaaagtgggattttctcagttggatatatcgaagttctcaaacccaatctcaatattgctttgcatgattttactcatcttcacaactaaatttgatgcttttatatacatgttaattacatatttaatctatacttatgttgtgtgtagtctctctagatatagatttactacaatttggcatgtgatcatgttgatcatttcatcactttcacattttttttttaaaaagagtcaaattaatatatgtttatgtgtatatattccatttttataagagccgccttatttacatatgaagaaaactaatttatattatttattccaaagctattttaattgttatattttgattgattaaataaatgttacaaaagttacaagtttgttactaaagagataatatttaatctagtgggggattgttatat

SEQ ID NO: 327811 - DNA, 430 bp, Cannabis indica
gagggtttcggtctttcaatattttgagttacttttgttgttgcctgttattagttttctttttaaaaaaatgtttacgggttttgtaatagcaagtgtggttttcaactgtgtttgtaactcaggatcccaacctttatggttcattaattataatataatagaattagcttttgagtttagtaatttcaaataccggcgttacagtagtgctaaacaaattatatgcaagaaacgagttttggatttattatgagtgaaaaaaatctttttaaatatttccttgataagtgttaattattgtcccccctaatttcatcttggcttcgcccttgggtggagctttgggttttgttcgtccagagtcgaagtgaagcggctggccgttgggatctagaatggtgctctcatcgagagagagagagagaga

SEQ ID NO: 327812 - DNA, 993 bp, Cannabis indica
aaaatcaaaataaaaaaattagagctgaaattaattttaaatcaaaaatatcatctttaacaaaaaaaaaaggggataaagagaaggaataaataagaaccctcggcagcaagcattggaagtacagcaatggcggctacggcgacagtaagtggcgggccattgcagagccaaagcgaagtaatcgaactctctctgagactgagtatgatgttttcctcttggaaagattccaaatccgagtccattaggtttggtggactcagtggtgaggattaaggaagccattgataatgctaagaaggctaaagaagcgaatttggtgagaagcagagccatcggagcagccgaggtttggtatttccgatctcccaagaaaaagattctatttttattatttattctaaggtgtccctaaacgaccaactacttaaatttgacaatttggtacaacttaggaatatacttttgggaaattaatatgtttttgcaacataatcctcaattttaacaaaatagttactaagtcccaaaagtcttaatagtattattattaggtaccaatagcgactgacatcagttaaggtggcgatctataagaccatgcatgtgttaatatatattgtggtataaaatttggcttatattatattttatgttaaatttggctaaaagtatgtgttaaatttatatcacattatactgtattattagagtttaattatataaatataagaaaatatatatacaccacatttatagtactccatcaaattcgaaaataattttgtaaatcactgtgtaattatgaagaaaaaaattgttaaattttaatttttttttctctaattaattgttgttaaaaaattaacttaacaagttttttaagttatgtactaaaaaggaataggaatcaattatatagtattaattttcattcatttgtttactaaattttaaaggctaattagtaatttttttcccccaaacttt

SEQ ID NO: 327813 - DNA, 300 bp, Cannabis indica
tcgaagctctgaagaagagagtgggaggaagctcgtgcttatctcctccggccaagagatccagaagcggtgagacgaccccatccacggagaggacgccgaccgaagcaattattgacctctgcgagaaaccaactattgtggacccttctgccccaaaagtgactaagtctaaagactctcaagagggagctcgaacaggcttgaacagtcgaagtgcggatctgagctggtcaggagcggagctgaacagatcagggcccctgccccacctctagtgctgcatctggagactaagag

SEQ ID NO: 327814 - DNA, 1263 bp, Cannabis indica
taccaaatcatgtttgtatgtttacaaaaccaacctaaaattttacttggtaaacaatacatgttggttattattattattattattattattattattattattattattattattagtggctgaggatgtaccaatatctttacaatgttaaatgaggaaatgttaaggagactcgtaatctacatttatagataagtagaaaactatcaatttttattatattttaactaaatataattttaaaatatttttaattgataaatagtgtcttttataatcaaattattaaatacaatctcacataacttattaaaatatatatttgtacaaaatacgaaatacaaagagcaaaattaaaattttaaaataaaaattttaaataagagcactttcataaacttctctactttattcttcgaaatatattaccaaaactttttttttttgcttaaaaaaatggagatcaagtggtgcagaccatgtcctcaccccctttggtaatcacggggacatcgtattagctataggagccttttaccttatcttgttttacttgggtcatcgatacttacacctcatgagggttcctatcccaaagatagtccactaacaacaagtcagcctttaagggacaaacataatccctcacaaatgaggggcttggtgagagtcgaaccctggacctaagcaaaaagagaatgttggtaaaagtattccctactactgcaccacacaatacgtgatatatcatcaaaactttactttctcaagtttactataaattttaacattacaacatacttcatgttgtttagaatacattatatattttaaatatataacataataacattttacatataaaataaatattaaaatttaaataattaataaaatatatataaagcaataaataattttagatgaagaaaataaatagtaacttttttaaaaatagaaaactaaaataatgaacaagtttaaaacatgtggtacattgtgtttttaatttaatttttaaccaatattttaaagaatacacatagggcccatttggtatgcaggattagactgaaaatgattggactagactggacaacattgaataaaaaaacgataaaaaaatttcatctgcatgagattatttatctcaccttgctggatgggataaataatcccagacaaatgagattagctggattagttatcctgacttctgccatgcccaaacactagattgaacaaattaacttgtctaat

SEQ ID NO: 327815 - DNA, 1519 bp, Cannabis indica
agtatcttgggtagcgtgcctaagtatttagggcgttacagttctttttctgcattgttttacaaaacttaaatgaatactattacatttttgatgcacattactaaaaaattcattatattaattacttaccacatcttctcttacgttcaccattctgctccgaccacttcgatgtcgggattgattttttaccgatcatttcctttgtactttactcaattcttaccatacaaaaaaaatacgttagctaccagtacttgtatttaaaagtttatcttagtacaaatataattagtacttgaaatttatgagttaggcgacttgtaagaaatttcaaccagtcatttttgtcgatttcaggatgcttttcagggacgtatgccaactgttgcaaattattttcttctaatgcaggtataatgatgtccttggtcattctgtttttgaaatctttcattaacttctcgaccatgaccatgcaatcatgtttgaaatcattccaaactataaaacccgtttagctttaaggtaaacaaacttgattagagtttatatctgaattaatcaaacacaaatcaaaactctaacaaatatctgcttacctatatatcttttcaattttaattttaagttcaaggttgacctgcttccaattttgataggacaacccaattgtcatacgacatgactctttaagccaattttgataggacaacccaattccctcattaatattgtttctactatattcagcaccaccttcttcaaggttacgaccaatttttaaaatttgatcatgaatgatgtcttttgtctaactgttcatgaagtctttcattaacttcccaacaatgatcatgcaattatgtttgaaatcatctcgaactataaaacccgtctaattttaaggaaaccaaacatgattagagttaacatctgaattaatcaaacacaaattaaaattctcacaaataattccttacctgtatatctttccaaatcttattttttaagttcagggttgacttgcttccgatattcataggacagctctatcgtcatataacatctaactcctaaagtcgatactagcttggcatagtttctgccataatactctcctttatcattgactaggagcgaaagtctttttgcttggtccatcagcttggacacttcattcatctcagttctacctcgtttaggtatctccctaggatattctgctgctgggtctgaatctgagcctgaacccgagttagccatatctacaccattaacaaataaaatataaagttagctataacagagtaactacgtacataaaaaaacaagtatcacaagtaagctataataaatattaactacataaacaaacattatcacaagaaagttaccaattagacatgttttcttttcttttttcatttatttttgcctaaatcacaattgacccatattctctcattgatattatttataatgtattcaatatcgtcttcctcaaggttacgat

SEQ ID NO: 327816 - DNA, 512 bp, Cannabis indica
taaagcagtttttgccaactatataccctagtagatagttgtctattttaacattaacgctaacatatatacctctagtaacatattcacgaagatatatacctgtatattaacatatgatgtataatcaccaattttttttctcctaaaattaaaaaaggcatatagagagactcacttattcacaatcacatgcttaatatttttgtaaactgtttctctaatggtaaacttgtatatatatatatatatgctggtcagtggtcacatttagctccattcacacattattaaatcacattttttataataatattaattatataatattaatttaatacattcatttttaattatatcattattattatgttaaaaaattcatttcatttattaattatcattaataacaccaaactataacccatgatagggttctagtaatgggataaatatatactgtgattaaatctacaaaaaaattaccattaataataattattttttatatc

SEQ ID NO: 327817 - DNA, 793 bp, Cannabis indica
ataacaatgtaactagtttttttttattggtatgattaggttctttaattagttcacaataattttaggccttcaagctatgccacaaattataataattatccaaaatcaaatacttcaaattttaaggtttaagaaagtccaacatgaattcaataacaatacatacactacaagaaaatgtatgagcttttgtttgtcggtataagggcttcgccggtataagggcttcaccggtaaaagtaagagtaactcgtccggaaagatttgtcggcgccatttttcgcctgcaaaagctgtcggcaatggctcgtcggcgtatgagcttttgtttgccggtataagggcttcgccagtaatagctccaccggctgatgtgtccctgactcgccaacaaaacttttggcggggattaggtgctaaatgacaattcggcatcttatttttgttggcgagtttaatcgccggtaaaactaaattaaaaaaataaaaaacaaaaaaatttacttacgccggcgacatatgcgccggcaaaagaatatattaaaattaatttatttataaaataatagtttagctggcacatgttacgcgccggcaaaagttttttttaaaaaaaaaattaaatttataaattaattttaaaattaaattaaaattaaaaatcgaaataatactaaatataatatcgaatatattataaaacagacatttataatgttattacaaaactatattaaacgtcataaactaagtaaaagtattctgaattcataaacagtaatattatcta

SEQ ID NO: 327818 - DNA, 971 bp, Cannabis indica
atatgtttcatattatatggtgtactgtcattatactcattatttggggtcctgaataatttaatattagtttttcttgaggtttgtcaaggagtgtttttgtgattctcttatataaagttgctaattttataatgtatagctacaaaagatattgatattcatgattaaaaccatatgtataatcactacataaaacacataaaaatgtacttaaagaaataatacagggaaaaaaagtgggtgcactagaggatttggatccttaattttcaactttaggattgtcatctatctctcaattgatcgctgacaaaaaaattagtatgtgtttatataaatttaatcacacatatatatagttatactaattattacttgaaaaatatatattttttaaaaagtaattaaaagaaattataaattggatccatatttcttattattaattaatcaactattatttttagacaacgcgcgtcatggataggtagtggtactatacaagccctccattactaaatgcttcttcttttttatttcttttttcatttttattgaaattgtttacttaaaaaacaaactaacatatttcgtttatatatcgataataatatttattgtttctaaaaactatattttaaaatatattgttatgattatataataaacaaaagggagtaatattccactacgcaatcatatggctgcaacttgccacgtcagaatggatagagacgtaaagtcaaagaaaccaactcccaccttatacttcattgttacattacatttcatatacacatatctaacaaacaaatacttaaaaatataagatccacattgtataattatacctaaacatgtaaatgtcatttgagaaaaaagaatataaacaatcgagacaaaattcaaacgctacaaacaaactataactataactctatatatatatatatatatatgtacgtaga

SEQ ID NO: 327819 - DNA, 849 bp, Cannabis indica
tgtattttaaaaaatataatagagaagctgttgagagtagtcttagattagagctcaactacaatattaatttgaataataaattaaattataaattgcatatagtcactaacgaaaattattataattgtttatataaattcttttaatttattgtttagaattaattattgaattgaaacgaacaacaaatgtcaagattattataatagaatcttttataaagacaagtaagaatgtaaatctctttgtaatagttatattattctgttttattattgtttgattaattaaggtgtttctacctaattttttggaaaatcttaacctgattgttatttataggtgtaattcgttatacgttcatttgtgatgaaaatataatttttttcacataattttgatgctttattgctgatgacttatatgtcatttagttgaagatactcttagggattttatcctatttgatgtaaaggactttgtagcctatttttatttaatctgttcgattatctgcatgtaatgaactatattcaatttaactaatcatggaatttccatttgcatttaaaaaaaaagaaaaaagaattacttggccaaaacttagatcaatatattttgaaacttaaaccaaaatttactttgcaaatatgagtataaatgtgcatttgttttgttatttttatattattttttagttattttttaatttataggtgtttttttaactatcactaactcaaaaagaaaacgagaaaaatagttgaaagaataaagttgtaacaacaaatttcatgaaaaaataatgtaatagtacaaaaagataaatcaaattgtcaaaactaa

SEQ ID NO: 327820 - DNA, 554 bp, Cannabis indica
aaaaaaaaaaaaatcctaaatagccatctttatatacacatataattataaactaataagttttgatttgcaaagaaaagttttgatgttgatcttgatagaagtttttatgtggatgaggcattggattgagtttgtttattatatttcatctttttgactaagcttactatatggtccaaaaacaaaaagcaagagaatatgataaatgattgattgatgggagtttttcaagaaaacgacaaactcgagatccagattccaaatccaaattctaatcccaactttatgggctctctctgatccatttcttttttcttctttttacaaaaacaaaaattaaattataaatggggtgagaaaggctcgagctctcgacctcaggagaactcaaacagctatgagatctacgcacgcgctagccaactgcaccaccacccccttatgttatttttctcaacaacaaatatgcaatcgtctagaaatataatatataatgcacccatcttaaatgcaccctctatgttagagaattttttaatatatatttttta

SEQ ID NO: 327821 - DNA, 803 bp, Cannabis indica
cattgtttatgtaataaattatatatgctcacagattttgaaatctattaaatcatgcccctcgaactttgacatatattaaattatatctttcaaattttcatctattttttttactaaaattagataaaagtacttaaatttaataatctcaatagtttaagggttatttttaacgactttaaaaattcagagaacataatttaatataggtcaaaatacaatagataaaaattttaattcattttatcaatagataaaacaaagagaatatatatatatattttacaaaaatcttaatatttagatattattaattaaaaatgaccaataaaggaaagaagtaatctttgctaataattttatcattacctaaagtggtagacagtgtgtacttttgtttggatttttataagagacaatacagatatttttttgtttcaacacttatcattttcaccaatatctatgtcttaatatcatccaacaacaaacaaatatcaaccatttttaaaaaacgaaatatcagattagattattagatcattgatgataaggccaaaaagtcttttctacgtgtaaatactagaagatgacacgtgttgaagtcccataacaaaaactaaacacgtacacatatgagcattgttaaccgactaccattttaaaggtactattctccaattcgttactaatattaaacactaataataataagaaaaatattaaatattactaatatcatattttatatatagtgataatgattgaaatttgaaaacataatagtgatttaaataaaa

SEQ ID NO: 327822 - DNA, 1077 bp, Cannabis indica
taaaaataaacccaaatgagtatggcatggtattaaaataacaataataataataataaaagttttgagtgttgctgcatgattaaatttaagtggttgaagagtctcttatcaaattaaaaaatataaaactaggagtgcaagttacaaaatatctgatgtgagtattttattttttatggagagataataattcttataattttttttaaaaattcaaatagtttacaatattaatttattttaatataaggcccgacttttattggctgactaggctcgtgcttagggcgcacacttcctaggactcattaaaattttttaagatctcattatttaatagctatattacaataaaattaacaattaaagtgtccaaacttggcctagcacaatggcagcctagtgaaagatgagattttattagttgaggacatgaatattatttgatttgattgtaatttatttcttttttatatatcttattgtatcattgaaattttagctaacataaattttttatcatgaatgattcagttaattaaataatacaaatttattaatttttgtaatactttataacttattttagatttatctatatttattttattttcttttatgttatgatatgtagcataaaacttttttaaaacaaattttttttaatttaattaatatatttatatatttattaaggagcttaaaattttatatcgtcttgagtctctatttcttcagggtcgaccttgtatacgtggttaactgaaataccaggccaccgatccaacggtaagacaaatagaacactcacccaaggtcttctaccgtgacataaaattaaaagagataagttgaaaaatacatcttttatgaattcattaattaaaaatactttcatattatatttcattaaaatataaccatttttgtgagtgagttgtccaatatacgctcacccttcacttaactttatcacataatttatattaacttattaagtataatagggacattatttataaaagtgagtatatattaaagaatataaaaataaaagtaaaataaataaaataa

SEQ ID NO: 327823 - DNA, 569 bp, Cannabis indica
tgatttatatatttcttaagtgttttataaaccctaacattaatatataattaaagatacactaggaaagcacaactaccaaaattaccagagagacaaaagggtattgctttggttcttcttctgatctgagatggttatattaatatgcatctctttctacagatgcaattttgaatttaaaacaatccattattacacaggaaaaaaaaaagtagaaaaaattatctatattgaaaggaatatgaactaagactccaacagagaagagattatcgcagcttagaaaaaatcaagcttctggcattgcgttcttatgtagaaggcttacaatagaattatttcattggagatgtaaaagtaaaatataactcactttattaaaaatttactgtactttaatagtatgctaaattgtgatacaaatattcacataacaaaaaaaagtaagttaaggaatatctttttttttttataggaatcaagatgtaaaatggctctaaatttaacaactaagttataaatgtttttttttataaaaaattaacaaaatgtccattcagttaaaa

SEQ ID NO: 327824 - DNA, 407 bp, Cannabis indica
aaaaatgacccatgggtcaacaaatctgactcttattttctaattataatgataaaaaaaaagagttttgatgatttagtatggaattaaataaaaagtaaagcattggaagatggaagagtgactgaaatcaaactcaaatgcataaaacaagtatttgacactgtaggattttactactttgacctacaccaacaaaatcaacaatatcagtatccaaggtcaaaattgacctttccacagtctaacttaagtttagacaaaacggcaccgttcaaatccccacaacaacaaaacttgtttcgtattgaaccttggattaaagactctcaagaagagtctagaaaccctaaactcaaacactatcctcactcagcctcacactcgaaaccctagcagagcaagtt

SEQ ID NO: 327825 - DNA, 504 bp, Cannabis indica
taaactttaaaaaagaaagtaaaaatgaaagaggacaatataaaaagggtatagagtataatttcctcataaaatgataacatcatcgaaatgaataggaaccacatggtgacactagcatctccatgagagtgctaaaaaaagtgttatgcttgctatgtgctaaatagtgtgtcaaatttattttgggtttagaaaaaaatgttaaattaaatcgagtgtctaatttaaattgaaagtcaaaatgagtagcaaactttgtttgggattgttctgtaaatttagaatgcaagtagttgaattaagtaatataataataaataataaagattgctcccacaaagattgattactaattatcaacaattctgtctttgtttgattactcatttgtttaattctcttattctctctacctgatgttagtctccgttttgttagacgatcagcaaacaaagttgcccacttcgtagctaggcgctcttgtttctattctgatcgtag

SEQ ID NO: 327826 - DNA, 1431 bp, Cannabis indica
gtgactcgtgaatttctcctaaattattttatttttaataataaactattttatttttaatataaataaaaagttaccatgaatttctcataaaccaagaattctcttatatagatacactttatatagaatagattctaataaactaaagtaggacctaaaaaaatctttgtaaattgtgaataagccttttttttttcctcaaatagttcacatgcttaaatctaccataacaaaaaaataaaataaataaaggtaagtaaataccaaattaaaggatataatatttatatttacaattgaataatataattatgatgcaaattttagtaagaaagtcattcttttctacaaagatacagaatgactcatcttcataaattttttcattgattttgttttatatattttttatttctttggctgttgtttttattcttcaatgttattacttattattataaaaataataataaaaacactacttacacaacatgtcatttgttataaaaaaataaaaataaaataaagaattggaaaaagtaaaataaagtaaaaaaagaaaaagaaaaactcacatgtattcagaaaacatagagagtatcttttataataaaaacttagtgactctcacgtacaaaataatactttatgaaaagaatatttataatttaaaacatgttattaaacatatttttctaccacttaaattgaaaaaaaaataattggaccaaataaatagattaacaacatatgcccgaaaaaagatagaaaaatacatacaaaagtataaaatatgttaatatttacaatacatatactactcttttgccgcttgcttatggtaaaaatgttatatagcttggaatagagcgtgattggataggagcttgccacctgggagggagggagaaaccaagagacagtgaacaaatccaaagaaaaatagaagaaagaggcggtgaaacaaaataggtttttagggttaggttaattaaatatatttttttaattaattttatatttatttaagaaataattaatgataagttgttaaaatatataatttttaaaatacaattatgtttaaattaaaaatatatatatatacacctaacgtgttacttgttttataattaaaaaatggaaagaattaagaggtgtctaaattaacatttttaagcctaattaaaaattaaaaaaataagaaaattaggtagagaataaataaaaatatttaaattaatatttttaaggctaattaaaaatctagaggtatttagattaatttttttaaggctaattaaaaattaaaaaaatgagagaattaaagaacgaacaaatactatttagagagattttagggtgacatatcataaatagatagacatatagatatgatatttagttaagatatttttattatagata

SEQ ID NO: 327827 - DNA, 600 bp, Cannabis indica
ttgtagcatatttttttagcctccctttgtgcggtgtgttaaatatttattttcgatagttaagatacataaacaaactaaaattattatatttacagtttatcacttattgtcgccactacattcaaagccatttgtattaccgtttctcacttgtaatcgctactacattcaaagtcactatcatcaccgtatcttacttataactgccactatattcatagtcgttgctattatagaccaaatattatcaaagaagaaagtaaataaataaaatcgttcgaaccaattttttttaatatatatatatatatatattagtataaataaaatttttattcataaactataaatagtgtactttcaacatctaccaaataaaaagaattaatatataactcataataattatttttataaatatacatatgtatatatgtatacatatgaatcgtgaaatttttaatcaattaaaagtagtcaaaattgtgtacgaagatggagaaaaaaaaagagttcgtagctttaaatttaacaaaatattatacaaagtatgatataataaaaattaagaaaaatataatatttgatggataattt

SEQ ID NO: 327828 - DNA, 1088 bp, Cannabis indica
ttatttaatcaacgtcattgttaacacaagcagaactccggctacgacatctgcctcctcgggtcttcctcaagatcctatggcgactgatcctaatgttcatgttccatccatgattggaatctccacgaactcgatagatatggccactcttactaccttggtaggcaccacaaatctggccaccacagctggccaagttgacacaaccattcctatgggtctgaacactcgacccatgcctccgagggaggaccctccacaagtgcctcccactgaaggaaggacccacatggagaaacccttaggcaccacaacatctgccccagtattatgctggagagacggggccagggattaaaaagccagccattgaccatccccatgtagatttgggagaagatcttgagttagctagacttagagaagtcgtctgtcaagttggccaaactgaagaaccacatgctgctggttgcgatgtatttgcacaacagagatgcgaagaatacatcctccgatcgcaccaggcacagctagaccaccgtaatagagaagctagtgacataataggcgattcaatgaaagaactactagaagaggctaggatctaatcagagatcatctccaagggcgactagttaataaatcagggaacatctaccaacaaactgtccaactgggttcctcaggaaccaggacagactttcccttacccaaagaaggataagcttttccacaaaggtctagtggcgagaacagccaaatctcgacaaccagctgtctgggggaccaaccaaggatctcaggctgtacaacacccctagtaggttaacctctggtcggctagctccttggcggtacacccttggctagccagtagagtgaacttctgtcccagggcctttgagagcaagtaacccagaggtcaatcttcaatctgctagatctatgaatgtgtggaaacacataaaaaaacaacttgagaagtgagtctagtcacttcaggtatctggatccacctaactctagcaactgatgtgatctaccccttgtcaacgcacagactacactagccaatcaggggagaa

SEQ ID NO: 327829 - DNA, 583 bp, Cannabis indica
caacgtgagaaggtgctaggcactactagtgccttatagcaatactcttttttcagtgtcataatatttttgacgcaattaagtatcaagtctgataataacaatccaccaccattatccatgtaattaatgttaaagtgttattatatatatgtgcacttagatatatggctcgagattttcaaccattaaagattaaacaaaagaatattgacactagtccactagtgatatatatataagggaatgagttaggaaaaatgaatttcaagttttttattttattaatctaactttaatttattcttatttttttgtgtttagcgattaattttcttactctatgctaataattaattatgtagatcacaatgtaaattaattaatttgtgtatttgatcaagaacggatcgtatttcgaattaatcaaaacttaaataataaagtaattaaatactgaatttcaaatagaaaaaactcattaaattaaaaaacatcacatgcatggattggatcaatacatagtttatactattttgaattctatatgttttttttttaactgaaatccacaatgtaggtt

SEQ ID NO: 327830 - DNA, 1414 bp, Cannabis indica
aaaaggaataaacaagaggaagtttatactctctgtaagttgaataaagtggggataggagctttactagaaactaaggttcgaggtgacaaagtggatgatatgatgaagactagcttcaatggttggcattttcattctagttttgttgtagaaggtagaattcttctcttttggttgcatacttttgtaaatattactattttggttaagactaaacatttctatactattgggtttgacattctagattccaagatgatttttgtctcattgtggtttatgggttaaactctatcatgaagcgaaaggagttgtggcaaggttttgatttgcttcctttccctgttaaaccttggcttattatgggggactttaatgttgtttttgatgtagaagatagagtaggtggtcgtcctattgcttcccctaaacttgatgatttgtgtaattggttgtctattggctttattgatgagttaaagagtttgggttcgttgtttacttagaacaacaagcatgacaatggtagaatttattgtagaattaattcagtgtttaagaatgaagcttggcttgatcttcacccttttgctgaggctttttaccaatgggatccattgtctgatcattgtctttatattattagaagtctctaaattaaaatttgggatttcaacctattaaatttttcaatatgtggacagagcaccgtgactttaagcaaaaagtattggagaattggaatcaagatgctcattgtataggtcttttccagactatgattaagcttaacagagtgaggaaactgctttaggattttaataagaacatggtggggaatgttcaattagcttacacttcagctaaggcttgttttgaatggaaccagcagcagatacaatatcacactcattatgcaattttactcaaggaagagaaagaaataaaagtgaccttgagttcgtgtactaagatcgttgaaagttatttgaggcaaaaaagcaagttaactggttgaattttggggatgaaaacacaactttctttcatgctaggataaaaaaaaaaagaaagaagccaatcgaattgcctcttttgttaatacacatggtactttggtggatgattatgatgaggtagttttccattatttgaaccactttaaaggttttatgggaagtcaaagttcatcttctatgagtatcaagaatgaatgtttgactatgggtgccactctcagtattgatcaacagagtcagttgattaagcattttattagctctgatgttaagaaagtcttatttaatattcatgagttgaaaaggccaggtcttgatgggtttgtttaattatatttattatattaactgccaaaatctgaataagattgactcgtggactatgtagaatt

SEQ ID NO: 327831 - DNA, 880 bp, Cannabis indica
gataactaatcagattgtaatgagtttaatttagggcataaaacccaacaagagtgtgcaccgagaaagcagggtacacaccaagaacgatgacaccgtaataaatatcacaatacacctacaactagcagtagtcgacaaggtagatccaaagaacatgcttctcctcatcatgcacccttgtcaacgttctcatcatttgaagtttgtaccatgttcaaagatcctacgtgggcaaagaaagatataatatagaaaatcatgagcttactacttgtttacatagtaaggaatcatggaagatacaacttggaaatttttatgaaaataagaaagaactgagacaagtagtggctaggcttgtaattaataataatgttcagtggatggtgaagaaggcagcccccgatgtgttatacgttatatgcaaggatctagattgcaaatggatattgagaggaagaagatgcattctgacaactttaaggttactgtatttcacaacaaatacacatgtaacctaaatgcgagacatttagataaccgtcaagcagtacaatgggtggttgaccactttattaaggggaagtacaccctagatagaactaagtacaaggctaaagacatacagagggacatgtttaccgcctatggtatctagatgagttatgtgaaggcatggagttgtagggagaaggcacatatgtacgttaggggtactttgaagttttcctagttgaagctacctggatacttgtacatgctgcaataaaggatccaggtaccatgactaacctatatgtagacgattaacgattcaagtgctattttatatcacacaatgcatgtagaaggggatttactttctgtcgtcctgttt

SEQ ID NO: 327832 - DNA, 1159 bp, Cannabis indica
aggtccgaccggcttttaatttttttttttcctgcgatttgagagagaggggaagagagaggtccgatggtcggaccttggggtccgatgggtccgattggtcggaccccatcggaccccatggtccgaccatcggacctggggtgtgggattattgggaccggctagatagagagagaaagagagatagttttagtttgggggtatttttggggttttgaaaaaaaatggtatagttttttagggtttaaattattggtttagaaatcaaattttttgattttctaagtatagaaaatcaaatttcccatatataatgatatgaacacatgaagtacacacaaacatgatataaatttatgtgaaaaattatttttcataactcatactcatcttaaataaaattaattagttaaatatagagtaatttgcagcataaatatctaagtttaactttcagttgtaaataaatacttaagtttgatttttaacggcaataatttgacatttaatgttcaggtacctacagagttccaaaaatataacttaggtattattaccactaaaagtatttatatgcaactgatagttaaacttaagcatttatgccgcaaattactcttgaatatactattaccacataagtgcatatcaaatttgtatgtgtatattatgtgtacaaatatcattattctatgagtattgtttaaaattccaaattttttgaaaaacaatagatagattgtggcatattctctaatattttcatttattcgctagtaattaataattcacaatctctaaatttcacagcaaaattctcaaaacttactttttattagcatttaatcacttccattagttaacttctaagttaattatttttgtgtacactgtgtacaatactttatgtacacatgaacaattaatttgacaattaactgttaaaaataaataaaaataattaaatgctaacagaatatgaattttctaagttttgtcgtcaaaatttaaggattatttgctagaaaaataagagtattgagagtgatgccgttatttactcaaaaaaaagaaaaattactaaagttttttgaattaatggaaaaaaaattgggaaattatctcatatactatttttttaacttttttttttttt

SEQ ID NO: 327833 - DNA, 2984 bp, Cannabis indica
ttcaaatttacggtttgggtttctaaagtggttgcagcgctagttgcaataggggtttctatacgattttttgttgccatttaggttgtagcgctagttgcaatagggatttctatgtagaatttcgtaaaaatgcataaaaaattattttgaagtgtaaaaatgaaaaagcccctataatttttataataatattattatataatatatggtgcaaattttttgttgaagttgacatgtacactaatagtagtattgttggaggtggtctcaattttttagttaggagaataaaactatattaccatacatgcattttggcggaatttgcgtaaaaactatgtagtacataatttcacgtactgagaatgttgttttgtgtattgtaatatatcaagttcatgctttagtacattagatttataattggcctatctaaaatgaatgagacatgaaagtttaaatatataacctatttttagagatgaattgttattatgtacgtatgttaaatatttatttattttttatcattgtattagcacttgataccaaaatatcatgtacgtactatgaactctccattttttttaaagtacgtaataatagacaaagttctatataatgtagattaaaagcgtaacataatattaaaaaataaaaaataaaattaagcaatgtgtataattcatctctatgattgggttggagctgcttgctgacttcagttcaaggctctccttctccatgattaggatttaatcaatcatggggatttggaaggaatgcttacgaggggcttgtctcataccctcttggtaagtttctttgtcttaatctgctcacttctttttttttctccttcctccttgttttttatacatctttgtttgtgaatctccagacttctttcatctcttttgccgcccagcggtgaggcttagaaaagattaaatacttggagagtgaggtctagaacttactaggccaacatgaagtcgtggtcaagaaatggaatgatgctcaactggaaattactcgtctcaccaaagaagccgagaggatgaagaagagccttgaagatgtcgagaaggcaacaaaggccaaaaccgatgaatgcgagaagctcaaagggaaacttgaggggaaagagaccgaaacccaagaacgatgcaacaaagttggccttcgtaccctttatcgagcctggatggcaaatccagacatggacacgaatttcttgaaggaagaggaggaggaaattcttgctttctgcgagaagaccaggaaggaggaggaagaggccaaggcagtacaagaagaagattcgtccaagtctcctactatgtaggcttggtttttatttattttttattttgtgtaggaaaatggccctagggccaagacaatggtttgccccttgtggtactttttttttgtaaagacaaaattgacaggttggatggccaacttggtttttatctttatttaatgattcgtacttttatgcttgaacttcaatacatatttgtttgcttgcgttttattcacaatttaaacaatcatattttgatcacatacaaagtactttaggaatttccattgctcgtatatccttttgatattaagtagttaatagtctactatatgcgcgagcagttcattatctgtcatgcttttaatttacgagtagttatcaattctgcctcgcaataacagttataatctgtttcaagcaaacttgaatatacttttaatgattttatcactttgtatatttttgattgcttatataaatagttagatcgtctattcatatactaggtttaagtacttttttcaagacaccttgatgtcttgtttaatacttttctatacaatgcgagccgttagtattcagcttcgtattgtgagttatgagttatatctcatttgtaacttttgattttcctttctcatcagacaggttttgaatcaaaaagttatttataatagtttgatcctcatttctcgttagaaaggtttgatcaataattattttttttaaaatttttaaagtgtgggtttgcactatatcatgtaaattcagataaatttcggttgatcatacacatatgcctctcaagtaatttcaaagagtaacactttgtaattacttgaaaaaaatgattaactttattcataactgaagttcaacatattacatcagaaaagtgagttacaatcatcaagttactggtagtagggtcgcaaatgttccacgttccagtagttctttatcagcgagccattcagtcgagccaatttgtaaacccaggttcctactatcgcttcaatcacataaggaccctcccagtttgggttgaatactcctgcagatgcatctctcgtatttgcgaatacttgccttagcaccaagtctccaacattgaacaacctctttttgaccctttcgttgaagtaaatggttactcggtgttggtacgctgcataagtaacttgcgcctcagtacgtttttcatcaagtagatccaaggacagttttaagagttcttgattataaaactctcgtctatcagtcgagatgtttacttccacaggtagtattgctttcgagccaaatgctagagagaatggagtatgtcccgttgttgtcttttcaatagttttgtgagcccaaagtacttgaggtctctcgtcgacccatctacctttggcaacatctaacttcttcttgatagtatccttcaaggttttgttaacaacttccacttgtctattcgcctgaggcctagatactgacgagaagctcttaattattttattcctctcgcaggtttcagtgaacaagttaccatcgaactgagtttcgttatcagatactatcttcactagaattccaaacctacaaacaatattttttacaacaaattcgaggactttcttgcaggttatggagataggagtgttggaaattattttac

SEQ ID NO: 327834 - DNA, 592 bp, Cannabis indica
aaaaaaaaatcatttttttttacacattgttgctacatacattaatactatatttctacaacgtaaaattaagtagttgttcggaaaaatgtaagtaaaaaaatacttgtaaaaatgtaagtaaaaaaatacttgtaaaaatagaaaaaaaaaaaaggtaaataaataaaattaaaaaaagtacgactttaggtgttttgagtacatttcctttaaaattctttagtatatggatttctatattttcttacaaattttactctaagctatattttgctaattaagtttttttttttaattttcttattacttttaactcaactaattttgcatatatatataaatatatatatatatagggtactctttaggtgagagcattacttttgctctcacccatgaggatatttttgttgtattctaattagttaaataatgaaagtgcataaaattaaaataggttagtgaacatacaaatataatatatatatatatatatgggtagttatttatttttttttacaaaaaaaagactatttagttatattaatattaattttttaaaaaaataaattaaatagtattgtataac

SEQ ID NO: 327835 - DNA, 1449 bp, Cannabis indica
attttttcttatttttagaaaatgggtgaaatgaaataaaagaatggttttattaaattctttttcagccaaatactaattaataaaatcagattattaagttaaattaaaaaccactaaagacaaagcataaatgggcaaaatgaccatttgccccttttcccacaaaacaacataaaagagcacttaggggtattttgggaaattataaaatcccgaccatactcgatattctcaatatctaactatatcgccccactatactaaaaatactaggatgtgattctaatagccaaacaccgcgttccaatgttgtcgggcactgaaaatgtaaaattataaaatttctatatatgacatataaaatgcattttgaattcaaataaatcaccataaattaataattcaatactaataaataattttcataattaaatcctatttatctgccaatttccaaatttatgctaagaggtctttacatgaaagcttgcagtcttacctcaggatgactctaggcactttggacaagtggatgtttttgaaaatgtgatatgttcatcttccatatcatggaatacgaaaaaggtgaaaactttttgcacgtgttgtcattttgttgactcataaattttacacatctttgcaaagtgtgtgtggcctgggatatcgcaatgacgactatttgatgaaagcgtaaatgttgaggagaatattaataatgagaaaattccttgaatagcatatggtacatttaatgttgtcctttcggttccctatccgttggattggcattatgctaacgtagataagatctgatcccttgattcaaaagcacacagatcactagcccataacctaaatacaagagggggaaaacctttcatcactttttccttctcaacattttgaattcaagttttgagagaaaatagagaaaaaccagagaactccattttcattttcagtggatgtctgatttctttgacattgtaatccaccactttttacgcattagagaacgagagtaccctaacgcacctcctttaaacccaatagtaactgacccccattcactggagcctttagatgttaaagcaaacatcaacaggatcctagacttgtcatttgcgtacttcaccgaccatcgcaacttttggttaccctcacttcctcttacaagtaagtttccttctgttggggattattttaccaggatctagatttactaccatgtatcttatttaacatcctaaatatgaatttttttaaaacaatggaatttaaacacatataaagtttaagaaaccttacattggttgtagcggaattaaatgactccttccactcagatttctaacccttgtatcctttctgtagcaaagtatcaccaagatatgagcccgattctccttcatttgattggattcttcacagtcttacacacta

SEQ ID NO: 327836 - DNA, 839 bp, Cannabis indica
tttataagataactccagcacggcatacaaatctaataatttcataccgtgttcgaattcgtgcctagtactctaatcctcactagtcacacattagagtttcacaattattccaacaccaacatgagttgttgctacagtaaaataatcaaaattttcatttcgaaactaaatttgatattattacaagtttagttagtaggtactagtgtacatagtgctcaacataatgtataacactatttgttttaaacattatatagttatgtattaggtaactgattgacaatatctgcaaacttgaaaaatatatattacatttgagataatatttgatattgtattccaataaataataacgtttaaagatgtaaattttttataacgataaatatattatatatattttgtatctattaaagtttattgaaaatattaatttatatgttttattcttccataataatattacaatatttttttttttggaaaaaaaactatatattgttataccaaatttaatacgagtattttagctcataatttttttttattattaaagctttaaaatacattaatcacattttatgtagtaatccatttaagatgttttgagtaaaatcctacctaatagtaaatattattggataatgctgtattaaaaataactttatgtagaatattttttttttaatatgtgtcattattttattttatgtccattaaatattatttctttatttatttttggctaattaggatttttgtcccctaaactttgacatgtaccaaatcatgccctaaacttttgaggttgttgaaaatgccccctaaactat

SEQ ID NO: 327837 - DNA, 1186 bp, Cannabis indica
ctgccaaaaactgcctaaaacagccaaaccgccaaaaaccgttcggtcggttttatacagttataatttctaaatggtcggttacagttttcgtaaaataaaaaccgtaaccgaccggtcggttataaaattttaaaaaccgaccataaccgaccgattttcacccctagagctagtgatatgggttgtgtattaaattttaagtttatatttttatttttattttaaagattgtcattctaatataactgtattttttagtttggtgttgcaatgttttttcagttttgctagctctggctacaactattaataatagaaaggtattgtttcaatgtgatggggtaatgtttgaaaacgttatagatttattatctaaatttctggggacagatttttcccatgtggcccgcgataaaaattttgcagctcaaggtttggcaaaacatgctcttcggttagacgatgagctatcttggttcaaggagattccactattgattgtgatttgctgcattgttaatcatatgtgactctattcactacgttaagaaaaaaataaattaatatggataatagaaacattatggaagaatatatgtgaggacatatattaaaaaattttgacatgtggaataacacatcataaggtattgtattgtctattagtaatacttaaatactttaaaaaattgggtcattatcaaaattttgaaaattttaagtacttattttaataaactaattttgattctcattatttattctttattttttatttttttaaaaaactaattcctactataataggtcttcttaattcttatttctattttattcttaataaaataattattctttttcttaaatatactttacatatgggtagtgatttaaaaaaaaaaaatcacaacaatttttctataacaaaaagtgttatttttcgtttttaaaatatttttaaatttaaactcactacatatctctcttatttattattattttttttttgtattaaatagtcactatataacattcagtgtatttttaacattacaatttaaattaaacccattgcacgtatcaaaaaatatatttctataatcattttttaatccaattaacgtgtactaaacaaatatctttctattattgttttcttttaaaataataaaagggtgactat

SEQ ID NO: 327838 - DNA, 828 bp, Cannabis indica
aagtttgttgttgtagttttttattatttgtatgtctattttttgttgttgttttgatattatttaaatataattattttcatgttagtttaatatagttttcttgttatttcgtgttatttttatgaaaaatcgttaaaaaaaaaaaaattaataaaaaaaaaggtaaaaatgtaattctaccttatataattatccccataaattaagtaaataacttttactactaacgtgtgtaacacgtgttcaattaatatacgtgaaaccattaaaggaatagttccaatttctgctataaatactaggaaaagaatgatgtgaagatataaagatcaaaataataatataagaaaagaaggatgatgaagatgatgatgaggttgattacagtattaatgactttggtagctggtgtgatggttgtagggtgctttgggcgactacaattaccggatattcatctgaatttggtacctaactggcggtgcagcgtacctggtgaatattgtcattgggcacaagacaagatctgctgcgaaggactgcattgtgaaggtgattgggggttggggtgagaatcgaagatgtgtccatgatgaaaactgtatagcacctggtcaccattgcgctttgctttcaggtccttgctgctacccaatgaagtgctcagcttcatcacacggaaaatgtcagaaccctggattggccttagatgctcaacacaacacctcatcatcacaaactatataacaagtaatcatggtgtgttgtttgttaattaagcaataataataataatctcaaaagtgcatgcatgcatgcgctttg

SEQ ID NO: 327839 - DNA, 1316 bp, Cannabis indica
gttaattgatgatattagtattattttgtatcttctaaattttccagattgttaaaaaatttatttgagctattgagatagttggatctaataacttccgtctaattatatttaattttactaacagatacttgacatggaaatacgaaagacccaatttaatacatgttaaagttcaaaagccacaattagatacatgaacaatcgctatgttaggcgttagttagtaaaatcgaacgaaataagacggaagtcgttaaatccaacaatttcaatagttcaattttttttaacagtatgtaaaatttaggagcagaatttggtatatcaaaattcggaggaaaataaaatcttaattaaccctctttttttttttgtcacactacaaaatattaaataaaattatacatatcaaaatttagggggtatgatttgatacatgtcaaagtttgggaacatcatttggcacatatcaaaatttgaggggcacgattaggcacaaggacaatcaaacacattagtaaaaatgaatgaaattaaagaaaagtcttcgattcaataatctcaatagtttagaaagaattttagacaacctaaaaaattacgaacataatttattgagtattgttattgggcactagtaatatctagcacattctagacatatcactttacaattagttagcgatactccttaaaagttattacgtaaaattatatgaaactcgatacttaattgtaaaaatagcgatattaacacgtagaatgatgctagatattactgtaccttttaatatttttttaaattgaatacatatcaaagttcggagaaaaatattatttaatttgaacaattttccaataagatgtttataaaagagtaatttgcggcgaaaatactaagtttaactctcagttgcaggtaaatacttaagtttaatttttgacggtaagttatatttttagaacttctgtagatagctgactgttaagtgtcaagtaagaaaatattatgtggatattttgacaattaataataaaatttctaaaaatataacttaagtattaagggaattaccctatatactatttttttaatttttttttcaaatttacggtttgggtttctaaagtggttacagtgctagttgaaatataatttttatacgattttttgttgtaatttaggttgcagttagttgcaataggtatttttgtgtataatttcgtaaaaatgtaaaaaaaaaaatattttaaagtataaaactgaaaaaacacttaagtacagtaaaacctctatttaagaatactctatt

SEQ ID NO: 327840 - DNA, 862 bp, Cannabis indica
aaaaaatattccgacatgtgtttcgggtacaaaagttgactaagaggttgttatagaaaattgacggtaggacttcttttcccaattttatttacaattctttaatcctagagaaacctctatgggtaaattagtgtcgaaccttttccgaacgctcaaaggccatactagaaaagttattgggcgtaatttattaagagatgactgccctcatttattatctggatcaagtatatattgttagaaattttatgtaaaatatgaggcatatatgatcgtctatgaaaatacaaaattaaatcgaacatatacataatataactaaaggatccaaataccttcaactattaattctttgagctttaatcccacaagagctttggatctacaaaagaaaaggaaactgattagtgagggtaatcgggctttcaagctctctctactctctttaaatagatttattgtatgtcactgaataagtagtgtgattgggaaccgagaccctatatttatataagtgagacctttaatcaaagtctctgccacaattatctgtcacaatgtttagacaaacaattaagaaattagattgggtaattaacataatgatgaccatcaatcaaaatattttatccataaatagaatatttatttgatataccaaatcaataaattataattaattgattatatatcgtgtgaacaaaatattctaaaattctcccacttagttaatatttaaataaaaatatcacttaaacccaacgattatccttgctaaataaaaaaatatatgaatcatggcgatagatcctcattatttagcaagtattatctttcatgtattacgatatatttatta

SEQ ID NO: 327841 - DNA, 1273 bp, Cannabis indica
cagacaacggcgcaactcgctaagaaggtaacctaacctctaccgccctctaacctttccttccctctctcttttgtattattttttctttctttagctcgtaaatgttgttcagttcttatttacttaattgaaaggttatggttattagtgattattatatgtcttttgaagaatgataatatgtgataatgatggttattagtttgtgaatgattatttgtgtctaataatctacgatttctaattctcttgttgtctctgtttctactgtgattctttttctcttgttatctaggaatacacttgttattctattgttttttttctaatgctacttacattgttatatggttatggtaaagactctttattaacctttgtttcgttttttattttgatttattctactcccgtgataatgatgtttgactatattcatgagagtgagatatattcttatttattctgagattacagatttattctcacttttttatttattttttgtttgctgtaatgataaatagtggtactaatgttgtttcaatgtctataaactgatttcaacttttttaggagacttctaatgtaggacattggtttggaatgataaatagtggtactaatgataagattggatatcgactgaaaatgcatagacaattttcgcttgatctgacaacattggatatcaactgaaaatacaagtagagaaatttagatatatacttgtcaattgacgttagataggcttgtatataataggtaagatttatttcacaagtatatctaaatttttctacttgtgttttcagttgatatccaatcttgtcagataaaactaaaattgcctatgcattttgcataagattgtcgccttttatttggtacaagggctgctgcataagttaaaaattgagcaaaaaaggcattttggatatggagagaagaagacagtctcggaacttgtcatctgaacaagatatgttgaggtaacttatttctgcttattaatgattagtgaaccttagcataccaaagtgaggctagagtttccattattttgaatattattcttattacttttgcttgcttttggcagtttagaaaataatgacagcaacgctttgatcttgcaaagtaagaaaaagaacaaggcatggtatatcctttgtaatactttgatcttattaataaaaatgttttttttattgttctttttctaattttatgaggaatgtttttagggaagtcaagaaatcaaggcaaa

SEQ ID NO: 327842 - DNA, 596 bp, Cannabis indica
ttaattttctcaatttttttattttatttttttaaaatgataactccaaatctatttttcattttttttcttcaatttattagttatatgtattgtacaacatttttaattttttttttttaaagaaaatccaaatatcacataatttaaaaaagctctctaattttttttggaaaccaaattatttttcttctttttctttattagctattttcttttcaaatatgataactcacacattttttttttacttttttttaaacccaaatatcacctctaaaatcactatttttcttaaaagttaaaccacacaattttttttattggctaatttttttttttttcaaatatcacataattttaaaaatcataactcacattttttttctattacttactaaactctatatattcttaatttcatacaaatacttagaatataaaagttagagtttataaaatgtgagactctctcaatacgaataaaaattaatatgatcatcgataatatataataaataaaattattaaaataatatataattaaatgttattatgtagtgctattatattttaaaataatttgtaaactatta

SEQ ID NO: 327843 - DNA, 638 bp, Cannabis indica
gtttattataccagtttttattttgtgggaattctaggtttttgttaattaggaaccctagctttccaattttcttttttgggtaaagattcttatatggaaaaatggagcgagatgctgtggtattcgatataagctccgatgaggaagaatttactttgacagagacgaaaggtgatgactttgattggttagcggagtatctggaagctggagataagggatcggataatgattcagatgatgttgttgtggttggtgagacaaagcctaagtctaggtcaaagtcttctaaacctacggttagagatgcggacgaggattgtgtagttttggatggtgacccagataagaagactctggttggtaatgatgatgcagtgagtgactcggacgagttgtgcatagttggagagaagggtccggtaagatttaatgttaaacttaattttcagtaagagatttttgttgggtgtgaacttattgaagttgttattttggtctgaggataattttgggataattaagagtccagcatttgtttgggatactttgaattttgggataatctcatttacagtctaggtttctatatatgcttgaattttgatgaaatatcacttggaaagttggattgt

SEQ ID NO: 327844 - DNA, 552 bp, Cannabis indica
gagtgacatacttgtgtataacagacattattctgtccgtgtaaagacccaatgaggcttcaagcgaggcgtcactgagtaagtgagaaaaaatataaaatgtaatatgttagagaaaaaaaataattgttaaaattgaaaacaacattttgatgtcttttattttctagttttttaaaacttgatttttaaaaatttggccaaacgttccctattaggttttaattttttttttttttgtatttaataactaaaaataatttgtaagttatgaatccaaacaacccctaagtctttgttctttattatttttttctacaagccagtcaaccttttttagatggaggtttttctctcttatttagagagactaggtgaagctaacacgtacaatgcacgtgcctagttctccatattatattttatttatcgttttaattgtaagaaaaattcatgtaatttaaatttcacatattaaaaattttttaacactactttctatattgtaaactattttgaatttttcaaaattttgtaggatgttttaaataa

SEQ ID NO: 327845 - DNA, 684 bp, Cannabis indica
tatacaaatttagtacaaactttgacccgtctgaaaatactatatatataaatatagcctacgattatatatttggaatcttctacttgacttggttgaccaacacatattatatataaaatttttgttaataataaggaaagattagcgtacaatttggaataatctctacttgacttggtcgtcgaccaatagagatctattttctttataagtaaaatatataattatataacaaggaaattaaaatgcaacttaattggttatcgtttaattgattatatgtattatattacaatatttctctagttatatataattaacttgatattatatacttaattaattacctaacggactagtactggttttcacttatataattatattacaatctaatataatatatggccacaaataatgttctgctacttttctttgcgtcttttctccttatgactgtttttacttgctgctcatgcaagaatcttcttaccaggtaaaataacaataattgttatcaaattaattaaccgatatatttatagcttagtcgctatattttggtcagtttatattacattttatttaatttaatattaaaatacaaaaaatttaaatgtaacccttttccaatcaagagaaaaaaaaaaaggaattatttcacaaaaacataaaacaaca

SEQ ID NO: 327846 - DNA, 785 bp, Cannabis indica
aggagaatataatttaaaataaaattaaatactgtatatctttttacatataattttttttcttttaaaattgttatttgttattttatttattttatttattttattttgttattagagatataaataataataatttattttattttgttgttagttatgtgaaaaaaaattatttttaattaaatattaaataattcaatattaaaaagtaaccaatttaaaataactgatccaattcgtactagattggattggatttgagttattgtgcagattggattggattcaaaataagaaatccacacttagtgcggatcaaatgcaccatgaacaaaatagtgcgaatcaaatgcactatgagtaaaatagtgcaaattgaattggatgaacaactctataattagtgtcacttaatcacataaattgatttttggtggtaaaaccctccaaacctcacttatgttagttatttaagccttctattcaaaagactatgttaattgccacggtggacatatcacacattgtccacaagtgtacagtgacaaattttagtgggggatattagcggcgaaattacttacactttatgattagtgacatttaaccacataaattaattttttggtggtaaaactctccaaacttcacttctattagctatttaccctccatctaaaaaactatgtgaagtgccatagaagacctgccacagtgtacataagtatacacataaaaaaaatttagtggtccacatagttttaattaattaaatattttaa

SEQ ID NO: 327847 - DNA, 763 bp, Cannabis indica
agtatgtgcttagcggtggtagctagaaaccatctcggtaggtggttcggatacacacggatcggttggacttctcagatgctttgtgtggagaagcagcggcttgttgtgcagcggtttctttggctctagaggaaggttttaagtttgttttgattgagagtgactcgagattagttatcaatgctatcaatgggacggagtctcattgggcaattgacaattatatctcattttgtgctaagtcatctcctgcttttatttgttgtaattttgagtatgttagtagaacttgtaattttgcagcccataatgtggcaaactgggattttattcacaagttgtatgggattattccggtttcttcggttccggagaaccttttatgtaatgaccgcgaggtccaacgttatttagtaatggtacgattacgcttattttcaaaaaaaaaagatactttgagtgatatttttaatttattgaggaattaaattataaatatttaaaattaataacctacgtatgaggttatataatggtagtagtcctaacgaaacaagggcaattctattcttagtttctctcatcaagagaaaaaattagaaaatttaaatcttgttttcttggaagatcattactcaaaatcatcatcactaaaccaattatctccgttaaggaattaaggtacgcttaagctattcatgttctttttctctttgaatgaacaaatacattttttagatctatagttatacacttataa

SEQ ID NO: 327848 - DNA, 662 bp, Cannabis indica
gcaatcattaaattcaatgaaaaaaaaaacccaaatttataacaatctaacgagtcaatccattatcgtaaatcactaatcatatttagagtagagtaaaagtagattaagatctaattgagatatagattccaacgcctaaatttaaatttattatatatgtcttccaagttctatatatagttgaccaattcatgattttttttttttaatttttagtgatacatatattaagcctctaaacaatattgaatcttattttatatccttgtatatatatatataataaaaaattagttatataaggtccgatctgctgttcaattaattttaaaaattcagtttgattatcattatatttatatccttgtgtatttaaagtaaaaaaaaaaaaatgtataaataatattatatattattcatatatataataataataattaattatatataattttaagatatatataagtgataaaatcggcttgtccattattagggttgtttctttcttacttttggataataataataataataataataataataataataataataataataataagggtaaatatcattttggaccctctgttttacaaaagttaccaattggatcttgtgttttgttaaatgacaaaatggaccctgtattt

SEQ ID NO: 327849 - DNA, 1246 bp, Cannabis indica
atttagacaccgactatgggtcagattcaagccttgggtcttgggtccttggtccatctagatcctggtccagttctagctcatgtcgtgggtcctggttcgtaatttatgtcagggacctaggtcccagtctgggttaaggtttcagtccgagtgcaggtcccgatccatgttcggtattggtccatgtctcaggtcttggcctagtttgggtctgggtcacgattcggtattcaggtcctaggtccgactatcgagtcccgggtcccagttcgggtcctggtcttgatcctagtctgagtcttagtacaagtcaaggttcaggtctcagtcctagttcgggtctgggtctcagtcttgatctcggtccaagtcgggtctgggtctcagtcttgatctcggtccaagtctgagtcccaagtttgaatctgagttttggtacgagtttgggtctgggtctaggtctgggtcttggtttcagtccttgtttgggtccgagttctggtacgggtctgggtactagtccagaacctggtaacgggtcttttgtaccgtgttctgggtcacatgtcttggcgcaagtctgggtccgggttcgggtctaggtcggggtatcgatctcggtccgggtctaggtccgtgttcggttctgcgtctagattcagttttgggtccaagtccaattcctattctagggtcttgatttcgggtctcgggtcagagtttcagttttggtgctggtctagaaattgttccaagttcgggtcttggtacgattccaatatctaaacactgactaagggttgggtccaagccctaggtcgtaggtccttatccaattttgagtcatagggtacgatttaaggttcaggtgtgggtttgggtctgagtcctagtctgagtctaggtccttgtttgggtttaggtccgagtcttggtcccaaatccaaacacctaccacatgtcgaatctagttagagttctagtatgggttcgggttcaagtctgggtttgggttcgggtccatttctaattcccaaatttagacaccgactatgggttgggtctaagcctcgagtcttgggtcctaggtccctggtccaaatccagatcctggtcaagttctacctcatgtatatggtcctggtttgggtctcaggtccaggtttgggtctaggtttgggtcttgggtcctgagtcatgggttcgggtccccaattcaggtcagggtcctaggtccctgtct

SEQ ID NO: 327850 - DNA, 543 bp, Cannabis indica
ttctgtttaaatgaccattttacccctcggattttctatgtaaatgaccattttatccctcaagagtgaggatgctttgaacaaattgtgggcttatgtggtacatcgggtaggattggatcgaattgttaactggattaagtaaaattctctagcccgagaatgagtctagagaatttatttctttttcatagggttttgtaacaaaagatgactacacatataatctattttttcttttaccaactttgagctcgctctcgagtgaaataacactacttgttaaaaatatattagggttctttgtttgtctatttctattaaaaaaaaagtttttggcggttaaaccctcctaactcttgttttacttgtacttaatcccccaagctcaaattttagcatcgaaacgtccaaattattgaactgttagcaaatttaaggtgtcatttggttaactgcctccatggacggttaatgtgtacactcttatacatgtgacacgtttatattgatacacctattattattattttaaaattaaat

SEQ ID NO: 327851 - DNA, 1309 bp, Cannabis indica
taatataatcactaaaataagatctcaatcatttatctctattcagccaagctcgaagaaaatcatcgtttcacttctaaatacctataaaatctgtaaagactgcttatgattaataccttggagttttaaataatttgggtttgtgcatgagatttaattattatttatataatgcatattgtggaaatatatttaagtttatgtatgttaattatactatttaatgtaattattttaatttcagtgcttgtgttcggaatctgtggaaagtgacgttgagcctttagagagttgcgtttatatgtttagaatatttgtatcggggtgttattattgggtattagaggtgttgtgaattggtcgggatttgcaaaatgtctaatttatccttgggtgattttggatattagagttatttaggggtaaaatggtcataatgttagaaaacccttttctttgtcttttgtgatcaacctaggcttaatttaataaaatgatttcttataaataaaagctagaaaggttaagaataacctagaagaagtaatcaattttcccatacctcattctccctttctttctttcgtttctcctagaaccaacaagaaaaggggattagtttgctgcaattggagtgatttcagtaagatgaaggtatcttgattaaggtataattctttagccttcttcccttttcttttccttagcttaggttatgtggtagttttattttctgtaagtttaggggctgtgaattgtttagctttctagcttatgaattctgatgttaagatagagttatttaagtggttagaactgttttgatgggttgttgtggtgtttggttgaaattggagttttggagctcaagctttgggctccaatggtaatttgtttttctgagtttgttatgagagttattgcttggttttggttcattatggtatgagcaggtgttctggaggttattggaaagtttgggcttgttttgaattaaagggatcgattttttgttcccagctcagaaccggtcaaccggttctgggagacctcttgcaaccggtcgaccggttggtacccaggaaccagggttctggttgggaaccggtctgccagttggggttttttcctgaaccctagttttccctgttttgtgttatttaaggtgttaggatcctatttatcgatagggttatccttagtttcatttctaaatccccgataagtgttttagcgtgtctctcattaagttttgaacgttatggtttagggccctgtaaaacgttgagctgcacttccactcagg

SEQ ID NO: 327852 - DNA, 870 bp, Cannabis indica
tattaatttttattatttaacattcattattgcactgaccttgtggattacatttctcacctaccgttataatcatgattttacatcctcaactgccataatcatgcaaaaaaatttttgaaaaataatatcatgcataacgttttttttgtaaaaatatatatctatctattctatataaaatgtggctatgtaacagaatttttagtttaatggtatttttgatttcctatgttaattttaatagaattacttaacgtaatattctttattaattttataatattattatatatatttaaaaataaaaaattatatagatattttatataaaaaattttaatttaaatttaaaatacttagaatattataaatattctatataaggaaattttaattgtaatattttatattagtcttctggtcatatttagtgtgcttatattattcattttcttaatcgatgtaaaccttctcgtgaattgcgtcaaggtgaccctattttacaatttttatttctcatatgtaataacgttcttgcaatacttatccaacgtgcgcaggatggtggggaaattcatggtattcaaattgctagaggtgccaccctgcttttccacttcatgtttgttgatgaaactatgatttttgctcaggccagctcaaaggtggctgagaccttgtgggtttgtttgaagaaatatgaaatttggtatggacaatcttgtaataagagtaaatttggcatatttttctctaagaggtgttcgtgtggaagaaaaaaggagattgaaagggttctccttatctatgagatggattcaatggggtttatcttgtagaagtccattgtgttgtcaaggaattgct

SEQ ID NO: 327853 - DNA, 725 bp, Cannabis indica
gtgttgagaagccctgttttcaggtttggattttgagcccaagtcaatagagtcccacaccctgacagtgatcaagttaattaaatattattattattgttattaagctctaatgaacaaattagttaattgaatatttcaattttgcataatgaaattatgaaagtaggttggcaattttcctcaaacacggcaacaacttgaattattattaattaattttcatataaataaaatcaagaatatgaatttaatgagctaaggtaataatttttaaaacaaataaatttctacataaatatggaaaaaaagtagttaggtggggggaaggagtactactagctcaggcaatgaaagtaagaacatctaaaataacagagcatataaaaataaagatatgtttacttgtaaattaagttgtgtttcaagacttcaacgttacatgttcgtaccttcgaagttggttgagaagtaagattaagggtaacaaaaagcttataaggattgctactaccacaacactgattttgttccacataatcaataaggtgcacaaaaaaaggaagcaataaaccacactgcctttatattccaaacccaaataacccaaccacaacttcctcctggttccctttttataggcattaatattatatatatatatatatatatatagagagagagagagagagagagagagagagagagagagagagtagttagta

SEQ ID NO: 327854 - DNA, 593 bp, Cannabis indica
tttaaaccaaaaaaaaattccatgagaaaaaattaatggtaaaataaaatagtctttaaatatattaactctattgaaaaaagggatgtacattttaaattaattgaggtggagcattttaattggattgggataggaagacagggaaaaattgggacagataatttggtagccaataattactataactttctgtaggacttattttttctttaacgtaatataatataatattatttttgaaaaataaaaacaggaacttgataagggaaatgacaaaagaacaaaataattaatatctttttgtttgttgagaatttattttattttatttttttagaaggcggtgcactctcataaagttctttaattgtccaagatctttttgtttggttgggtgagttcttttgttcagattttagtttggaaacttatttcatatattattttttattttttttttaaatttacagtttgagttgtttcggtaattttgccaattatttcaatataagttgttatacggattttgattgcgatttaggttgctccattagttactataggaatttttgtgtaaaattccataaaaa

SEQ ID NO: 327855 - DNA, 1238 bp, Cannabis indica
atatttattatttactgacataattagagagtgaaaagaagagtgagtgtgtatgcgaggttctttgttaatggagaaaaaaagagtgcttttaaaatgggtgaagttgactgtggtgttgagttaaagttaaccggcgtcggttagatattgagttatgttgtattataaatagatattgatattatgaagggtgatgagatgagttattataggtttgatgagatgagatctaacggtaagggaggtgcgtgatattgaatggattagtgggacgcatgcatgggatgtttgccattgggattgttctggttactagagcaagccagttgttagtctcacagagtaacctcggccatgtgttgttggccagttttaacaaagcttatggtgacagacatcttacaatgggtggcataacatcttacattggtgtcatggcagtggcaccgtggcacaaatatattaattaccatatcaccgtatctctctctatatatatttgctcaccatttcaatatagaatttgtatatatactataaactaagagagctcctattcacagtataatatagtgtttttgtttttatactagctacagtttatacatatttttttggtttttcattcgattaaatcatgcattggtacaataaatgatgaaagctttatttaattatctacaaattgtctagaatacaatttgactaaaaaaaactagaccatggttattagatactttaaatatttaacattttatcaatgtgttacattataataagtttagttagtagtttcggtattatttattaaattaaattatataggatctaatataaatgtactaataatagtacagacaagtacttggcaccaaaataataaaaagtaatatattgttatctatgttacaatattaagtatacatattttgattaaataataatataaaaaattgctaatcacttacatcatgtcacattatatagtattgggcacctaaatattgagttttgtgccctaaataaaactcatttcaatataatcagatttactaattaataaagatcagaaagaacattttatgttgcatggttcaaagaattaatttcatgattatatttaatgtatcaattctgttaagtccagaacatatgtatttgttaatgattatagtgttgtcagcacaatggaatataatcttgattatgtgttcgaaagtttaattccctgattt

SEQ ID NO: 327856 - DNA, 842 bp, Cannabis indica
tttattaaatactttaattaaaaattgatttatttaagtctaaaaatagaaatttacctatcagtgacctgttatagcaggtaataagaaaatgtaaccatcatggttacatttttattgtaaccattgatctactcacccatgtatgtatatatattcacttacaattttgagtgtagattagtgaagatcaccataatttgaacaaagtatagattacaatccaaaaattagactcctttatatagtgtttaagtaatcacatttaaaattcaaacacaccatctcatttctatcacataagagtattaatctattttgtatcataattttgaattctttaaattaaattgtgtaaaaatcatcttattacactaattatgtgtgatcaacataacaaatgacaataaattgtaacacctcttcaaactacaatatggaaattacaaaagtgtaaagttaagaccataggttagatatttatttatcatatacttaatatatataataatatatttttcacattttaatttatacttattatattataaaataattaaaattaaatatcaggggagtgtaccaacataaccagaaatactgctgcaataataggactcgttttaggcttttgaagctccataacactataattagatttgtaataagcttcagttttatagatctcaatttttatttttacttttattttttaatagaaaaaggtaaacgctaatagcttctcaaaaaaaaaaatgagaaaaaatttcagaagccgaaccaattagacgaatataactttcaggatttatataatatatataaatatatatatttatagg

SEQ ID NO: 327857 - DNA, 1385 bp, Cannabis indica
tcaagtgacgtgcagagattaattgctgggcgatttgtctctcttgtttcgtctgctggaatcagaaaagaggtggtcttttctttgttgaagttcattggttcttgaacacaaggaaaatgattgatgaggagtggttgcaagccatgaagagggctaagtggctgaagactcatcagggttatagtgctcccgagggagctattctcctgttgtctaagatagaaacatcttcatgtttgattaccccgaaatctttttattgttgatgaagcttattatggaagcaatttaggctctttctctgttgaactaaagatgcttggagttataaccgatcatgttgaatctttgaaattgattgcagaaaatgcaagtctttgtccaaatctgacttctgtaacagctgattgcggtttgcttatgcttgaatgcatcaaagtttgtggtacttctgccactagcttgattgaaaggattaaagagcagccttggttaaagacaaactcggggttcgagacccctttcgaaactacttatcctaatccaatatggggctctttggctaatgctttgcagattcctactgttgacgaactctactatggagatgagcttttgaattatcatagtgaactgagtgcaattggagtggctgttgatactgcttgtgtaattgaaaagattgatgctaagtttaagcttcttttacattcatcaaaactgggacctgatatggtactatcaatgttgaagagtttgaaagaaatgagacaaatttcatcttcaggatgtgttgaactgcagtgtttgtttactgagaagtggttaaaaactcgttgtggttacaaggctccaagccaatcaattgtttttagtatgaattggggagcggtatcgccttttgttgaccttcctctaatcgatgatgggttttatagcattatgatttacaggtacaagaatgaactccaaatgttaggtgccattaccaactttgagggtggcgctggacttgttcttgaaggtctaaagagtcccattgaacctgaatttataacagcttctggtacaatagcactgttgaagtgccttcagtctgttatgtccaagtcttctgatcagtcattgcctgagaactttcttgagaacatctccaaaagcaagtttttaaagacaacaaagggttactcagttcccgaagaatgtgttcttttcgattcagcttgggaaggtactttgaaccagactgatgtgccgagtattgatgtgacgtgctacgaatcagacttatcggtgtacaaggagcagttgaatgccattggtgtaagaacagattctatggaggtttgctctcttgtctctcggctactctattcgcaagc

SEQ ID NO: 327858 - DNA, 901 bp, Cannabis indica
taaatttttaatataatataaagtttaagatttattataaaagttttaatttaacacgtttttcaagaaaattctttaattagcaaagattgcactgtaattgaaaaagcactgtaacgtgccttaccattagggcattacaagaccatcttccccatcgtccaccaactaataaatcaaaaaacaacaaaaataatgtactatcggaccaatcatcgtcccctatcatcactatatcgtccccaaaattataaaacaaaaacaaaataaataatgaaccatcagactaactatcgtcccactattgtccttatatcagacattcatcttcaaccacaaattccttatatcacagaaaaatcatcgggcccatatcgtcttaccattgtactccatcgaacttaacacaaaacccccaaaaaaatgtaggtttcacctagaaactcccattttaccaccattatcacaggtcagtgttccctaagccaaaatagaacaaatcaaacaaaatcctacattctattttacaaaataccaatttcaactaacattttgtacaaaaaatactcgaaattgataatttttaataaaaaatacgtacatttgccattggttcagagtgttcttcgttcttgattggcgcgattggtgttcgtcggtggtttttggaaacaagatgagacaagggagactcgtgggtggagcttgggtgttcgacgatgatttttggaaggttattgaaggttgccgtttcaattaagggaagagagtgagagaaaaaagagggagagagagagtgactggagggtgcagtttcatataatttaatataatagcttttagggagtatcgctattggtccaactaagtatcgggtcccatataatttaatataatagct

SEQ ID NO: 327859 - DNA, 1002 bp, Cannabis indica
tatatttaggtgtctataaaagttaataccacatatagttttacataaaaataattgcataaaatacaattcaatataatacaatacaatacaatacgacctaatacggctaaataagaaaattgttcaaagaataggtgagaaaaaataaattagtaagcaatgataaaattttattaattcttatcatatatactccatctacttctaataacttttttacttcttttttttttttctttttttttttttttattttaatttagtttcctttagtattcttttgctatggatatgcacatagataaaattataagcaatgataagtacatttaagtacacacttattttttaatttgtgtggctgagatttattatatattattatacttaaaagtagtatataatgtaagagtgtctcaatcgttattctaaaattatatatttgtaaaaatgtatttactcttgttagtctctcaaaatgataagacagtggtgcttctgctagtactgtttaatttttgtctctcttattataaagaggaccgatattcttttaccctatcaagtgatactaaaaacatctctacttcaaaacactaaatataatatatagtatatagtataaatttatactatatttactctaaataaaatactaaaattatatttataaataacttcatctacaaaatcccaccaaatttagtgaggtaggtagaccacaattaatttttttaaaaaaaaaattgataattaaatattacttttaagagaaaaaactaaataattatatatatttagtattaaaatatttttattatattaataaaataatagaataataaataatataaaatttggtataattttagtgttgtgattgaaaaattaaaaaaaaaaacttagtgtgaaatagaaattttttggtgttgatttaacactaaatttaagttttaccattgaagatggcctaatagattgtatgagctttttttattc

SEQ ID NO: 327860 - DNA, 556 bp, Cannabis indica
atggtccattttgttatttaacaaaacacagagtccaatcggtaacttttgtaaaatacaaagtccaaaaaagtatttaccctattataaaaaaatattttaactctcataactaccaagtaaataatcatataacacaattattataactatcaaggtataaaaaatacaaaggtacaccaatactttttttttcttttcttttaatgagttatggagaactcattattattattatcttaggccatcttcaattattatcaaggtataaaaatttaaatatgatgcagttttttcatcaaaagcgttcaacattttaaaagtatttttattttggtgagagtttatagtgtcccactaataataatagacattagatcactgtatttttacttttaattttactttttaataattaaataatcttttttaaaataacaaataattatataataatataatttattcatcaaatattataataataaaaaatatattttttttagtattgtggttggaattgaaaaaaaaaaggaaacttacaaaattactggaa

SEQ ID NO: 327861 - DNA, 880 bp, Cannabis indica
  modified_base (836)..(836): a, c, t, g, unknown or other
gtatttgggcgaattcaggggcaacacaaggctataatataatgtggacaccttccctttattaaatttttaggtggtgtttgtttgggagaaattaaaacattagaatagaaatgaaaatgaggatagaatatgaatgaaattgaacaaaatttataaaagaattattaaattttttctcatgttaaattaaaattttcttctattaattttaaaaaaatagtcattccacttaaatgatagaaagatcattttattagaatagcatttcaatactttaaaatgtaaccaaacaaaaaaataaaataaaaattgcatcatttgtatttcattttgctttattacatccaaccaaacgctaccttaaattaattaattttagttatgtaaaaaaaacacttattggataaacatttttatttttcaaattgtggtgaaatagtggacaaaatacaaaaaaaagctccatggttggtctagttgtcacttgtcatttgctggaagagctatgctagtccattctattctcttgggccttagaaattattagatgaacatttttattcttccgccaaaagttacggctgaaactgataaattgtgtcgtgatttcttatgggataagtctgagaataagagtaagttgcacttcacttcttggagctaggtttgcttgccgaaaaattaatcatggaggaattggtcttagggaagggaaaaaaataaaatattgctcttatggccaaataaatatgggctatctccactaaacagatggcataagttgagaaataccactttattaatcaattaatcaaatttacctcaatttttanatttaattgaaacatacctctttttatattgtattgtacccaaa

SEQ ID NO: 327862 - DNA, 950 bp, Cannabis indica
gtttggtattcatgatgattattgtggctattgtggttattatgtttagatttaatttgtgtgtgtgttttctttgtttttgttggaggagttgtgtttagtgctttggtttgggattgaagtgaggattttatgtgtgttaaataatgaggtagagaatatagtactatcaatcaataattaggtggtatagtactacatactttatattttaattattattaacaagtatatatttatagagaaaataatttaattagcgtaattaagttttatgtcacgcatgcacttttttgtttggctattatgtcatttttaatgaaaaagaaagaaagagatatatataatagttcagtactgtacgtgataagtgctttatttgttgaggctgattggtacatgttatggaaagatagttagctcctatcaaattaatgtgatgttgtatgttatggtatgaaggactaatcaaattcttatatatgatcatcatcaattaattaatgaatattatcattataaataaataagtggaaaacacgattccactttgtatcaaatattacattaatttggatattaatacaattttagtttaatttaggatgaataaagactatagatactatgttttacgctataaataaaataataaataatttgacttattaagaattttgacatgttttagtctataaataagtaatatttttaagagataaaataaaataattagtatataatattttgaatatttaaggaataatgggtattaaaaggaaaattttatttatgtttgattttaaaagggtaagagtaaggaatagggatcctatgaaggttatgaagtagaatgctataatttagttgttactagccaaagggtaatccctttggctagttctagtattttatagggagatctagttgcttagtcttggtggttggtt

SEQ ID NO: 327863 - DNA, 599 bp, Cannabis indica
tatacacataattttcgaaagttgtgtatgatcatgacatgtgattatgaacattatattagatagaaactttctccacattactaacactaaagcctatacataaactcaagtcaagtcatgagtcaagctctcagtctctaaacttttttgtttttaaccataataattcaaaaatctaaactgatcatagactagactagaaaaatagtatatcaatttcacttaaatttatataaagttattaatgtttacagaataattattatatccgaccccaaaatataagctatataattgagttgttacttgttctacttaatgggtcttcttatgtaccacaaaatttataattttgattcttgttcttatgttatttcacatgaaaatatgtttattcacaaataactgaataaatgattctgaaggttatttctactcctggtccaccactcaaaactgttgcgaatggttgtacatcacttgtgacgaccaaaccaaccatgttgtttccattaatattggtgatcttgtcactacactttattggagaacattgtcccacatgaattaaatgtaaaagtattgagccatatata

SEQ ID NO: 327864 - DNA, 821 bp, Cannabis indica
aaaaacttaaaaaaaaaaccgtaaaaaaatgaaaaaataactaaaaaaaaaaaagataaatttttttgtaagaatccctaaaattttcagttttataatattatccaattaattaaataaaaaaatatgtaagatgtgtcactgacattataatagtattgttgaacactactgatattataaataaaacataagtttcatatattttgttttaaattacgtatttaagatagacccatttcttcaagaataatgtgtaatgtaggattagaacttatgtcatttgcttttgtgcagaaatttgcgattgtttacttggaaagagacctgaaattgttaagaatccttgtgggtgttctcaagagctcatgaaaatgatgaaggaattaaaagaagatatggacaaagtaaattcaaggatggatcgcattctattgcagcaaaatcacaatagggtgcctcaacctatctccatttgatttttatttattttttgtgttcatcttggtcaattaataatgaaactatattgtgtcattgcaatcacactgattatgatgatgataatgattatacagaaattaaagtgcggttggaggttatgaaatggaatgaaatggaaaggaaacaatttttattccattcctttgtttggttgcattttaaagtattggaatgacattcaatggaatgctctttccaccattttggtggaatgactattccattttaaaaagaaaggaacgaccattgcaatgtaacaagaaaaaagttaataattttttattaatttttttatgtcattttaaatttattccatt

SEQ ID NO: 327865 - DNA, 1488 bp, Cannabis indica
aggatgttaaaaacatactttttagtaaatctaggtcctggtaaaataaattccaacacaactatcatatttttaatttgtacttcaacgaccatgggattgttgtgagaatagatggtggtcagagtcttcttcactgaatgaaatgattggttcttgtttgtgtggctactttggttttctttcttccacaactagtatttcatctttcttcttgtagtattgggtcttagcatacctttctctaggttttttcaagtctccagcaatatgaggacctccaatgataacttgtatatgtatgtccactagtggaggcattaactgttttgattattatctagttggggggcccgttggtcctagtcagccttaatgtacattcgtatgtacgagttgtttttcctgatgagtaattatatttcttcttttaggttattgcactcattggtatcatggccgtagtgtgcatgaaagcaacaacatttggtggtatccctctttctcatatctttcttgattggagggagtcttttgtacgacaccacagattgagttgtcgtgaagataatttctatttcttcagtaaggacagtaaagtaagtgaacttcagaactttctcttgaggatgttgttgctcaaagttattattgaatttgcctttattcccattgccttgatgatttccattaatcgacctttttccactttgacacaaattgttatgttttgaggttgggagtttagattgtgctggatagacatattgacagcagtggtgtgaccttggttctttttctaaccaactgtgtctacacgccaaactatttcttgaagctttataaatccatctactcagtctaaaactctcccattgaccccacagcgagccttttaaaagctttccataattctctcaaaggatcaattcctcctaggatggcaggcagtcttccttcctcggtttgtcttttcacttttatagcatcgatcataaacctactgatgtagtctctcaaaggcttccctagtatttgtttcacttcaaccagatcctctaagtgagctatgagtttccttgaagaggaaaaatataaatgaaacttcgccatgaaaggattccatgaacttaactatcctggggctaacttgaagtaccactgctgggcggcctccgccaaggtaattggaaagattctacactatacattacctttcaccgcctccaagtccattttcatttcaaagtacttgatgtgggatagaggatcttctttgcccgtatacatcttccatgtgagcattttaaacttgggcagcagatcaagggcattgatgtgcagtgaaaagtaggggtgtacatcggttggtttggtccggttataatatatttttaccaacccaatataaatctcggattgcaaatatctaattgtaacctgtccagtgaaaaaaataaaaaaaagtgtaacccgcccaatgatttt

SEQ ID NO: 327866 - DNA, 826 bp, Cannabis indica
cctgcagcttttggttgacaaacttgttcccaagcaataagtccaggaacattaaaaacatgattgcctttccataagaacgctcgacaaatggcttcgatatctcttatagttctctttggtaacaccataacttggctccagtatgagtgaatggacataagcacagagttaacaagaatggcccttcctccaagagataggtttcttgtactccatgttttgattctcgctgtcattttatctgctaaaatcatgcattctttccctgatattcttttagcacaaattgggatacctaagtatttaaaaggtacctcttttttgttgaatcctgggcaatcaatgatgcgttgaatatcagattcttccataccacagcagtagatggccgatttgttggaatttggctatagaccagaagtggctgagaataattttattccatgtagcatgtagtaaaacctgttatagtatccatgacaaaagagtataacatcatcagcaaacatcagatgattcaatttgagttctgcacatctatcatggaatttgaactcctacttggacccaatcttaagcattattctcgacagatactccataccaagaacaaatagcaatggtgacaatgggtctgcctggcgcaaacctcttttcccttcaaaatatccatgaagtgagccattgaacataagtgagaatctgggagtaggaacacagatcatgatcaatttgacaaacttattaggaaaatgataggcttaaagaacttcttccaagaaatcccaatcaagggttgttgggaattattttaccaggatct

SEQ ID NO: 327867 - DNA, 965 bp, Cannabis indica
tttttttttttgttagtgctaacctttattacatttatattattaaaaaatatatattgtatattaagggatataaaaaaaatgggcctttttaattttgggaccttgtgcaatggcccaagatgctcaatgcttgggccggccctgagttggagtagtctgcattgagtaaattattcttaattaagacactcgatcctttgataaaaatgaaaataataaaaataaataataatgatacattaattataaattatatttatgtgcttaattatgttaaaataataaataataatttaagcactaaataatttttcagagtctaaatactaattaagtctaaatactaattaagaagtacatattttatacatatatgattatacatattcttcttggaatgagataaaaattttattatcacatataagatatataaacacttttttgtacaattcaacttgtaggtgcagctggggcttgcatttctttatatacactgcatgtatatatgttttcaattttcgtactcagcttcaaacaacatacatatagatacagctttaataaagatatgtatatacatgtacatatacgactagtgccattgatttgtaatctagattagcatatatatacactatttaattttaagaaaagtacatactggtccttttttgtttgtttgaaatacggtccaccttttaattgagttattcattgatacaatttaatctcatcttttatataataagacatatatatttatcattttccacataaataaatatatattaattcttgatgaaataagtattccatgtgtagtcaactcgttataatgtggcgttttattaagcaaatatatataaataatatgtgtacagtgaatattaatacagtaggaaaactggttggtgtcctagaaaaaaaaaaaaaaacaaaaacaaaacaaaacaaaagaa

SEQ ID NO: 327868 - DNA, 1558 bp, Cannabis indica
tttgaattgtattttgaattcttattgtctatagtcatttgggtaaatctttttataacagggatccctaaaataccttttcaatgctattataatgtccattttcagtcttttactttagtcaagtttttaatattctcacataataatttattaatatattagtattaatctagtttataaaatcacacacgtgacgtccctatagaatagggcgttatagtgacacaccttaagagaggaatggagaagctccgtctgtacattatcctatttaggatcaggtacatagcagcttttcttctcagttttcttgcttcatttttgtcttctggcaaggctccagtttggaggtaagctacgataggtgtcatccatgttggagtgtcatctaacatgttgacttcttctgggacaataatgctgggttcctctaggaactgtatgggcaccaagtttgctttgtcaccaatggtgctacttgccagacaggaaagtgcatctgctgtgccattctgttctctagggatctgcttaatcgtgtagcctttgagctgacttagtaagttttcgatttttctcaagtaggccaccattctttcacattgagttgtgtattcacccaggacttgattcacaactagttgagaatcgttgaatatgttgagatggttagcccgtacttcatgtgccagcttgaggccgactatcaaggcttagtactcagcctcattgttcgaggatttgaagcagaatttgattgctgtatgaagtttctgcccccaggtgctgtaagagaaacgcttgcactggacaattggtcagtgtagcttccgtcaacatggagttttcatgttagttctttgggattttgttgctgctcttgctctcgcttcttctctggctcatgcttttctcctaattcttaagggatctcaagagtttagttggtgcacgcatccacgaagtctgcaagggcttgaccatttattgcggttcttggttggtatatgatcttgaactggaaaatctcaatggcccatttgagtagtcagcctaatgctttaggttttctacaaaacatacaatagttgttgatcgatgtacaccttcatggggtttgcctggaagtagggcctcagctttttggaagccaagagcaagctgtaagtcaacttctccatgagcgggtatcgactttttgcgtcaattagccttttgctgatgtagtatacagggtgctgtacaccgtcttcttctcttgtgacgacaacactcacaacatgctttgtgactactaggtacacgcctagctcttcattgtctaggggcttagacagcaccgatggttggccaattatttcttcagctcctggaaagtaattttgcattcctctatccactcgaatcttttattacctctgagaatgttgaagaagggtacacatttgtctgttgtcttggacaaaaatctacttaatacagtaatgcgtcttgttagactctgtacttccttgatagttgtgggtgacttcatgtccaaaagggcttaaatctt

SEQ ID NO: 327869 - DNA, 1150 bp, Cannabis indica
aaagattttcagcaaaaggagtttcagcatcaaagtttcagtgaaagagatccaggttcatttaattccgctgcacccaatgtaaggtttcctaaactttatatgtgtttaattcatcgttttagaaagttcatatttagggtgttaatcaacatacttgtgagtaaatctaagatcctggtaaataattccaacattcacccccaagggcctcaagtatttgtccaccctgttcatcctctatgccacacaagaatggggtgagccctcccaacatgacaccaattggctctttaatatgaactcaagtcccaagcaaaacatgtcaggattctactatttttcttagatcaagaagaaattgttgacgggtaccacgaccaccgaggtgactaagatagggggctttgtggacgaatactattttatcaaaggaatgggcaccgtccacaccagcttccagcaagtttcgtcctaatgccgccctccgttcacaccggagcttaggaaaagggagtagaagattctttaactccctcgtgctacacggaacatctcctcttggccatcgagccaattttgtcaagtacaaactttatttggctaattttgtaccaaaggctgtgaaaacagcaaaagaggtcgtgcccaaacaggaaactctgagcaagaagaggaaacagaaagctacttcaagcagccaagtacctgttgagcggtgtatccggatcagggaagaacctgaaagagtttcctggccatcatccccagtggtaagaaagggaaaggctactctagttgagcaggagtgggaagattcttagacgatgagcctccatctctgcttattcgggagaatgttcctgcctacgtgtagggtattttaactctattttaatttttatctgtattggcttatatcgtacttgtcattaaccctcttgttgtgttcacgtgcatccatgtctcaaaaggtgttccaagccctaaagaagaggccaggtgacagctccgcccatacccctttgacctaacgatcaaagggtgatgagatatcgcccatggagaagagctcgatcgagtcacctatcgatgtctccgaggaggtggcgtcagaggtggagccacttgttgggttttgtgccccaaa

SEQ ID NO: 327870 - DNA, 1100 bp, Cannabis indica
ttttctttctttctaagaactttcctgggctgctgatgaagttttaacagtcaataaagtaagagtctttattatcattaagcttcttacattccaaattaatataaacataacaaaaattcagacaaaaacatcaaaaacagacaaatgggtgttacgaaattcacaaattagaaactatgaattcactaaaactaagagttaccttatcacagacaaagcaggcaatactacaaacagacttgcaatggttacaaatcctcttagagctctcatccttggaagccccaccctgagaagcattaccagaattggctttggaatccttgtcctcccatttgagaggcttgttaatcacagaaggcgagtaattaatcaaaccccaagcttctaaaaaatcaaaaaccctacgaacagagccaacgtcagcaatcagaatcctccggacttcagtaaaggtaatcttcctcgaaggatcagctctgtaatacttaacaatggagtttctcaagtacttgtagatcccagggttcttcctcgaatcgaaaaactccgggagaaacctaacctcacattggtgtatagtatcccaagaaaaccatcctgaaccaaatcaaaagaaaagtcaagtcaggcatgaaattgaagatctgtttagggttatgggaagtgaaagattcttacttgagtagctggggacgagggcaacaacaggatcggggattggagttggttccggaggtaagggattggaggttgcggcaggtggtgttggctgtgaggagatgtttgtggaatcggcgacaggagtttcagactttaccggcggtggcggtgctgtcggcggcggcggttggggttcagatgaggggtcttcttcatggggcgttgatttggtggccatgtgggaatggagtcggtggtgaactggtagagagcccagtttttttctctaagaatggttttttcaacattaaaactgcgtcgttttgatgtagaaaacgacatcaagagtgaagtcctatgttgaaaacgacaacacactttagtatttaacagaagtttatttatattattattatttaatttattttattttt

SEQ ID NO: 327871 - DNA, 1045 bp, Cannabis indica
aggcatgtggattcaccacgtggcttttacacgaccaagtgtcaccgttgagattgtggtttcatcacagcatgcgtcatcctcgagttatatggagattcgacggtggtgattatagttgggtcaaacttgagctcttcaaggcatgtgaacattatttagtacttttttttaaagggaagtttccactattattataaatcaatataatgttttaattcaacttttgctaaattataagtatggttaatatttttcttaacatgaaaaataaaacaagtttaaaaaaaaaacacaaacctttaaaattaaatttaaaaaacaagataaaaaaaacaacaaacctttaaaatgtttggtatagaattcaaaatatcaaacattcgtaatcgtagcgcatccatttcaatataggtgctatataattgttcttgtagcgcctaattgagattataaaaaaaaaaaaaaaaagttttaagtacttccattttattcgaacaaaaaacatccttataccgactttgaaaggacagtgataacacggtcgtggtgatctcgaacaataaaacccacacccaaaatttttaatgcagactctagggctacatcttcaaccctgcattatttagcggcttccatgggacaccttcagctggattactggctattgtcaaagtctaaacaagaataggattgcacacagaatttccatggagtgaacgtcgatgagataagtaacatttctccatatagtttaaagaaaaaatagtattgtgtgctttttctgttctagttccaccatgtaaaactctatttctctctgtccatatcgcccacacggtataaataataagctcgaaatcggtttgagaatgtaaagagaaaggtggattagataatcaccattatacatttgttgagctttttgataatcaatggtgaaacttgtatgcttctaaactgatctagcatgtagacaataaaaaagagcatgcctaattaattctcacgcatttgtgtacatcgagctgttgggttttatgcc

SEQ ID NO: 327872 - DNA, 634 bp, Cannabis indica
ataaagcaatataacatgtgtttcattacgtaccaaccaaggttgtccatattgttactaatgctatattttggtagttggtgcacacatacatacccatatcatatctaccaattttgtccaatatataataatgaaggcatatccaattatttcctcccgggactgaaggggcggatactattcatttggggtgtatcttagtcagtttggtcgctacattctattcaactaaatataaaaattaagttataaaaatttaagtggaactcgcctaattagaaaaaaaaaatagtaattcgtccaataaaattagtcagtttggttgggttaatccgtctaaactgaccattaatatacatatttctttttatttttacatttaatttttatattttaattaattataataatgagacaaatatatataaattgaatttaaaccccaaattaaccaccataaaaaaatatatattagttttaactttatattttctaaataatcatataaattatatgatatatatatataaccctcttaatcgagttggtccgtttatttcgggttgattggacaagttggtattattttcaactcgtgcaacataaaaaattgggcaggttatattttcgt

SEQ ID NO: 327873 - DNA, 787 bp, Cannabis indica
ggtgaccttgctgccatgaggttgcctcaagatgttcaaggccttggatcttgtgaggtaataaaataatatttatttttatcattaccaaaaacctttcttaaattgtgaaaaaagttaaattaatttacaaaactattacttttatagaattatatagaaaaataccataatttttcttcaacaacaacaaaaaaaaaatgccttaaatttttattttgccttacaataataacaacaaaatataaatgaagtaagcatcattctatttttttttattgattgatatatgtctataaatatgtatattgtgcaatgttggttggattgatcaaacggttattaattattaaaagttaaaagtatatgaaactaagttaagggatttttacaaaaatattagaaattgagtaaaaatttataattttattgccacaccgaattttttataacaatactatctttttataaaacaattgtaaactaataaaacagaacaattaaaacaatactgaaacaacaaaaaaataattatagagtaacagtgaaaatttaatacagtacacagtattttttaaaaaaaaaattctgccccagtgaaaaaaaaaattgtgtaaaatcctaagtttatgtatcaaaatttttagatcttagaaatttgttgggccttagaaaaaataaagaggaaattacactctataccttttttatattatcctcttttatttttaccctcttttttaaagtttatcatttttacctctttttttaaacattatacaaattt

SEQ ID NO: 327874 - DNA, 1682 bp, Cannabis indica
aataaaataccaaaataatatctgacatccatcatttctcattttaactagtacatagctaatttaagtcatccagaccatctattccagcttaaatgcaaaaccagtttcattagaagtttaataagtagaataagactaaactaataacgattttttctcaacggtaccatcctcatctactagcatcaaactgagttcccagaatgagaaaaaataaggggtgagcttataaagcctaataggaaaaaaaaaggaacatttttattaatgcatatataaaatatttttattcatttttacgattttttaagaatcatttcattaatacacaatctataatttctcttacaaaaaatgcggttcatacacaataaacacattataaaagaaagctaaccaaacaatatattataaaataacttattatcaattatttttaatttatatgagtattataattaatattatatttattgatgtgatccaactgatcacagcagacaagatcaagaacaaaactcaaatgattaaagtcaaaaaaacaaacttgcaaatcttagctgaaagaaatgcaattaaacagtaaagaatgtaactaaaacgaacacaagaatgaaatcaaaaattcagccattgaggcacttcccattaagcaattatgcaaagaatgagtacacatgagttggtggtccaaccaagaaatagagagtagaaagtacacttgaattgacaccgcatttgctggttttcacataccagaacacaactctctttctctcacttctgttacaataaaataaaatgaaccaccccaagccttaagttagttatgtctatttatagacataaccaacttaaccgacacaactaacataccggtattacagttgggaatagggttcggaaagagaataaacatctaagtcttagtttctaggccatattacaacaattccaccttcgcatagacacttagactttgaaattaggaacagagcaagctgaactttgattaggagatgagaaactcatccaatttctttgatgttgaccaagtttaaacagtgtctaaacttggtttgagtaacacattttgtgaacatgtcagctgggttatgatttgtgcagatcttcttcacttgcacctctccatttgcaatgatctctctaataaaatgtagttttatgtcaatgtgctttgacctgtcatggaacatgggattcttcattaggtgcaatgcactttgattgtcatagtggacagtcatgtcttcagacctgaatccaagttcacttgagagtcctttcagccagattgcttcttttatggcttcagttgtagccatgtactcggcctttgtggatgacagggctaccaccttttggagattggacttccagttgatgcatccacctaaagcagtgaagatgtaacctattaatgatcttcttgtgtctatgcagccagcatagtcagagtcaacaaatccttcaacttcacatccacctttctcagttgttttgtagattaaacccagtttaagagaccctttgacatacctcataacccatttgacagcatcccaatgctttggccctggatcagcaatgaatctactgattatgctcatgctcatggcatatgccaggtcaggccttgtgcataccatggcatacat

SEQ ID NO: 327875 - DNA, 702 bp, Cannabis indica
aataatatatattaataacgtatgcaaatgagaatcttatcatatcaaaaacataaataaatactaaaaaacattagtagttattaacacttccttctcgttgttatgtgtcgactattagtacaactaagtattaagtctcatataatttaatataataactcttattaggaaatatcgctaaccaattgttattaggtgccacttctaaaaagtactaagctctactaatacttaataacaatgctctataaaaaaatgagagaaatgctaaaagacacttaggtaccaaacaagaggtggcatagtactgctatatcataatttacacattttgatttaataaataatataaaaaatcgttagtcactcacaatcagggccgacccttacttaaggagggctaagccccgtatctaaggctggcttattttaagggtccaaataaaaaaaatacaacctttaaaaaatacatattttttaaataattttttaaaatactattgaattttatagtaagggtccaattttttttttttacctatgacctatttcaacttaagactggatctgctcacaatgcaccatatttattataacaatgctctagaaattatcatatcataatataaaataataacaatatatatatatacgtaccttccgtaacgaagagtacttgcagggaggctagtaccaaaa

SEQ ID NO: 327876 - DNA, 785 bp, Cannabis indica
ttaatatctgcaaacaaaagcttcttatcttgctcagaataagctgggaggcctaagtacttttcatgacattcactaactggcatccccaaaatttgactgaaagaatttctaattgattctggggtatttggtgaaaaagcaaaaaagacttgtcctcattgagaagctgtccagaggctcgatgataaacatctaaagctcgtttaatagcaccagaagaacagtcattggcttgacaaaagagcaggctatcattagcgaataacagatgcataataggaggagctcttcgagaaatagttagcccttgtaaacgtccaatggcttcctcatattgcaacaatcgagagagaccttctgaacatatccaaaataaataaggcgataatggatcaccttgacgtagtccacgttctggaacaaccgtgcctttaacttcaccattaatgtggaaagaaaaggaagttgtgtgtaggcaagtcataataagagaaatccagcaaatattgaaccccattttacccatcacagtagctatgtaagaccattcaactcgatcaaaagctttactcatatccagtttcaaagcagcataacctttataccctcttgttctatgctttagactatgcaccatttcgaacgccactaaaactgtgatttgcctcttgggtaggaaagcactttgtttctctgaaataacattcggtagaacatgcatgctttaatcgaagagcaatcatcttggaaatcaatttgtaaatgacattacaaagactaat

SEQ ID NO: 327877 - DNA, 746 bp, Cannabis indica
tggcattcctcatgactttttccataatatttgtaagtttttttttaaaaaatgtcatatttagaataattaagtttttatgccatatatatcaaaacatatcttcattttcccatatttttgtaaatagcccttatatttatatatagtaaaaatattaaacaaataaaaattttatgtttttaatagctatttattttttgggtgttgaatttataatatttggttattttgtatatttattttcatgatattttgttttacttgatagtattttacttattttaaatttttttaaggggatgtactgatatactatctacttgttttggcatcttgaagaattttttagtctaattttttttcatattcatgtacgttatgcctatttaagatatcttacaaaattttgagaaattcaaaataatgtacaatatagaaaacaatgttcaaataatctattttatatgtgtataaaataaattagtcatgcgtgcaacacactgtttgaacatagtttgcgacgtgttaaacttttctaaatttcttaaaattttgcaggatatcttaaataactataatttacatgaccatgatatctaaagtggttgcagcgctagttgcaataagagtttctatacgattttttgttgcaatttaggttgcaatgctagttgcaatagaaatttatgtagaattctgtaaaaatacaaaataaaaaaaaaaaaaaaaaaaacaaaaaacaa

SEQ ID NO: 327878 - DNA, 517 bp, Cannabis indica
ctgcgagggttagaaacttggacgatagtacccagcttactcctcttcagacagggatcacgattgatcttgccactattgggggcgagctatgggatgacctgcagggtcgccaagtgaaaaacatcagcgagttcaatgaaagagctcaagtgtttgttcaaaaagaggaagcaagaaaagagatgaagttgttaaagtctggcttgagaagtaaacccaacactgtctcgacaggcaccgtctcaaccaaggttgaaaatctagaggcctctaattcaaagagaaaatataactctaaggagtcagccaaggacaagaaaaagcaaaagaagcacgacaaatacgtgccaatatacacaatttacaccgagctgaatgaaactacggtaacaaatctattttgtcacatgagcacaagatcgtattccgtaaactttaaagtcccactgaggcgatgtgagacataagagagatgtaaccaaactttgtaagtatcacaaggacattgggcata

SEQ ID NO: 327879 - DNA, 1222 bp, Cannabis indica
tatagtagagagagagagagagagagagagagagtgaaagatgagatttagtcaattaatgtttcaatgcaatgtgtacatatacataaagaaataaaatatgagcatgtgtaataaccatacacaccattattaatttatatattccaaaatagagaaatttgcatgtgaaagactaaaagttatattttgagatgctatactatacaaaactctaaagtagacatcttaataggactaggaatatttactgaataatttaacaaattgggatgataaatagtagttcctcatttgaaagatggaattgttttctactcctagtccttggataaacctagtagagtcgagaatttctaaatataaattagcttggaaaagccaggagttatgaacaaatgagcttaatttgagtcgatcaagaacattcaataacttgtgtataacagtacttgaagagcaaaagctactgtacataaagtataaagtaaaaaggaaagaaaaaacaaacattaattaataaatagtttcatactaaacaatgtttgtgcgctgaagagatcagatctaaaggttaaaaagaatgtggttaattataatatatattatatacaataatactcaaacattaatatataagcaaaagtagtttttcacataaacaaactgcgaattacctctcttcttcttcttcttcttcttcttctttttatattagaaacagatgacaaaacaacaaacactagaaaacaacttacaaacagaccaacctaagaacaaaagaaaagccatcaatcttggatgggtacaaactattttaaaacaactcaaatttatataataataataataatcatcatggatctcttttagctaggtgtttctccgaatagatttcacgtgctataaacagtataattagatatgtaaattatgttattactttaaatattattgagatataattgttcaacgtgccagtatatattgtacgaattaataataattagtatcaaatttagatgccagaattgcaccgaggagaaataccaaaggatataatgggttatttgcggcaaaacccctttaagtggacatgtttttacaactaaccccctaatctaaaattttggtggtaaaactacctaaaccactagtccgttagcagttaaccctttccatccatttttggctgttaactgccatggtggaatgtccacgt

SEQ ID NO: 327880 - DNA, 698 bp, Cannabis indica
gttgttagttgggtttttttttttttttttaaaagagaaaaatgttattatattaaaacgaaaaggttcataatacaatagttattagaggaggagggattttctcaaactaagtacagtcagtgttctccgtgagagcgtgtttagctaaataatgagtagcattattagtgaatctgtagacatgagagatttgaactccagaaaaattagacactaaaacagaaatattcgctagcagataatgaaaatcaaaaatattaacttaggtttagaatttgaaaattgttttatgtttttgaaaattaaaatggtgggttcacataaaaattcttgattagttaagtattttaaaaataaaatctaaatattattttgagtgttaagctacaaaatgaaaacatcattttatgttttttatgttttcaaattatagaattcaaaaactttttaaatattttttttactttttttttattattctaaaattctcaaccaatcacatattcaattttttaaaattcaaaaacaataaatcacattacaattaatcatatttttagaaacaattttttacatacaaaattaaaatttttgttttcagaacacatctttaagaaaatacaatttttaaatcataaactaatgaatcccttagaccatgtttggtattgttttcaaaaaattatttttagaaa

SEQ ID NO: 327881 - DNA, 764 bp, Cannabis indica
gttttgaggaagattcctctgcaatttgtgcgtcccatatatgtatttatatatatatatatttctcattttatctcctgatctcattaatatatattgtcatcattaataattgcatgcatgcttgaaagaaacctgcttactatatttatatattaactatttttttcctcttgtgtggatcattttaaataattattcatttgaaatatcatatatatgtaaaaagaaaaagaatgcaataataataaatatatatatgtatgtggtatgtgttgtctgaagggaagagacaaagagggatgttgatgacttttcttttcttataaatgaaatgatcttcttcacactgatttccacatatatagagagagagactactgcatgcaccattaaataccattgttttttagttcatttgatttgtacgcaacacacagagatgccttttcattagtctctctctctctctccctctccatatatatctatttaacacgtaaaactacttatccatcaattcatttcttaataaaattataagatgatgacttctacttcacctgcatgccttggcttgtcctcaatcatccaatccatcacaccatgcatgtatatagaataatgattataattagttataattaattaataattaatgaaatataacgtatagttgatgtgattatatatttaggtaagacttaagagttaagaggtgcacgtgcgtggggtagagagtgaaagatatatatatatatata

SEQ ID NO: 327882 - DNA, 1343 bp, Cannabis indica
caaaataaaatttcaatctcatccaatatatcaattcatctaaatctcatccaatatagtattttattttattaattttatttttgaaaccaatccaatatactcatttaaaatataaatcatagctatcaaaatattcatgtgcaaacaaacacatcctcaaataatgcttgcggagcccactcaataattggaaagaaatataaaaaagagagcaagacaataattacactctaaatatagaaattattttatattaaagaaatcctgctatttcacttttttgtctaaaccaatttcccaacagaatttaaaaatatatatatttttttacaagttttaaatgttaatttagaagggaatatacctattttagttaattatgtgtttcatcgaaaaaaataaatttgatatcatatattttcaataatatccaaaattcaaatttaggatatcctatatatatattgaataacaatagttgtactctacatttataagtgtacacatttagtattctaattcaaatttagtcaattaaattttataaattcaattaaactattttcaattatatgtaatttaataattaaatttaaatttaaagtttatgcagttgaagacagagtactaaataagctcttatacgatttcaaaatagtacgttgaatactaaataattattatttggaaacacaaagtagtaaatttgtatttcaacatcaaatgtataaacaccctattagaatatatatgcatggagaagaattaaaaaaaaaaaattatctcatatattttttcaagtaaataaagagaaaagaatcactaaaaaagttactttatatactaacaatttttagtcataatataaatatcgtgtgactcttttagtataacaaaaaatacttgttataaaagaaattaatattttcaatataaattattaatttttaatttaattttagtcgtaacataaaatttcaaaaaaaaaaataataaaagaatttttattcttttaaattagaatcatttctactgttcctaattccctcatatatgatttttttttttattatatattattgatgtacagccattttttttttaaaaaaaaaatcatttaaaacaatattacctaatacttatagggtaagtctatagtatattttttaagtagtgtttcggtaaactcattatttgttttcgccttggcatatattagtgttttttacttctattttttttattaattattatacgttatacttatttaggtaccacctataaattttgaaaaaaattacgagtagtttacaatattgaaaaataagatttacatattt

SEQ ID NO: 327883 - DNA, 1377 bp, Cannabis indica
acaataacaaataactttaaaacgcattaaattgatacaataactaaataaatatatattaataaataaaaagtatataaataaataaatttatttataccgagctcggagagagagggagacggacgggaggtggtggtggtctgacgtatgagacaaagatgagaggaacatcgacaggaggtggtggtggtttgacgtatgtgacggagagggaagggagaccgacgggaggagggctgggtggagattgatggacgagagagacgagaagaaagggagatcgggagagggaggaagacggcgagagaggagggcgaaggtgcggaggcgtgggtggggttttggagagttaagattttcgttttatggtgtggaaaatgaagaagaaatatgtgagaagaaatagggaggtatgtgggaagtagaaaaaaagtaggtgggcacgtgggaaatgtggcgagaagtaggtgataattttttaatgggcccttatactcggtttaaaactgtcgggtatagtattaatttatgtaaattttcttttttgtgatattttttagaaaatgaaaagttgtataaaattaaaaatgttacggctcaaattaaaattatgtttttttagattattatgtttgtttttaaaaaaataaatatttttttaataaaaaataatattatttattgaataacaagttaattatataaaaaacctaatatatatcaatatttttattatattgagaggaataatatgtttttttcttaatttagtgcttaattagtttttttttttaagatgaaataccaattttattgaataaattaacattctctacataaaaaatgtaagagttcactagaaatagaaatattaaaaatactactatcagaattgataacgagaatgtctagtaacataaacataatgtgaatttagtgcttaattagttaagaaaaaaaagaatcgcccatgccatgttttgtgtttttgatttttccaagtttgttctcaatgaggttttagaaaaagaaataagatgcacaattaaggtatagccagctttgcaaataaaactaatttaaaagtaataagacataatatcatcattcaagggtcaattatatcttagttaacgttgactcctatgtgaagcacttgactttcaatattaaggcaatattatgtcgacattctttcgacactcgaatgaggtttatcatagtcccttattaatcgccttaaatgtcttcgaaatcccaacccattctccatttagaaaatttcattatatgtatttttccaattaaaactcttaggtgtcgactcgttaacaaaaccaaaaaacaaactcatatgtgtcgacacttttccac

SEQ ID NO: 327884 - DNA, 1941 bp, Cannabis indica
tagggtattgttatattagttactaatagcataacccttagttgggggtttgggtttcccaaattagggttttagtgtgttgtttacccatttatgtaatgtgactaggggcatccatccaacacgaggttttccgttcaggtcggccaactcacttaaattcagaaacgaggcaaaaatagcatagaacatattatatatgcggttatgtgtatgtgtgatttatatgcatgcttattgtgatttgtacactaccaacactagtacggtagtggtactaagtgcattggtatagtgtacgatgtttaaagtatacgatacggtgttactaacactagtatgggtaggtacagagtgtatatggtataacacttagtggtactcgaggtacgggacaaaccctaccaatactcgtatagtaacggtacgtagtgcatgtggtcgaccttagtaaagaacgttcttacttatctattaagccttgtggataggtgtatgagagcctaaatacaagtcgctaatatatcatttgttatatgtttttcttactaagtctgttgactcacagttgctactttcatgtgtaggtaaaggaaatgcgaagactgaaaatgagtgagctccgagcttagatggtgattgtacatgtcaggatgacgcgacctagagtgtttggtctcgagacaccttggacagtattttgtagtcactgtgcgacatgtttgcaaatatattttggctgtatttgtaaaagtttaaactcgggatccccactatgtaaatatatatatataaatatgtttatacattttaataatttcaattaaagttttaatttggaacgatttttgagaaaacccctttaattagcaaaggtagcaagttaatattagaaaatctctgtatcgcgcctaaaaattagagggctacaaaaagttttttttttatttttactaaacagatttttatctttagcttgaacaaaaaaattactttagctcttaaaaaatctccaccaaacaggtctaatgttatattaatacagccaaattataaaataaattaatgtcaaatatgacaattagtattgttacaagtattctattaaatttatttaattaattcctcaattgattacaacagtattataaggcgattcacattaggtgagttaaatttgagctattatactccattctctaaaatataaagaaaaataaataaaactagtcttttatcaatgagtgctataatatattattcttagctcaataaataatatttctctacatatgtatatgtgtgattatattgagctagacttgagcgcaatatttattaagttataaaaattatattaattatttaaagcttttcttaatatatgtgatactatattataatttattttattttcaaatagtaatataatattttaaaaatataatatttaaatgatatatagaaaaggtagagaaattgatgtataatgtaatgaaaagtgcgaaataaaattaaaaaaaaatttaacaaaatattttaaaaaatagagtagaaaagttttaactattgagtactcattctttattgaaaatattttctctttttaattagggtaccgttaggtaatatttttactttctatttttttaatcacaaagtgaaaataaaatttttatttttaaaaggtcaaaaatacattctgtcaccatttttgttttttaattttaaaaacagaaaataaaagtgtgttctgtaaagtttgtttttatttttctttttggtattttatttaagtcggatctaggtccggggtcggactcgggttcaggtcagaagccgggtttagtaccagggtcggggaggatttagatccgggtctggtcggagtctaaaatattgattagaaaaaaaactatttaagaaaatattaaaagtaat

SEQ ID NO: 327885 - DNA, 653 bp, Cannabis indica
aatatttttttaatgataaataagccttacaaaaagtaaaattataaatttgtcactaatctcatagttgtactaaagattatagtacttaatagcaatgcttactcttatattttgtgtacttcaatatttaataaaaaattatataattgattataataaaatataaaataataaatattatgttaaaataaattttagtgtaattacaccttaaaataattattaagttcaaattccaataacaaaataaaaaagtaaaatgaaaatgtgaattttgaacttgtaatttccttaaattttaaatataaatttatgaatatagtaaataatataatttaataatatttgacctaattaatatttgtataaagggaatatagacttaataatatttttgtttggcatagaaagtaaagtatccaaacttacaaaattgtaattttgttattattgttgcgctagattagctctattaagaagctgactagatcaatacgtgttaatgtgtgattcgttataaactggaccaatcatgaactaatacatgctggtcttgtcagctacctaaaatcattcgatgaaattacaattttgttaaatttggatacatcgtcctttgaaaaattattaaatttactaggtgaatgtac

SEQ ID NO: 327886 - DNA, 655 bp, Cannabis indica
aaattaccctcaaaagttttttagttaagttcttcctatttttataattaactttcctaaactacccttgcagcacaactcttttccttctttctcaaagtcaccaaggtatgcactctctatagaatacagatatagtagtactacacctttcggaaccgactctactacaaccatttgaactacatcatcatcacctctaaaataaacaccgacactacgtctcaaccatacaaattcttgagagtaagaaagggtcggcgaagaaaagagacaaccacgcagcactacttgccgctgcagctgggccagggagtttatggctagggtatggtttgaacctcgagacggctccgattgctgttgatggctgcgaagctttgagagagaattagagtatagatctaaggaaggagatgactacgaaatctagatttgtttttttgttgaaagtgtctgaaagggaaaagttattgcaaatttagaaaagtgttaaaaatagagggatataattggaagaaagaatgaaaaagaagtataaattagaaaaatttgaactgcgggtaaaaatgagagacaccaaattaaaaaagggtttatttacaaaaatatgggaaaataaagatatgttttgatatatatggcataaaaactt

SEQ ID NO: 327887 - DNA, 2264 bp, Cannabis indica
accatagcatcatgataattctgagctacacaacccatgcaaaagacaacactcgaaaccggaaaaaactaaaaaactatagtcaaaagacaagactaaagaactatgccaaaagacatgactaatgaaaaaactaaattagtttcaacacataaatacgatgacggcattaaaattaattaaggaatgatgaactccttatagttttaaccccggtcataaaaaattaattggaattaaactaataacagtaaattaataaatgaaaataaaaatctgaaactgaggacgtcgttgagccgaaccgaaccattctcaaacaactgctctcttgaaccgcttacagaagaagacgttgatgtggaatgagaaaaactttggtatcaattaagaagatcaatacaattgtcttttccttcgataatatcttatcatcaagtttattgtctataccattgcctcagacttgccgaaaaaactctccaatttagaactttatcattgaaaagaacattgaagaattttatcacttgtgatcgtgatgagttggttaccgagcaccggtactaacacgttgggaatatctatgattacagagattttgcgagaattggagaactattggagaacattcaatatctactttagggtttttttttttttttttctttttggatcgatgatgaatgatatagattttttttttatttgttatgtgcgacatttacttattcttagccctatattttttttttatttatttaatgatttgtatgcatcttgtttgaagaacttaatcactatgtatgtaatataattagtttgtatttttcaaaaatgcactttaattttatgtcatttttttaatatctaaaataacattatattagtaaataaattgaatcaatcaacacatatttttaataatgaattaaaattattgatgtcttgtaaaaatcaatttagtaagtatctatatatgactaagacattttggcactaactcgagtgactttgaggaccaaaaagtaattacattgataaaatataattcatttgcttaaatttacaccccaataaattataagtgcactcttaattgttttatttatttaaatattatttttgataaatacacccatttttatttactaaattaggtttctttttttaagaaaaaatacaccccatacaataaatattcaaccaacttccatttggatatatcgtttttttttttttctagttctaatctttttatcttttctttgtgattttattcttttaaataatcattacattttggatatcaatatatgcacttacatatacatctctctttttataattataattaaaaatatcaatcaattttttcatatgtataacaataaataaaaaatactatggtcgaaaaaatagaagtaaatgaatgaaatcttttatattagtttatatatatatataatataagttagatttatacgaaaataaatacaaaaaaattagagattatataaatttaataaaatagttaaacatataatttttttatgcttatattaaattttatttattgataaaacctcaattattatcctccattaatgattcttttttaagacttgaaggggatacttttacttttaaaagtaaatgaggtgtaattattaaaataaaagttaaaataaactcatcatttaaagttgtatattttggtaatttgtacaaaaatgtaattaaaatttttatgtaaattggggtgtatttataacttattggggtgcaaatataatttctccattctaaatacttgtctttaccgagttttttaaaaataagtaagttacaaggatttagaaaaaaaaaaaaaagaaacacaaaaaatattgagacaaataagtgattggagcgttaatgaattttggttcacgagtcagtactattaagcttttagcaactcaacaattaatggagtttttgttacaatttttgcagtgatatttaattagctctttaaaaaatcgaatttctttcttggtgttgagattgctctatttgtaggtagtcatgcatcttgggttggacaaatcccagctcagtaagaggctaagtttgtctaactcagaaatgaaatatactttttgaattctaagatctcaacttcaaatatatatatatcgtctattgctccaaagaaatacttaacaatatatctgcacatattctaaaaaaaaccattaataaataagcacgtaagactt

SEQ ID NO: 327888 - DNA, 862 bp, Cannabis indica
aatcaagaacataaatgtgataaggatttggatagatttataaatcgaataaacatataaatgataacatgaaccaaatgacacaataagtgatgaagatacatctgtctctttattgatatttaaatgatagagattacaaatggagttttatttagggcataaaacccaacataaacaggcttggtagggtaaggtgttgatgctctttctcatgacgcattaaattcatgtacaatgtctcgatccttgagtgacatgtcatctcttgttagtactcccgttccactctccgtatgtacttcactcgtggagtggaaggggcaagagttgctcgcagagcaactggattctctcggagatgactaacctattattactccttgaaaataatagactccaggagtaattaaggcgatgcaaacatgacaactattcacacctcaaaggatattgtaaacttactggaatatcttttctattaaatatctaaaagttgatcttagattaatcatgttaattttgatatgattaggttctcgctcaactgtatttcacatgttatttgacttttttgttaaaagctttcctgttggtttagcttaaatacttacatcttggaaacatggtagtgtaattgagtgggagcactagtcatagatatagaatttatagattctataagttcatagaagtgaaataatgattttcttagagcttgggtaaacgagtttaaatgttggagtactcatttcggtaattatattaatttcttgaaatatcatttacaagtagccaagtattttcaggataaaatacattgaagggtaaaatagtaatttagtccctattcaatgtagat

SEQ ID NO: 327889 - DNA, 908 bp, Cannabis indica
aaacatacatacaacaagccgtgcttaacattcccccatatcatacgttgcaaaccataaatatagtgcttaaattatatgagactcaatatctaattgtaccaattgtaatacgaatctatttcttacaatgttatttttgttcaagtcctaatgtgggtgtgaaaccaacatatacagaagaaatggttcaaagagtttggttgctcaatcataaaatgataaaaggaaaagagcaaaatcacaaagagaaacattattcaattgttgcaactatcccactttagttacatttagcttatattttttaaagcaatttgcttatgtggtcatgcattaaaggtatatgtaataaccccaacacagtttcaattagaaccattattcatcatcatcattgataccaatttttgctaagtcttcaataggattcatcatcatgttatcatcttgtatataaattttgaaccacaagagaacaaaggactttctcatataactgactcaccaaatctcttatttattaaaataatggatgcaagtacttgaaattaaaattaaaaagcttccaatccaagacaccatattaattgcaacactggcattaattcttactaattaagtacttgaaatttaactcccttcatataaaattatcaaatcatttatatgtgaagctccttttattaacttactcctgcataagaaatcaataattctaatattgatcagtactatgctttataaaaatgcaaaaaaccaaaaccaatgagaaagtaaaaagagtgaactaagaaaacataaacagataagtcccactaacatgtttgttgaaagcaatgacaatcaaatttattgaaaataatcacaatgtctattgtaactactgaaagttattgaataaacac

SEQ ID NO: 327890 - DNA, 931 bp, Cannabis indica
gttaatgttttgttatatttatgttgttttgtacatagttgtatttttgttattttagagttgtttgttaaattgttttagggttgtttttttagttatttattttattttactgaaatatagtatttttgtaattttgaaaatttaaacacaatatttatataaggttaaaatataaaatacttcgtgtcttaatatttttatgatttttttttttattttacagtatttttttaagtttctctgtaaaatattcactaaatgtaaaataaaattaattttatatgaaactgaatataaaaataaaagaaaagtaaaaaaaaaatgaaagtgatatacttcacatataactttaattacacagttccactttacgagtaaaattgataaaccaacaaacattatctttcgtttatatctgtattttaattttaatttaatttcttttttgacattattaaatatttcatttatatctttcgtttcaataatttcaccatcccattccccactaaatatcaaacttataatattcttttttaaaaaatatatatatcaaacttaataataataataataataataataatttatttagttgctttaaaaaatatattttatgtaaagctggttttaaaaattatttatataaaaaaaattgttgaatttgttcacgattatactacacagacaaaatgaataaatattgacttattctattgccaggataatcggtactgcattgaagatttgtcacaattgtactcttaattaataaatatcaataaagcgtgatacttgtcaatggcagatcatgcctgtataatttataatcatatctttaaaaaaaaaaaagaattatataataggattatattaccttaaaagttgtgattatatgtggacagaaatctaaagaaacaaaaaataa

SEQ ID NO: 327891 - DNA, 640 bp, Cannabis indica
atgtttctgtaagattgttctgtcaatttgggagttattgataggttctcgatacttgtcaatataatatcaatggttaatgctttgtatctttttttttttttttttgttcattttggtctttattaataggttatcgccagattgtctatggtttattgatggtttctaatttgtcacaattatattatcatttcggtatcaatagctcgtcgattgcttatcaacgattttttattttggctttttgtatttgataatttgtttaattaccgatggtttatcgacggtttgtcgatatttttacgacagtttatgtgctaattgtgattttttaatttgcagatgtctccaaagcttatagttccatccgcagagtattttacaggtcgtgtgatatagagaggcaacaatgtatttaattagataaaaacacagtttgatacatgtcgtttgacttatagggtgaaggaaagcccttttggtcaaaccgtatgtataaattctataataacataaattctgtgttcgataatgctgacctcatctctatgaacactcttaggggtgttcataaaatagccgatccaatccaatccaatccgcaaagtgcggatatccgcacttgtgcggattggat

SEQ ID NO: 327892 - DNA, 560 bp, Cannabis indica
aaaatttcggttttgaaaaaaaaattgttgaatcttataagaatcttaaaccctaaatcccaatacaatataacataaattaaatctaactaattagaattaagattttacttcttcacgcctacgaggggtgttgacccaaactcttaatctccttgtttacaaatatttgactttctcctaaacattgaatgattattttattgttcaatatttgtcataatttatactttatttgtaatacaaaaatagaaatgtaggtgactccaaggcatatcctagtatttggcacttattattttaaacaaaaaatttaaaatctgctagctttctcgtttatactattaaaataatgtaagactagacttcagttacataattctgtttttccttctttctactacatgaataaactagtatataacttgtacaaactgttggattaaaaatcctttgtgggcacatatgtataatgtatatgctattataaagtgtgatacaaaattaagtgaccaattatgttatgggtatcaaaagggtattaaagtgtcatggaatta

SEQ ID NO: 327893 - DNA, 884 bp, Cannabis indica
aaacccgataaacccgcccgattatgctccaacttgagttcaaattcacaaattggatttcaagtattggagtgagagagctctctaatcattagaaaagttgggaaaccaattaggcttgatgaattcatgaaaaaaaaaaatagtgtcttaattttacgagttatgattgaagtgggattgaatcaagattttcctgaggaagtctcattcaataatgaatgggatgaagaattgacggtcaagctacattatgaatgaaaactaatactttgcaatcattgtgattgcgacactctaaggatgattgtaggaagaagaatatggggaatgatatgttcacactgtttgggtgccaaagaagaatttggggaaggtagttaaggtggattcacctaagaaagtggatcaagaagggtttcaaatggtacaaaaatgagggaaagttaagagcactgtagccataccaaccaaactcgagaataattttcaagttcttagagaagttagagagtgctcaatcctcatgaaaatcaatttagaaaatctagatatcatttttgttaaataacttgtcgcacaagttagtgagccaaactttgaactcataaattttagtgtactatgcaaatcactttaacaaggacaaagtaaacttataccatttgattgtgtgtagtcttgatgtagatgagcttactatcttgatttacatattttgatcgaaagttgatttttttttttagagtttgactttaactttcaggttattgctttaaaattttgaagtcatcttttggatagggttttgaattcttgatcttttgatgaaacttttgctcttatgaagtatgaagtagttgatatacttgttgaatctactt

SEQ ID NO: 327894 - DNA, 3136 bp, Cannabis indica
aagtaattacatatttaataaaatatgtccatttaaatattatttattttctgggatattacactgaagttttctcagattggcaaggtattaccagcattttgtagaaggattttctaagatttcaatgacactaacagaatttactaagaacaactaacggtttgtatggtctgacaagtgtgaaataagcttccgagagttgaagtagcgattgatcatgacaccagtgttagctttaccatcaggtcataaaatgttcatagtgcattgtgatacatccagaaagggtctggggtgcgttctgatgcaagctaaaaagttcattgcttatttttcttgacagttgaaggagtatgagcaatgttacctgacacatgatttagaacttgatgtcgttgtgttttccctaaagaaatggttatattacccgtatgggaagaagtgtgagatctatatagaccataagagcctcaagtacttcttcactcagaaagatttgaatatgaggcagaggcggtggttagagccagtcaaggattatgactatgaggattttatatcatcccgagaaagccaatgtagtggaagctgctttgagaagaaaatgtcccaggcaggtttttgttaccataaagatctcacctcagttggctttagataaggttaggaccggtattgagttcgtggttgggaaactacataatttgacacttcagtcatacttattagaaagaatcagagaggcccaattagaagactctgagttagttaaaatttgacaggaggtattagatagtcgggctaaggatttctcaatctgaacagtggaatgttagtttacaaagctagagtttgtattccaagcagtgatgagctcagaaaagaaatacttgatgaggctcatactacaccttattcattgcacctgggtactaccaaaatgtaccaagatttgaaaccctattattagtggtgcagaatgaagagagatgtagtggaatacatgtccaagtgtttaacatgtcagcaaatcaaggcaaaacatcagaaaccagcatggttatggcaaccattagcacttcctgaatggaaggggaagatattatgatggacttcgtggctagttttcccagaatcataggaatgtatgattcagtattggtcatagtggactatttaacgaagtcagcatactttgttccactgaaaataacctatacaatggatcagtatgcggaattagatgtgaaagaaatagttcatctccatggagctctaaaatctatcattttgaatagagatttgaagtttacatcgatactttgggtaagtcttgctatgggtacaaagttgaagttcagtacagcttttcaccctcagactgatggacaacccaagaggataatacaaatattggaggatttattgcgagcctatgtcatggattttaagggttcatggagtaaataattgcctttgatagaattctcctacaacaatagctatcaaagtacaatagggatggctccctatgaaattctgtatggtaggaaatgttgttccctaatacattgggatgagactggggaaagaaagtatttgtgtcctaagctagttcaaaggaccgatgaagatgcttgcttcacaaagtaggtagaaaagttattctgatcccaaatgcagagacatatgatttcaggtgggagaacatgttttcctacgagtctcaccaatgaacagtgtaaagagttttggaaagtagggaaagttaagccctaggttcacaaggtcatttgagatactcgagaaggttgggcaggtagcgtatcagctagtcgtgccactagcattatcagctgtgcataatgtatatcatattttaatcttgaggaaatatgtcttagacccaactcatcatgtcttgagttatgaagccctagaactataattagatttatcctacgaggaacaaccagttcaaatctttgataggaaggaaaaggttcttctgaacaagaccatagcattggtcaaggtactctggaagaccagttaggtggaggaagccagatgtgggtcagagtccaacatgagggctcaatatctagagttgttcatgttagattttgaggaaaaaatcctttaatggggaataatttgaatgaccgcgtgattaaaatacggattagtagggcaattagcattattatttttattttatgattttatatggatatatatatatgttgtgggccctatttttagaaaataggcattagaattataatttttaattatggagattttattaaactctaagtgtattatttttgctatgtgtgaaatttataatttttatgactttaactcggtaacgatgaaacatacgatggatgaccattagagtcacatgggtgagtttagaacctttagttagggggataatcatatgttaaattttggatatcgagattaggctgggttttggtattggaccatcttacccctaagccattttgttatttaagcactaaagtaagattaattttggctttttattttaatgataaatggattatttcactaagcctacaactggccatttttggtgataggataagcctaatatttattttcattcatcaaaaattaattaagtaatctaacctagcataagaaaaaaaaattcaacaacatttctagctctttctctctttctttcctatggctaaagcaaccagggaagaatcaaagatttggtttcatccactcttagttgtttaataagattttaaagagaattggaagctggaaaccaaaggtaagctttatcactcttttagtttgagttttgggagttttggtaaggtttaaacatgcataattggaatttaggttcagtttaagttaaagtttattttagttcaatttttgggttagttaagttgattgaggtcatttttagctagttttgctggtttggtaagaagtttgcaagtttgagtttgaaaactcaagcttggctcaataatggtggtttgagtttctatgtctgtttgcttctattattgcttggaaatagtttattggtgttattataggtattctggaaagtttggttgaatttgggaga

SEQ ID NO: 327895 - DNA, 673 bp, Cannabis indica
ttaaataaaaataaaaagtcacccataaatttctcataaaccaagaattttagttatatagacacactttatatagaatagatatacattctaaacaattatattactatacatatataattaaaatgaggaaattatagttgataagaaaattgtaaaaattcattgtaaaactggccaaaatctaagactgaaaaaaaataagaaagccaatacaaattagcttttaggaagaattaaaatcatgtaaattgtttgtttgtgttaaatgcagatccaaatgaggtgttcgttgagaggagtgtgtgtttttcctgattaatttgatctaaaagttaatatatagtgtcaaaaataatgtaaaaaaaaaagtgtgtccacaggtctcatacttcagccaaaaaaattaaaattttaaactttaaattttattttctatcattatataattcatataaactacaaaattttgtattgcacattatattcattcatctctttaagttatttttttctatatcgatcccacatagtatagtaatatatatatatatattactaaaagtaaaagtgacatttttgatttaagtttggtttttcctttttcgattaacttaagtggcgtttggtaacactttttaaaacagttttctgtttttaaaagtggaaaagt

SEQ ID NO: 327896 - DNA, 642 bp, Cannabis indica
tttatttttattttcatttgttgattttatttaagtcgggatcggggctgagtctggggctgtgtctgggatcgggtccgggactgggtctggggctcggggcagtgttgggttcgggtctggatctaaaatctggggctaggtgcgaattcggggtcaggtcagggtcggggatgaggttggggtccaggtccatgtcggggattaggtctggcagtcgggttacagggccgagactgggttcgagttcggggtcggggtttgagtccggagtcagagttggggtcggcatcggtgtcagggtcagcgtcgaggtccagagtctaggtctagggctgggtcaggggtctaggctagggttggatccgaggttcgggtcctgggtcaaggttttggtccggggttggggtcatgttttgggttcgggtctggggtgcgggttcgaggtcaaggtctgggtctgaggctggggtcggggtccgagatctgggtccgagtcggggtttgggtcttgggtctaggtttgggtgcgggtctgggttccaaggtctaggtaggagtcggagtccaaaatatagattaagaaaagtttgaaagtgattttttttttcaaatttttaaaattttgactctcaattaaaa

SEQ ID NO: 327897 - DNA, 965 bp, Cannabis indica
aaacccgctcaaaatgttcagccctaaggagaatatgtcagttatagagtatacgacatagtttggtagacttgctaggttggtctcaggaatagcgccaactaactttactaagaaagagaagtatctagatgggttgaatcctaagattagacacgacctgatggttacgactgataatgccaccacttatatgctgatatggtgggaaaagcactacgagctgtgggtgtagttgagtgtattcaggagtcccgatggactcagattattagtggagccactggtcctcctacctctggttatggtaggggtggtagtgactcaaccagtgatcaaaagataaaagttccacctgcgtctggtggctcaagtcaaaataaaaaggttccgagggaaccaagatcatggtaaccgtcagggtgggtctaagaatcaatacacttacccagaatgccctaattgcaagaagcattatctggacgagtgtaaaggtcgaggatgtttctaataaggtgtaactggacactataaaagagattgtccatagttaataaaggaagaacagaagtaaaggcaaaacttgctctagtaagggtttttgctcttactcagactgatgcggaagctaacccttcagttgttacatgtcagctcttggtcaacaattcttattactctattttgtttgactctaaggccacttattcttacgtggcagccacagtaactgataagttgggtaggtcatgtgataatatattttgtaattattatatatttacataaaaatacattctgttttaaaaaaaaaaatacataaagtacattaaaatattaaaattaataagtaaagaatacatttgctttgctttttttagttgattggggcataacttcaaatactttcactttatttgcacttaatctctaaaactcaaattttagcggtaaacctcccaaaa

SEQ ID NO: 327898 - DNA, 1248 bp, Cannabis indica
aaaattttttgaattttttttattatactttaccgaatacatttaataattacaatatatatatatatataattatagaagaaaaaaaaattatcctttaatgccgaaatagatggagtacaaggtatacaccatagagttttcatgtataataataataataaaattgaattacaagaatggttaattctaatattatttgtatgatatgataatttattatgtgtgagaataatattaattaatatatactaaaattaatctcacttattaattaataaggagactctgagtcggactacacataagaattagcagtaattgtttagttgttgttcaaacaatatgcatatgtcatctccatttagttcttttcagttagtgattagtaagacttttttagcttctttaagttttgttaaacgtacgttttacggaacaggctgcacattgtgttgttcatgactcttgtttattctcatatcgtatttttaagagtaatgctgtgacagtcagtaatttcgtgatctgtaaagaaaaatatcaagtaagttatgcaatctcacatcgtttagagaaaataaagtgtaatgattttaaaacggtatatgtataagacttcacaatttaatatgacttagataaattgatgggtattagctttatcaacaagttttatcttatttttttgatagttaagtgtacttaatcacaattgtaataaattaagagaatattagaaacattttaggagaattttcaatagataaaataagaatattatttatgaaaacataaattaaaattagtacggattttatcttaaaaaaaaaaaatttaattcacttttagaaacacgggatatattgtaaattatatttatattatatatttgaaaattaaaattaattattattctttacgtagtcaaatcttagaaaatagtgatcattttaatcgagagccacagacacaaatctgacacgtcaataaatctagattcaactaaaattttgaaaatatgaaataatgtcattggaatttttttttttgtttgtttagtaaatgccatttgaaactcattaagttactaatttgttaccgttgaagatgataacaagtacttgtgcaatatgccaaaatatatataacccttttttaataggtatcacttaataattactaaataaatttaactataaatattaatttaaaaatattaaaccatcaaattttgatctaataacg

SEQ ID NO: 327899 - DNA, 501 bp, Cannabis indica
acgtattcagttataaaaaaagtaatagagtgcatcgggacattcatttatgggacgaattttttatttttttttaatttacctttacattataattgaagagagaacattagcataagaattaattgtggagtaaaatttgaattaataaagttgaatattaaaatatttgaattaataaaattcagaaaaggaaaacaaacctagtacagtattaaaaagaaaatctcattatatttattactaagtttaaaagttgttgttatacccgtattttacttatatagttgttaatatccttcccaaacaaatcgtacagtgggttaactaccgacttttacgcatatgctgagaatcaatatcaatcaatatcaatcaatatcaatcaatatcaatatatcaatatatataaataaaggaaagcacaaaagatctttggtggcatcttatctttttttcttaactatttttcctattttctaaagctttcacattttgtta

SEQ ID NO: 327900 - DNA, 496 bp, Cannabis indica
ccttcctctttctttcaacaaaatatactttaattcctacaagaaagacataaattgaatcaaaatcaaatattttcatttataaaatatattacaataatttcatgaaaatatcaattaaaactcaatttattttatcattttaaataaataaaagtgtatttttaaccactaatcatggcacatggccttcgcgaaattgtgtaccacgagtttaagacagtgccgctcttcagacattccatccctactttggagataagggatagagcgaatcacatcctttctttgccggctgaacagagaaatattatccatatgactagtgtggacaacttccaaatacatggcttatatcaccttgctcctggggttgcgagaatgccagctgttagtgtggccagccctagagatgggcaaggtcctgacttggatgatgaagaagcatatttatctcgtattgtacaaaatacttgagaggagagagagagagaga

SEQ ID NO: 327901 - DNA, 601 bp, Cannabis indica
tttaaaaaataaattgaaatcggttcgaattagattcgatccaaaaagaattaggcggagcgaagcagatttgatccaagatccaataagtatccgaatattttggatcagagatgatctgtcggatcggagctctaacccgctccaactagatggatctttttgacatgcctaatttcattgagtatcaagctaaaagcgagaaaataagcattttaaaacttttatcttcatttttaaagaaaaaaactgaaaataaatgctatatttatagtagtgatgatccactccgaattaaattaagatacaaacccataaaccacaatatacatatcataattagcaatgctattcaatcaaattcaagaataaaaatataataaatttaaaccaaattttatgatttaagaataaaaatacaataaaatcaaatctatgtccaaacttaaattttttttttttttattcataggttgccggctttaaaggacagacttactaggtcgatgaccagatctgtgtcaacatctcctagctatcgtcgtgaagagcgtgtgccagtggttgtcatcaccacacttgaaatatatatatatatata

SEQ ID NO: 327902 - DNA, 1458 bp, Cannabis indica
tgtgtaccaataaactctcaacacgtggtttttttgtcagcatttaacagtgttgttaaattgggtatgaacggacaaacaaaaatagggaccttaggtattttcaccgccaatttttgaggttgaggactaatcggcatcaacctcaagtttttggggacttttgccgcaattatcccttctcataataacttaaatccaatccaatttgaaaaagtagagatcgaatcggttactttagagaaagtaaagatccaatttaatattgagttatttaatatatattaaaagtattttttttttatataaaactaataaaaaaagaacaaatgattgttgttttatgtttccaacaataaattaaaataaaaaaaataataaattcaaaagaagaagaaaataattgtatgtataaagaaatatttaattttattttagattgtatttttcttataaataagaataaaatatatttgatatactaagttttaaaatatatttgtattatataaattagatttttaaattaaattattaattgcatatataaatatgtgtggattaaattagattggttacttttatatgttaatcaatatctaatttgtacaagtgcaaattttaaatattttaaccgattcaatgtgaatatccatactttgcagattgaattgaattatttattttatgaagactcttaatatttagtaagaaagagagatagattgatagagaggggtggagggagagagaatagaatagagaggtaaaatttattgtttagtaaaagggagaaagagaaggataggagagttagagggacttcaatctctaaatcccaaaatatctaatctctccattttgtaaggattttagataaagataaaataagtatactaaaattaccctttaaaatgaacaaatatttatgctaaaaacaatattatgataattttaataactaattttatctctattctataaattcaaaaaaaaaaaaaaatctctctattcttaaattttattcataatatcaaacaatagaaagagaattattatactttaatcctttctaaattctccttccattttactctctttctaattttttttttcttttgcctccatcggtatatgtttggtaagaacgaggaaaggagttgatcaattcattcgtttggtaattactaattactaatgagattgaatgaagaaaaataaattggagaaaatagtaaatctattgtaccctttaaaatattatttaaaaatgactgtcacatatataatataattttgtaagtacatacttatctattcttacatcactttattctttcttcctaccaaccaatataacaaaatttactcttagggggtcttatattcctgctaacttatggttcttattgttgaaggaccttcattaataaagactttatttttcaaaaaaaaaaa

SEQ ID NO: 327903 - DNA, 1518 bp, Cannabis indica
agtgtttttgtttgataggactgatagggtccgatatagtgtcccattgtctctatcaaattttctaagtttagtgttttgttcgataatactgatgtaggtctcgatatagggtccgatggtgtaaccaattaaaagttttattaatgttctctataatttactaaagtattgtgtataactactaatacaatgataattgtagaatgtacgtcatagagcatatcgagcataagatattggaacgcaaaaaccatatctcagttataaactcaatctttaccctcaagctcccaaacaccattataaacccaatctctaccctcaagatcccaaacaccattatacataacaatagcaaaaacagttgaacttgtcatacacagacatttaaacaaaattaacttatagaacaaaaatctaataaaaaagtggtaaaaaaaatcctcatatatctgtcaagcatcgaacacaaataggttttagttagtcattgtagaatactttataactcacccactttgaacaatcaaggagttttttttggcaaatgtcaataatgtgttgtaacatttgcatcctactatttggttaccaaggagacggccgataccagctgctatcgaaaacttgacaaataggtggtagataagtgagatggcttggaggtcgctgggtattgacctttgaaggagacttggtgtcaatcactatgaaggtagtcatagtgatgtttaccatggggcagtttcgactgtgagtggtaatttgattttacaagggagagatgtcagccacaaggagtgatgttaactcacctgaaatagtacatgagctgcttgcatggctccgagttacttagggactgacccactcctttcagggatatatttggtgatgcttgattattaaccatcacttttgccaccatgatgtttgaaatttcgttgacactgtctgagcttgactgctcttaccccagagttgatctcttagtgactagggatgaaaaactttgaagttttatcagttgaagctatttgttgtgagtgagttagacaattattagtgggttattgcttgtgtgcttggtgctcaagcataagttaactttatgattataagtgagatgaatcactgtcgaagagtagtgcagaaaaactcgccatataatctgtattgggtgaaatcacaggttgttgaagaacctggtttgataatttcaactcatagatccttgttaaaagtttaagaaaaaactctaagggaggaaaaataaaaaagacaaattggactaaacctgtgctaagtacaacgtcccatactcaagaggagtttagccactgaaagaataccacaactggggaaatttcccactcttaagggttttcttcaaccaattagaatatctcttctggatgcagcgtcctgcttccagagagctttctgtaattgatgatgcttttcttttcttttttggatttttgtaattcgaggaggaacacttgcactaacact

SEQ ID NO: 327904 - DNA, 733 bp, Cannabis indica
catattaggatgtaaatgaaacatacatggcagtaaatctagatcctggtaaaaatatatccaacaccatcttgttggtagcactacaaaactcacagaaaaggtatctaagacaggtagaagaaggggaagagtgaacattggtgcaatctcctgcacagtgccccagaatgatgaattttcccatcacatttaccaaggatgatggcaaaaatatgtgcttaccccataacaataccttagtaattgatgcacatattgctaacaagaaagtttctagggcccttgttgacaatgtaagctcaatcaacatcttattcaagtttgtgttccaggcgataggactcactgaagcgaacttaacttcttatccccttccgttgtaaggcttcaatgtagatgcccttatgtcgatggggaaaatctagttattgattacctgcaaaggagagaatgatacaagtgcttttcagaactcaacttttgtggtggtggatttttgaacaatgtataatgagaaactaagatggtctaccctagtggactttgtgttggggattatttaccaggatgtagatttactaccatgtatggtatttaacatcctaaatatgaatttctaaaataatgtaatttaaacacatataaagattaataaatcttacattggttgtagcggaattaaatgactcatttcgctcagatctctaactcttgtatcctttctgtagca

SEQ ID NO: 327905 - DNA, 991 bp, Cannabis indica
aaaagttttataaattttatgattattagtgaggtagcttgagttttgtttcgtcttaaataaaataattttttttttaaattcttataaaaaaaataaataattttttaaaattattattagaaaaatacatttattttcaaatatttcttttttgagttcgtaagcctaatccgccttaactgaaattgaacttgacacaaaacttactataaaacagatacgaactaaaatttataatatttttcttgatctccaaatagtactgttaaatctttttatgctatttagctcaaaatactaattcatcctagtagtatttttaatttattgttacaagaaatgataatccaaaacgtttttacatgaaatatgttcatatatgtgcgtttaagtcattcaaaaaaatataatatttagttttagtaaatttttagataatttattacctaaaaatttaattatagtaaaattaacttatttcgttcacattcaaaataatatatttttatattttcagcactgtatttactcaaaatttcggcaaaaattgatgggagattcaacatacataattacatatgtcatcatttacaaaatttagaaacacttttattagtaaaatgctcaaaccaaataacaaaaatcctatatttttgtattgctatatttttagtgaagtacattcttaactttgtgaagaaaaaaaattccatatatcttttgatattattaccaaaaacttctttgtagatctgtcacaatctaatattgagttgggtcaatgcaaacccacataaagaaattatctgaaatatgttttttttttaattattttataagtttgaaaaatataaaattgctaactaattagtacattttttatggttctcttagaaattaataatagtaactggttactatcacattttttttttattatcccatatattttttttaaaaatttatggtttgggtttctaaagtggtt

SEQ ID NO: 327906 - DNA, 824 bp, Cannabis indica
tttttcacaaaccaccatggatattgatatcgtgaatcataaaggaaaaaggaaaaaaaaaaactacggattttgatatgaagaaatcaaacaagcaacaaaagtggaatgaaagagatgaaaaagattacttgaaaaaaaaatagttagaaatgaagaaaggcataataacaaatactaataaagtagattttactacaaaatgagaaattccaacttcatttcgataatttttttacataaatctttttaaacagaagataattacgatatggggtttggtttcatggaggcagagattcagagagacaatccagattcctcatcttcatcaagagtggaagtgtagataaagtagttagcccagatgagaccaaacacaccaagaaggatccaaccaagaaggttgttgctcagcccaaacggaagcccagtaccttctgtgctcaatctctcatccaccaaagccatagctggactagacaccgttgctgccatagctgcagccattaaagaagctcccatacccatcttttgcttgctttcagatttctccattgaacacctcacttttcctcccttcgccattgtgggaagtgctaaatgtacaattcaaattcaagttcggaaaaaaaacaatattgaaaattgaaagaaaaaaagagtagctaactacaaaaacttataggtcttattaccaagaacaggtgaggattggatccccaaggatggtttgtggagaagggatgcccggaggactgaagaggttggagcactagcggtgaagcttgccattatcgcttgatgaagcttgattttccgag

SEQ ID NO: 327907 - DNA, 1026 bp, Cannabis indica
taacttaaggttgtactttaaattggtacaaaatttctttaaggagatataaagattcaatttttaccgagtcaaaagaaacgaaagaatatatatatatatgtatataaaatattaagtaagaaaagacccccattcgccactctctctctatctttctctctctagaccacaaaagaagaacccacagacccaatttgcccgcataattctgacaaccactctccagccaccgtccgaccccacgctcgagaccattcaaattcccaagtgctgatgacctcaaccccaagcagtggcactcctttcgccactgttagccccagatcgcaagtcaaagtttggaggttcaaactttgaatagatttttcggccacctctggtatccgtttgccaagtcgtcttcaccaacagactcagcttgtcaaggagaacaatctacactaagccattttatccagcttgctactttttttggtgatgtttttgtagcttcgccccttttcagcaactttctggcgatatcgtgcactgtttcaaaaattggctggcatggtgtgatatactcgtcgaggtagtcattttgatatatagtatccctacttttggcacgtttttggtacatcaatttctaccgccactgatatttaatgtgcatcacttaggtgaggtttcagaactctaaactttaaatataatcatattatatgtcgttggagtcaattttgaatgtagaatacaacgatgataattatttagccatttgatggtataggtgagagtgatatctaacattagactaaataattggagctcgagatttgagagcttaggatcgtctttttggagaaagtttaacgacttagttaaggtagagactcaactttattattggacttgattttatatgtgttgaataacattagacatattctaatttttataatttggaaattgtaaaaaaaaaaattaaaacttaatttgcatatttttctggactgttttaggacactgagtgccaaatat

SEQ ID NO: 327908 - DNA, 1313 bp, Cannabis indica
ttttttttattttttttaattctataaattctaattctaatcctaaatgaaatcctataaatagaaagagatgattcttattttcagacctgataacttaacttagttttcactttgtttgacaacttagaaaataaagagagagcttctcaaatttcgaaacccacttcttcttcctttgaaattttcgaacccttagtgagttgaggaatattgcccatacaattcaagccaatattcaggcctttgtagaagattgtaaagaattccaacaatacaagaaaatcaatgtttagatcttgattatactatgtgacagcaaggatcaagagttagatatctaaaggaacaagacattatatttgggtgccaccaatgtaagattttctataactttaaaatgtgtttatttcattgttttagaaagtttatattcaacatgttagattataattctataatcaatatgcatgttaataaatttagattttggtaaaataaattataataattggtcttagagttatggtaatgatttattttcatgaaaatataaatttaaaatgatgtttggatgatttagatgtgttcatgttagtttatgtaattatttgatgagtgattgtatattacgaaatttcctatgaaaaatatttttgaaaattctccttaatagaaaggacaaatctccttaacaaaatgggtttggatagtggaggtgtgggtggtggtggtggtggcggggtgatagggtgagtctagtaggtggtggtggcaacgacgtggtacattttctttaaaataagtaaaataaaataggtatacaacgtaatttttttcttataattagtattgatagtgttattaactttttctttaaataatagagaaaagtccaaacacaaagattgccaaggatattattgggtccaatgatcgtaagtgaatttggatctttatacataaactcaccaactcttgcaattgctacaatgaaagtaaatatttactccaattttttatatgtataaatataatgaaatgcttaatttatcagccaaaatactattattattttaggagaattttagtgtaatttttaatagtatttataattatttataatttttaaaaaatttaataattgatagtgtgaaaataagatccaaacaattagctcacttcacacacacatatttaaattattcctgtcagcccaggaataaaaaccgtacgtctaggcgttccctgttgctctgatctaccctacgcctacgggtgttgtttgggccaagagccatagttagttgttg

SEQ ID NO: 327909 - DNA, 1283 bp, Cannabis indica
caacactaaattaaaagaatataagttttatcaattctaatgggattaagttatcccaaactaggaggtttaattatgttgttggattaatttttgtaacatctttctctaacttgataacagaattacatcataaaagttattcaatccaatcccgccgtccaaacgaggccttaaggaataacttaccttgttctgctacaatgatgactcagatcttgatagaaaaccttgcttacatctcttacttttacagatcctttcttaatcagttccgaaaactacatgggtaagagataaaacgaaatgaacaactgtcaataaaatcaacatttagtaaatttctagttttagaatcggaaagactcacctcgtcttctgtttcctcaagtaacctgtatcacaatcaaaagttatactaatcatctttggtaaaactttcaagtcgaacccccttaccttccacaataagttgaggtgtctttcgaataagcatgagcttcttgtttatctaatagaaattggtgaaaaatataattactaggaaataaaataaaattcatatttcattctacaccaagtttcctgttatgctccctatttgattgaatagaatatttaatcaaagcagcaagagtcaccaactgaagcaacaacaggaaatacttaatagggatattatcagcaagaacataagaagcagaaaggaaaatcctttgatgataactcaaaaaattaaagcttaaaacttacattatccattcttgtacttggggtaattaattatgagtttattatgaccttattcaagttttcttttcaaaagggaatgaacatgagcaaaaggagtaatgatatgtcatatatgcattttaaatctagttgttcagatagttttggtatcttatatcaagccaaaacagtccacaaacctatacaatctgaatgtgatgtgaatttcgtagaagaaaatttaaaatccaaataaggttcatttgctgaatcataacactactacttgggatgaagctccattacccaaccatatgaaatcttctccaataattatttttttcccttacaatacacctaatcattaacttatgccagtgaaattcattaatcaccattgaaccaaacctttgtaaaaattattagaacagtaaaaaagtaaaacaaaataagatgaaaaatataaaagaaacaaaccatgatctataaaaatgaggggtgcgatcataccagcactaatgcaccggatcccatcagaactccgcagttaa

SEQ ID NO: 327910 - DNA, 720 bp, Cannabis indica
actcgagtgaaaaattatgacaaaaatacgatttccaatcttcttggaatttccagaaatggcagactattttggtaaaaacggccaacctttttttggcacaaaaattccaaatttcaaatactttgaaatactaccgaaacctatccaaatcattccaaactttataagatacatatgtatcatatatacaaaaatcttgacgtaacataaattaaaaaaaattaagcccttaaataggaaacgccattaatatttggacttaaccttcaaaaagttccaaactcgatttttaacttaaaattacctcaaattcaacaagtatacatcgaaactagtcccatagctacttaagaacaattccatgaagtaaaaatctccataactactctaaatcacaaagtcactatataaaactaattgtttttaacttaaaatgaaaccaatccttaccttaagcttttccacttaaatgatttactatcttgctactactggaggttttgggtttaaaattaaagaaaatggattaagggagatgaaaattttatcgcattgaaggagagggtttcgtttcgttcttctatatatgttttaaaacataatatatatatactgataagctaaaaatttatcaattgtatttatatattataataataataataataataatatatattaataataatattaatattataaataaatttttattaa

SEQ ID NO: 327911 - DNA, 616 bp, Cannabis indica
aacttgattccgataaaaattgaggaacttatgaatttaggaagttttggatgcactcggacaagggactcattccgcgcccgtgcttcagaaaatttcctgtctgaagtcgctcgcgcgcacctccttcaaacatcacgtcccgcgcctaggaccctgcagcttaccgaggtttctcggtcagggaggctgcaatgccgagttttcttggctggagtccttacttccgcgcgcgtagctccctgggtgcagcatcctggggcagcacgggtgatttcacccaaaaatccaattttggtgggatttttttcccaatttcagatttttcaaaatttcaaaccccaaaattaaaataaaatgttatttttaatatttaaacttaaatataatttttttaaaaattgtaaatatttatttttaaagtgattattattaatcttttgatattttgaggttttcaatttaaaaattgatttattttattttaaattattgttaaagatttaaaaatttgttaatttccttaatatttatatattcatttaattataagatcactatatttttgatattttgactatatttttcaatttaaaaagataaactttatcttttt

SEQ ID NO: 327912 - DNA, 720 bp, Cannabis indica
atgcacctaaatatttgtgtttgtgttattctattccaactagctaggttgttgcatggctcgataaatccccactatctattgtacatcaaatataaaaaaaataaagtaataattagttaatagctcgaacaaccaatatcaacattgccatatgcatatattaataataataaaaaaattaataataataattaccatgacttgagatgaccttggtccaattaattatatgtgcctatgtgtatttcttccaaggttagaaaaagagaatagaatatgctttagaaaattttaaataataaaaataagtataattatatatgtatatatatatgtatggagatgtaaggagagagaatgttttctttgaaataattcagggagaaaagaaaataacaagggcagatgaagatgatgatggaacatatgaagcttaaataacaattgttgaagatgatatatatatggtgagtacaccttcattaattatattgtatactattttctctaatatttgtatacatatattataagtatattgtttgatcaaacaaatgaaatttgttatataagtaagcaaatcgaaagcagatctacacatcttttcttgttttgacattattaattgtttttatatatcagtactgtagttaagtaattaatatcttcattctaatcacttttttacaggtttatacaaattatatatatatatat

SEQ ID NO: 327913 - DNA, 768 bp, Cannabis indica
atttgtacaaataccgatgtgccacatcaagcataaataccaaaatttaaaataattactaaaaatagaaaaaaaaaaaaacttgaaaattcttgccttcagcaatttcagtgttttgtaagttttaaaaaaaataattttttagttgcttttgatgtaaataatatatcaattagttatttttttaaaaaaaaaattgtttcaagataatttttttctcgtacacatttagttagttgtttatttagatttaaaattatgattttattttttaatttttaggcaatattatatgatatattattatttaatataccatttgaagctatattttgagttgtgagaaatatatatatttttttcaatataaaaaataatgaacaagataaaagtaatatttcccttccttttataaattgttaataaagaaataactaaatattatatttgaacaaaataagtatacaatttattttataggttactacaataaatattataatatttcatattttaaaaatttctagcatctaaataattttactttaagtaacaccaacatatcctatacagcagagaaaatatcatatttaaaaatttagtttcttataagttattttagaaattagttagtatttgaaaattgaatttcgtagtaaagaaactaaaatgttacttttccggcaaaacttattattatttacaaatatagaatctccatctttttttacaaaaatatggcataaaaaaagcccatataaatgtaaa

SEQ ID NO: 327914 - DNA, 1582 bp, Cannabis indica
atgtcaagttgtctaatttcccatccactagataccgcaatagtcaagataattcgcacagtagcagccttgataatggggctgaaagtctcaccataatcgattccaggcctttgatggaatccctttgcaacaagtcgggctttgagacgatttacagtaccatcagcattcaacttgattcgatacacccatttatttccaactaagttgtatgcatctgaaggaggtacaagaacccatgtcccttttgattttagagcatagaactccacattcatcgctttaaaccagcctggatgctttattgcttcagcaacactaaccggttctgtgatggcagattcagattgtatttgactcacaaatgttcgaggtttgaatatcccaactttacctctggtaatcatagggtgtgaaggcaatggaacattgggttcagcaggtacaccttaaccagtttcaacaccaccaggctcaaaacaacccgaaattgtttggtgcagatcatgttcatgttgcaggtcatgggcatatagatcattgtctctgtcaagacctgaaacagaactaggggattcaaaattagcagctgaagagtgagcacgggggctgctagaggatgctgcatgagaagcttcaggtgatgtatcagtggaagaagagtcgactggtgtggataatggagtggggtaatgagtgggaagggtggaccaggaagtagagtgaattaggacaagttgtggagtggtataattgttcagaaaaccgattttgaaggggaattccagttcgttaaaaactacatctcgagagatgtagatgcggccagtgggactaaggcatttatagcctttgtatgagtcactataaccaagattgacgcatttgatagagtggaactagaatttgtgggattggtaaggacgaaggcatggaaaacacgctgcaccaaacattttcaaaaaagcataatctagttttcgagcaaacagtatttcatagggtgatttctagtgcagcaagggtgtgggaagcctattgattaaatagagtactgaggtgtgaaaagcatcacaccaatatttgaggggcatacttgcttgtgcgagcaaggtaagtcccatctcgataatgtgacggtgcttgcgttcagcacgtccattttgggcagaggtgtgtggacaggggtgctggaactcaatgccgtgagtttgcaccagatcaataaaaggcttgtattcacccccagagtctgatctaaggctctttattttcttgtcaaattggttctcaactagagccttaaattgtatgaatgcagcaagggcatcggactttagtttgagaggatatagccaggtataacggctataatcatccacaaagtggatgtaatagtggtgatttatgttagaagcaacgggtgcagggccccataggtcagtatggataagatccaacacggatttagcacgagaattagatgaacgaaaaggaagagcatgtgctttaccatattgtcaagcatcacaaaaggttttcatttcattttttgacacacttacattaacagactcta

SEQ ID NO: 327915 - DNA, 1121 bp, Cannabis indica
tattttaacataaaaatcaattgtacatcaactaatagtgtataaaatatgaaagaaaccaacaaacaacaaaaagtatgaaccatgaaaaactaaaacataaactatttttctcttgattgaacaattatatatgaaaaaataaaataactagataacaacttcatattaatacgtaaattaattaattaacaacgcattgcattaactcaaaagaaattcaaaaattactgataaataatctttaagaaaaaagtaaaagaaactacaagatactagtgcattaacttaaaaaaattatatacccataaaaaagtaaacatatattcatttaatttttttacgtagttaaacaactaaataacaacgagcaaataattagataacaaccctattctaatatgaaaagttattagacatcaacatgtggtgttaacttgaaaaacacaaataatcttagaaaaataacacaacaacaatctttatatatgtttccatgtaaaattaaacatatatatatatatttagtttttcttaattgaacaactaaataacaataaataaataaatatataataactccactgtaacagaatatataaataggcatcataaaataactccaaatacactgctcaatcattaattcatgtacagtggcttcaactttctttcattctaccaaaggaatagaaatagacaacaagcctattctgatcaattttgaaattcatcatcactagaaatcaagttttttgcattcaactatagtagcaaaataacataaaaaaatgaaagcatttactaaattaacatataaataactaataaacaacactacatcaacataatcattaaaagatctatagataaattgaataattcaaaaatctaaaatacaaaaaataataccaggacaacaatacgaaaagctcaacttaaagaagcaaaaaaagtacaactgaatatgtattatttctttaggctagtaaaaactcaattcttttggatattttattaaacacatagcatatgtgtctttatatacatgcacatatacatacacacacacaaaaaaaaaatttttactattataacccaaaaaggaaaaaatcttacaa

SEQ ID NO: 327916 - DNA, 764 bp, Cannabis indica
ataaaattttaaaatacacataacaataataaaaattaaaaatatattaaatatacgtacaatgcacataataatgacctaattttataaaaaaatgtgaagaagccttaagttatggctttaacccatattttttttttaataaggctttaacccatgttttattctagtcgattgtcaatattttttctccaagtctttgaatttcattttaaaaaatatatttcattcgaacagagaatattatgttgttagagaaatgttctatcgatttgtgttgtaaaatatgtaccttgctgtgattataacgaattccatttattttattaaagcaaaacttattttattatttttttaatactttttgtagtggtatttacctgttatctataccttccttatcctaaacattaattatattttttcaaaaactgaattacatattgtatatcaaataatcaaagatgccacggattgaccgaccaatacttttgcactacttttgcacttgaagacttaggatatgtttttttttaggttgtttggaagtaactatgtaattactagataatgtaattattagggtagtaattacacagtttagtaattacactatattttaaaatgtaaggtgtgtttggatatgaagtggtaattacatatgaatcttgtttggcaaaataattagtaattacatgggaaaataatattttttaatagttaatgttaatatggaaagttttagtaattagacagtgtaatta

SEQ ID NO: 327917 - DNA, 860 bp, Cannabis indica
gttattacaattcaaatttttgagattatttatatttattacaaatatttattttgtttttatacttttattattactttattagcattatttttgcactattttttgatggtttggatggcttttatgatttttgtacaatttttatggctttcccctaattatttagagtagatttgtagtatagtcaatgagtaagagaaagatttcgtttggtattcatggcttctacaaacaaattttgagatttgacagataaatgcttcaagttttaatattattagataaattgtttacgatctttattcacattacatattttttcattaaattctgtggtaataatagaattttattgttattttgttggtcgattcttttggagggcctattgttctggggatttagccgagaagttttttagatataagttatttgagagttgtcatctttttacgattgagctttcttgttattagttcttgatatcatcgttaggggttaatccaattttatttatcttattttattttttagatattttgtggagcattttgatatgttaatgagttggcgtatagtttttaatgttacaagttgaagctcaagctattttgggttgttgttcgaagacgttatagctatattgtttaaatttttggggagtagttttgtctcatattgctcgcttactttagcaatttatggtttgacaaagcatgccctttggttagacaacgagttatcctagttcgaggaggttcctacatagtttgcggatatctgcatcgtaaattcatgagtgattttaatcaatacgtcaaaaaaaatacaataaaaaatcttaaatgtaaaaaaat

SEQ ID NO: 327918 - DNA, 547 bp, Cannabis indica
gaatccatcatgtacttcagacgtgagcccttcaacttattcttttgttacacatctaagtaatggcatgcagaaccctcttctatacattacaccttctgatatgatgtattgtacaactttcctcatcatcttctcagctttgtttctctcatttggaagttctccaatattgaggtaggttgctatgggtgtcatccagttcgatgctgtgtctatcatttcgatttcatccacataattgatgttaggcttttctaagaattgaatagggacttgatagcgagctggagcttttcccttatcactccgaggactaagatgtacgcctcgttccttctttgtttgaaggcttatcgtttcattttgacaatcacagttcttattaataaagagtacttcagaagttatttgaatgttagtttttgacttgccaacactataaatctcacaaaaagatgtctgaagtggattggtgaaagttacagggatgcatcttcctttaacgagataggtgttgggttttgtgccctaaataaaacccttt

SEQ ID NO: 327919 - DNA, 1189 bp, Cannabis indica
agctaatattgaatatgatgcaaaaccaaatgtataatattctaaatatcatatatttattatattgtccatatcataaatgtacaataacaatgtagctttcaaatttagtttcttttatttttttaaaaagggaaaaaatcatgtaaagataacagagattatatatagttgaatgatcactacttccaacaactagctagcaaatagcacaagccatgaaatgagatgagatgagattagacccatatatatttatataatgacccttcactatagtccccttctttgaatgagcctttgtccacactcacaagcaaaaaatgttctagtagctagagatcatagcttacaataaattaaaaagaaaaaagattcttttttttttcttcttctcaagtatttctctatcatgggggaccaagaaggataggtaggcaaaggggtttaatgggggaggagaatcaaagtcatgggttggcaattctttggaatggtatataaatatgtatgtatatgtgtatatatggtgttaaaattgtcaccatgttaatgtgtttatatttattgactttggatgcaaatataaaagagagagaagcttctcttagctctttcaaaggtgccaatggaatataattatttcagccaacgctatatagcttagcttcccacttttggccattaatattttcctacttttataagaagaggcaaatagaggtgtgtgtgtgaattgtctctttcaaccatacatctaatatttttatatatatatatatatgggccaaactgcacgattgtgtaaatcgtatagttaccattttattttggaagttgagtattagtgtgtctaatactttctataagtggcgttttacgattagttagtgatcgatgtttcttaaaagttattttcttaagtagttatatgagattcactacttaattactagtggtatgacacataaaaaggtagtagctaggcaccaatattactttttattttgaacattactattaggtatcattttgttttaaggtgactaacaccatatcggtgtaaccaaagacgaaggcagaaattaagaataagtggggccaaaagataaaaaaaaataattaagcggaccaaatacataattttttgaaaaaataaaattttaaacattaaattgctttataaatt

SEQ ID NO: 327920 - DNA, 983 bp, Cannabis indica
tttttattttttaattaaaaatacaaatgtacaacgggttaccaaacctagaataaccggttgccaacttaattaaataattaaaaattaaaactattctaacgtgggacctacctgccgtacacggattccaatccgtgttttgcacatatgggcacaaaatcggatgcctataatatattatatattgttatttttaatatattgtctatgtagtaaaaataaaatgattagattttatagtattttttaatatattatatatgagaaaaataaaaaagtaactgggtcggcgggcaggttcgggttcaacccaaaacccggtgaccataaaaaattaactcgcgaacctgcctgaaagtgtactaggctaaacccgacacgtccaaacaaatttttttttttaatttttcgagttgaccgggttaggtccaggcgggttggttgggtccgaatcaaacccggtcaatatgttcatccctaaaaccaccacaccacaatatcttaaaattattaaaattttaaaagtttacactatcattattattatatattataataaaaattcaaaaatcaatctaataaaaattgacaatacaaaaataaaaataaaaaaaatattaaaattttaacgtctaatatatttactaatcatcaaattattatattaaattgtttttaaaaaattatgcattatacatatatgggttatttgcagcaaaacctcctaaagtggacaggttttcgcaactaaccccctaatctaaaattttggtagtaaaactacctaaaccactagtcagttagcagttagcccttttcacccattttaggctcttaagtgccaggttggaatgtccacgtgcacattttattagtccacgtaaaaattatttaaaaaaaaactaaaaaaataaaaaaattaattttaaattaaaaaaaaaattataaataaaaaatttaaataattttttttttacttt

SEQ ID NO: 327921 - DNA, 601 bp, Cannabis indica
atcacattctactgtgttgacatcactgtaattatgaatgactatagtgttcaggacttaccgagattttgtatataataaaaccataaacatagaaaactacatgtaaacataaatgacttttaatctttcattgatatataacaaatcagattagatttaaatgggttttatttagggcataaaactccaacaaatactatttataatatctcagaaactaaaacaaagaatatagaataatagcatgttttattaaatatgagaaattattttagaaatatatagtttaacatttaaataaaattatttatgtgttataattaattggattagaaattatttaattaattatgggtgtacttagatatcacattattatgtgttatatctagtaatataatatcttgataagcctaatgggaaataattagagtttgtatatattattggctaatcaagtaataagtgttggattttgtaccctaaataaaactcatttcaatataatcagatttactaattaataaaagatcagaaatcattttatgttacatggttcacatgatttatttcatgattatatttaatgtataaattc

SEQ ID NO: 327922 - DNA, 1043 bp, Cannabis indica
ttttaaaaaaaaatactttctatttaataactatttgaattttatatatatattttattttattttaataaaatttatttaagtattttgtataaatatttgaaatatattttattttattttatatatttatttttaagaatgtgaaaaggaaaaaaaaaattaaatataaattaaaaacacatatttatatatatatatatatttatataaaatacatttataaattttaaggtgcatataaaactctcgtagtttaatttaattatgaataaagtgatagactcgaaaacatcataacttgtctttaaaacacatggatagcattttctttatatttatttttaatatgattttaatgagtttagtttatcttcaatgtaattagtattttttattgaatttttattaagtacaattccaatgtaaaaatttaaatctaatgttaaattaacgcaaaatatattattttagcgttaattttttttccaattctaaccacaaatactaaaaattatgttctttattataatattattttaataatataataacaatatttacttaataaatgaattatttaattattaaaaagtaaaaaaaaaaatagttgtggtttatagtgcccactattattagtggaacactgtaaagcattttataagaaaaattacattatatatgagtttttaaattatcattggagatgacttagtttcgatttactttttaattgtaataattatttaaaaaaaaatagggaattagtaattttaaaacaaaatcaaactaaaatggtgtctaaagaactgcttttaaccattttatgactaaagagttttttttaataatttctttaaaccaatggtcaatttagttttaacaaaggagattttttttttcttgtactatttttttttttacaagtaattattaatggaaaattctacaatacacccccttaaaataggtgtatcgatgcactcttatctatttcggtatctaaaaaaatatttagtccaatttttttatggtcatataca

SEQ ID NO: 327923 - DNA, 846 bp, Cannabis indica
tcctcataaatatatgaatatttttgaagtatttattagagcaaggtaaaaagcacttgtagtgtttaatactttacgtattattattggtacaatttaatattaagtctcatatattttactttaataataatcgtaaaaaaaaaatactaatcatttatagaacattatctcataaggatgttgtgaaccataattttttatatgctctattacagggttggtcttaaattgaaatagtttataggaaaaaaaaaaattggtaccttctcgtaaaaataaatagtattttaaaaattattaaaaaaaatatgtatatcttttaaaaagtattttattttatttaaacctttaaaatgagtggatcctagacgcgagtctagtccgcctataagtagagtcggtcatgctctattggtatggtatgtccaaaattagcataattttgcattttagtttcgattttatgagtatttaacctccaataagtttagaaatttttttgaaataaaattcaaaacaaatgcttttaagtgcatatgaaaaatatacatgcaactagctttttgaacatgatcttatagttcaaaaaaatattaagagtttctaaaaaactttttgaagtttacagcataaatatttaagtttaaattttgacggtaataatacataagttataattttagaatttatgtaggtacttaactgttaattcttaagtaaattgtcacatgataattcttaattggtccagatcattatattagaatttattggggtcacaattgtatatataaaatgtgtgttgggtcatcaaataaataagtcaaatttatgtggtctatt

SEQ ID NO: 327924 - DNA, 1335 bp, Cannabis indica
atacttgtgagtagatctaagttcctggtaaaataacttcaaacagctttaaggtcctctagaagtacaacatgaagctcaaccccctaaagtgttcttttggagtgggcttaggcaaattccttggattcacacgctacgagaatagaagcaaatccaaacaagatccaagcccctttggacatgaagtcgcccacaatcatcaaggaaatacaaagcctgactggatgcattgctgcactaagcaaatctgtgtccaagtctacttacaagtgtttacccttcttccaaattcacaaaggcaataaaatatttgagtggacagaggaatgtgaaaaagccttccaagagctaaaaaaaagttggctcaaccacctgtgttttcaaaacccctagatagtgaagagctaggcgtgtacctagcagtcacaaaacatgatgcgagtgcagtcctaacaagagaagaaggaaaagtacaacaccctgtacactacattagcaaaagactaatcgacgttgaaattcggtacccactcatggagaagcttacctacagcttgctcttggcatccagaaagttgaggccatacttccaagcacacctaataaagatttacatcgattaaccattgcaaaaagtttcattgaaacctgaagcatctggctgactactcaagtgggccattaaacttggccaatttgacatcacatatcaacaaagaatggccataaagggttaagcccttccagacttcgtggacaagcgtacaaacacacctcttaaaatctctcaagattcaagagaaaagtaagagccagagaagaagcgagagcaagaacagcaacaaaaacctgaagaatcaacgtggaaactccatattgatggaagttgcactgaccaattattcaatgtaggcattgcccttataacacctggggcaacaactatatagagcaatcaaatttggcttcaaaggctcaaacaatgaggcggaatatgaagccctaatatccagcctcaggctagcgcatgaagtacggactgaacacctggacatattcagtgactcttaactaatcgtgaatcaaatcctaggtgaatacacagctcgaggtgaaaaataatgacctacttaagcaagatccaagacttactaagtcagctctaaggctatactataaggaaaatccctagagaacacaatgctgcaacatatgcatttgcttgtctggcaagtagctgttgggttttatgccctaaacaaaactcatttcaatataatcagatttacttattaatatagatcaaaaaaaacatttaatgttgcatggttc

SEQ ID NO: 327925 - DNA, 1059 bp, Cannabis indica
tgcttcttcatcatccaagtcagggccttgctcatctctagggaaagccacaccagcagctagtattctcacaaccataagaacaatgggatacaagccatgcatccgaaagttttccacaatggtcaaccggataatatttctcctttcaaccgacaacgaaaggatattatttgctctatcccttatttccaaggtagggatggagcgtccgaagagcgacaccaactaaaactcagggtgcacaattccgaaaaagccttgtgccataaagtatttttttttggcatacttgcaaacttttgacatggccttgcagttggtgtcccccatccattggtgatcaagctagctgaagtaaaaatagccagtcctgctgtgcttcagcccaaacttcaactcaaaatagtatccaatctcgtaaggggtagacagagtctaaccaagctctttgtacaagataaacatcgctaatagatatttaatacactttggcatcagctgtgtcgggcacatcccaaagtaagccttgacatttagaaagtattgatgaagcggcgacaccgccccatgttcaatgtggcaccttaaccatgacaaccatcctaaaggaggcctgtgcgctctataattccaacgaggaatctcgtaatgaacactccctactaggtcgctagccatgaccttatcaaaggcctcattagagagagcggaagctggcaaaacccaccttgtcctaggtggtttcgaatccaatatctccgacaaaggagactattctaggacatgatcttatcctagtactgtaagcatgccaagcccatttagcggattgcctcaggcttcataattgcccaaaagacagttagggaggataaaacatgtcctatgcatcggagctcccagtcttcgagtccacctctgactcagcttcgataggaggccgagcaggctcctcctccactataatttgaccccttgcagccaccatggccacatgaggatcagatttactcatttcaagtaaagtttgttttatcctgttgggttttatgccct

SEQ ID NO: 327926 - DNA, 924 bp, Cannabis indica
tttgatgttgctaaaaatattccgacatctcttcaaaattgggagtcatctaaaggaaattttcattcctatgtctttttcaagagttgataataataaaaatcttattcctgctcatgttgataatgctcccattattgatgaatataatactcctgatatggaagatgatgatggtcctattattgttgaaggacctattattgacaaggggcctattattgaagaatgttctattgctgattagggtcctattatcggagaaattccagttgtggaagatgtcattgaaagtaatgatcaacaaatagaagatattctactagcacctactctaagaagatctcaaggacaaaagaaattaacagtgtgtgatgataattttatttatcttagagaaggagaatatgatattggtcattttgtggatcgtctcacttatagtaaagcacttaataatccacattcttcaaaatggataaaagctatggatggtgagattgagcccatggtgaaagatgtatgggagttagttctattacctgatgattttaaaccaataggttataagtagattttaagaactaaaaagggataaaatgggacaaattgaaaggtataaagcacgtttagtggcaaaaggctttacccaaaaagaaggtattcattataccatgagtttcttgcttatttcaactaaagatttatttcgaattattatggttttaattgcacattttgttttatatctgcataaaatggatgtgaaaactacttttctgaatatagaattgagaaagcaagtctatatctcagaacgtgaagacttaaaagaaaatgggaatgacaatttgctttgcaaattgaaacgatccatctatggtcttaaaaatgcatctcgtcagtggtacttgaagtttgaca

SEQ ID NO: 327927 - DNA, 1043 bp, Cannabis indica
aaaataaaaaaactcctaattataataataatagtgtgtgtgagatcttactataatcaaagaaactatgtccactagattaaaaatcgaaggttacaaatgtcctcatacatatatcaaatgttcaacgttttatgtaataatcagaaatgtctttaaaagctttttaggccataacccctaataagttcgattaggcatgctcattaaaggtttcagttaactaaaaaaattcatacttctactttaattagactttacacatacagataccaagcccattaactattgatcaccaacaatatgggctaacacaacaaagaatatctaatccatattttattaaaattaataaaagttaatgtaagtctaaataaaaatttaacataattgtcttgagttcatctctttaattttttggtttgcatttattttaatttcgatccaaaacttatcttgtttttaatgtgtttgatcatttaactagtttgagtatatataattttttttaacaaaaaaaacacgctaagaaaagaagtatatacatttgttaaaaaaaaaacattatttatatgtaattatatatgcattttaaaagatatttaaaataaagggaaattatagtaaatggccccaaatcataggactatgttagtttatattctcatttcaaaaaaatatagcaaatgaccctaaatcgtaagaatatgttagtaaatgtcctcattttaaaatcattaatttttttttattatttttttttagaattagaagcaaattatttaaatattatggtatatctatattagttttgttaaaaaaaaaaattatttaaaagttatgtcaatttttttaattttttatgagttgttgtgggttgttagtatatagaatttgttgtgcggtatatttctattttgttgtatggtatattattattcttagatgatatttagtttttaatatgatatgtataatagtggtatatataattttattagcataataaaaatattttagtgtatgtatataattttattgcc

SEQ ID NO: 327928 - DNA, 514 bp, Cannabis indica
ttagatcgtaccaaacttaaaagtccagagagtttagccgcaaattaccctataaaaatgcttatttatacgcacccaaaaactgatgcccttgtctattttagggtgcacaagtactcaattagctaggttagaggtgttttaatggatcaacctaatgattgcggtttagagaagttgtaaaccattcaatttttttattgtacaagccaataatataggctttagtaagttaggttgggttcattgagttgagatgaacattttaagttttagtatttatgttacaaacatgataaaatgatttaaccttgttaggttgtttttagtattatttttaggtttatttttagtgtgtttttaatttagttctactcttgtttggaacaattttacactttttatcttttattcttgcagatttaaaatagaagaagaatgtaaaatatcaaaggaataagatggaaaaaagataaaaaaaatctcacaaaaagatgatatataaaatagagaa

SEQ ID NO: 327929 - DNA, 693 bp, Cannabis indica
aaaaagggagggttttcttgacctgaagcactacgaaaaaagagagaaatacttagaaatatctataagctttcgagagagatcaagaaacttacttgcttcttttctcacaagtaatccaataaaaagaagagtaagctattaccattatcacggggatgaacctctataaaattttatgttattttctttacaaactatcactattatcattattataatcgttcccatcgctttaattgattcagtgttgttgactaaaagcgagatcaacaatgtattatatatatataaatttaaaaaatttatgtagtacacccccttaaaggtagttctggtagacctccaatttattttggcgtacaaaaatggtttttagtcacttttttttttatttttattgatcgcgtacgttgtagatatttaagatcacctataaattatttagaaaatttcaaataatttaccgtgtcaaaaataatgtttaatataatattttatatatgtatacatgttagtatgattttattttaaagatccaccaaataatatactattctatgtatatatacatgttagtatgattttttattttcatcttcatatatactaattgttattttatttatatatatctatgtttatacaagttaattaggtttaactcaaaataataaaaaaaattattatttt

SEQ ID NO: 327930 - DNA, 552 bp, Cannabis indica
ataacaaagagatgttttggcttaaacatctttgggacagcttggacgacattccaaaaagaaattaaaaaaacgaaccttcaatcggaagggatcagttgggagttggaaatttgttggtggagtctcaaatgattgaagctgaaaatgaattaataacacaaaaaaggtgacattaagtataccatgcatgcatatgtataatttaataagtaaaaccttaatttgtatatataataattatactcgtatatatataataagaacaaaaaatgccccacattattataattaatattacaaattatttaggcagcaggctcagatgatcagtgactacacatgcttcgagaaccaataatgtgaagcctctattaaattatttatctcaagtcgttggttgatcactatatgtccaaatctatataaaattctgttgattaacaattatttgtaatatatgtacagatatttttatgtagaagtttacccatattgttgttatttatttaaggctctgtctgtctctctctctctttatttatatatata

SEQ ID NO: 327931 - DNA, 1391 bp, Cannabis indica
ttttttaattttatttacataaaatacgatctttttattagggttgtacatcaatttttataaaccgcccaacccgagtaattcgcccaaatcaaactgaaaaacagataaaaaatacaaaccaaaataacctgaaaaaattcaaaactgcccaatcagttcattgagcgggttgaaaatagacccaatctgcccaattaaaccgatcaaatcgatttaagccgaattttagtttttttttaagttcaatttttttactttaagtcttttattattattataatataatatatatatgtattgtttcaaaatatatatattaaaaaaaacccaaagtaaatgacccctgacgagtcactgctttaagtgtcgagactgatgatggatgatgatggattttctggttcgtgattttgggtagtgagaatagagttgttgctgttgagcagaagctatagactcagactatagaacatgtgaaccaataacttgaagaaggggatgcaatctatgtaacatggcgatggagggtaacaatggtggggttggttgaagtgagtggtgttacagtcgcaattagagctacagccatcgctagaagagcatctgcagcattgagaaggagggggagggtggtggtggtgagcggccatgaaaggtaaaaaaaaaacctctcaaggtagcttttgcaaacggctcaagttttgagcaaatgtttgctaagattgaaggttttgtttgccttttttggatttagtttaagctgcaaaatttggttaaggcagtaattattattaataataataaaaaatagtaataaagaggaaatataataaattaattgattataggcataagaagataaacttgaaaaaataaaataaaaattacactctcatctcattctttttgtctatatcttcatctcagcctctcaccctctctcatatctatctatctattttacagtcacaccaaagtatttttatttaagttgaaactgaaaaaaaaaacctcttaggtcggtttaggcgggttaacccgagcaacccatcggtcgggttaaaaatatattttttaaaattgggcaggttaggcgtagaattttgcaacccgaattttacgttgggttaaaaaatatgtagtataaacctaccaaaccgaccgatgtacaaccctactttttatgttgtactcttattgatttgctgttaattttttgttatctatatgttattttttattattttttgatgttatttagatgttattttcatgttacttttatattgttttcgtggtttttctatgaaaaacagtaaaaatatatataaaaaaaaatctttaaacgtaaaaatataatttttcttttacaaaaaatggtgttttat

SEQ ID NO: 327932 - DNA, 661 bp, Cannabis indica
aatatcaggtcctacatattttactttaaataaaattataaaaaaaaaacctgtaatcaattataaaacgtctatttatagtgatgctacgtacctttatggcccataacaatgctccccaatccactgcaaatattggccaaaatgggcctaagacaatccagaaatttgcgccaaaatggtagtgcgtcaagtttatcaaaatataaacttgacactctttttctataataatattcatttagtactttatattttatcaaaatacaaattttatgccatatactaaaattcaacagataaaattttttaaacatgatcgaattgcactcaattaaatttcaatttcaaatttaattacttaattagatataaatataaatatatgaatgcatattggtcatggtattgataaaaatttgcttactaaatttaagactcatacttgttgttgtccctgattttgcttaatatacgtggaccaactagataaggacacgcggatcaagcaatctacaatatttgctaagtctttatgccataaggtagcgtccaggacgtagctcccggagaaggcatatggaactccatatgctcccggaagctcgagtaacactaaggcatctccgcaaggtgtcaggtttctcctgagcaatcaagt

SEQ ID NO: 327933 - DNA, 865 bp, Cannabis indica
agtatttgaattaatagataaactaaagcagttgtttccaaatgaacaacaataatcaaatttttccaaacaagaaataaaaaccaaattccaaccaaattatggtacaacaaaagtatctattaagtccaaatagtaaccagtacttaacaacaacctaaaatatcttattgcttcaacattcactaactttccatttctcacataaatccttctttcaacatcacttggcttttggtaactcaggcaccctacattgaaacactgatgttagtagtagcaccaaaatctaactaccaagtgtttctgggtactaaagctaaatttacctcaaaatagaccaaagtaagaaatatacctttcttatctcgccatcaatgtacttagcacattccttcttcacatgtcctcatgttgtaatagaaacaaccattatcgttgttggcttgaatttgtttcttatgtacatgacccttatccttagcaacctcattctttctttgctttcccttatctttagaggttcttgccaaatgagcactttaagtcttctcttatttcaatctttcttcctcttgaacacaaaataaaataagctcattaagagtccacttctccctttgaaagttgtaactgaccttgaattgactgaattgtggaggaagagagataagcactaaatgcacaaagcaagtcatccaaatgcttaagcataagtgcctttaactttgaagcaaggtgacacatttccataatatactcccttatattttcctagccctaagttcctctaaaagatactagttttcgcttgatcactttttgcaaagcgtttctcaatttcagcaagaaaagttgtggcatc

SEQ ID NO: 327934 - DNA, 1227 bp, Cannabis indica
acagctcaaacacaacaattacatcaagaattaaaaagtgccattgttgagcaagctttgagttcttgaactcaaacttgctccaccacacaattaaacaataacaacagtccaatcaagcttaaaatactaattataacttaaagaaactaaccccaatcgaaattcatcaaaacagaaccatagtcaccaaaatcaaatcttaaacctaacaaaatctttagtaacacatagaatagagttccttaggccataccttatagcttagaaaactccaaacctagcttgaaattcaagaaattcactgagttggttgctcctaccattgattttttcttggagccaagtacaagagagagagaatagcatgatgttttgtgctttgtatattcttaagtttttctacttagaaagactattaaataatgtattaatcccctccttaattaaaaaatcagatgccaacacacacaagtgacacctataatagtacaaaaagataaatcaatttgtcaaaattaagttaaaaaaattgaaatatagaaacatattgaggagttgatattatattacttattgcaattagaccatctccaatggaagatttaaaatttgtactacaatgcacaagatgtaaaataagaaagataaaaaataattaattatattgatgattatttaatattttattcaagatacataaaaattattattttttattcttttattatttaaataatggttatatgctaaataaagaatgtaaattttaataaaagtcaataaattataataattagggacattatagtaaataaaaaaaatagtatatattgtgagttgaatttgaaacaatgctattttttgtgccaaatttaacacaacttttagaatatgctaactttagcacactttttagaacaccgttggaatagtagttttcttccactacttctataaattccttttttctttaaatatcaaactaaaagatcattgttgggattaaactcacttaacctcccaagtcagtatgtccatctatttgcctatcagatgaatttgaagaaagctgctgcaatttatgacagttggctttaataccaacttaaaggggacccaccagcaactatatataggggttatttgaggaggtctgagttgagagttctgatctctaatctccaatgctcatactttagattcagtttagagagagagagagag

SEQ ID NO: 327935 - DNA, 635 bp, Cannabis indica
ttatattttattaaaatatacctagttttatcattaggttgcccaatatacccctactttctacttaagtctagcatataatttacattaatctaagtggtctaatggggacatcatctataaaagtgggtatatcttaaagaatatgaaaatggaggtaagaattaaaacaagtaaggtaaagtggatatacaatgtaatttgttcttttttgtggggtatgtattattatacatctattcaagttgttttctagaattttttattttttgataggaaaaaagttattttggagagtttcaattagtattttttaccattcaatccaattcaattgtaaaaaaaaaatagatatctaattataattagattggattggatgttaaaaggtagattctaattagattggatcagttattaaactaaatgaagagtgatatttagtttatatgcatttttcttcccatttttaagttaatatttaaaaagagaattttcataaatttgaaaaaaattattggagtttactttttaatagcataaataataattgaagaaaatatgggaacaaaaagaaatcattgatcaaaatatgagaaaacaaaatatatataaatgaaattactttaaaaaaa

SEQ ID NO: 327936 - DNA, 1063 bp, Cannabis indica
atatttcttaattattattattatttatttgattaaatagtaataagtataatttggcatctaaaaaaaaagtataatttggattttttaaaaataaacaaaatggaaagcatacttggatttagtaacaaaaatttaatagatttgtcattctatttaaaaaaacaatgagttttttgcaacaataattatttaccttccctatcttgtgattactattgtcaccagaaaaaaaaaaataaatgacttaaatgatacaatttttgaaggtaggactttagctgccaattctccataactaatattttaataagaagattaattaatatagaaagataatattatgtttaaatgttatgctatttattttaacattaaatttagtttaaagtatgactattataaaactttactgtcctagtcgaaaatttaggattgaactatggtatatattattctcacctgtcattaaacttttttgaaagattataaatataaaaatatgattacataatataacaccactcaaatactgcactaaaaaatcaacaaaatagtcattttattatttagtatttagagtaccgtaagggcagccaaaagaaaaaaatattgaagacttaacatttagaatcgaaataaggtaataaacatgaagaataattgaaattaatacttgtaatatgttatttactaagagtaattagaatgcttaaattaactaaattatccttttgagctaaactatagtatatggtaattattttgtaagacatattttaaaagataaaattgtcattataaatttaatattaaaaaataaaataaaaataaataaaatccattactgataactctaagatttagagttattttgatgtccttaagcttgaattttaagctaaataatagagtaattagtgtctatattatgtaattgtctttagtttgttgtgtcttgtaataaatggaagtgtgtgtgttagtaagtgttaaatagacttatgttgttgtttttatgtgtattaagcaagaaaaaaaatgcaagaataggtatttggaa

SEQ ID NO: 327937 - DNA, 855 bp, Cannabis indica
cttttacttttttggcaagattctattgatgttaatgttgttacttactcccttaaccacatagactgtattataaataattttaatggtaaagactgacatttttctggttattatggttcgccttatgtcgatcaaaaatctgtcacttggactttacttaataggctttatgacactgctcctctcttgccctggctagtaattggtgactttaacgattatttgtttgttagtgataggaactcgcataactcccctcctcctcatgctatgcattttttccactcttttttgcataaattcagtcatgtccctctccatcatgttggccctaaattcacttggaggcatggtactactcttgagcgcctggattggtgcacttcaaaccaactctgggccaattcgtatcctcaagctaccctgttccatttaggattctatggctctgatcatcgtgcgcttaagatctcgtttcaggatcccagctctcaaaatcgtacttccaatcgattccacttagaaaatcattggcttagggatccttcctttgtctcaattgttcaatcatcctggaccaattcaagtaccctacctatctcccctcttcattctttccttgacagacaatccgcttgcctctcggatattaaaacctggagtaaaactcaataccctctccagcttcaaatttcccgtactcaagctgatcttcatcgtctgttaaatgatactcggccaaatcctcacacttcgtctcaagttgccactctccaatcgcaactggatggcttgcttcttaaggaggagatttattggaagcaacgatctagagttgactggctgcgtgct

SEQ ID NO: 327938 - DNA, 941 bp, Cannabis indica
tacttctgtttctttattgataattgaatggtaaagattacattgaaatagagatttatttagggtacaaagcccaacaatttattcatagagtaatcttgataatctgacataaatttaaaatatttttgaatttgtagatttaatttctaactgaaattgaaaagttttagatgtggatttggttagtttgacatttttatttttgctcaaaaaaattgcttatttgattggttcgtatattctatggtgggagggacaacgacaacaaatagtaaagtgtggggattttttttaagaaaaaaatatgggaattttcaaaaagatttttgttcgtattttatttataattttacgacttaaaatttttatttataaaaatatacttataaagtttaaaaattttaaaaatacacttttctcgacaaaaagtttgaaaacaacgagaaatcaatctcacaaccaggggcggacccaggtatgagcgaggcggggcagtcgcccccttgaaaaaaaaatccgaaaaaaaaaatatatatgtattttagttagttacaatataaatttataattaaagataatatttataaagataatattaattttggtgtagtgattaagctacttagcatatagattagaggacaagggttctaatcccaccaaaagtatatttttcttctttttaagtttactttttcctcctctcacttatcaaaaaaaaattacgcctcccctcactttaactgtaacgccctaaaaattaggcacgctacccaagttatttacgaaaccctaatcccctaaatctgaattactaatcaaaatagcgcagaaattaaacttttgcaatagacggaatgaaaataaaacttgtaataatttaaactttacaacagttgggatcccaaaaaaatatttacaaactttattacaagtct

SEQ ID NO: 327939 - DNA, 1096 bp, Cannabis indica
gttttgacattatgcattaatgtgaaagttaaatacatgcctaactgtgataaatttcgaagtacataggaactgttggagtacagtgtgtggtgaggctcagttaggtggctatgattcctgagcatttttagctgttatattgtttatgagatagatttaactctgttagtagaacatagaatcacagttaagctagtcaatgttggttccactatttaagctgtctgctatctctggtatgccatgtacgtgagaatcatttaagctttacactttctgtctagctatcttttcatgtcatgcggtcaaataatgaaaccaaaatgtaaattcttggataatcttatgtgaatgttgtacaaataatttggtaaaactcaacaatacattggtcctttttttttttcttgctgagtaagaattgatcatggagtatttatatgaaacttcatttatgcaggacaagtagacagtacactcaatgtttatttgtgatactttctactttgccatccttaggaaaaatctatattacacctcctaaaataggtgttttgttattgtaattttttatcaatttttttcatgatcgtgtacattgtaattatttagaattatctctaaattttcggatggtttagaatagtattctatatctacctctatttttatactgatgtttacttattttttggctgaggtgtatttaaaattgggttcttcctaatgtgttatcaatatgacatatttccacgttgttagctttcaatcaacaagatttttgtgaaagtaacttataattttgtactcatctttcaacacccctaaaataaagtattcttttttctcttttcttgtagactttcctcattttctcatagcttttctttcaacacatcaccccccatatcttttttcctatccttaatttatcaaaatttcacaaccttccactaatttgtccctatatatacacatatataaaaataataatatctttatatttctcaaagcttgtttcacaagaaacctgaaaagacttaaaaataaaaaagaaagaaagaaagaaagaccgtcttttttgtggatttct

SEQ ID NO: 327940 - DNA, 659 bp, Cannabis indica
cctactgtgccataaagcaaatttagaatctacactagacacatgattggtaaagcatgaatgagtaggttctttattaatactggcagtaggaggtagatgagatagttgtgtagaagagaatttgtatagcccattctcaagcttcccaaccaacaagatcttcttggaatcctgttctttgacataacaaatagtcgggtgaaattcaaagaaaacagaattgtctatagcaaattgagaaacactaagaagattttttgtaattgagggaacatgaagaagattagtaagagataaggctctagatgtaaaaggagagatgagggtagagttaccaatgttgtcaatgcctaggccagtaccatttcccacaaaaacttgttcctgtccactatagttgctgctagaagcaatattggcagcatcgggtgttaggtgatgagaagccccaaaatcaggataccaactatcatcttggacagtttcaggagtagcaatataggtttgactttctgcaatgtttgctgtagcaggaaactgacccaaacacttagggccagtgaaagatttgtcaaacctgtaaaaacattgtttgactgtgtgccccaatttgtgacataactggcactgaggtttttgtgtccaagattgtgaag

SEQ ID NO: 327941 - DNA, 1112 bp, Cannabis indica
gatgactaaaattgtatctgttctattgtattgtctctctgtatatattcttataacaaagctgttttttttcctttcctgcatagtaaaaaagtagtagaaaacacagtttttgacataaaaggtaactaaaacatcattcaacttcattcttccaagaagctctctttcaatggtgaacttcactccttacacatattgacaattgaatcagtcatggtgaaacttggtgtggcctctgttctgtgtagaagaaaatatattcaaaccacaataatcaatgtatatgtagatatatatatcagactcaaaagaatattactttactttaacagcaggttcttgaagtgccaaaacttcagctttaagctctctggtaagaagagatggatttggatgtgggcttaaaatttctagcaaactctttctgaattccacattctgtttaagccatcatcaaatagttattagtactcaaaatggaattgaaattttcaagtttgcataaaaagaaatacatcattacctcaaaagggttgacaccagaattttcttccagtactatgttttgagtttgaaggagatgatgtaatagctgaaactgctgatatatctctttcatcatatgttttctttctttcaaactccaaaagaaagcacctttaattatctcagtttcctcttcaagaattttaagtctctccttaagctcatcaacttcacttccccacaaaacagccttgttccctttggatgatgatgatgatgattctccacaagccttgctatcgctttttttcgagttttcggaatctgaatttggtaatggttttttacctttctcattcttgtattgatggtactcattgtaaaatcccttgagtctagaaaaaaaccagtcttttgttgaagaaagttctatcctaaactccattcttttccttcaatcacttcacaactttcaatatagtaaaaggaaaaaaaaaatcaataagagagtaaaaacataaaaatggggaagttcatgggatgggaaactttcctaaagattatattttacttatgacatgtttggattaatggctttaatactcttaaaaatgtgtaaaaac

SEQ ID NO: 327942 - DNA, 1348 bp, Cannabis indica
agtttagttttttttttttttttatttaatctctataggtgtgttatgtaacatttagaaaaaaaaaataacaaaattaaaatatatattttaaaaagtaaaagtatgtttcgtatccattttagtttttatgctttcaaaaatgaaaataaattttgtaaattttattttaatttttttttaaaaaaaataataataaggactcagaaagagaggtgagaaaaaatgagataggggctgaaactgtgctagggccacggtctgagatcttggattctgggttcggggtggtgccttggtcggtatgcggagactggcagggtcggtgtgttgacttcggccaaggccttgtgttaggtgtctgacattgggtatgggtcgtggactagggttcaagtctaggtgcgggttgagagccagggtccacagtccaaggtccaagctggagccaatgtctaggtccgagtctgatctggggtcctgagcctggcactgggtccaagtcggagctaaggtctaggtttaacttcaagcaaggggacgattcgaggtccaagcttgagccgagatctagatcgaagtctgagttctggcactaagtttggttctagtctgggatttgatatggggtcggagttttgtccgggctagggtcttggccaggagctggaaggcaaaggttgaagtctaagttcaggttggggtctaattgcggggtcaaaatccaaaaggataaataccattttggaccctgtgttgtgtacaagttactaattggactctctattttgttaaatgaaaaaatggaccttataatttccaaaaacggtaaaaaaaaaaaaaaaaaaggatcctgagctcaattttaaacaattttatttttaatataaccaactttaacacaatttttaacacgaacatatacagaaaatgtaaccagttttatcataatatctctagataaaattattattaagctttattttgataaaaaatcagttcagagtcttatttgtacaattttagaaaatacagagtctattttattatttaacaaaatggatagtccaattagtaatgtttgcaaaacacaaggtacaaaataatatttacccaatccaaatattgatgataaagcataaaaatagacttttagttttaattaattttaaaagtattttttttctaacattttttacttttttaattaataaaataaaaactaagtaatggttacattacgtaacataaatttctcacatcatgcatcctctgatggaaaatatgtataattaaacctcataagaattggactatttttagagtaatattaaaggtaggggtattt

SEQ ID NO: 327943 - DNA, 1146 bp, Cannabis indica
tattttctttacctccatcttgttgatgagatcttcagctgtattggctatgaccacaatatgtctagctgaatggtctatgaagccttcatctactcctttatcaaacaaggcaagcaagttgttatagtaaccatccacattcaacaatcccacctgttttttttttcataaaagaaaaaaagaaataaaactcaaatatgaaagctaataaagcaaaagtcaaaagtagtactatatatactatataaatgttgggagctacttagatagggcatcacttgtttttggcattttaaaagattatatcttaatttttcatatagtatgaatttagcatatttttgagaaattttgaaaatttacagtgtcaaaatagacatacatggaattaactatttgaatcctatttttaataccgtaaattattcagaattttataaatatatgcatgatacccattataactataaaatataatttctctatataccgaaaacaaaaattactccttcagtataagcaaaacagacatgcatagaattaattatttgaatcttatttttaacattgtaaattgtaaaaatatgctgattcccattataacgataaagtataatttttctatataccgaaaacaaaaattgctccttctgtatactcttaccaaaaaaaatttccaatgtatataatatttatcttactggtttgtcatgaatcccaagctgagaccatgttatcatctccaaaagttcttccatggttccataaccacctaataacaaaagattgtaatttttcactttatatatggtattatatacacatatatatatgtatatatagtgggtgtttcttgttgaacaaaccaggtaatgcaatgaaagcatctgcatgtttttccatttcagacttcctttgatgcatgtcagcaactgctttcaattctccaattgtatcacctgaaatctgcaaagcttgttgtagaaattttgatcattttcaattcaatctctccatatataaatataaatatagatacaacaataaaaaaaaaaaactacctcatgaggcaaaagagcagttggaataacactacagacaaagaaacaggatcagaatcagaatcagaatcagaatcagagt

SEQ ID NO: 327944 - DNA, 700 bp, Cannabis indica
ttacattaatattttttggtatttttttttctagtacgtaaccctatttagttatagtctctcaattagaatataattttcttggtcccaaatgtattcttgaatagaggttctactgtactatatattaggagtggatttgatacaatccaatcaaattgaactaatctaattacaaaaaaaatctttgttattgtaaataatttctaatttaaattgatgttttcttttatttatacactttaaaatagtttcttttatatttttacgaaatttcttacaaaaatccctacagcaactaacagagcaacctaaatcgcaactaaaattcgtatagcaatcctcatagaaaccactgaaaaaatcaccagagcaacccaaactgtaaatttgaaaaaaaaataaaaataaataatatatagggtattccggcctttatataacagtaaattttctcaaaaaaaattataaaaaattaaatatccaattataatagtatctgatgttagaagttagaattctaatttaatactagattggttattaaatataaatctaaaaatttaataataaaattgatctgatccaattatatttaatatatatttaaaaatattcatattacttatatataataatatatgtatatattaagaaggaggtttcaatagttacatttttattgtaaccatcattgtta

SEQ ID NO: 327945 - DNA, 973 bp, Cannabis indica
attatatataaatgtagtgacccataaatttctcataaaatattttattttaatataaataaaaaattacccatgaatttctcataaaccaagaattctgttatataggcacactttatatagaatatatatatatatatatatatatatttagaaagaaatatatattatataagaggggaattagtatttgggacccttttactcacataggctcttttctctgttttcaactatgtaataatagtcgtgagattataaataaaggtctcattctgcagtttatgttttctttttgtataatgaatgaaactacagtaagagttgtacaaaggaaagaaagagaagtttttacaaaaatactgaatttcggataaaaatttacaattttattgtcacatgaaattttttacaaaaatattatctttttataaaacaacaaaacagaacagtagaacaactaaaaaacaaccgtgaaacaacagtgaaaacttaacacagtacacaatatttttgaaaaaaaattctactctacaataaaaaagtaaaaagtttaaaaatttcagtatgtagtgtaaaaattcaaaaattagagttattgtgagtaattatctttgtggcccaacagcccaaatctgtaatttttatggagaattaacagaaatacataacaatttttttttacacgtcaaaattaaaaatattgagattcaagtgtaaatatagtggcgaaattaaaaggggtgcatcggtgaactctatatttcgttatttgggaaaattttaatctaatttttttttcctagtcgtgtacgttgtagttatttaagatatcaagcaaaattttaaaaaattcaaaaaaatttaacatgtcgaaaatacaatttaaacattcttttacacatgtaactcttttattttatacgagtgtaaaataaattttttaaacatcaatttctatattgtaaatttt

SEQ ID NO: 327946 - DNA, 683 bp, Cannabis indica
atgtcaaaattattgagtagctagcattgacaaagggtggtttgactttttataaaaatttattatagattgtatagaaaaggagaacactcatgccttattaattaaaaaggtgctgctaggatttaatattttgtgttttgaatgaatttttcgattcaacaaaaaaataaattaaaaattaattaattaattttataaatattctaaatttaaaaagaatttacaaatttatttacatatttttttatatcaaaaacttatttactaaaatttgtaaaaaatataaaatattggatttaaccctaaataatcttttaaaatttaaaataatattaattaaacaataaatacttaatttattcaaagagaaataatatagtactagaattatatattctctttaaatcattacaaatgtggtactagaattttatattctctttaaattattaaaaatatttacatcaaatttaaaatgtataatttttttatcattcaaatatttttgatgaaatcatgataaattattatattacaaatttagttatataagtgtcatatatatatatatatatatatatttactatatacatatttaataacattatgatacattatttttctaagaatataattttttttttattttcatttcaatctgttagtaatgtaactttaa

SEQ ID NO: 327947 - DNA, 1043 bp, Cannabis indica
tcaggaaaatcagaaattggtcaaagaaattgataacttgaaaactaccttgctttctaatatcataattgaggatgattagtggtaaagtctcttattcccttaaaagcattcttcattatgttgtgttaatgtatcacctgtttctattcatttactctctttacagaaactagaaatgggatagatgaacattaaaggccgaaagcaaataccaagttagtgtcagcttccgtaagcagggcgaaaatggaaaaacaacaaaaataaaactttggtgtaaaagcttatagttagaagatgatgagccataatagataacatagcagctaattcttttttagtttacttctggtatgtctttctttctttgattttaaatgtttttgtttagctttgatagttagttactgattagtaatcacaaatattcagatgagtttttctctagttcttaacataaactaagtacaatttatatatgataattataatagttacataataaaactgatttgatcagatcaaagctagctgtaagcctgtaataatactcttctttccaactttgttttttggggtagcataacgagttgggtgttgggactagtgtttactttagaaaccttttttttggacagttgaggaaaaaggaatgacaaaattaggggtggcaattagtgtttgaaaaatttcaatcttaactcacctatatttatgttataataaaaaattaatataattagtatcacatatttaatttttataaaaataatttattacgaattatcaatgcaataaataaaattcttaatatcaaatttaaagtatctatctaatattcttataagcaatttttttttttttaaatttatatatttttctatgaaatttatcaatactttaacggtaagttaattattttaataatatttaatatgtttagatcaatttgtattgattttggaggaaattacactctataccctttttatattgtcctcttttatttttacatttttttttaaaatctattattttta

SEQ ID NO: 327948 - DNA, 1767 bp, Cannabis indica
gcaagctgtccaaattccacgatcagtgtattgtgtatttactatgcaatctttctgttatattaattgtaacgagaaggaaaatactttctctctaagctcatagccttataaatagtgatgcatattcactaggcaaagagtcgaaaacattttagttgagagattttgtctaagaattcatatttagagacactgttgtaagagctataagaaaatgaacatttctccttgttcttaagtcaatgcaagtaacgaggattaggctattaccgaactgctcgggactaaacctctataaaattcttgtgtctttatattgttttattatattcctttcgttataatcaacctgttgcttacaaaattagactcactgtcgttggctaaaagcgaagtcaacaacatttaagcatatgtttatgaatttcccttttcatatgtgacgtcataaagccctaaattcagaaaggtatttttcatatgaaaaaagttccatttttcgtaaagatatcatatttcatctatatcttctaaatatctcataaagaaaatcatagtaatattagtaatatatttcccaaatcccacttggttgatcaaaactcggtttcactcatgcatttcatcaatatatacattatatatcatcttaacttcaaaattcaaataaaaggaaaactgcagatatataagtgttacgtaattgaagagggaaaatataacaaaatagacataattgaaaagagttgttaaaagacatggaaatactgtgaaaaaatcactgaattgattgggactgtatctagggttggatgaggaagacttttgcataaagttttgttaaagattagatagtaaaaaaggagacccgtgagacatgaaatcttggcaaaaaagagattaagtgctttataaataagcatgcagtagttggaatatatagaaaatattgtatatgtacaaacagataaatggtatgagaactgtaaagctataaattattattaattgcagtagttgggaagttctattccacatgaaagaagcttagttatatggagatagccatactccaaaagtcgataggattattaataaaattacttgaatgctatcatataataataagaaggcagaggatattgtgtatataaactatagtgtacaatgcaattattatgatgtatatgtacatcatgtataaataatatttcatataagcagtgtatttaaatatcaccattggatctcaacatattaaggattacgattattagtcaccatatacttatttggacaacatccttataataataatactaataataataataataataataataataataataataataataataataataataataatagagaaagtgagaataagaatgaggtactatggccattgtcaaaatagttgacagattcaatacggagcaatactatttatcactaattatattatacacacagcgacaaacataataatagtatatggggccgaatatattaaggtttagaagactggttctaattatgcagggtctttattaaatttggtcaacttggtatgacctttaatactaacaaatttgttgatctactgtattaccatttgagtccattccacccaaaacattataattattgtcaaataatataggggtgttcacaaagtatcagatccaattcaatccgcacgatccaatccaatccccacgatccaatccaatccaatccgcaaaatgcgga

SEQ ID NO: 327949 - DNA, 1110 bp, Cannabis indica
gatcggatgaagaaaaaaaggttggattggatcggatgcccacctgatcataatttatgatcacaaaagatacccaatcccaatatatgacctgacactttatagtccctaccgcatcagatcgagtgcaacttgatcaattcatcaagggggcggctctactgctgaagatggttaacaaagggagtcctagcagtttccactccattcccagcttggtaattattcaagtaataaacacaacatccaccacaaagaatcatcacaattcttttattcataaaatatattattttgtaaccacaaataactcaagaatttataattattgatctattctgacttttgcccaataaaaaatatattatttattagtaattttagtcacaatacattatagtaaatacagaaattttatgtaagatttagtctaaactctaaagtaaacttttttgttagtgatgaatagagaagctgaacacatccagccatcccaggtcaatttttttttagtgtgtacagcttcaagagcatgcatgcatatatgagttttattataataatttatcaagaataagtagttaatatatatagtatttgatgaaaatgataatgcatttatatatttgaggcatagatataaaaaatggtataatattaattgaaggtacaacaggaaagaggactaatcaataaaccacatcccaattgcatttatgtcacgcgtctccaagataaaaaagaaatatgcttttatattgaattgtgtttcggtgagcataagatgccactctcatctgatcaatattgaatttgaactatactatataattgttttcgttcaaataaataatcattaattattatgtgaaacaattattgtgcatatatatatatatatactatgttagtgatcgagaaaataagagaaaatttcaaacttccatggtacgagtgtaagaaattgattattccgagcatatgattcttttatgtagtatttaataatatatatggttgttctcaaaaaaataaaataaataatatatattgtattatatatacatataaatatggatggattatatagatgtattttttttttgggaa

SEQ ID NO: 327950 - DNA, 621 bp, Cannabis indica
ttagacaaaagtccttaaatttaataatctcaatagttcgggggaaatttttaacggccaaaaaagtttaggaggcacgatttactacatgttgaagttcaaggggaaaaattactaattagcatttttattattgcacatacaatattttatttgaaccttgctttcgtcactaaattatttcaaataattttctaacaatgtgtacgaaattcattaacaataatgataacatcatctaaaaataataaaaatttacacaaaatactttaagttactttttttgtaatgtttttatggattttttttcgcttacatgtttaaggaattttattttttcagaataaaaacgtcattttgatattgttgcatcattacactatttttgtcacgtgaaaatgtgttaactgttataaaataatataaagtagatgagaagaaagaagaagaagatgaagagagaaagagaaagtgaatgagaatttctgagttgtttgttccaatggggtgaacccctatttatacaaatacaagagtgagatattaagaaactaagaaaaagggaaactaaggaaaagaggaatgttgattacaattcatggtaataaataaaagatttgg

SEQ ID NO: 327951 - DNA, 737 bp, Cannabis indica
agccaaatttctggcttcgtcactgcaagtcatggtgatccccactaatctacactcaaggttgtgagtgagtgttttatatattattcccttgtcatatatatatatatatatttatatatcttcttctccttttcttatatataatatataaagtgtatatattgtatattatgtgttgtaacatttatttaatctcattgttggtccttgtattatattgcaatagagttgtaatatcttgatttttttccattgtaataatatctctaacattaatggtatacccagattccaaatttggaatttgatgctgttagtttaaaaaatctagtatgatatagataaataaaagaatatatattatttctatttatgtttaattataaaattattttaacaatatttaaatcattaaaattatttggactaataaaaatatgccacatgtacgcatttgtacacagtggcaatcccaattggcacttaacacacaaatttaacaaatgcatcatgtttgccaagagaatcaaacataataaggggaccaaaaaaaaaataaggagtttaagtgtttaacaattgaaacataggagagtttggggaaatttctttattttatatattctttgctaacaaaatttcttatgtcggttagctctatctccacatatttttttttataataaacaatttattttttgaaaatttgtagtttatattaattacataaaaaa

SEQ ID NO: 327952 - DNA, 1225 bp, Cannabis indica
accatagagtacataagactcccaacacaacttgcataaggaatcttgctcaccttggctctttttgcatctatttttggtgactgagatgcatacaacttgaagtattgagtaagtagtgttacaacttgtttgcatttgaccatgtgttatgtttatttctatgcatttttacagtctattttagtgtgtgtttaagtatttttcactttattatttggatttatgattagtttttgtttttgtttgtttttaggagaaatattgggagatctccgtttttggttattttggtgctcttcaagccgtttttgagataaaaatggctccaaaattcatggtctatagtcaaaagtgggtactttccaaaaatgaagtgaaaatgaagaaaataggaaaatagctcgtcaatgtcgcagcttagaaggcaatagccgtgacattcccttggtggttgaaagaaagaaaattgagaaaccaagaatcaacaaagaaaataaaaattgaaaacctgcttggaatactgcggctttctaagcaatgttgcgacattggtaatttgtttttttttagtatttaaagggggtaaggagctaagtttttattctattcgaacttgaaggccaatttggagtatagaaggaaggttaggatcagaatacactattggaggactccaaatagtgttctttttcatctatctctattttttatatttttaattaaatttttattattttaaaatgacttataatagctaattttcttttaaggaatattatgtgaaccacttgaatttattttatggattaatataattattcaatttcatcttcgtcgcttatttcaatttcatgcaatctcatttaattttgtaataattgactgatcatctataattgttatttatgttcgaatcaaaattttaaaaagaaaaatttgaatatgctatgattgttatggatgcaaattaatttaggacgaaagtacctagattatttgtatgattttatgagttattttgcttaatgctttctttgtgattaaactttttaccataagaatataggaagttttcacatagattgagtttgtagtcttaaccagattataaactacttaattcaacttgtcaattggataggaagaaaaaaaattgggtaattgtattaggaagtaaaataaaaaatagtcggggatcaaaataattcttgtctttatcatt

SEQ ID NO: 327953 - DNA, 606 bp, Cannabis indica
gaagaacgaacatttttgagttcttgaaaaaacacatgtttccgatctatgcagatcctggcctgccaatgaggccttatttgaggcttggccagccatggttggctttcatggggtttggccagccagggggtgtacccctaggctggccggcctatgcctggtattagggttcctggtcgaccactagattgggtcttggggtctggtcaaccactaggacctggaaccctggctgaccaagggcaaggctccaagtgggcagccagtttttctccctctttcgacctcggctagggtcttgtgatggccttggaggcatacacaactgtggccttatgcgtggtttctcttagaaactctgtacaaggacaggtagtgagtccattatagttaattatacaactcaagactttctacatttcttagtaagtgtacttgagacggtacttagtcattgatcgacgttattgttgggttttgtgccctaaataaaaccctttacaatatgattagttatcaatataagaaatttgaagtgatttatgtttacatgaattttacatgcttatggtttaatatgtttattatatttatacacaaaat

SEQ ID NO: 327954 - DNA, 1046 bp, Cannabis indica
taatatttatatttatatatgcgtttgttatttttttagatattaatatcatttttacaattttgaggttgtattttgataataattactatattgaatagtaaataacatgtaatatttgatcttttatgtaatttaataatttcatacatttatatttttaaaataaattttattttacaataggggattccccgccccgtcctcgccccattaggggattccccaccccgtccccatggggaataagcggggatggggattaaaatccttaacggggatggggacggggagagcactccccgctaattccccgccccgtgtgcatccctaagtatcacttgggtagtttttgagcttggaccactccaaatcttggagtggtaataaatcttttgtgtcagaaaagctagagtaaggcaaggtacatctctacatacctcttagccttcacctattcccgaatcaataaaatttatccgtgacttggtttaattaagggattttgattagtgagatcatgagattattttttcctttttatgccacgtgttattcgtccgaaaacacagataacacataaatatggggaagttttaaaaatactcaaaataaattaaaataaaatactaaaaatatggtatttgcaaaaattataaattttgtttacaaaaatacagtttgtaaacatcttttataagatgttagacattgtatatttgtaattaattactttttacagtaaaatacaattttttttttcctgaaaaatggtgccaaatgatatttttttcctttaatattttacactcaaatttgatgaatcatatttaataatatagtaaaattaaccttaatcatatcagttttaaatttaattagttaattatgtttaaaaatgtatagtttaatcaaaagtggtatttttgcactatatccatgcatgaattctagtaacgaagctcaccagaaaaaggcccattaagaataattggccttataactcggtatttttgccaaatcccaaaaagaggaaattacactct

SEQ ID NO: 327955 - DNA, 830 bp, Cannabis indica
aacacatgatattcagatttggacatatacagtgtagcgatgtctgtgccgtgctccctgcccacccatttctccaactcatttcttatattaacatatataatatcttagaccatctgttttagttaatatgtttatctcgtgtattaattatatgttccatgatatattttgaaaattttaatgtgaatacagctcttattgttggagccctgcccgtgcacacgtttgcacaaaatatgtttaggaagcattattattatcaagggaaccagtatagtaacagcattattgctatgtaaaaacctatataagtgaaagtttttcaatatcctctagtctttaaacagtactgtgtcatctgaaggagatactttctgctcttgcacgtgtgatctcagcttctatatattcggctggctttgttatggcagttgtgtgaacacatattgcaattcagaaatatataatttatgataaattaattaaaacttgctcctgtgcactggtaagacttggaatgtgctcaaatcgaggggaaaaaaaaatcatcagaaaaacttgaattgaaactacgatcctagtgaggtcatatgcacacgcttgtgataaggcgtttctgctatgaattgcatagtatgtgaagaatagatataaaatgattgagagtatttaattttgtatgttaaaactgtataggtgcggggatatggctctgataccatgctgagaattatgggttctatctcaaaaccaattggcaatgagtggagtagcccatgttcttatatatggctcacttctctaccatttattttatgtgggacaat

SEQ ID NO: 327956 - DNA, 2337 bp, Cannabis indica
tttttttgggtttgccttaattccgtaagagctgataatgaaccttaggaacttcccagaggaaaatccaaaggtacacttcttgggatttgtcttcatcccgtacttcttgattactacaaaagcttcctcaaaatcttgaccatgcccttcagaagtcttagacttaatcaacatgtcatctacatacacctccatgtttctccctagctagtttttgaacattcggttgaccatcgatttcaatgtggcttcggcattcttaagcctaaatggcatcaccttgtagcaataaacgcctttgtcagtttggaagctagtgtgttcctcatccgcggcgtgcattttaatttgatgttacccgcagtaggcatccatgaagttgatcaacttgtacctagatgtggcatataccatctgatctatctacaggagtagaaaacaatctttagggcaggccttatttaggttagtagagaatgcacattcttcacgtgccattgagtttcagaatcaaaacaaggttcacgagccataccagatataacgcttctcgaaggaaatcgttagccataacttatctacttccaccttcaggcttccatccttactagatctaaaggtcttctcttatggcggtggcgtcgcgtcttctcaaatactcaaagcatggtagatggtacaataccttaaggtttaataaccggattagaaatcctaactagattaattatgtattaatgaaaaattatattattatataatttaatatgtgaaactattctggtttattgcattttaagacctcgttggtgtgttaggggcatttttgtaattttgacctgagaacggtcaaattgtaattttatgacataccctgcttatggactatattattatataatatatttattctgtctatctgtaggtgtttactgacaagtcagcacagtatagtcacaactgtgtatttttgaccgaaccgagtttgagacccaaatacatttttaaggtttatttatggcatttatatgataaatgagaaaatttgaattattgtgatatctgagtgtgaatgaaatgactacattaccctttttatatgtttgtgacattatttatgccttaggggcaatttggtcatttgaccacattatgcattttcaacaaaaggaaaaattagatttttgtaaaaatttgaaaatcaaattcaaggttttgaaccccatggccgactcactctttctctctatttgattggtatttttcaaactcaaattgtggaaaggagctaggatactggtgtgatttatgtgtttctcttgcttgaagttaaggaatttgtggattaccggcgcttgctccgaaacaccgaagatttgaaatcacgacatacttggattaccaggtaagatggtaagctagcacgtagagttaagcacaatggcgctcatgtatgttattatacgtatattatgtgagaaacttgtattagggttattgacctaaaataagcggttatgtggtctagggttatgaccttggcatttaagtgattttgaatgctatattatactgtatatgctgagataaagaattatgcgcgtaaggcataattaggttagactcgataattagaactgagataaaccgtactaaggccttattgtaattagacgtgtgagcgtagcacgtaagtcatgtcaaatagatgatagatgcagtggcataaattattatgtgatttttgatcttattgcatattattatttatactgtcttgctgggcttggctcacatgtgctctactgtgtaggaacgtgtaaatttgttatcgattagccatgagtttgagggttagtagtgtattgtacatgttcgggcgatactagaccacaagggttgggtctaccagaagaaatattttgtattccagcttttgccacttagatcagcgtgtagagacaacttgtaatattttgcaaaagtttttacaggatcccaaaacaattgtaatcttttggaatgtttgtaaagttaaataattacaagttatgtttttactttataatcgatttaaagtttaaatttctactcttatttctagtaatctcgaattagcgtgattagcttatctttagtcactgtttgtggcgttcctattgttagagcgttataatttggtatcagagcgccaaggttttcaaacttcctatagatcggctgaatatgtacaatcatcgtcagagacaagctagactcgtggtgtgttaagtattgagagtaaatgcttaattgcttttgtgattaaatgtttaccgctttccgttttaggca

SEQ ID NO: 327957 - DNA, 1823 bp, Cannabis indica
gagagagagagagctagctattattattattaataatttatttatttatttatatagataattagaaattattaggattgtaaatgtgcatttgattcaagatatgttcaaaattatctgtatgcttctcgataggatgggtgtgcattccttcgtaagtggtcaccacaacaccttcatctttcgtcaacctttgaacttgcttctttacattacatccatggtgtgtacacctatagtagctcctgcaaattaatacatacattaaaatagaattataggggacaagaaaaaataattaacactctatgttttgattctggctttttaattttattatatatatatatatatgtattgtgaataattataaagtttattagatttagaattaatgttcatgaatgcaaaacaatcgatgcaaatatatgtaaatctatcattaataattatcccaacatcaacatatcccaattcatatgatcaaattaaccttctttttttttaaggggatatgatcaaatataatttaaattaactttgggtgtctgaataataatgtatagttcttaatattattagttcactgctataattaatgcaatagtacaaactactaaatgtgttttgggtactgtctcattaatatataataaattaattagttaactatcatgtaaagcaatatattattaaacctaattaatacatgtacatcatattagatatatagtcccttaattaattaattataaggaattaactaatattatactttgaataaacaataactatatatttgaagcataatattgaagaacatagtagatatatagagagagatcttaattatatatactaattaatagatgcttataatatatgtttgtgtgatttatttccttaatttgtgccttattaaagaatatatgattaattatcaagtaaagatgatgattagttagtaataattagtaaattaagacagatcattgatgatgatcatgatgatgataatcatgaagaaaagggtgtgtgtgtgtaaatatataccttggaaatgtattgttcttgacagccttctggccatacttcctccatctataaccatcatcaagaatatcaacttggcttcttgtttgaaatgcaaactttggcttcttcaccttcttattcttcttctcatcatcattattcttcttcatcaccactcctaataatttcttcttattattattatcattgctattattattaccatcatgatgatcatgattatgatcattttgatcatctgaccctaatcccaaaaacccatcttttgaaataataacattattgttattattaaaagcttgatgatgatgttgatccatggatggattattattataataagctgaagaagaagaagaagaacatgggaagaacatttgatagttttccatactgatcactattctttaattactaccaatatctattgataattgaatgcaaaatctatctacctatatagctatctatatatagatatatatgagtacgacatatatatatatatatatatataaaccgaatgtttggaatagcttggcggctcgatattgaatattatattattgtgagcttttctttcttttcttttctttcactatgcaccctgtgactgtgtgtgtgtatatatatatatatatatgtatatatcgagagtcgtaacggcacgaaatggtaccaagaagaaagaaataattaacaaggaaagagatgtgatattcatatatatatatatatatatattgtgtatgtatactaaataaaat

SEQ ID NO: 327958 - DNA, 880 bp, Cannabis indica
attattgggagagaattaatgaattaaaataacattaattaatgatctcagcccaaacttataataattattagtgatatactgagatctagtatagattatatatatgcacaacaatgtgtatcttaatttttttaagtcatgataataagaaagcaaaaattctattaaaatagtcacaaacctaacaagatcataagatcaatacaatcaatcctcacggtcatggctttacatagagcgcggtgatcccgaccaacatacttgaggaacatctaaacataaaactaactgagcaaaagaatgagcaatgacgaccactacacttgaaaaacatctaaaaataaagctaattaactgagcttaagagtgagcaatgacgttattaatagtcccattataatgataaatagacatataagaaaaagatttctaaatatagaaataacattaaccgaactcttaataataactatagcaaacaacgaaaacaatttaagaagatagtaattcgagtataccctaaacgcaagtagaaaaaaacgtgaatcttgtaacatataatatttttttttgaaaagtttaatttataatatttgtatatagtttatgttaagtttgttcatcttattatatatgggtttatgcttaattaagcttttttatttattaaatgtcattatttatattctcatttcttcattattttgtgtgtgtattttttgtttgtatatatatttaaattgatgtaattggtaagagaaagttagaacaaaatcaactaataatataagtattccaagtcatttacaacattatcattatgttggaaattattttaccaggatcttagatttattcacaagtatgttgattaaca

SEQ ID NO: 327959 - DNA, 607 bp, Cannabis indica
aacaaaagcatttatcgccttaaacaggcctcaaaacaatggtatagcaaactcagttctacactcatatctgatggtttccaccaatctatatctaataattcattatttaccaagcaaacatccaatatgtttctggttgtgcttgtttatgtcgatgacataatcgtggccagcaacaactcggatgttattgctcattttaaaacctacttgcatgacaagttcaaactaaaggacattggcaccattcgtttttttcttgggctagaaataggaaggacaaataaaggcatttctgtttcacagaggccatttacccttcaactcttacaagaaaccggttatatgggagccaaaccctcttccactcccatggaagtcaatctaaaacttagtaaagactaaggtaatcctttacctgatcctacttcataccgaagtcttattggcaagttgatttacttgaccataacacgacctgatatctcatatgtcgtgaatcacttaagccaatttttatattctcctcgcatcccgcatcttcatgctgctcattgttaggctaaaattagtctaagtttcgggtcatattttcggttagttt

SEQ ID NO: 327960 - DNA, 1042 bp, Cannabis indica
taatttcttttttaattatcttagtcattcaaaattatttttttttaagatctaaattaatattttaagatttactaaaaaagatattgaatctttctcttttttattttgaggggtacgatttgataattgtcaaagtttaggggcaaagttgctaatttacaaagacacgtcaacatttgaacgaaataatgggacagaatataatagaaggattaaattactgtaaatgtaaaagttcagaggagattcttaacaagttgtatatttgagagggcagaatcagtatttttgaaagttcagagagcaaaattaataaatattctttgataattttactattttttttattttcttaatttttaaaatgattttttttcactgaaatgcattttttaaaagaaaatatatctatatttttttattttaaatttatttatttataatgaaatgggcacgatttgacaatggcaattgcaaaacaatatatgatagaacatgggtaaaattactaattatttaacataagtctcatattgtaaagaccgcttagtttaatttggaaattagtaattaattgagaattaattatgaaaattatttatagatatttaaataattatttatgttgttatatttgaattccaaatgtatttttatgtcatatagtgaatttcataattttgcattgtcggtgcccggcaacatggaacgcggtgtatggctcggtaagatcacaatttagtatttcagtattgtgggacggtttatttagacattgtgaatgtcgggattagtcgggaatttagaatttcccaaaatacccttagtgtctcttttatgttattttagtatggaggggcaaaatggtcattttgtcccattgatattttgtcctttagtggacttagaattattttattcagcatttattttttaatttgtggctgagataattaattaaatgctatgttgttcattttatcaaagtttaaagaaaaaggaaatttttcaaaaaataccattttctctcaaactctct

SEQ ID NO: 327961 - DNA, 769 bp, Cannabis indica
taaaatatgttctataactcattttgttttttaattttaaaataaaaaataaaagtgtttcctgtgaagtttatttttattttaatttgttgattttattttagtccagtctgaagtctgagttcgggctcagttacgagtctagatttgggttcagttatagggttggagtttggcgttcggggttcagggtttggggtctggggtccagggtccagggtccatgccagtctgggtccgagttctgcgccgaagtccgagaacaggttcagggtcggggttcgggtcaagggtctaggttgggatcagggtttggatccggggtttgggattcgagtctagggtcctggtcgagatcgatgttcaggtccgggttcgggtttgggtccgtggtctatatatgttcgagtcgggatttgggtccgagtcaaggtcagtcgtgtctaaaggtctaggttgggatcatgtttaaggtctaggtccgggtcaggtggggttcgaggtttgggtttggggtcttgattgagtttggggtttgagtctgtggtctaggtcagggtttgggtccatggtccatgtcggggtcagggtatgggtctaaaggtctaggttggggtcggggttaaggtccgagtctctaggtctaggttggggtgagggttagggtttgggtctcatgattttaggtcggggtcggagtccaaaatattgattaaaaaaaattatttaaaagaattttgaaagtgtttttttgtttataaaatttgat

SEQ ID NO: 327962 - DNA, 827 bp, Cannabis indica
atttataatttttttttcctattgtgaatttttttttaaataatggttaatttttgattagttttgttgaataattgtttaaattattatttgtaataacatcatatttgaatacaaagacacaagaaagaatgtctcatttcattagtaaaagtaataagtagaagtgatgtttaaaaaattgagaaagattgtttaactttatattagtgatgttagtgaggaatttgttaagttctttgcgtaatgtttctttttattttgtaaaacgcatttctttatgagggcctctatatctcaccctgatcgcctgttcaatttggacgctattccaattaagttgttgcctaatttggtaacggagattttcgtttaataaaatagctttcatttcaaaaaaaaaaaaaattgataaagattgtttaactttataatcacaagtggggtgtgcctatttgtataataactttgtatattattcaaagaaatttatataaacaaatattaaattttgataaaattatattatttaattattattattaaataaaagatacaatttattttaaaaaaaaattaaacaagggcaaactatttactagtttgtaaataatgcaacataaatcttaggaattacaatgatgtatctcaacaatacaataaccattccttacacaaaaaaaaaacattatataaaaaactacaacaaccattagaaagtatttaaagctatttttgtttttggcgtatcaattttctcactccaacactaacataattaatgtctcgtttagctttgagaaaacaagtgtttcaacgtccaccac

SEQ ID NO: 327963 - DNA, 930 bp, Cannabis indica
tttttctatcatccaaaagtacagaatgaagccaaatccccaaaaaaatacctttacagtttcctcaaggaagttcctaggattcattgacaactttatagggattgaagccaattcggagaagatccaagccattctaaatatgcattccccctaaaaacacaaagatgtacaaagtctgactggaaggatgcagcgctaagtgggtttgtttcaaagtccactgacaaatgcattcctttcttaaatgttttgagcagaagtaataagtttgaatggactaccgagtgtgaatatggcaatgagaaactgacccatagtctcaatcaaaggccaagttctagcagatttcattgtggaatgtacttgaatcaataacaatatgaaggaacgcatattgaaaatagaagtctagaagatttttattgatggagcatcaaatgagaaaggttatggagcaaaaatcatattgattgctctgtaggggcatcaaatctaaatgcccttaagttttaattcactgcctccaacaaagaagcaaaacatgaagaattgattgcaggcttttaattggccaaagaagttggagcccaaaaattgaactctacaacgattctttgaatagtgtgttttagaggatggttgtagtgaggcaaatgttgttcttatcacaaagaagaagaacccaaagcttatgtctgctttttgtccaatagccctttgtaacaatatgtacaagattatcacaaaggtaatggtcaatatgatgaagccatttatggattctattattttaaaaaatcaaagtgcgtttattctgggtcgtttaatctctaacaatgttttggtttcatttaaaatcctacattacttgaaaagaaaacaaaaaggaaaaaatggttacatggctctcaaacttgatatgagcaa

SEQ ID NO: 327964 - DNA, 616 bp, Cannabis indica
aaaaataaaaaaaaccccatatatttaaatagtttaaccatgaatccattaaaacatgattttatgcctaaaaaatgatattttagataaagtcccatgaaaacgtgctcgacaaaaagaaaaaaaattgatgattaacgataatttgttataataaatgataaaaaaaaaagaaaatttggtgacacataactttactcttagttgtctgttttagatgatttgtttttttaaccaatgtgtttttttttagataggttgcgcatgttttggcgcgatcttctcttacggaggctgaccgtacttttttaggtgttgatttacctattgtaatttcttccttgattttggaggatttgaattaatgaagtttctactcaatattcaaaaaaattagaagaacctcaaatttgaagagtgtataatcttaaatttcaattatttaaattttaaactttattacgacgtcaaacaaataaatatggagttgttttacacccaacatgatattctacatattttgaatatgtagatcttgagaaaataaaatataagggacacgattttgtcctgtgatatactttcacggaatgtattctgtggtacattagatggg

SEQ ID NO: 327965 - DNA, 1707 bp, Cannabis indica
tctctctctctctctcgaattctctaaggaaccagctggtatcgggttttttcagttgctagtgagtgattctagcaagtcttgagtgttgtgattcaaggtaaatacatttagcttctcctccattgagttctttaagtttaagttaagtttgattgcttgcattttagttctaggttgttgtgttatgaattaatgtttgttttggtgttctgaagtttgtttgtgattgtttaagttaatttgggttggaattgtttgttgtgttgaggtttaagcaaagtttgggtttgagaactcaaaccttgctctctaatggtgatttgggattttgtgctaattgttaggttttgttgcttgatattggtttgttggagtttatacaggtattctggagagtattggagagtttgggggttgatttgagtttagggggtcgatttttgggtttccctccactggggacctgagaaaccagtaaactggttttgtccctcagtaaacccaataaactagtttaccggttggggtttttccaggaaccctagttttccccaaattgttgatttttagggtatgggcatgtctttcatcgataaagttattcctagtttgattttaaagtccccaagaattgttttaacgtgtctctcatcagaatttcgaatattgtggtatcgggccctgtaatacgtcgagctgctattctactcaggctgaccggtacacttgagcacggaaacaaggtaagattagcatagaacatattatatatccatgttgtgtttgtgattgcttatgttttgggtgatatcatagtagggcaaccattatgtcggttcggcagtacagacatcgtactggctaagagtgatattcaccccaaagagtattaattggcgctatcatagtggcacaaccattgtgtcgattcggtagtacgggcacaatactggttaagagtgatatcatggccagttgtactcttaggtgttattgatgatatcatagcggtacgaacatagtgtcgggcccgcagtacaatcatagtactggtagtgggtgatatcatggtcaatagcaccaactattaagaacgttcgtaatcatttggttagtcttgtgaataggtgtatggtcgcctagacacaagtcaattttataatttgttatatgcttatcttactgagtctgtcgactcatcaatttgctatcttgtgtaggtaagggttaagcttggctagtggagcagtgagttagagctcggtaaggattgtacatatcgcggtagtgcaacttggagggtttcgatcttatcacattttgagttttattttagtattgccatgttatttataaatatatatattgtaactttatatgttgcatatgtattttcaacatggttttaaacttaggatcccgacttacgaggttttataaatattatataataagattaatttcagtttatcaagtttttaaatacgggcgttacagtttggtatcagagccaccaagttgttcactgaagaccgttaagatatgtacaatcaaggccaattacgagctcaactcacggttccgtaagcttttaccttttagcaaattgtttaagttgtattgtgtttttgtgtgaaatgttgttttaaccttaaatgcggtaaatttgtccctactcgatgtagatcatctatagaggatcat

SEQ ID NO: 327966 - DNA, 600 bp, Cannabis indica
ctaataactaataatttttttttctttaatttttaattgtatcactttcaaataacatagaaaaaaactagcataaaatttaatatacgtgcctcgcacgtaccttttcgctagtatttatatatatgttttaagggagacatatccttaattttttttacaagtatcaataaaatataaatttgtttatattttcccttgtatattacttgctaattggaaagttatgttattgatcatgtctgacctttagccaaacagtggtaagtaaccgtcattttaacttttaattattatttaattatttgtatcttctttacaaataattttttgtaagtagttgttctaatttttatttatcttattattattttattttaagggatattaataacaaaactatttatattttatattcggtaacaatttatcattaaaattaattttttggtggcaaaaatacttgaattctctttctgttagttatttacctttttcgttgaaaaaattatattaaatgctacggtagacatgccacagtatacatatgataaatttttatgggtccatgtaatataatattgggtgattctacaatgc

SEQ ID NO: 327967 - DNA, 1295 bp, Cannabis indica
atgtccacgtttcatgagtagttataaatgattagatcttaataaaaataacggataccttatacacctattaatagggacagaatttagggaaaaatagacggcaaatttgagagaaaaaactatattttacatttattaagagaattgtactctgtatctagatcatcatccctaataaaaatgactcatgcagtatgtaaattttaactacaaaattacataaaaaatatctggtgttcatttattttgattataaaactctgtagtatatttattacataaagatttatatatttggttaacgaaaatctttgttaacagacataaaaacccaacacttagcacatcaaaaatttgattaggagtttagattacaacaattgcgacaaattcaaaaataaattttattctttgggtgtcgtcccatgaactaatagcaatttgagaagattattgataccacatataactttgtgtgttttttactttatgttcattttttattttttgttagtaatctttttagacgtatctcatttttgtttaaatagtttttgtgtttgtttaaatatctccgtaaaagtgcagtaattaattatttaatttgagtaattaactctgtaattagaaaaatggaatttcacttttcacctatgattcagattttgaatgacattttctaaattcatttacactgatttgtaaaacattatgtgatgtacttattattgcttaaataccatcttctaatgattaatgaatatgtctaatggaatattgttcgtgtatttgtacttattttcttagctaaaaattcggttatatatgcagttgaaatagttgattttgaatttgattgaagtataaacaaagcaaattgaatataattactttgtattctatcacatttgtatataaatatatatatatatatatatgtttatattatacaacatatttattaattatatatggtgatgttaggtttggtaggatataatggtaatgacaattgtaatagtaatggaataaaaataataatgagaattaattatgatatttgatttattgctagaataaatttaaggataagtgacaaattaacaaaattttcttcactttattttttaaatttatataaggaaagggtgcttgagtcaatttagccttattttatttaggtggcgttttgtaacacttttttaatcagttttctatttttaaaagtgaaaaagtgaaaatatttttaaaaacatgttctataaaactgtttttacttttcaattttataa

SEQ ID NO: 327968 - DNA, 814 bp, Cannabis indica
gatccaatgaacacccctactcaagagtgtagttttggatttttatacataataaaattactatattagaagccaactcattctcaatagtctaaagtttttttcttcactaaatgtcaaatccttcaattttggatctggaattaaaaatgctctcttgtttttcttcttctcttttcgaattattagatgtaaattctttgaaaaggctctcttgtttttttttggtcttttcggattataagatgttaattctttaaaaatactctcttgtttttctcttttcaaattattagatgttaattctttgaaaatgctctcttgtttatttgtctttctagattattatatgttatttctttaaaaatgctatcttgtttttctatcttctcggattattaaatgttaattctttaaaaatgttcttttatttttctattttttcaaattattagatgttaattctttgaaaatgttcttttatttttctttatttttgaattattaaatattaattctttgaaaatattgtcttattttttattttttcaaattattagatgttaatttttttcgacttctaactcttgttcctttttgttttagtgtcgagaaggtagtaccctttgtttcttatactttatttttaatgaagtgcttatttttttaaattaaaaagaaaatatataaatatatatatacaatagaacctctatccaagaatacacttgggaccaagaaaataatattctaattgagaggttataactaaatagagttacactaaaaaaaaaaatcaaaatattaaaaaata

SEQ ID NO: 327969 - DNA, 891 bp, Cannabis indica
tgtgcattaggtctaattttgataagttatgtgagattatatttgacactttaattataaaaaggaatatttaccaattaaaattattttaaaattatatttaattaatgtgtaataaaaattagttttcaacttatctcattattctacaatagagtaataggctcttttatgtatataattttagataatttctttgtatttcaaactataccaatttgtttggttgtctttttttattattttcttaatataagtttaatcaccaaatattacatctattcaattagtaaaactttatcatagattaaaattaaaaacttctttacttgttactgatttaaaattgagagctcacgggactaatatatgataggctatttgggtgttagaacgctcaagcacactcacaaaatcccccaaaattaaagtgttgtcaaagtggtagacgacatgtttgttggcacactatgagcaacatcacatgtctcttgtggcatctttcatatttggttaaaaactcaccaaaacacttcaaatcttcttccatatcactttgaaacattcaaacacttgttagctctccaaatagcatctcctccaacaactgaagaacaattaatgctcattagattcaaaattaagatatgttactctcatttacacatttgttataagttgtaaccagactcatactcttcaaatgatgtttgtacaactttcacaattaccaatttgttccacattaatatatttgtttacattttattttatcaacattacatattagagtttatttcctcttaaaaagaaaggaaaagtacacacccagaagaaaaaaaaacccttacaagttcatatacagaggcattgattatcccactaaagccc

SEQ ID NO: 327970 - DNA, 1057 bp, Cannabis indica
tatagtggtggtttgacttattgtagatacccttttttgcctacttctccatcctttctatgtattaaatgctctaggggttattatggttctctttcacattccattaattttgatcggagcattaattgctacaagcccttccttctgccctttctatttaatttttctcatcattcccttttgtttccttcccatttactcctgatcccccgaatccatacccagaaaaaccaccttggatatcgcaatttggaggcggacgaatggtttcccaaagtctctcaggttcttctcatcattgctgcttcaatggatgcgactagggacatgactagggtggttctccggtgtttacttcgtgccttttggttttttatatatatctccaagctcagatattatcttcttcatcacctttctgtcatcttgttttttcctgctcatatagctgtctcttctctctttgttgaaatggatgagttcttaaacaatgtttctaatgctcttgttctcccccctgatgagtccactattttcacctatgatgctagttcttccagttctgatcctgccccagtagtcttcttcttaaactgcatactattcgtccttacaataggccttctctgatgaaaactctctctggtatctggtcatcgcaatgccgattccctgttactgtgtctgagcatgctgatggcatgtttcttgtctcctttggcggggataagggtagaattttagagggtcaaccatggcattttgcccagtgtcttactatctttgcagctcctgatagttcctttccccttacttctgataatctccattatgttcctttttggatccaagtgtatggtattcctttcatgtgtaagcgctatgaccttgctaggtttatagctatggagattggtgacctttattaaggtggataaggacaccattaaggagggcactggtccttatctgcgtctgagagttcttctggatgttaacctacctagttaggaggggtatgaacattaaatttattaggatggggcgtgtagtt

SEQ ID NO: 327971 - DNA, 743 bp, Cannabis indica
tataatattgaaaaaaccccttttataaatacgtacataaattagaataatatccctagctatatttatatatctcaataaatataaattaatatgtatatgtcataattgatctagccaaccaaataagaattactcgtgatcattaatttgcaaaccctagtttgacaaactgatacaaatgatcatataataatattgatcactaattattaattaattattacctcaagtactacaagttttcttttttatatgtaaaaataattaatcataaaatgtcaaagcacatatcagtaacgttttcattgcagatttttatggctgtaacacaccacaaatatatatatcgatcagtttatatttatataatctctgcgtgccacacacaatgcatatatataatatatacaaattcgatgccatgagtccgaggacaattaaaactgtaaaaatatttttttatgtatatagatatatagagatctctctatcataagtatattattgtatatataacattaaaattaaatgcaaattagtttaattatgagttgtatatatatgcaatattaattataaaccaagacatatatattgctatgaattgtatatgtaaatataataattgatctgtcttataatttatgagtataactttgtgatgaaaatacttagctctagaaaataaatatgtaaagtcctttttttggcaagttaggtgacaaaataatttttccttt

SEQ ID NO: 327972 - DNA, 818 bp, Cannabis indica
gtaaaaaaataaatttttgcaatatatggtgtaatgtaaaatatatataacaccaaaatagtatttattcaagtatatatgaataataattaagggagttattatgtatattattttttaatttttttaaatatataatttaagttgctttagtggttaacttgatatttttgtgtgggttgcttacaatttaaattatttattaattgttatgtaaattttacgtgaatttccgtaaaaagaaaaaaaaaaaactacctttgaaattataaaattacaaaacccctaataattatatatattattcggaacatgattcgaaaaggtgacccataagttaagaaaaaaaaaagaatagtgacccataaatataaatctataaatagatgccatgatctcattctcttccaccttatagacacaaaaagaagtcaatgcatatatatttccactcaactttcaagctatcatgactcaaccacaacttactaaacttttttctttttattgactttgtgccatgaaccaatcccacacacaaaaacgtcacttgtcaagaatcatataaatatatttatatagcattattaggaggtgacctttttttagtacaagagccaataagattagttagagattttattaaaaatgtaaaaaaaattaagatgtattacaaattttattactgtataatataaggagtaacaaagaaattaaataaatattacaatacataatatacaatatataatatacaatatatacgccatatatattataatataaaaaaaaagtagaaagaatatatatatatatat

SEQ ID NO: 327973 - DNA, 1028 bp, Cannabis indica
acgcttcctcccatgcagcattaaatgcgacttgatttctcgggagagtcctgacacatcccggagtgccttcatgctatgctagcttcccggagtaccttgtactccgggtgtatcctccgggacccatgcgaatagcgcttcctggtggcataaaaagacttagcaaatcttcccaagttatctgatccacgtgtcccctctcgactggtccacgtatattgggcgaatttaggagcaacactatgatagtttttatataatttactatgtggattaattgagttataatttaacttgttctgtttgttactatataggttgctatataaatttttgtaaaaatatatatataaaaaactgctaaaaatgaaaaaactcgtaacttttactaaaattagacaaaagtccttaaatataacaatctcaatagttcatgaggaatttttaacaatcaaaaaaattcagaaatttttagatatacttttttattcctttgagtttcttttcattgagtttattcttaaaatttgaatgagattttttttttaaaagaaaaaaaaaaacaagaacaaagaaagtaaggcacatgttcatttaacttattttatttttatttctttaagagagaaatcaattatcattaaacaacatctgccattttttttatatgtcactccttggcatgtcatagttgtgccacattttttttaattttgttattaattttttctaaaggaatctaaacattgttgttataacaccatacttctttggtcaatgacaataaattattaaaaaatttatttataccccaaaaatttttaaagacacttaattttaataacttttatttcatataaaatttatatctttaattatattaaattttttaatattttttcttccaattgatattcttaaaataaaaaataaaatagtatatacatgatttagaataaaatagtatatttttaaaaataaaaaattatatgaaattttcttaggaaaaaaaaaatatatacatg

SEQ ID NO: 327974 - DNA, 1616 bp, Cannabis indica
aaacaatttttttccttttttatatttttacgaaaatctatatagaaatttacataacaactaacggagcaaaacaagtctcttatattttatgtatttataatgtgaaaaggaatgaagaagaaaatttaaaattatatatattatactaaataaaataaaaataaaatgtaaatgtatttttttttgggtgaaaaactgaccatgacaaattgttaaattactttattttagagagaaatttacagagaattcttacattataagtattacgtttaatatgtatatagattaattggttgagattttattccttctttgtaattttttttttctagggtaggaaaatgacaaacatagatagttattcaaatatgtattcctaaaatcttttaaaaaaaaaaatacaaatcgtgtatttatttttaatgttatcaaaaaatccaaaatatatataccaaaagcagatatttgtatccttcaaaaaaaaaaaaaaacagatatttgtaagtatatttgaaaaaaaaaattaaaaaattaaaaaatttgaaaattttaattgattagattaacttttctgggcaggtgaatggggggctcaataaggattttgtgtcccttataacttcggttttttaaaacaaacgacttcgcctcaaacaacttcggttacgaatatgcataaaaaccgaagttaaaggtctttttctagtagtgcagtcgagtaatctgattatatatcgcaaccagtacttaaaatctaatgaatttgagtcaattgaattttttaggcataaattaaaattttaaatttttttagaaccaaacaagtaatgttggtattttaaaattcaaagtaaaaccaaactaatccaattcaaaatggattggtttggttcgaaactgtagtttgtaatttgtaaatgttataatattttcttactgaattatttttattttaaagcttataatacacaaataacaatgaaaataaatgttcttaacacaataatatgcctaatatagttcttaaatatcaatattcaataaaaaattatattaagtaaataataagaattaagtggtttggtttggtatgaactacggacgagaattttaaaactatgactgaaccagagaattataaacagtccagattgatcaaaccattgataccaaatttatttggtctggtctcaaatggtttggtccgaattagttgagatttcgacccacagattagagattatataaacaagggtttttttcaattttaaccaaaaaaagtaataatattacaaaactacttccagttggccaaataaataaatatacagcccaaataaaaaaaaatacacaaataacacttacacacaccttcaacccaggatccatgcttcgtaggcaactatcgcgcaaccatcgtgcaactacacaacaacccaaagcaaccgagacgaaaattcaaccagaaagagaaccaccattaattctggtgacttcgcctgagaagacgattagagtcaatcaaaacatgggttgtttcgaattcataaaaaagtgtagaaaaactactacgaaactaaaattcaaccgaaaatccagtttaatttgca

SEQ ID NO: 327975 - DNA, 587 bp, Cannabis indica
tttttttttttttttgaaaagatcagtcttttaagatttaaatgaagagaaaaaccaagtagtgagttgaagaggaatataaagaaaagtgttggaatcagataaggtgttgactttgacttctaaaagaaacaagagtagacaaagctttacataagcagcaaattttagaagataaatttgataaagcatgcttatattaggcaaaaataacaatctaaattaaagttaaattattattgcatcttctcaaattattcctcttatatcaaaaatctcactcactctctccttcttttcgcgtttcctctctctcgtcttctcacgtttccgacggaattaaaacccaaattgcactcacttcttgagctaccatcgtcttcatacccacaaccaatgggaatcaaagaaaaaaaaaagaattgaagcttggacccacacaaattgcaaacccctatttgcgaaccaaaaactcgataaatcaaaaaaactaccgagacccttttcgctattgttgtttgttgggaatattttactaggatctagatttactaacaagtatgttgaattaacatcctaaatatgaa

SEQ ID NO: 327976 - DNA, 766 bp, Cannabis indica
gtttacttaattatatttatcttatattaaagtttttaaaattaatttaaactataacattttttaacttgaaatataaataatatatttttattttttaaatttaattacttaaattctagaaactaacaataacaattatatatatatatataaaagaacagtttggacgggttaacccgaccaaacaaacaaaatcattgggcgggttgaaatttttctaaatttttattgggcgggttacgattaaatatttgcaactcgatatttatattgggttaataaaaatattttataactcgaccaaaccgaccggcgtatacccttactatgcagccaacccaagagtccttatacataaatttcaaaaaatcacttttacttagcttgtttttcccaaacaaagtgacaacaatataacttaatatgtgggttcgattcaagttgttgaagtccgaacctatcccagaaattttggagtcaacctgggtgtaaggctagggtttcttcctaggttgactgctatgattcgtgtctacttaactccatgacgtcatctttcatgtcacgtgttaaacattgatgtccacatcactagaaaaaaattttgatttaacagacttgtattgggaaatcttaattaaggaattattgatttaatccctttccttaaatgccacgtgtcatacattcaaaaacacagataatacttatgtaccactaattcaatgtaaatagttaatctataggctaattagtaattttt

SEQ ID NO: 327977 - DNA, 696 bp, Cannabis indica
ctttagatgatgttcaacacagtgcttcattagaaaatatttcaacatattagtactctactacctacactacatacctactcttaatcttattataataaaagaattattgactagcttggctgtttaatgttatatctatatatatatatatgtgtaatactgtacgtgttttatgtttcttattattgttcttatattgccgcatggctctatgttaagacatgtactagctagttggtcatgtatggtgtggtttgttaattagtaattacaataaaaagtgcccttgggacatttgttgttgttggtttactctagctatatattgacatcaataattattccttctatattgggcattttcccttgtgtctttgtgttttatttatttatgagttcttctcttgcctttaataaagggtttttcatcatctgtgttgggactaggtagtgactgtagttaattttatggcagaaaaataaaaaacgatctgcagcaaaaataaaaataagaaagtattaaacagatcgtcaattcaatgtagcccgctgtaaaatcttatgtatatgtgaagttaaatataatatgctgagaccaaatcattgagactcgaacttcattattttcagtttgaagtatatctttatatattaaaagtgcctatctaacggcaattcttggtttaacagaat

SEQ ID NO: 327978 - DNA, 1236 bp, Cannabis indica
tgaatgaacatttactcaaacaaaaatgaaaatcataagaaatggaagaagaaacgaaccttgaatgaagatgtactgagatgagacaacaacgtgaatctggaaattggagagagagagagagagatgagggtttgatatgttaaggtgtgtttggtgggtaagtagtttctgtgggaaaatccgccattgcacatataatcactatgctttgtttggtacaataaatagttataacttcaattttgactaatttgtaacttaaataactctcaaatgtaaataaatacttaagtctaatttttgacagtaataatacttaagttatatttctagaacttaataaaatagtttcagacgttattttcttattggtatatttaaattaacttacaaataataaaattaatgacttggactaatcaaagactacatatacttataaaaattataaagttataatttaagtattattaccataaaaaattaaacttaaatatttatttaaaactgagagttaatcttaagtattaaaccgtaaattactgtttaatttattttttttaatgtgtatatattatagacatttttataatattaatcaaagaattacaaaattggattaatatggttttagatattatagacataatttagtggtttcacaatatttctcacaaataaaaatcttgaattcgaatttctctccctctgtaattaaaaaaaaatatattatttatattttgttaaataataaaataaattatgtatattttagaatagtaaaaaataacattttatgcttaattgttttagttatttttttttggttatataaaaataaattttatgttgtgtaatatgttacctttacatttgaatttgtttataccaaacataacataagatagggtaaaagggtgtaagacacagccgcaaagcaaatgtgaaatcaaaggagaacagaatctaccgaatcttgtctccatattcctcattcaatcccagcccttcatttttctcttcatctcacggctctaattagcccaccccacccaccaaccttcccactcttttattaaatttatatttgtttctattttagtgaaatggataataataataataataataataataagaattttttacatgaaaaatcaattttacacaatttattacaaaattactcatacacgcatatgtctacatttttacttacaaagttggttttat

SEQ ID NO: 327979 - DNA, 891 bp, Cannabis indica
agccagcgcgaaatgaggattatcatgattagggccaatccattagtgattatcatgatgcaccatctgagttagaagaacctcatagaaaactggaagaaccttcaccagcaccaccgcatacaagaaaaaaaaaatagggagagaaacaaaagagtagactttactaaaatgaagagtggaggggaagcggatggaagttgagtacaataacttcagacagaattttaaatattgacctaaaattttaaaattaaaataattatttgttattttataatttgaagtatatttgtaattgtaatactgtgtcaactcaataataaataatagttaatatttatatagttaatcgatggcaagaatttgatatgtgagttttaagtatatgtaaaactgaaagttaatatatatttatcaaaatataaacattgtgttggctatataaatcttgtatttaataattagaccaaagacaaataagtgatcaaatgttacagtaactaagacaaatactaataaaataatagaattgtataacttgtattattaatttatgattacaacaaaataaattaagaataatattattttaaattatttatttgtggaaattggtcgaaaataggctatgaactattgaaccaaaaccaaaagccatcttagccatacgagtagttcccaactcatcaaaagctcatcccaataatatgttaaatcagtgagaataatacataaacactactacaaaaatggattttcctcgcatttttaaacagtcgtttaacgtattcccttcagtttctataaccgtcgcctatacgaccgtcataaaacgggcagaataggcgacagttcaaaaccgtcactaatgtgagtttcctgacggtt

SEQ ID NO: 327980 - DNA, 1245 bp, Cannabis indica
attaaaagttttccctcttaccaaaagaccaggtgggaattttcccatgtactttttcttttgagttttgtcggttgttatatgtgccggtaaaagttacatactgtccctttgaaacaaattaaaatgcgagtattctcctgctaaaacggaggaaattttaccggtgcaaatataaaaaacactaaaaaaaagtatttgcaccaaaagacagttaacttggcagtttaccggcgcaatattttgtgctgccataaatcatttttactagcgtgtattatatttgcactggtaaaagttttagcttaaaatttttggctctcttatgctccttcttttttggtgcatttggctaactacgctggtaaaagttgtattttttatagtatcaggaaaataactcaattgaaactgaattagttgtacaacttccacaattagatgatatttatgtctgtcatgatgttaagccaattgaagttccaaacatctgtcgtgtaaatcttgacactcaagatttaaataatttcattgttgatgacaaagacgagagttcaaaagttcaaaaacgattgtaacaataactaatgatgatgaggaggacgatgatcatgtaattgtaacaatattgtaatattaaataataattcacaaaatattttactatttaacatgttgtaaatatgattgtttattttaaatttaaaaatatgttatttatgtatagatgtctacagcggtggaagttcttctaaaaggaaatgtacaaaaggtatatatgaaaatacaaatgtttaatttggatgtgatttttaaaagaaaggagcctaagttgattttccattaaaaaacaaactacataataattgtacataccattcacaaacatatgaaccaaacaacttttgcctctaagtggcaagaacaaggaaaataatcttagagtacttaattatgaacatatcattatattatattaccttgtactaattccatgaattcatacaagaaagctataataataatacaaccaaaaagggctgtacgttctatatattatagaactaattatatggcttaaataattaacatacttcttaatgctattttagactaatgttttacaaaaattattgattgaactctattttgttaaattgttaaataacaaaatgaaccctatatattctttcaaaaaaaaaacgaaccctatattttataatatagtacaaataagactctgag

SEQ ID NO: 327981 - DNA, 653 bp, Cannabis indica
acagtccaccgtagcactttactgtgatttttggacggaggtgtacaaagcaaaacagaatggaagtttaggtagttttgccgccaaaatttcagtttttgtggttaagtattacaaaccgtaaagttcaagtggtttaaccgccaatatccctatataaattcacagccttaaaaaaaaaaatctatataaaatatatattatttataatgtgaagaataagctaaaaggagaattgtattgatagatgaatctgatcatataatttatatatattatatatttatgctgaaacatatgtgtgaattattaaaaaattagcaatgaaggaggaggaagaaggttcaataggtatttttgaaaagaaaaaacttttgaacttccttttttgtcttactaagctaaaaatgtaaaatttgaacctaaaatacctattataaaaaaaaatcccaaaaaaacctatttggttctattaattatattatcttaaaaaaaaatatcatactaattaaaaccaacaaatcaatcataaagaattaaaagaaaaaaagaatttattatactaatatataatttcttatttatttttttaaagtatatcatataaatcaatctatatatcaatcaatcaatatatggaagaggtttcaatg

SEQ ID NO: 327982 - DNA, 778 bp, Cannabis indica
tttaaaaaaataatttttagaaactttccataaaaaggttattggattattaccttattaattttttttagttcccatcaatgggtattacccattaagaagtgttccatatatatatatggtgatattacatttagttatttaattaagattgtgtttgggtagaaataatagaatagaagagaaggagaatgaatcaatctttatttcttttttattttgctgaattttaaaatgtttgaatatcattccaacatattttaaaaaataaataaatataaaatatcattctacttaaatgatttttctatatttttttctggattgaatattacatttaaaaataagagaaaagattattctaatcctttttatgtatatatatacatatcaaattttagtttattaagtattcttattcctattgtcatttcttaatcatattcttctccttttatttcttctaacaaaacataatcttaattttcaagcaaaattagaatataattatatcgataaagaaaataaaaatataacttaatgtgtaaaaatattaaaacatatttcattttaggcttttaaacatattaatgtaaaatctatttcttcaacatatgaattatgtattatattataactataatacagtagaacctctactcaagaatacacttgggaccaagtaaattatattctaattgggaggttataactaaatagacttacattagaaaaaaaaaattaaaaaaccaaaaaatattaacaataaataatcatt

SEQ ID NO: 327983 - DNA, 895 bp, Cannabis indica
attaatatataaattattaaaattaatttccgagtttattattataaaatgcgggcgttacaagttgttagtatctaaagttatatgtaatttacacaaagaatatttatactattgacaatgtgttttttattttattatcttaattaatgtaaaaaaaattgcacaccatcataactttttaattaatatattattagttttgaaatatatatagaaataaatagagaaatttaaatatgaaaaaaaatttataagttactaattaattaatatacagtatatttgataaaatatctaaatatcacgttataatatgttttataagttgttttcgtaataaagtttataatagtatataattatgtaaagttccctataaaaaaaaaggcaacaatattataaaattacaatgagccgccaatttaaatatttatacagctcacatattataaatacctcttgcactcaccatccagtcacatgacccacgcttctcttccttgaacccttcatgcaatcaaacgaggacaacaataatgaattaacctcggcaatcaaagccactattaattccgatgacttcacttgagaagaagacccaaaccaatacaaacatttacaattactgaatgatacaaaaatttgcagaaaaattagcttgaaacataaactcaaccataaatgataattcaaattccagaaaactaaccctcctaattaaatttgcagattcataaactgtagatctatgtgaaatagatatggaagttccaatcaatccaaaacatgtataattcgagaaaaaatgtattaatacaatagctaatattttacctgttgcattatcattgtttttcagcattcaatagtggatttattcatatcaaatcac

SEQ ID NO: 327984 - DNA, 1100 bp, Cannabis indica
agaagtgtgttgattagctctgttcttatgaccatacatagttactggagtcaaatcttgtttctttcatcaaaggttgttcatgaaatggagaatatatgtaaaagttacttatggaaaggtacaagtcaaatgcctgggccagggaacattgcttaggctaagatatgtaagccaaagtcagtagggggaattggtttcttgagtatagctgattggaacagagctgctttaattaagaacatctggtcaattacaacaaaaaaggacaactcgtgggtcaaatggtaccatagtgtcttcatcaaaaatgaagattggtggggatacaatgccctctccaaagcagcttgtattggaggaagttagttgagctcaagaatgagctcaaaaactgaatagaacctgctactttcatgaataataagtatataattgctgcaggttacaagatgtacaatcaagctgacactcattatcattggagcaaacatgcttggaatagactcaatattcccaagcattgtttggtggtttggatttctttgttgaataaacttaaaacaaaggataggtttctcaaatatcatattgtaggagatgatatatgcttattctgtcatgggaattctgaaaatgttgagcacttgttctttggctgctctttttcacaggaatgaatacatcttttagagtagtggctcggctggaagatgcccctcactccattacagggactgcttcggaagttggatagagttaagggatacaaattttgaaagagagtgattatggcaggtatagcagcattggtgtacaatatttggcagaccaaaaatgatatattgtggaatgaggcggctgctagtgtgcaaaaaaatttctagcaaacaaagtggcaagttaagaatagaatttcctttgatatgccaaataatgttaagaaagaagaatttgaatggtttgagaagttgtaagtaatagtggataaaattgtatagactcatatgacatcttttttgatggtcattaggtgtaaaaaattgtttgtgtggaatgaaagtctgattcatcaaaaaaaatattcgattgtcgaaaaa

SEQ ID NO: 327985 - DNA, 830 bp, Cannabis indica
ggagcaaagttactaatttaaaaagacatgttagcatttaaacagaataatgagacggaacctaacagaaggactaaatttctgtatgtgtaaaagttcaagggagattcttaacaagccgtatattttaagggccaaaatcaatattgtcgaatgttgggtaaaattgctaattatttaaaaaaaaaaaaaacaaacatatatagtcaatacatttaatacaaaatttattttactaatactctaaaaaaagatatttcacttactcaaatataacagcactggtaaatcatatgactaattgtttattttgattcggccagatttagacccattaagagtatttgtttatttttataagtcacttattggcacttaatgcatatgagagaataagatgtattagtataacttaataaaattcagacatctttatagttttattttctaatatttatatttattttatgattttctttcctcttttacatcattaccattattcttgatatctaatatatatataataaataaaattttaacttgtttcctatcctaatgtacttatatatttttttatatatatttatatattaaacgtatttatagtaaattctatgatgtataataataatgtaatattattattatttttcaaatgtaattaatttttactttatctttcttatattatatatatataataataatattaaataaatactaaaaggtaccagtagtgccttgtgtcacgggccgcctatttggacacccccaaataggtgggacgtgcggcacttactggtacaccgagctagcaagtcagccta

SEQ ID NO: 327986 - DNA, 3588 bp, Cannabis indica
tggcccagtcaatgaggttgggaataaaatgcatcgcaaattattcgagacattgctcgctcgcattatggtattgaagttatacagatgagaaactgggttcgtagtcccatcatattgcgagacgtgtggatttttgaatccttgtgggaattaaaaattcataatatcaagatgaaaaagctcagtttccttatccgagtcatagccaggtaatttcccatgctccccattctgatattttctaaacatatccttcaactcaatgattcgcaactggattgggtccatttgatgttggttagaattaagttgatggcgtaagtcaggtgcattctgatttaatcgctcgcggagatcgagttgtcttcgattcaaatgctcacaaagatcaggttgtcttcgttcataattacttacggatcttgtatccgagtaactctcagattgataacttctcgtattactcatgctttcttgattagcataacgtcaagatcttcttccttctcgcgttcaccttcctaatcgactgttccctcgagacctcaagtgtcccaagctagaacttgcctcgtcttgtaccggccttctcctttggaagaggtttgatacacgtcctctatttagatacgtgtatataccttccctctcggatcgagaaggatgttgggggtgctttggtggtagcccacttgtcctaggttgagtcccaggatttctctcgttattacgagggatttcctatgtcctagtttggggctgccttgtgtcctcattcttgcgagaagcctttggtacatcattacgttcattcccctgattcataaatccattggatctttgaggaacttctcggcgttgttcttggttattttgttgttcatccattgaaacatcccttttgtcctgcctcctggttcttgaaccgtgaggtctacctcgtggccttcttaccctaagatcaggttgattcggtgtatcagttccttgagtcgcccttgtcactgtagcctctctttccaactcagtgtttcgtcggttggattcggctaagcgttgtcggagttgtcaattttctaattccactaatggaacatacttacttggatcataagcatcctcacttctaggtttataccctgcagaagtattagtttcttcgttccttccttctgggttttgattaacaccaccatagtttcttcttaagcgtgttgttctagaagtatggggtctttgagaacccattggttatttcccagggtgatgtgtagtttcctcaagacgacttccattattttgattgttatcagccatggatatatttttgtttgtaaggagggatttttctgagttttatcacgtaggctctcaataaaagcaccaaactattgacgcagattttcgttaaccaataataagccttttcgtagtaaatatcacacagaaataaataatgtataattaataccagatatttttacgtggttttgcagttaaatctgcatactcttcgagtctatcttatttgagatattttctgattacaagatgcaatatacaattgatcgtaactatttttctctctagaattctctgtctttatttataggaatataggttagcaaataattaccattcaattcaaaatatgtaattgttgatgaaatgtgatcaatttccacgtttcatttaaattgtatgtggataatactttataaccgcttaattttttgttattctcatccttaaagatgatcaatgctgatttggacaactgtatcttgcttatctctgagttattatttttagctattataatgtagaaaaaatgctaagtgttagcaaatgattcgcctagccaagtttattacgaataacgaggtgatggtctcgctatacataatctgagattgctttgcataaccaattcattccttcaaataaatgaattatctccttagatttgtgtactccgaggcaggcatgtgtctcgtcaatataggtctttatagtcctctatctttgtctcgtttaagactgcatagtcggcgagttatgaatattttctattaatcttttacttaacgagttattctttttctttggattaaatgatataattttattatatcaagtggttcatattccattgtatgacacgtgtcaccttctaaagtgaagctgaattttggatataacacatccaaaagactcttgaaataggcaatggagttaagccagtttgacatccattaccaacctagaatatccattaaaggtcaagctttggcataatttattgttgaatgcacaaggatgtacaacaaccctgaagaacccatctcgaagctataagtctggaagatatatgtagacggagcatcgaatgagaaaagttctaaagctggaatcatcctcatctcactgcaaaattatcaacttcagagtgcactccgttttgagtttgaagcttctaggaatgaagcaaaacacgaagcaatgatagctggcctacaattagctaaagaagtcaaagcccagaacattgagctctaaagcgattcacagttggtaatcaaccaaatttttggagaatattaaactaaaagggagaatatggctaattacgtagcaaaatttagagatttattgcaacattttaagcattattctgttaaggaaattcctagagatcagaatgcctcgcgaatatgctagcaaagttggcaacagacctagagatagaaaattacggattagtccccatcgccatctttcttctccaagcacaaaaatactgggggtaataattattgatccttccacttcctcgatggctccaacccaaaagtatatggaatctggaacacttccagatgacaaagccatttcacttaaggtttaatatcaagccccacaatacgtgctcatggacggagagttatacagaagagagttgtcaatgccctaattaaggtgcatagctagaatagaaataagtgttgtcatgcacaaaatacatgaaggatgtcaatttgggggctcggacttgaacttcctacagtaaaataaccataactcacttaattgttatatgattgacgtgattcaacttgcatgtctcacaccctagacataattatgaagctatcgttgtcaaaatttaccccaagagagttacgaaaataagctccgagttacccgcagtggaacccactgggcactaaaaattggccatcaccaccagattttaattttcactgtttaatcatcatcaatggttaaaaatatcttttttttttatttattttatttttgtgggtctccttcacctataaaagaacagcttagtttatttttcacattcagaaaactactcataaagtcaaaacttctttctctctagacttaaaattttttgatacttagtctattgttataattatcatcttgtgagaaataaaaaattgaagtaggcgtagccccatcactatcgcaatatatggggtgaactactataaattagttgtttatttaaattacttaattacttttatttatgggaaaaaacagaaaaataca

SEQ ID NO: 327987 - DNA, 762 bp, Cannabis indica
gataattttagtgaaatatttgcgatatgagaataaaaaatacaaagcacattgataaatatcgctaatcatcatgaaaatttgagtaacaatttagcaacaattaatgatgtgtttagcgatgtttagagacattgtgaaaaccaaaaaaaaacgaagaaccaagcgatgggttgagaattccggtgatgggtggggattttgggagttccggtgatggatttcaaggttttggattggagatgacgagatttagagtgagagaattagagagttagagagatatttttttaagaaataagaatattttttgaaagaaaaattattataaaagtataaatatcctattttaattggatgtatattaaaagatacatttttcacgttaaactaaattcatcatatgtatatatgtacatactattacctcttaccagcaaatatatataaatatatatatatatatatatattattcctgtatatttttcagtcctaaattagtggaatctttgataatatccaccaccgttagtcaacgaaactgctcaatagccattaagaataagaaaatcattactatatgagatgacatattgtttcctctaagtgatttcatacatctaatctcaaatttcctctttgtggcctccctccatacatgtttgtatcaatatttatatcaattgttcatcaccaataataataacatatagttagatcccactgctagtcttctttatcttcatatatatatatatat

SEQ ID NO: 327988 - DNA, 682 bp, Cannabis indica
tatcatttatctttatagtaagaacaaaaaaaatttcttcacccacgaccaattttaattcaggaccaatccttattttaagcacttatttatatctctatataagaattctactccttcaaagaaaaagttgcataaaattcatttcaaaaagcattattctctatctatggaagaagaaggatatgatatactaatttttatttcattttgttggaacatggcaaaacaaataatcgtgtagtgcccatcattttgccaataagactaaagtgatagagccaattattatatctcactaatctcatatgtagcttccatagatgtgttatttttaaaactaaataaatactagatatagttttaaattaatatgacatttcatccgcttaaccacaatttatttttatttatttattatttttattttgggagaaaaatggagatttcattaaaagctaattatgtacaaagttcataacacgatcatatcactctaaaagcataatatgatgatatcgatgaagaaataggttaattaagctatttatataaggttaattaatatatttttatcccccgaactttgatatgtactaaataatagggttgtacattgttcggtttgggcggtttatcctatatattttctaacccaatctaaagttcggattgctaaaat

SEQ ID NO: 327989 - DNA, 1479 bp, Cannabis indica
aagactagtttggcagtgcattgattttgaatgtaagtttgtgaagaaaaaatgagtacttggttacagttacaaaaacttaaaaaactttctagccaaatagcctcttaccaaatatatatatatttatatatgtattctcatcaatcattattagtacattgaattgtttttaaatttaaaattatagataatttaaaaaaaaattaaaaaactaaaattaaattaacattgaatctatctagtatatatatatagcttaaaaagtatgtatgaataatattctccacttttcattaataatgaagttctgaacatatcttttgttttaatatatataatgcatttttttcaatcttgaaatttattaggcctcgatcatgctctaccatatatattataattaacaataatatatatgacattttataataatagttctttatgtctctatatatataattaataatattattattgggaatatataaatatcaccaatttttttttatttgtctccagcaaaaaaaaaaaaattaaatttttatttgcaaaagacaagtagtactatatatggtgatattgtatataattaattattataagtgacataacatgataatgacttttttagtgattcataaaagaaccaacttggcattgctattgaaatttcaccaattaagagtaagactcttttaattctattcctaaccttgtacctaggttgattttgagaacttcaaaaatagaagttctaactttaataactggaatctaactcattatctttcagtattatgtaccataatgaaatggagcaacctaatgcaagccccaagagctaaaattataggaacctgcaactcgaaagtcaatttgggcaccttagggtttcaccgagcgcctaagttgacattcccaacttgggtttcagttgtcgagaccgtcttagtgaaaaaaggtcaaaaattgcattgggacatcaactagacataccacgaagatatttaagacattagaattagaattagagcaagttcatttttgagcaacccgcgcccaggttgacaattagtcaatctgagcaccttccaagtatcaaatcgacgttctaacattttcgtcttttttgtctctattaaaaatggggaaataggtcctttcgcggaagaaacaacacttcctgggttctaagaacaaggcccagcgcccaggttgacacctacgactggccctgcacctaggttgacatttcgtcaacctgggccattttaattggattttttcaagaatacttctcatcatcttcttcgttttttgaaaatattgagattcaactattttcagggatcaaatggaatttctcaacgggcaaaaggaggacccagtgcccaggttgacacttggagttgggccctgtgcccaggctaacatattatcaacctgcgctgttttcgatcaagttcaccaaaaagt

SEQ ID NO: 327990 - DNA, 680 bp, Cannabis indica
ttatgtattaatgtggaattatagtattatataatctaatatgtaaaactgcactgataaatggtattttacgaccccattggtgtgccaggggcatttttgtaattttaacctgagaagggtaaaattgtaatttatatgatatatcgtgcttatggactatattattttatagtttgtatattttgtctatttgtagatattttctgagaagttagcgcggtatagtcacaactgggtattaagggccgaactgggttcggggcccaaaatatatttttgggattttattttggtattaatatgatcaatataaaaatctgagttatatgtgtgtatatgtgttggattggataatttttcccttgataacaaatgtgtggggttattttggtcgaaggggtattttggcaagcaataatgataacaaagagcttaagggtaagaaataatgataaaaaataattgtaacacaaaactatgcaattcaacatttaatcatgtaaatgcaggtaatatggcaagcaataatgataacaaataatcaaacttgtaaagtaaagagcttaagggtaagaaattgcaaacttttgatttttacaaggttccatagagctaagccacctacgtccttggtcttcaaagttatggacctagctttgagttccaatatcgagcca

SEQ ID NO: 327991 - DNA, 971 bp, Cannabis indica
tttttttacaactaattacaaaatcgttaaaacaagaataggttatacatccaatcatagaaaagggttgatcctgcttctcgaaagccaagacaacatgggtatatgtacactgctagatgacctcaggctcatggctaaacatatttgctatacttcttacctgcaccaaaaagcacctgtgagtcatagagactcagcaagaaaagttattaaatcaaaagcattgtaactgcagatattcccgtctccttaaacatatatattggtgattcgcgcaagcccatcatacacatctatatggttttaacacttatccaattacatatatattacacaataagaaaaccacaacatctttatcgttatactaaatgactatttaaccaactcataaccatatattctcagtgcttcataaagcactcctatcttacattcctatgaacatttactcttatttcccgtgagtcactgaggctctacaaagaaagtgactattttttataagcaatataacattcatttaatcacactatagcagaaatgtactcaattacaactcatcacataataacacacttgatccatttcacaacatcgtaaccacccaattttggtacttcataaagtactcttaccactcattaatcacgagctacatatgtcactatcattgcccgatacagtaaacgataagtaagaaacctatccgcggtttcaggagtaattactcataacggtaatgaccgtttccaatcctcaccactcgttatcaatgagctgagtatgtcactatcgttgcccgataaagcgaacgataagtaagaaacctaaccgcgggttcaacgagtaattactcataacggtaatgaccgtttcttaattcattcacaacaacggtgataatcgtgttcttccctcaatcataacaattcacaaacaataatgatcatttctcatcattacct

SEQ ID NO: 327992 - DNA, 877 bp, Cannabis indica
catcgattgaacgacaatggtggcttgagagaggctgatgacgagaagctacatatggtgattgtgcgaagacgagtgtgaaagctcgataagcttgatgagagagtaagagatgacttgttgaacccaaatctgaatgaggttagatatgaggaagaagaaccaaaggtaaatatgtaattataaaactttaaaaaagtattaaagaaaattttaaaaagtaaaaatgttaaaaattagaaaggataatataaatgttaaaaattggtcaaaatagtcattttttgtaaaaattccttttttttttatatggtgaatccaccctcccccaaagtcaaaataatactcatatatagttaaaacgtcttgaatttatgaattataaatttaactatctaattacatataattcactcaaaaaattacttttagtcataatataatttgtgacaaaaagtaaaaaatttgtgattaattataaaacataaattttatgttgtgattaaaaattttgtaactaaatatgttttatagtcataatacgactaaaacgaattgtgactaaaactaaattagttatatcttatatctaaatattatgttttagtgacacataattttattataataactaaaattcacatttagttaacaaacaatttaaattgttactaaaaggtaatcaataaaaataatttttattatagtgatggtaattaattaattagtcaaattactggtaaacttttattggtcagatattatatgatgataatattaattttagtaaaatataatataaaaaaaaaagcatttctcttattttcatatatatatatatatactagcaaaaactacgtgtgaggcacgtatacta

SEQ ID NO: 327993 - DNA, 762 bp, Cannabis indica
tggcgagaagtaggtaacaatttattaggctcttatacccgacgattttaaactttcgcttataagggccaaataaattttatgaatttcatttaaaaccgtcgcctattcctgaaattactgttataaaccgtcgggaatactaattttttccaacggttttaaacaattaatttttttagtgatgatccccccaaaaaggtatttttaggaacgtcgagaattccaacttttgtagtagtattttatttataagctacatgatacaagaaattaagataatagagtaagttaaactaactaactcataacagaaaaatacaaataacaaattcttacaaaactaactaacaataattacttagatttagttttctaggctaaaattccccctcaaacgaaaagggattgaagccatttgaactttagatttgagatagttgaagcgatcagtagacaatggttttacaagaacatctacaacttgataaagaataaggacatatctcacagagagcaacttggcaactatttgatctctaacaaagtgcatatcaattttcatgtattttgagcgagcatgaaaaattaggtttgctacaagagttgtggcactttgattatctacccaaataacaggacagtgaggtatggtgacatgtaggggtgtccgttggtcggtttgattggtttatgctatattttattcagcccaatgtaaagatcgggttacaaaaatctaagtgcaacctgcccaattaa

SEQ ID NO: 327994 - DNA, 2380 bp, Cannabis indica
ccacacatgggacaaatattttcaaccaacaccttcttaatgcaaagattgactttggtggcaagacaattagaaaccgccatgtatcccttccttccattagtcttccttttcaaatagtgcattacttcaaaagccaccatgatgttatccgatatcaaccttcccgacacaaaagcgctttgagtttctgagatagcatagtttaaaacattcttcattctattagcaactacctttgaggcgattttgtagataacattgcatagtgagattggtttgagatcgcccatttgggaagggtttttcttcttcgggataagaacaatatcagtgtcatttattgagtccggaaactgacccgagtcaaagaaatcccgaacaaacttgaccacatctgccccaacaattccccaatacttttggtaaaaagcacgagtcataccatctggccccggagacttgtctggatgcatttgaaaaagggcatttctaacttcttcctcagaaattatcctcaagagttcttcattctgctcacggcttacagaaggccgaataccatccaacaccgttcccatgttaatgctagaagtggagaaaaaatcatgaaaatagctagttataacattggccaaacctgactcccaattaacccacactccattactatcttgaagccgagtaagactattgttcctctttctagaattagcaattgagtgaaaatacttgctattcttgtcacccgagtttaaccaaaattgttttgatctttgcttctaaaatatttctttttgagccaacacctctgccagcttttccttccattctttgtgttgttgaatagatatagaatctctaccccatttggaatttcgaatttgactcttacaatcacttattctctttcggaaattcccagttatgtcccgaccccatcttcccaagacttccccacaatgatgaattttctcttgaatatgaactaaacccgaaccccgccaacaaccctcaacaagctgctcacataaaggttctcgaatgcaagcattttcaaaacgaaaggaacgaaaagagacaaaaggagtgttacctttaaggattagcaacaatgggcagtggtcacttgttgagaactccagattgagtagagacgattgtggaaacagagataaccaagagttggtaaccagagctttgtcgagcctttcttcaatccactcattactatttcttcctttctcccaagtgaacgggtaaccgacaagaggcaggtccatcaagttgcagtcgtccaaagccttagtaaaaccctcaatgagccgatcggggtacttccttcctcctttcttctcaaagtgagaccccaaattgttcatatcacccaacagacaccaagggagatgactgtcgtttttaagtgaacagaaaaggtcccaggcctgaaaacgaagctctcttttcggctctccataaattccagtaaaacgccaaggaggcagccccaccatttgcaccgtagcatcaatatgatgaaaggagaacccttgaataacaacttcactcgtatctttccaaagcagggcaagaccaccactgtgtccacgagcttccaccacaaaacaactttcaaatcccagatgggctctaatattttccaaactagacttattacataaagtttcacaaagaaataacaaactgggcttcttttgagacacaaggtcccttaagaattgtttggcccgcaggttcccaagcccacggcaattccagcttaagcaactcattgctcttggtgggcctgaaaaccagagcccaccaatccattttttgaacgcctcataccatcttgctccatatcatctgctgaagccgaaaaatcactcacacgtgggcccacaaagtttcccaaagtggaatctggccttcttctctttgagtcaaccattgtagtaatggtagaatcaaaaaagttttcattactattgacatttaaagtcaaatcttcctcatttattccttgtgtccccttgctatgattacgcccagcatttggcaaagaatccttaaacatatcatgaccttgatttttgccaatcaattcccctgtattctccacatttctaggaactaaattgacaccctgttcagtgctgcttccttgagattcacgcaccgccgcaccagaccggagccactgtgctccaaatgttgactgtctcctctgtgtcgtggccttctgctccaaactataaggcttctcatgtaaatgtaacagctttaagaacagtctgggacagaacttctccgaatgccctatgatcccgcatatgaaacaaaaggttgggattttttcatacttgaaattagccca

SEQ ID NO: 327995 - DNA, 609 bp, Cannabis indica
ttaattttaaacaactttttttttttaatacaaccaacttgaagataattcctaatacgaacatatataaaaaatataagcagttttgtcatagcacttttagatcgaattataattaatctttcaaaatcaattcagggtcctatttgtactattttagaaaatacagggtccattttgtcatttaacaaaacacagagttcaattggtaacttttacaaaacacagggtctaaaatagtatttaccctaataataataataaataaaccttttaaggcatgtttgggtacgaagaataaaaatataagaatgagaaaggaatagagtcaaatttaaaatatataaaaaaattaataaaaaaattatttaaaaattttcttatcttgcattagcatatgtttatttaaggggaacatgaatcaattgcatgatatttattctctttgtttactaaatattgtaatggaagaaactagtggaacccacttaaattagtgagaaaaaaagagaaatatttttccctaattttataagaaatacatttttctttcttaactattttattttattaattaaaaaataaaaaaataaatatgcccttaaaaat

SEQ ID NO: 327996 - DNA, 801 bp, Cannabis indica
aattatacgtagtatcagtattccttcgaatactactagtccagtaagggaccacgcccaaagaatgaaatctattagtaaagtcttaaagattacaaatacaattgactttaacgaattctgactctccctctaaagatttgtcacaatatttttataatccagcatgctaatctgatctctgaaccacaacaaatagtaaaatttcttcatcaaaaaccacaccaaatagtaaaacttcttcatcttttgatgtgcacatgcattcacttcctcccgaagtgagtccttgataagtcttctcccaaagacctcctattgttcaaagtaactcttcaacctatattatgaattgtaagagaattataagcaccaaaacttagctgaacactctagatttttatgcaaagaacaaccttgtcacaaaggtagaatatggaaataataagactagaagagataaacgtatggctgctctctaagttctatatttatagatcataaaagtcctagagagatccacaaaacactttttacagttaacaaaagttttgaagactcattcaagacgagtaaagaaaaggaaagaaaataataataaaaaaaagtgagatccacaaatattttatttattcaaattccctttccccagagaacccactgccagccctagcaccaatggcacctcaaccccaaagaacccaccatcgccaaccctagaagctttttcttctctctctctctcttcgaaggcagcaagagcaaggggaaggggctgagatttctttggatttttcagca

SEQ ID NO: 327997 - DNA, 1305 bp, Cannabis indica
cttgagaaatggcctgtttcgggacacgggggggatgcaaaactggataaagtctattgctgggttaagttgaaaggattaccaattaagcttttcaccaaaaggaatgctatacgactgggagtgatggctggcgaagtggcggaactccgatggggggacgagagtcgtatgtttcttcatggctatgtgcggatgaaaatcggattcccaataaataagagtatttttgtgggtcgatttatcccgaatggtggaaaacaacactggattcaattaatgtttgaacacttacctttgttgtgcttccaatgtggggtttggggccatgaacagaaagattgtgaggctgacattttgaaggaaaaagatgctactgggagattggttccgaagtatggaagttggttgagggatgatgatccatgcccgaatggttttgtagctacggttaagatggatcaaactggtctgcagtctggtgacagtttggtggaggagggtggaggtgttcgcggccatcctagtctcgttaccggagttggaacggttgctaataataatttggcggtttccaaagaaacagaggacaggggtatacagaacgtggatatggaagttacaaagaatgtggaagttactatgagtattaaggatggagggcagatgatgcacgtgcaacaaattaggaaaaaagattctgaggtgggattgggcctagatagtcggactgggcctggaataaaagcccagggtgatggtttaggatttaatatgactaatggaagcccaagtggagataggtcatctgatggcagtattagtagaatttcaaaggaaagtgacatttctgaacatgacaagaagaagaggaaaaatgggggacccgatagcactgtggaggctgaggctttgaatcgtatactaagtaaagataagcaagttcaacaatttgatttagagctaaaaggggttgagaattttgcttttggggggagtgatgttgtaaagcaaggcaatacaagcaagacttcccagcgtaagaaggtctctatcaaatctaaagctcgtgcgaaggggggcagtcgagtgggacaatctggggttcaggtgcaatcgttgattgttgagagtgataagtgtggagatggggtttctgtggagggacacggcgatgaaggtattgcgagtcagccaagttataggggaggaaaacttgagtctttacttcggaggtgggtatttctgctgagttggatttcccatcttcttctacaaacaatgaagcggcgagccttgctaagc

SEQ ID NO: 327998 - DNA, 958 bp, Cannabis indica
ataaaacttatactttggctactaaaacatacaccataatgtagatctcgtcctaagctttaaaacggtatatagaaacgtcctaaacaaacacccaagtgaaaagttatgacaaaaatacgatttctaatctccctagaatttctagaaatggcagaacgttttggtaaaaataaccattttttggcatgaagatctcaaattttgcactcttcgaaacactatcaaaacctatccaaatcattccaaacttcacgggacacatatataccacatatacaacaatccttatgtaaccgaaattaaaatcgaacccttaaatagaaaacgcctttgacgttcagacttaagccttaaaatgtttcaacttcgatttctaactcaaaattacgtcaaattcaataagtaaacatcgaaactagtcccatagctaccaaagaacaattccataaagtcagaatctccataactactctaaatcacaaagttactatataaaactaattgttttcaacttaaaacgaaacctatcattactttaagctttttctcttcgatgattaactatcccgctactaccgaagcttgaattattaagtttcaaattgacaatcgaagaaattaagaggagagaaagtttcgtcgcaccaaaaaaaggaagattttgttttttctatttatgtttttaaaaatataatatatataatgtatattaaactgataaaaataacgtttataataataatataataatataatattaataatattaataaaaatttattattaataattatcttattatttcatagtcacagagaaatctttaattttagagtatttggtcaactctgagtatcccaaaatgtcatggtatttctaaaatcatattaccttaataatcccattaatattactaactaaaattattatgccatttttggcctccaatcaggtc

SEQ ID NO: 327999 - DNA, 891 bp, Cannabis indica
tgttagaaattgtcttaaagttattataataaaaataaattattaaaattaagcttatgatcctattttacccttttgaaaattataggattaattttatcatttaacaaaacagaagttccaattaaaattttttataaaatacaaaatctaaaataatatttaaccattaattattaacatattgtgagctattaaaaagtaggcacaatgaatttaatttgtttacttattgtaaaaacataatgcatatactttctttcaaaaaaaaaaaaaaacaataatgcatatcgttttatactgtcatgacttttgattaaaatttaatgtcatttttcatacatttatatcaagtaacggattcatctcaacccaataattgatctgacaattataaaagatgtataacaatattagctccaattaaatgtataccagtgctgtaacatgtactaatttcaaccaattttttttaaaaaaatatatattttttttatgatggttactaactagtttaggttttatttctatacaacaaattattctaaatttttaaaaatgtataaaatatatattataattataaataaaaaaaatagtgggagaggttaaatataaattgtgcccgccattctttgtttttgtttttaacccagataggaaaacttaagaaaaatgtaggtgtgggggtaaataggcatagaggtgggtggggatgacaataattgggagagagaaagatgggtgtgatcaaattcaaatcactacaccacagaccactcctcactactagtacttgccacttttttattttctattcacacttttattttttatttaaccatattacaaccatattttacttaagactcgaactcaaaatctctaaca

SEQ ID NO: 328000 - DNA, 528 bp, Cannabis indica
aattcatgcaaacataaatcacttcaattcaaattagaagtaaatcatgctagaattagagaccatctaattaagtcgaaccaagaagagactgcaagtcgttataggcgattcctaaaagaaatttttgaggggaagcatcatttcttgcgagacgcggcttggcctgaacccatgatattaacttctattccacttgtaagataaatgtttttacccaaagtcattgttgcttttgaaccaggtgaccttgagtttgaaatcatgtctcctaagccttgcaaattaaagactccacaggatcccaatgttacctttgaggcagaacttattgagtccaaggttaggtctattggggcctacattagtggcatcctgaagtcttgcggcattaagcagcggaaaggatgcattataaggtctgtggcacttagggaattcagctgttgtcccccaaaaatagtaatacgcgaggattttgggctttttgccctaaataaaactctatttcaatgtaatcttttctat

SEQ ID NO: 328001 - DNA, 1107 bp, Cannabis indica
taaaagtgacatttcttgtattgagccccactttcattacattttactttgtacacccatttgcaacaaatggccttatggccaggtggtaacttagtgacaacccaagtgttgtttttttctcgagggcatcagtctttttgtccatggccagaagccaatgtttaaactgagatgccttaacatagttttgaggttcagtttcaaagttggtttctaggacagcagccctgaattgaggatgtagtttgatgtatgaaaggaatggctcaatcaggtgagcagtagaagatgcatgacaggcttaatttgttagatgttttggtttgaccaaggctctaccagttcgtgtgagtagtggtgctttcgtgatggtaggttgttggttagatatctaagcaataggtaagttaccaggaggcacttttgctagtgtggatgctactgatgtgggaagcaaaccaggtgatgttggcttggtgtgttggccatctggtgcaacaggtggtgatcctagcttgttggtggggaaactaggtgttatatttaggatgtccacagacttatgggtagttttttttgctgcacagttttgacatgcaataggaagaacaatgtcaagaagtagcttattgatctctgatggagatgttgtggagagcaaggggaagattgtttcatacaaaacaacatcccttgaaatgtatatttgtttgttttcaatgtcaagaagtatgtaggctttcatgccttagggatagtcaatgaagacagaggctctacttcttgggtgaatttgtgccttgtggaggtaagggtggaaccataagctaggcacccaaaacttcttaaatgggcataattgagggttgtaccatgcaaaatctagtatgaagtcatgcctttgaacagtttagaaggtgttctattcaatatgtatgtagctgtttggactaggtaaggccaacaaaacagttgtaaattgtattggaatcctagagcacaagctacatttagtatgtgttgatgtttcctttcaacaactgaattttgttgtggtctttccacgcaagagtggtaattgacgatgcctttagaggcaaaaaa

SEQ ID NO: 328002 - DNA, 835 bp, Cannabis indica
tggtgagaaaattgaacttgagcgtctttatgattctgttaattttttactctctttacaggtaataatttttcataacaatgatatatatatttgttttctttcgcttataattttcataaaatattgaaaaattaaatcaaataggtgcatcggtacatttattttttagcaatgtattgttgaaaccctaaaattatatgattaacataatttacttgcttgctagaggaaaaatggtggtttaactgtttgggagcaagcaatagggcaagagtggatggaggtatagaattgtcttttataatacgatagaaataattaaataattagtatttttgtttcttgaactttttaaactattaagttatgccctttaaaatcaactgcttgtataaataatactctacaaaatataactttcacattatatgatcctttcatcacactctattcaaatttttcatgaaataaatgacgatgtgaatagttgatgaatggatgcaaattatatacttttcaccttttttattattcaccacatcactcgtttcatgaaataattgaataaaatgtaatgaaagagccacgttaatattttaaacattatatttcaagtggtattatttacaaactgtatatattaggagacgcaacttaatagtgtaaaaagttcaaggtaaaaatactaattattctaaatactttgattaaataattttgaaagagactagatatttgtgtttggtaattaatttgaatgcaattcaaaatttgattagatattgaatccaactgaatttgctgagggaattgtgattgagcatgaatatgt

SEQ ID NO: 328003 - DNA, 1328 bp, Cannabis indica
ttaaacggttgtgattaatttagaaattagataaaaaataattaataaattacctataacctaatactaattatttttatttatttcattataaaaaaaaaaattataaacaatagttgtgaaattctttatcatcccgacaatgccaatgtagtggtaggcgctctaagcaagaaaggtctcgggtaagtatttagcacgattatgatctcacctcagttggcagatgacatggtcgtattgaatttgtagttggaaaacttagtaatttgacactacaatcggacttgttagaaagaattagagctgcttagttggtggattcagaattggtacgcgtttaggaagaagtcttagttggccaagctaaagatttcatagtgtcgggtaacaaaatgttactttataaaactcgaatttgtgttctgaatagttcagaacttaaaaaggagattcttgatgaagttcataccactccatattcattacatctcgatactgccaagatgtaccaagacttgaaaccctactattggtggtgcagtatgaaaaaagatgtggtggaatatgtgactagatgtttaacttgtcagtaaattaaggctgaacatcaaagacctgcaggattgttgcagcctttaacacttcccaaatggaagtgggaggttgtcactatggatttcgtggttggtttatccagaaccacaggtgtgttcgattccatatgggtagttgtggatcggtttaccaagtgggcacacaatctgctagtaaaaataatatattcagtagatcagtatgcagaactttatgtaaaagaaatagtacgattgcatggggctccgaagtccatcgtttgagatagatacctgaagttcacttccaagttttgggaaagccttcaacgagccatggctacaaagttgaagttcagtacaactttttgtcctcaaacagatggtcagtccaaaaggacaatttagatattggaggatatgttatgagcttgtgtgatggattttgaaggctcctggagtaagtatttgtcatcgatagagtttccatacaacaatagctatcagagtacaatgggatggctccctacgagttattgtatggcaagaaatgcagatctccaattcattgggatgaaagtggagaaagaagatacctaggtccggagtcagtttagcagaccaatgaggcaatagagaaaattaaagtcagaatgcttgcctcccagagtagacagaacagttatgcattcaatctttttttattatacatatagattaatgatacattgttattctttcagtttttttgtt

SEQ ID NO: 328004 - DNA, 969 bp, Cannabis indica
gacctatattggaccaatatcagacatatatcggaccaaactcaaaaaaacaattaaaataaaaaaaaactataatatatgaacaggggcatcggatcccatcgggcccaatcagacccacttgaaaataacacaaatcagacccatcgaacttcaatgagaccatatcacaaaaaatctaacgtgcatcggcctaaccatcagacccaatcggaacccatccgacccacttgaaaataacacagatcgaacaataatcgaacccatcggaccaaaatgactatgacaaaaaaatttaacatgcatcagcctaaccatcagactcaatcggacccaatgaaaaataaaaaattacgagaattcgacccccataatcgggcatacaatcggaccccattcggaccctattaacaactatcggaccgagaccatcggaccatacatcggcctctatcggaccatacatcgggacttcatcatcaacctatacccaataccatcggacctacatcggtccaccatcggacctaaatagtatatcgacttccaacacagacaaccaaaaaaaattctaaaatataatcaaaactcacacaaatcacagatcaggcatcacaaactaaaatataccctaaatcaatgaatcatagtgcaaaaacaaacaaatccatgaaattttaaaagagaaatttaaaaaattaccttagacatggtgcggttctcctgggtgggtctcctcctccatgcggcggtgatgacggtcggatagtgggtgtgtctcggttggagttgactgggcatggttgtgtgaggtggctgggatcgggcgaagtcgagtccactgggcgtggttgtgtgaggcgactgggatcgggcgaaggaaagagggaccgagagagagtttgagtggaagagagagaaagggattgggttttgacaaagctattttgggggtttttgaaaattggt

SEQ ID NO: 328005 - DNA, 722 bp, Cannabis indica
attagttagggtgttacattaatgctcaaacatttggcttaaatttcaatgtaatttggttaaagtgtgaagaacctaaagtctaagaaagggatgaagaagagagagatctgaagaggtcaaaaggtgattagaaagcggtccccaaaccctagccaatcattatgtatatataggcttagggtttggtaaaatttccacacaagtcagggtatctcacttaaaatctcatatcttatcagaaaataatgaatattaattgtaaataaataaaaatctagttaatgatcccacactcataagaaaatatcccaacaatcatttgtcgttaaacttgggtagattcctatttttcttaaagtttgcttatgtggcatagtgcttcatccatggagaataagaaaaatagagagatgtgaccatatgcaatggcccatctcgttattagggagtatatgaccacaaataatgtagcatagctctcccaacaaccctttgtggtccaaccttattaggacatacaaattttagtgcaaagtctataagcctatcttgtaagacaattttaagcctaatagcttcagaattgtgctatgagcaagagacacgcataaagttaaatgaagtcatttggataaaaaattgagagagttatgtctattttaccaaagggctgtaagtacacttcagctccaaattcgacttgtgccacgtcatcatgc

SEQ ID NO: 328006 - DNA, 591 bp, Cannabis indica
aaaaaaaaaaaaaaaatactctccttatatagatcaaatatatttttgatgataactttttaaatttggtgtgttttgaaacttgtgtattgtttatagaaacgatattcttagaaatatttaaatactaagctaggtcaactaggatgggagggatgtagagtgatttttacaatatttaatatcttattttaaatctaattttcaataatgactttgccatttaatttaattttttattttaagttttaataataatgactccctattcttttttttttttctttctctctttctcttctctctgaattattgttacttgattgaattttaaaaaaatattattgtaatctattcttcaatgtaaaaatttcataatatgggaagtatatatattttcgctagtttcaaattttaaaaaaccatttgattacttatgataccaatctatattgattagttactatatattttttttctattttagttaatatttattttagaatttaattaactgaattatattctactataccataactaattagtgtctccactgttaggttatttttagtattaattttagattaa

SEQ ID NO: 328007 - DNA, 508 bp, Cannabis indica
caaacttattgaccgacgcaaaattcaacccatacttttttacttcagttatccacgaacccaaataattattaattagtgttggttatgtatccgacgctaagacaaaaactgaagcaaaatataaaatatataaaaaaatgtgtatacactattagcgtcggtctacaaccgacgaaaaaagtcattgtatatactattagcgttggtgcacaaccgaagaaaaaagacattaaaaaaaatcagttatgggctttagcccatttaaaacctaaccctaaaatataaatctaacttctaaccctaattttctcttaaccgcccctctctcatctatctctctctctaacctaattccctcccttcacccattatcaccttcatcttcttccattcttcttaaaccaacccaaaacatgaacctcttaaactctaactctctctttcttatttttttgcaggtggcattggagctcatcgtcggccatcatggagcacgggaccatct

SEQ ID NO: 328008 - DNA, 881 bp, Cannabis indica
gcacaaaacccaacaatattttgattctagatgattccccaattatgagctgtcaggagattgttctagaattccataaaagcatgggattcctttttctaatacaaccaatcattgtgcaagggaatattttattgttagggaattattccattctttgcactataaatacgacgtcaaattcattgtatactcatcgagaattcaatatacaatatacaatatacaatagaaaatcatttgtctctctaccattatattctgtttttagttttcttttgttcgatcctcctttctgatttggtatcagagcgggtatggtatctccaggcaattccttagtcaacaatgccagatttcaagttgttgatgctccttctcaagctccaacacctgcaccagttgctccattgctacccgtgcccttgttgcaatccttggcaccaatcaccattcataaggacagagacaactacctctattagcgctccaagtcattccagttgtgcgtgctcacgacttagacagtttctctttggcacaagacctggtcctcctcaataccttgatgctcctcacgagataaatcccaacttgcagtagcaggtaaaccctcaatttactgtttgggtttgcatagaccaagctattttaagctggcttttaaactctatttctgaggccatgcttggccatgttctttgttgtcgtatttcttatgaactttggtctttgctggaaaatctttttaccactcaatctcgtgcacgttgtggtgattctattcgtgggtatgaaagatggaggttataaatacattttttcttccttctcaatggttgttttgtggtgttttttttattttggttctcctataaata

SEQ ID NO: 328009 - DNA, 1139 bp, Cannabis indica
aaaatgtatgagtttattgatttaagattaaaatgtatgatgaatttatgtgatctgtgagtttatgttagatttagggttgggtttggttgaatttgtgttttagacaaaaaaatagtttttacaccaggtccgatgcaggcctgacacttttctgttattaaatgagtaaaggttgaagacgtaggtccgatgtagatttgatggtggcccgatgctactcatttttcttattttatttatttatttattttaggaaaaattacggcaaaaattctcaaaaagtttatttgatgcagataaatctccaacctcaaaaaataacaacaatagtccccaagctcgagattcttgtaagttcgttagccctctttttaacaagtctgttaatttctccctataatgtcacgtgttgataccaaattgtgacataagtttctaaaaagttcattttaatgcagataagttcctcatctcgaaaaattgtgacaacagcccaaagctcaaggttctcgttagtccataggacctaatttaactgctttatttgctgttccaaaaaatatcacgtgttgattttttattggtccaaattataattttaattaaaattaatttaaaataataaataaataagttattttaaaaattaattaattaattttttatattttatatttttaatttaatctttcttcttctaatctactcctagcccaacatccctagctctggtctgttctaaaacctcccaacttgtattagcaagaggggttgttctctaaaaaattgtaagtaaaatttgaatcagagaagctaagataaaaaaaaacccaccacccaccggagacgaggactggcggaatagattcagggagagggtcggagtaaggtgtagctattagatttttttcatttttttttgcttaattccttttttgggctttttacagggatggtgggatgggatgaggaagaaagtggggatgaatggatgacacttatcggcactaagcctttaccactgagaagggtaggtggcgaatcgtagaagtttatatatatatatatatatatatactagatagatgttacgtgccaagtcacgtatgttaattttattactagtttttaatttt

SEQ ID NO: 328010 - DNA, 1003 bp, Cannabis indica
atagttgttttataatttgtttttttatttttttttgtcacagttgttgtttagtttatgtatattttttttatcgtgtatattttcagtttattccaaattaattttttgttgtatatatgtacatttatttgttatttttatgttgtttttcagtttatagttattttttaactatcagtaactcaaaaaagaaaagagaaaaaaattgtaagaataaagttgtaacaacaaagtccataagaaaaaaaaataatgtaatagtacaaaaagttaaattaagttgtcaaaactaagtaaaaaaaattgtaatacaaaaacatattgagaagttgatattagtttgcttattgcaattagatcaatattttgttatttctgttcctttttagttaaatttttgttgttttatagttgttttcatgttgtttgttaagttgttctatggttatttttttagttgttttgagttattttttttttattttactgatacacggtatttttataattttaaaactttaaacacagtatttttgtaaagtaggtatagtaaaaatgtaaaaaactccgcgtcacagtattttttttgtaaattttacctcattttacaatatttttgtaagtttctctaatataaataattgtcttaattataatataaaggaaaagatttttttgaggcgtttggtatgagggttagatttaataggaatgagaatgtaaatttaaattaaatttgaatgataagggctttgtgtttctaagtaggtctcattttttaaattaaaatggtgataatattaagggataagttgagaaatacctcttttttgtattaataaaaatattctcatattatattttattaaaatagtaacactttttgtgaggtaggcttcccgaatatagcctcaccctccacttaacgtgtaacacataatttatatttaccttgagggtatataatagggaacgatcatctataaaaataggtatattt

SEQ ID NO: 328011 - DNA, 777 bp, Cannabis indica
atatatatatacatatacatacaacatactacaaaaaaatcttacttttagtgacaacaaaatttataacgaaaagtaaaaaaattatgactaattataaaacatcattcttatgtttgactaaaagatccatgactaaaggtattagtgacaacttagtgactaaaaccaaattactgacaacttgaaactaaatgttatgttttagtcacaagtaatattttattgtgactaaaagtgactagatagtcacaaaaatttatgttgtgactaaaaagttatcactaaaaattattaatttttgtagtcacacataaaacatacaacataaaaaaaaactctgttgtcgtggctatagaattaatacaaatacacacatatacatatggataaaataataataatatatataaaatatatacatgcactgatgtaaatatatatttacataaaaaaataagtaatttcaaattttatctcctgtcttgctttggtttaagtttctcggcttggaggttttgaatgtcaaggaccacggaggggtggtctgcctgggttgatggcagcaacacgaggctccatcagagctaggttgtgcgcggatgatgaaatgaagaagaatgagaaagagatggaggagttgagtgaaaattggatcaggaatcaccattttgaggttcgagggagaaaacagaaaggattagtgatttttttttttaatacgttaacattagatatcttttacatgctttaatgttgatttttttttaaaaaaaa

SEQ ID NO: 328012 - DNA, 1054 bp, Cannabis indica
attacataaaatacaattcaatataatactatacaatacaatacggcataccaaacgaaccctaaatgagtgttgatttatgtgtcatctgacacaaattttgtataagttttatacgtttttgggtaatttaaaaggctataagtggcaggtgttcttataatataatataatataattttataatagataattttacttgctatagccgtttcaagatttttattttttgaatttaaaaattggatttgaacaatgatagaagggttttgataagtaatttcacaagtctaattgtacctgtatgcatgtacataagtttagcacactaaacatgtcttataaaacacaatgtttcacagaaaagcacaatatttcaaagtttctaaaaatttgaactaaaagttataattttttttttgtaaggagatgctttaatatttttttaatcactatttgttttttcttttaaaaaaaaaatcattatttgtttaattaatatttttaagtggatgaaataaaaatacatatgatcgactaaatattattgattttaaaaagtatacctacatacaaggacgactctggacataggcagattaggctcatgcctaagacccacctagcccagaggccctaaaagaaaatttctctttttaaaattacacatatttttttattgattttgaaaaatatcatatttcttctaaaaaagggccaaaaaactatttttttacttatggcccaaaaattctaagatcggccctgtctacacaattaattaaaaattattaaaggctaaaactcaaactaaaaataatttgatgaaattctaaaaacaaagtacttaaataaataaaaatatcattgttatagtttttttattaaaaaatttgcggcaataatacttgaatctttatggaattatatgtgtgtcgaatgtatatgatatgtgaaacaccctaactagtataggcgtgttaacgtgattttaaacatactgtgcaactcgttgctaatcaacgaggttaatgaaaatcgtgattaattaaaa

SEQ ID NO: 328013 - DNA, 1026 bp, Cannabis indica
ttgtgaaattaacccttttttattgggtccctaaaatgagtgggtcctaggcgcgggcctaggccgcctatgcctaggggccttgaatacctatgctatttaaataaaaaaaaaaatcaataattttgatcttatgttattatgtattttaaaatcatacatatttaaaatttgaaattaaatatgatcaaacatcttcaattatatgagttcccaatttaaatttattgataaaattttattaaacaaatttaacttttgaaaaatataaagtactaaacttacttttcttttaaatatagagtgccaaatgaatatattgcttgataaaatttgttgtccaattattttttgtaatgtcttactagattaggcacgttatcgtaattttaatttactgtgcactcttttactaatcaaaagatttattgaaaaacttaaataattaaaacatttataattatacattaatttgaaaattaaatattttacataatccaggatcccgttaaaaagttacaatcgttttataaaatattataactacaaaagttgtcgcccatcgactattaaaataaacctgttgtctcaaagatcgaacactccaagtctaaccacctcgatacgtacaattttcgtgctcatgctcgctgctgttcaaccatagctttgtcttttacctacgcatataaataatatatgtgagttgacacacttagtaagaaaagtataatcataacataaacataaatgagattataaccatgggcgcccatacacctaatcataaccatatcccgcgtccaatgtgtactgagtttggaacgttcgtacgacaatacgattaaccataatatcagcctatactagatactctaatcgtaccgatgtgatagcgtcaatacgtactttgccaaacatatattcgtcgatatattcagtgcaactctatatagtacactaatactgctcttactgatatgttatctattaggcaatcttaaaatatgcacgctaaacatgtaa

SEQ ID NO: 328014 - DNA, 849 bp, Cannabis indica
aatccgcacaagtgcggatatccgcattttgcggattggatcgtgcggattggattggatcggatactttgtgaacacccctaatgggaatccatcaaagatttgaaaatctccccatgcattgttgtggaagctgaaaattccccaaaggtgaagcactttgtgtgaaaaatggctcattcatgactccctactcattcgacgtaatcgtcaagagggcttcagattaatcaaagttgtaacaagtgctctaattgtgcaaatgagaatgtgtttcatgcattatggggttgtaaggtgaataagtgtgtgggagatgcgtggcttcaagcaacaggtgcgagatgtatttgaatatttcttacttgtatcttgaaattgtggttcattagaaataatagtacaagggctatgcgtggtgaaagaaaggaagactcaacgactagttgcggtttgggttccacctacagaaggtacattaaaattgaatgtggatgctggaaaaagggtaaggtttgtactgggatcagttgagtgggtagtaatgaggaagttggattatgtttgcaacttctactgtgctgcagcagaagtgttcaccattacgggggaaattgttagatgttcgcattggtttgaagatagaaattcaacgatatttacaaaggtttaatatagaatctgattgcgtagaagctgtctaattaattcatcgcaaggagaatggctgtaaggatattgatggtatactagaatatattagaagcttattattatttcagaaaattaatggagtaactcatgtattagccaatcaaattttgacaaaaccttttcaaaaaaaaaaaa

SEQ ID NO: 328015 - DNA, 736 bp, Cannabis indica
ttgtatataataaaacttaaggaattatatttaattatgtaataatggtatggtcgacgtaagtaggaaacagtatttggtaatacaattaatattatagaaattttttataatcacatatatggtagattatttatagatctaattgtaatttttcaaaaaaaattgaaatagttttacaatgttgaaaataagttttaaattgttacttacctatacgtataagaaaaattagtcgctcgtgtaacaaatatttataccttattttagatattataaattactcaaaaaattttgaaaatttaccgatagtcctaaataactataacgtacccattcatgaaaaaaattagactaaaaaattcttttaaatactgaaacccaatattatattgctaacacagaaatttcattaataataatgagattctttaaaatgaaattaaatgagatcgaaggaactacttttatagaataaataataataataaataagataaaataatcgtgtttttgtagttaaatctacatagtttacgagtttatattatttttgagttctcaatctttactaaatataaaatattcaataataaatataagaaatattgggtttcttcattttattctttcagattgatcttttagagaaaaaaattggctccttctatattgtatctttttatttatttatttatttattagaatttttaggaatcgtgatattattcttttt

SEQ ID NO: 328016 - DNA, 982 bp, Cannabis indica
gagagagagaggtatgatgagtacctaaatcagagaatccccatccaaggacatctatagcccatgtttctaacccagcattttcaagcaatggaagtgcacacctccattccaaacaagagctaaaaaattacaacataatatatggtgttaaacaagaaattacatcaaaattgtgatttattaattcctttaacattttactaacctgtcaaagcaatgaagcaggaccactggattggcctcattttctttaagtggtttcacacaactactcattatgcaactccttgaatcttcaaattccaactataataattaaatcataatcacttcagttcaaattttcaaatgatatcaacggttagtattttattattttctagatatgaagatctaacaacaacaacaacaacaacagtactccaaaatctgacattgacaaataaaaaatgattttgggctgtcagtagtacttttgtttttatccaaaattgtctaaactttctcccttgtctgtttttttttggatccaacattattataaatacatttttgagttacacaagctaggattcgatctcagtactccctattgccactgagctagactcaagtggttggctcccttaagtgtataaacacgaatttggaatataaaattaaacaatgagggagaaatgtacaagtacaagtcacataatgacattacttatctaaaaaaaaaaagatttagcaaattttaagaccaaaaatcaaaatgcatgtagctacctgaacaggaagcctttggatcctccgagctagggctctagcatatgggtctttagataagagatacctcttttagggagaaaagaaggaaacccattacagccgccaatgccagtattcatgagacccttaaagcttttacatttatttgatataatcacagacataaatgtttagtgagggtacagaacaaacccaattcaaactc

SEQ ID NO: 328017 - DNA, 593 bp, Cannabis indica
ttgatggccttatcctattaacacaatttaagaattgttgttagaattacatacaaaacctaatcaaaatcgaatgaataagtggaaagtaattacctttgggcaacacttgccgcagttagagcaacgaatgaacttaacatggccgcggccatgcttgtttctgcctccatttcttcgcttgaacgtcatgtttgattaaaccctaattttccaaaatcataaaccagactatcgaggttggggatatagtgaacgtataggcttaagaatttgggttttttatgggcttgggcttgggcctgtgaggacagcttgagcttcaattactgggtatgggcctttcgcgtgagcctcttttactggacttagccaagttgggctttctggttggttagcatgtgtatgaataaacttacagattttacaaaaatacctgtttctgtgctttcgaaaagaggaatgctaattacaacctcctattataacctcttagtcaatctctacatccgaaatcacatgtcgtaaatatttttttttaattatttttatagcaatattcattatagttacagtatcattcctgtaaattt

SEQ ID NO: 328018 - DNA, 661 bp, Cannabis indica
ttatagttatcgtgagattgatttttctttattttcttactttttgccgagacaagtatatttttgtaatttaaaatttatacgcgtatttttataaataaaaactttaagccgtaaaagtgtacacaaaacataaaaaaaaatagtatttttgaaaattcttcatttaacgatatatggtatataaaacaactaacaatttattaaggtagcatttggtaatacttttgtaaaataaaagtaaaattttattttttaaaaataaatgtgtgttttataaccagttttgctattcaattttaaaaataaaaaatgaaagtgtgttttgtaaatttcactttcatttgttgattttagaaaagtcaggtctgggtccaagtctaggttcgagtccggggtgacgtccaggtatgggcctggggctggggtctaggtctgagtccaaagccgggggtagggtccgagtcgggtccaaggtccaaggtctgggtcggttttgaggtccgagtccaacgttcggttcgggtcaggtcaggtttgagtccaggtcgagatccgggttcgtgttctaaagtctaggttgggatcgaagtccaaaatattgataaaaaaactgtttaaaaaattttgaaaatgactttttatttgttttcaaaatttt

SEQ ID NO: 328019 - DNA, 539 bp, Cannabis indica
gaaaaaaaaaaacaaagaatgaaacaaaacataaggcataagtaaaaaaaaaaggaccattttgatcaaaaccagatataaagatcttaaaagtagttaataacacagcttgaactttcatataagtatgattctataatctaaatatatatatatatcatctaacttctggataaacggcaagagaacggcgtctgttttcatcgtaaacatggcaaccttcgtcgaaattctgtgagtaactaacggcgtcgtaatgaaacgaaatgggcttgtgatgatgattcatggatccacacaaaccgatcttgttatttcttaccaatctccatagaaagcttctccaccgccagcctcttctccggccgccgtgtggagcggcgcagtagtggaggcgagagtactcgttttcttcacgtagcggaaaacaggtagacgatgccaaacagctagaaaagtacgacggccgcggcggaagacggcggctcatgagatccctctccataattgaatgggtgatctctctctctctctctata

SEQ ID NO: 328020 - DNA, 866 bp, Cannabis indica
aaaaaaaaaaaaaaacaattctccgtaactcaccactgctatcggaaagcccgtactccattgcaaaccctcgaaaattcacagcaaacccacgttcagaaaatcaaaaattgggcgaatttctccaccagctagaacgagccaagaaacctggtgaaaaccacccaaatttgctaaagctaaagccagaagctccggggatttgaattcgaaccctagagaggcgcagagaagacgatctggattgtcgaatcaagcagaacaaaagaaaaagcgaatgatttcgtggaaattgaggatttgaatttgggaataaagggtaaattagggttaaagttgaaatctttgaaattgtaaattaggtataaggaaaattagggatttgggggtgatggagaatggagattgatggaggagagggagtctggtgtggtctggtctggtggggtttcgggagggaagacggacttcaaataagttttatgccgctcttttttttcagttcataatctatttcagttccgtcacggcacaccgtttcgtttcgacaacgcgtttcttttggtacttgttgcatatgacgtttcttttgtggatgtattggaatttggataaatattattttggagattatattttgcaaagcttattaattgaattctcttttttgttaaattataaatagatcttgtatcttttaagagtgcatttagaaagccacaatgtaactagatttgtgtgtaatttgaggtaattattcaatttgacatgtttgtctgaccatgtaattacactgtaattgtgtaaatgagaattgaatgtaattacactttgtaaattcttaaaactttccatattaaacatta

SEQ ID NO: 328021 - DNA, 1216 bp, Cannabis indica
agttcatatttagggtgttaatcaacatacttgtgagtagatctaagatcctggtaaaataatttccaacaagttcaccattgagaaaagcattatctacatcaagttgctttattggccaatttttagataaagcaactgtgagcatgattctaatggttgtcggtttaacaacaggactaaagtcaaaaccatattcttgagagaaccccttagccataagtctaggttttagtttatcaaccgaaccatcagtattttctttcactctaagcacccatttgcagcctatagttgtcctaccattaggaaatggaacaagagaccaaggtttatttttgaccaaagctgtcagctctatattaatggctttgttccatttttcatcttataaagctttggtgatagatttggggatggcatgagcaagcataatctttggcttgtgaataccagccttggcccttgttgtcataggatgagtatttagagtagttgcagcagggggaggtggtggaatagcaggtgttggtgtgttggaaaatgaagatggatgtgtggtagagttggagggggaaagaggtggtaaagtggagtcagaggtagaggatatagaagggtttggtaactgtggtaatggatgtggtggaatgataggaacagtaggaatgtgagcagaagtagagaagttggtgttttgttgagatgaagaagtttgagtgatggtagagaagggaaaagagaattcattaaacaacacatctctagaaatataaaatcgaccagtaggggagaggcacttgtagcctttgtgtttgaggctttaaccaagaaaagtacatataagagacctgaactgaagtttatttttatggtatggtcgaatgttagggacacatgcacagtcgaatactcttaaagaagagtaatctctattgtacaacacctgaagaggtgctttgttttgcagaacaacagatggtattctgttaatggtgaaggcagctgttctcacagcttcatcccaaaaagataatggcatagatgcatgagcaaggaatgtgagggttgactctataaagtgtctatgcttgcgttctacaaccccattttgttcatgggtggtgggacaagataaacgatgagatatgccatgcttgaccaggtaagactgttgtcctcaaaagtgagtgttttaatatttatactcgcaagt

SEQ ID NO: 328022 - DNA, 534 bp, Cannabis indica
atttaaatgaaataaaatagcataaatcaaacccatcagcctcactatgtctttagaccatggggtttggatttaagcctattatattatttttatcaacccattattctctaaaatctaaacctaggagaaacactatatatagaacataaagcctttgattcacaacttttgactcactcatcttttgtcaaaaaaaatcagattattctttattttatagtgtattttcgaattctctaaggtttttttctctcaaattcatgtaatcttggtgttgagaattgcccacataatttaaggtaatactcagtatagtgagaaagattgtgatgaacacaatcgaaggagaaaaagaatctagattcagttcttaatcatactttgcaacaaaaaggatcaagggtcaaaagaactgaatggaatgagtcgttattattccactgcaaccaatgtaaaattttcttaactttatatgtatttatttattgttataaccaatgtaaggttttcttaactttatatatatatatt

SEQ ID NO: 328023 - DNA, 560 bp, Cannabis indica
atttgattcaatttacattcaagttcttgaaaaaaaaatattcaagccttcactgaatcgaaattctggctccgtcaatggggtgttcattggataattgttaaatttatatgtaaagttataaatatttaagttggtaataatatttaatttatatttctagaacttctgtaagtatttatctgttaaataataaataaattagcacatgacaatttttgattgagtcatgtcactaaatttttattttttttaaaaaaaaattagtttaaatataccaataagaaaataacacataaataataatttagcatttaacagtcatgtacctttggagttttagaaatataacttagattatttacaataaatagttaaacttaggtattataccgcaaattagtgttttataaatataaaaattgagggagaatttttaaggtacgactaatcaatatataaatatatttatgaaagagaagtatgaggcggtgacatgtccttctaaaatcactctaaaactatttttctcttttctccttaattctctcaattttaat

SEQ ID NO: 328024 - DNA, 574 bp, Cannabis indica
aaaaaattactaattagccaattctaaatatataaaaaataaaaatattcctacaataattaataacaagagtgaaaatctcattgttattattattataataagatggtattatattttttttaataaaaaaaaagtccaacttattaacacgtggaagttggatgtatagagcattttgtgtaatggtggattattcgtcgtttaattgttggtgttaagtaaactattggttattgttgctccaaggatgaatcatggtgaggattggattgttaggttacagattttaataaagattatcccccatgggccccatcccatctacttttaccatcatggacggttgtgattttatttcattttaatttgattccattaccaagaaaagaaaggaaaaaaataaagcatacttttatacaagtagtaattatatgtatacacaaaatattggggaagttttatttacaattaaaacttaataaatgaaatcttattttaaaaatttatattttatataggaatatatttaatcacacaattgtaattattttttactgtattgactatcact

SEQ ID NO: 328025 - DNA, 600 bp, Cannabis indica
aagatgaaactataaatatatgttgtccattgtgtctttttcagttgttatatatatcatctcatcaactttactttgacaagtctattattgttgttgttttcttcttcttctctttaatgttttagtgtttttttttttccgatttcattctaaatttattttaagtattactttcacattaagcaacaacactagtatacaataatactagatatggagaaaatattttgtcccattttatattaggcattaggaaaaataaataaatttgagcacttattcaaaaaataaataatattttaaaaatcactaaaaaaataaataatttattggagctcttaaattgggtgagtcttaaactcaaacataatctattttaatttacgttcgaccctgatatataatatatttatttttaaaattgttaaattaataattaaattgatccaacaactttaattattagaaattaaaattcataataaaacttgtaaagtctaacaaaaatacattaggtttggtttttggaagacaaaatctattacctattagagtaatttgcggtaaaaatacctaagttttatcccgagtagcaga

SEQ ID NO: 328026 - DNA, 638 bp, Cannabis indica
ggtgtcatctctttctattgtcatataacaaaaagttggtgatccattcattcagactttatttgttatcactatatatatatccacctcatgaactcataattcatttctaaatatatattataacatatataataatgaggtaatatattatagttatataaatttaagtttgagtttaatttctttgtattgtgaattaatatttttataagatgaacctatgttccattattttaggacccagattatctgcctttattatgttccaaaagtatgaacttaatgcatcttgatcatcgatgcaatttttattgagtgagaaaatctaaactcaaacaaataaaattttaaaatatcattaagaaaaaatacccagtaatcactacaagaaaatgtgtagttcgaaattttttcacttaataggtttgtttggttgaaagtgattataaaataaaaataaaaaataatcacttttaatttttatttctttattttggttgcattttaaattattagagtatcatttaaaaataagatataaaataacatttcaaagcaaaataatatattttttatgtacataatttttttaatataattctattcttattttgttttctttttcaattcatccc

SEQ ID NO: 328027 - DNA, 649 bp, Cannabis indica
tcaactaaatatttagtgttgaaaatggttgtacgtagttgtcgaaattgaatcatattcattaagaattttctaatgtaattattaaacattaatgaaacaagtatatatgtctcttattcttattgtggcatgtttttattgtgtatgaagtatgatattatacatattaatttatttataaataaaagctataaataggtcataaaaataagcatatatacaacactgcctaacctcgtctttcactttcccattcccttatttatagatcaatgtctctaccttaaacgacccacaaacaccttacccattgggtctgccaaacttgctaatgcttagctgtgatatatcgaaagccaagaaaaagtgttaaaaattaatggttttatactttcatatatctatataggattgttattgggtattagtggtgtctagcaccctcaaaacgtgtccctttgcgattgactaacgatactctgtaaaagctattatattaaactatataggatccaatatttaattagaccaatagcgatattaacacttaaaaggatgtttgatatcactggtgccttttagcatttatcatagatatatatatatactaacaaaaattacgtgcaagacacgtatactaaatttt

SEQ ID NO: 328028 - DNA, 1110 bp, Cannabis indica
gtgaaccaatcagagattgacacgtgtcaatttacttaacccttaacaaccaaatacctataaaattttaaaaatatagcttaagtatttatgctgcaaattatttattttttaatcaatttacacgctcgacatcatatactagaatatatttccttaatttttttatagcgatatttattatatttataatatcatctctctaaattttaaaaaattctaaataatttacagtaccgaaaagagaattattgatattccactttactaccagtgttacaaaaatttttaaacctattcaaaaaattttaaaaatttacaatataaagaacaataggaaaaaaaaattagaaaaaaaataaatcaacatatatttttaagtatggaaattaagaattttaataagagattaacgtaacactaactttatattttcaaaataacgtcgctcggtttctctctgagtacacttcttcagttttccattgccttgttttttttttttttcaattaaaacgatatatttgtaagcaaagaaaagaaaacaatactttcatgtaaacctgtttacgacaaagttttattgaaacgacaccatatttctaatcgaaccaaatccaacttttttgtttcaaaccattacgctgataataaatcattggtcaatttatgagatttctttctgcaacaattcctggaataacgacaataaaatttaaaacacgacttttcagcgagaaaaaaaaattaaaacacgacaatattaaattttgaaaacgatagtaaaatgagaaacgacaacaaactaaaaacgacatcaaatacaattattaagaaacgcagataattttaaaaggacaaataaaagaaaggggtaagttaaaaaatactcttttattaattaattaatcaaatttgtctctaattttatatttatttaaaacatacctctcttttagtatgtattgtacctaaaatacacataacagagtatcttgaagtgacagaggtaaaattggtacaatgtttaaaaaaagaagtaaaaatgataaactttaaaaaagagggtaaaaataaaagaagacaatataaaaagagtatagagtgtaa

SEQ ID NO: 328029 - DNA, 691 bp, Cannabis indica
taataaagtattttccctacaaaaaaaaaaaaatttaattatagaaaatttaaataatacacttaaaaataatcttttttttcttatttacaattgtatggttttgtgtttatttcaatgttatttttatttgtagcaaagttatattatattttcataacataaaaacaataatttttttttaaaacatgtaaataataagaaaaaaaattcgtaataaagtaaaaaaaactcaaattttataaaaatataaatatttagttgttattgagtatttttaaaataatcccttaatttatttgtagaattgtgataattaagaaaaatgcattaattttttttagaaatttggacataattaaccaatgagtggttgtcatatcatcatttagaattttggtttgttttaggttattaattagtcaattattataatcatattattgttgtaattaatatattagatccttataacctaagaatccggcaatttaaagaaaattataaccaaaaagttactaaatatttggcttttcttgagtgctagtcaatttttatttttgtttcagaaaatatatatattttcttctattttatataaatatcaatgtatatttgtaaaatatatacatatataacaagtactcacatttatatatatatactagcaaaaattacgtgcgaggcacgt

SEQ ID NO: 328030 - DNA, 722 bp, Cannabis indica
tttttaaagagttgaccgagttgaccgggttaacccgccaacccggtcaacccggccaaccgaaacctgccaacctgtgacccgccaactcgccaacctgcgaacccgtgccctatccgggttcgggttcggtttcatttttttgaactcgaaatccgcaaattcgaaacccggtaaacatgcccgatgttcagccctaatggtaatagcctactccccttgtattgtattgacttgagagaaggaacatagtgttctttcccttgaaagctcttacaattgatctttaagtaattttctctcttagatcactcatttctctctagagtatatttcagtagcaattttctcactccccctcataatgagactaggtcactatatatagagacttaatgcacgagggatggtttcccttttgctgataatgcacaaaataagaaattacaataattctataattacaatatatgaaataggaaactaggacaggttgccattttactcggactcaatcccacgattataaggattgtcttcgcgtctggacacaacgagattagtctctaaagttgccatctcttatatgtcgctcgacataaacacattcgtacctggttagatagccgactattacaaatgttgattagtcatttataagttgctaaggatattttcctccgcccaggtttcagaaatatgggacacgtgtcatccgattc

SEQ ID NO: 328031 - DNA, 633 bp, Cannabis indica
aaaaaaaaaaaaaaagctctttctccctctttgaacccttattttcagccaaggaaaaaatagaagaaccaaggcttcctcatctattttctttttgatttctagctggttttgggagctaatatctgaggtaagatcctagaactattccttttgaattttcggtagtttcctttggtgtgagcatgcaaattttaagattaggttctgtctgaatgagtttttttgggttgatttctagggttttatcaagttatttggagcttttttgagatatatttgttggttgtttgaggagttaagaaagtttgagtttaagaactcaaacttgtctcaacaatggtgaattgtgtatttttgagttataattcattaattattttacggcttgggttttgtttgttggagcttaattaggtgttctggagagtcttgacaagtttggggttatttttagctcaaatggagactttaatatttttctgcaacagaaaacaacagactgtttctgaggaaacggtctacccactttacttgtgggaacctaaaaaaacggtacgtgtcgtttttactagaaaaaaccctttttaaacgtcagtttttccacaatctcgttttttcgttgttttctcg

SEQ ID NO: 328032 - DNA, 1551 bp, Cannabis indica
ccaaaaatatcacgtgttgatatcaaattatgaaataagccccaaaaaagttcattttgatgcagataagtctctaatctcaaaaaattatagtaaaagtcctcaacctcaagatttcccttagtccatagatacacaatttaacagctttatttgtagttcttaaaattgtgacgtgtcaaaattttattggtcgacatcataaaaatttatttaaacaataaaaaaatatttaaaatttaattacctatttttttcacttacttttattgaagatttaaaaaactttatataaataaaaaattttacaaacttctacgatttgccacctaccattctcgttctcggtggtggaggcttactgtcgagtgtcgaccagtaacattccttcatctcattccttgtccatcccactatctcagaaaactaattaagcaaaagaaaaaagaagagatgtgatcatgattgggatcagatctttaagagagatgaatttttttatttttttctttatgtttctagaaaactgagagatatggatggagtatgcgatagagaaaaagagatatgggtggtgggttttggtggctgattctttgacctcaacttttctggttcaaagtttacataggcaattttgttttagagtggcccctcttgctaatggaaattggagagttttaatagagcagattagggctgggtaggttggtagggtcgcccctaaggtgagacaaaggaggtggccgccttaggtgccccaccgctcaggggccccatttcgaaaaaaaattaaaatatagtcggcaataaagtaaataataatactcttaatattaaatatgtgttgtaggctagtggttattttattagcttaacaactaagaggttcaaagttcaaatcctaacaacctcacttttttactgggccctaatttttatttttgcttaaggcccgaattaatatagggacgaccctgtaggttgggctgggagtgaacgagaagaagaagaaagaaaaaaaaataaaaaaaataaaaaataaatacagttaattaattagttttgcaaattaattatttatttatttattttaaattaaaattatgatttggatcaataaaatatcaacacgtgtcattttttagagctacaaacagagcaattaaatcaggtacatacggactaacgagaatcttgagctttaggctattactataatttttaaagattagaaatttatttgcatcaaagtgaactttttgaggacttatactataatttaatatcaacacgtgatatttgtggagcaactaataggtctcctaaaatgaagactaatgaacttgcaagaatttcgagcttggggactattattgctatttttcaaggttaaggacttattcggatcaaagttacctttttgaaacttttacttcaattttaatacacaaagaatttatttattacataaaaaggagtgaaaaattacattaaataattcaaaaaaaaaaccaatgtcatatacatagagaaatttacatggtatac

SEQ ID NO: 328033 - DNA, 634 bp, Cannabis indica
ttttatttatcttatttaattgctttattttctactcactgtcattagatagaagcgaggtcaacagtgccatatatcgaaaataatatccacatcatcaagccaattttttaggtaaataatgtttttaaaatttaaaatgatattaattaaacaatagatactcaattgatttcataaaatacattatggtactagaattatatattttctttaaattatttaaaaaatgatactaaaatttttaattctctttaaattattaaaataatttatattaaaattttaccaaaaaaataatatttatattaaattaaattatcagcttaaattgttatctaacataaaataatattttattatttaactatttttttaaataattatatgaaattattattttattacaaaattagttataagtatcatatatatttatataatggagtgacaaagaaatacctgaaaagacaacagtgataacatatcaaattatcaggctatggctttcagtggtgattttcggtaaataataaacgatttgatctgaaatagtggcagcacacaaatatatatatatattgttgggttttaagccctaaataaaactccatttcaatgtaatctattttat

SEQ ID NO: 328034 - DNA, 2838 bp, Cannabis indica
  modified_base (53)..(53): a, c, t, g, unknown or other
ttttttttttttattatttttttctatatcatttaaaaatatattttcaatanattttattatttataaaagtaaaatatataataatatgtatagaaaagttaagaaaataatattaaaatatatttagctcaatgaataactatctctacatttacctaagtactatttattgaagctaaaaaaatatacaaaataattataatttatctcacttgttggaagctcaattttataaccttttttttctataatttaaaaataaaactattttaacttatctactaggaatgctcttacatatatactagtgaaagaagccatacaatgcatgggttgttattgtaattaaaaaataataatttatagttattttgtaactaaaaatattatttttaatactactttttttagttttttttttttttggtttttaatacaacaacagtgttggtcaaatatatgaacctcattgcttggtctctttgtagacattgatcgaggaatacggcgtcgtttggtgtccaaatgtcttacggagtttatgacgtcttatatatttttatgtcgttttattcacatttcactttttttgtcgtttttcaattttaatgtagttattattcgttcaaaaacaataggaaacaaacaaaagaacttcggaatcagaagagaggttttacgtttatagcttgtataaaacccagcagccacaatccacatcatattttgcagaaaacttcccccgtaaaacaacccactcttccccattcacaaagaaaaagaaaattaaaaattgatccattttcttgaaaaccaaacagcagaagccaaaactactttatacaaaaagcacaagccatactttttcatcaaaccccattactgaaaacaaactctataacagagacaagccaattgaagcaacaataagactcacccaaaaattccttacagtccttatcgacccagaaaaatcaatgttatacttcttggtcatattgggataaagaatcccccatgtccgattctgcttaggagttccaagtttctcttccttatcaaacatctcgtatattaagtctctgcaaccccttcttttctcaggggagttccaaatcccgatctcaagtgccttaccaaacccttcatgtaaagctcggcatagattgggttggcgtctaattccccagcgtcgccgcttgagctcggccacccagtctccgttaccaccaacgggatgttctcgtgcccagacacagccatggcgcaaatcacggcatcgaccataacgtcgaagagattccggtacctgactccggtggtgaggtcgtctctgaaaccgaatgcgtgttcttgaaacagagcgtaaccaattgggatttcgctcctcattcggtacacgttgtatgggtatatgttgatcaagaatgacgaattcgtgtcgcgcaagaactggagcaaggggcttattacgttccctagagccggttctcggaattgggcggcggagggcgggaagaatgaggtgatgacgttgatgaaggagaaggttgtggagacgtcgatcttgcgaatacctagatctctgagagcgaggtggacgttttccatggctggaaggaggaagctcgagttctccggtgagttttctagaatgtcgtttccgacggagattgtagagatcctgacccgtggaaagaacgggaccaccatcgtgtagagccattggaaggcgttggagcggtttgcggccattgatgggaccagggagttcggaatgttgaggaggagggtggtgttcgagtataggaaggctctgatcgtggctgggtttggttggtcgagtcggaccgagttcattcctaaggagattgccaatgcagagatacgttcgggagaagggggtcgcgagtgggtcgcggtggttgctggcgagtaggtaattccgattgcggtgaatgaggtagttccggcgaccggagagagaaagtagagggagaatgtgagggagaagatgaagaagtggtgaaacgacattggaactccactgctggttcttgctagtgggagtaaggttttggagggagatatttctggtttaaaaactgacgggtatttgctatattacgctgggggcggacgataagcagattgtttcgagacggaatcgaaaaggactgcgtactttagcactgggccattggtggtggatatgtagattgcatttcaatgggcttcttctctaattgaagcccaattagtcgtgctttatagcctggttgctttaataacttgcttcatttctttttattttactttattaaatggattgaaaaatgaattttcttcttcggagatgcatcaaataaaataaaattatatctactctatctacaccacaaataaaaatatttttgtggcttttgattttcaatcaaatggtagcagttcatttgattgtcataggtatttccataaaagattaacaacttctattatttattttaattttttggaaaaaagaaaaccactcacgttgtactacagttgatttttaatttccaaacatgtgtatggtctatttccaaaaggagaaagtcaaacggtctatgatcatctataggtagagatttttcttttttcatttttttcttatcctgaactaattttagttgggaccttgcattaatactcttaaaagtgtcatgatacttcaattaggttaataattttttttcttctaaaatttgggttataaataatttttatacaggaaaaagatgtttgaaagttattaatttgatgttcattgataacttgtttttttttttttat

SEQ ID NO: 328035 - DNA, 520 bp, Cannabis indica
aattacctccaattacacacaaatccaattacattgtgactttccaaacacgctctcagtaattttacatgtatataaaaatattttgtttaaaacttaatttcgagactgaaaactacaaagtatattgtcaataaaagcaaatatgttgtttcatgtatgtataatcattctaaattgtagaaaaattacatgttttatttattttattggcttgtaaaaaacaaaacttaatttttcatttgaataaaattcaagagggggtcttctgaaaaataaataaattaagtgggttcaatcaaaaaagaaaaaagaaaacaattaggaggtgtgttcaaatgtttgtattatagattatagcgagaaatgaatatacaatttcttggtcagcaaaaggctatagtaaatatttttcagaatatggagagaatcaactcatatttgaattgaaattagaatactgatgcaagttcttctcttctgaatcaataaaattaatatctgaaagaagttgacaata

SEQ ID NO: 328036 - DNA, 952 bp, Cannabis indica
aaaaaaaaataaagtattgaacaaaaaatattcctttgaatcaatataatataagtatggttcaatacaattttttttactaaaatatttttagaacaatgggagtgggtattaacacttagatgaaaaagaaaaacccaaaaataggcatgaacacatctgtaaaaaaaaattagacacctaaaacaacaatcaaaatcagattacaatagtccaccgtaaacaacataaccccgatctccatcaaccagaaactcaaagccgctgtggaaggagagggattcgaagggtgtcaaattctagtgaagtaaaacggacgaccttacaaacccccaagcactggtcattcccctgcaaagaaatagattaagaagagaagggaaagacttcagatataccgttaaagatgaaaggaactaaaacaaattaaacgtaagaaatcgacgacgagaaggagctcaccatcgtgtcgtgtcgacgggtgttgcgcctattggcggtgcccatttgggcgtcaggacaccgggagaagctccgcctggcctggcgatctcatgatcgcagagagaatagacaaagaagaagaggcggaaaagagatgagaaactttgagttaaccttttatttttagaaaaaataaaagttaacgagagagaagggggaggatgcgtctaggctgttcgctgccaacgagggagaagaaagagagagatgtgagaggcgctgtgtaattagctagggttttcttgacatatatatatcactttaaataaaagtaaaaaaataaaaaactagatttgaattggaaagagagagacgatgatgggtcgaatttttatttatttattatttttaaaaaaataaaataaaagtaaagagcattattaataataggttttttttaagttagactatatagtgacgcgcagtgtgagaaaatagtgtataccaa

SEQ ID NO: 328037 - DNA, 676 bp, Cannabis indica
atataaaggctatcaaacaaaaggaaaatacatttcaatcactataccacaatttcgattaaatattaatttgaattacagtatttactttatagttcgattgacaattatgagtttcaacataacaaatcaattaagaatattcctactctcaactttgtttcgttatatgaacactatcgaataaaattttaaaaaaagtattttgattatacagtctcaattattcattaatttaaaaaaagaccttgtgtgaaaggactctcaaattatttggtcaatctttaaaaataaactttacaaaaatttactttttagtttggattaatgatcatgagtatcgaaaacaatcaactgattaagaatatttttactctcaatttcgctttatcatacgaatactattgaataaaagaaataacatttcgatcactataccacaatttcggttgattaaaaagttgaagagagatcttgtatcagtcatcgaacataaaatcaatgaaatcttattagatatactgatcccaaattttaaataaactaaattgaatgagaacatttttgctctcaactttgtttgatcatacaaacactatactatagaagtagcatttccacctaaaccacaacttagttattccttaatttaaatttgtagtactattttcctatg

SEQ ID NO: 328038 - DNA, 1042 bp, Cannabis indica
tattagtttatagaaatatcatttataagaagcaagtgttttaaaggtaaaatacattgagggggtggaatagtaaatttgtccatactcgatgtaaatcatctacagaggatctttgattattttgattgaaataatggataattcatagtgtatctatttggaacatatagagcattttatgaaatcaggaatgcaattctgaatctatagtggagttaggaggaattaataagttaggaaatttacttaataaatttcagatttatttattgggagcttggtctataaaaaaataaaaaaaaatatatgcataactttgaaataaaaataattttaacaaaactaatacatatatataaacaatgatctttgttgagtttttttttatgtctttttttagtctaatttagggtgtgttttagtatttttattattttattgtgcaaaattatgcttagctttttttttttaggaaaaatatttggagatcctcaatattggtaattttggtgttctgcaagcctttttgagcaaaaaataaaaaaaaataatgaagaaatgaaacttcttttagcttggagtgatttctatttctttaaatgggtcaaaaaatggcatttcctgctgttaatttcatcattaagagtcaacaatggtcactttctaagtttaagatagaaaattgaagaaaaaaaatggaaactaacctattaggccgcagcttggtaagcaaggttgcggccttgctcgtgttcgttgaaaaaaaaaggaaattggatcaaagaaatcagcaaaggttgaaattttgggaactgcttgtaaggcagcagtattgcaagcaaggtcgcagccttggtatttttagacaacttaaattttcacctataaaaaggggcttcatggataggtttttgaaccattcaaaaattgagagaaattatgagtgtagaaggagagcaaagagtagaatgcaccagtggaggattctaacagtgttctttctcttcaactttattttttatgtctttagttaaatttc

SEQ ID NO: 328039 - DNA, 886 bp, Cannabis indica
ttatttccacacattagcaggtgggactaactcttaatattattagatgtcaatatttgaggaaaatttttattttattaatgtactaattcaattacaatttttttatactaatatgattcaacacaagtattaataaaattttaaaaaaaaaacataatcacttaatccaattcatttaagtcttaaaatccaaaactattagtaatttgaataatttaatattttaattaaatttttagttctagaacataatttcaatgttaacttaaacatataacaaataccacatagaaataaaacattaacaatcatttaagtaatagttgtactatataaagttatcaactttttactttaattgtatacaatttttgttttacaagtagctaataatattaagagttagtcccacattgttaatgtgtggaaataaattgtatgtggggaaataaattgtgatatataagatgaaagggctactcctcccattgccaattggttttgggatagaacctcattcatcttatttctcaaattctaacatggtatcagagccacttgtgatccgttgtgagcccaaatttccaccggtccaaaaagtcgtttgtgatccgttgtgagccaaagtgtcaccggtccaaacagatacttccgctgtctcccctataacctacatttgggacctttcggccaatgtgtgccaatttctagtgttgaggtctttgacctgtttcaaaatccacaaatttcccgacgtgtacacccacgaatttcccgatatttggccttgtgggattctttcaaatgtcacgttcggtcctgtggtctttaaaggtcgttcgttatacccacactttccaagtccaaacgcgaggagggtgta

SEQ ID NO: 328040 - DNA, 861 bp, Cannabis indica
gtgcagctacttatttcttcaaccaataaaaaaagcttgctaccttcttccttcgaattggtgctcctgccttccttctcgttgctcctcccttttcatttccttcctccaccttgttggttgttactgctaccttttccctcttctcatcacagaagaaaaaaaaaaaacttgctggttgctgcaaccttgtccgagttaggtgcttgttcaactcatcctaaatttctgcttactcctttctttgttccataggtaaacatttgaatatcatttattttttttttttaactcataagccatatatttagttgttcttaggatcattaggtgtcgattttttatttggttattaatttgttgtgtagataagaaaatgaatagaaaatccaaattgagtcatattggtgttagaggagctagtggtagtggtagtgttgatggtgataataataatagtatttgaaatagaaaagacctggcttggaagttgttgagttttgtgccctaaataaaatctatttcaatataatcagatttgctaattaataaaaaaaatcagaaattgcattttattttacatggttcacatgatttctttcatgattatgattaatatataaattctattaagtccagagcatatataaatatatatatatacatatatttgttcgtgattatagtatcgctagcacagtgaaatataatcataattatatgttcaaaattttaatttccataatttgttagctcacttgatttagactggcataataatcggcgataaggtatacttacaccttggataagtgttatgtcatttttagggcattggcaaagtttatcaatatcggatgt

SEQ ID NO: 328041 - DNA, 1057 bp, Cannabis indica
cttatgtaatacatgtgggccccttctcttcacttacctcatgtactcatcataaagaaactaaagcaactatttcattactgcaatgacatcagacagtctagtgaaagtgcatcaaaaggctagaaaatgcatcaacttttattcagcaaaggatagagcagtctcgaccgcaccaatgtagctattaaagtccctatccatacagacgtttacacagggacttgatatcccaatttttttcctcatgatgttgcatgcttatgtggacaaaattagtgccacatggtagtacagttcaccgacaagaaggccatgttagtacctgagcaaacggagaccccaacactcaaacgggcatcaagtgacagactagctccctcttaggagctggccgaccaccaatggctggcctacggctggccaaccttgggactacaacattgccagctagcctggcctccataggagcctagcccaccaagatgtgcactgcagtcttccttatagagttctacacgtggacaacaacacatgggctacaaattaggccctaaaacccaacagattggctgaataaactatgttaatatctatggtttcaaactataatctagggttaggcctcctatataaaggcctttaccctagcctagaaacctaagttgcctctaagcttgaaagctacttctaaactctaaggtggcatttggttggaggtaatgaaattgaatggaatggaaaggaaacaattttcattccattcctttatttggtttcattttaaagtattggaatggcattccaatgtaatgctctttccaccattttggtgaaatgactattcaattttaaaaaggaaggaaataccattcgaatgtaacaagagaaaaaattcaatgatttcttttatcaattttttcacgcattttaaattttattcctttccatttctatttctattgccattctcattcctattcctatattttcattcctaccaacaaaacgccacctaagtgtcgaataaactctctctctctctctctctctctct

SEQ ID NO: 328042 - DNA, 1051 bp, Cannabis indica
taaaaatcacattggatttatttttattttaattggatatcaaaaagtagttaattttattttaaattaattaatttatattatatttgtaagtaggttacgaatgggtataatttatgtaataaaagcttacgaaattaaaaaaaaaatacatttatctaccactaagtattataaattaaaattcaaaaacaaaatatatatttagctaccacttaatatataagtaattatcatcctaaaaaaaattgggtacattaaactatacattatatattagtaattatttataataaaagtaactagatgtaaattttccaatacatgtatatatattattaatgcttgagtttgagttatttttgacaattagattaaaaataaagtgttaaatataaaagtccctagatatactaatgtagttattaaaatctatttagcatatttagtatgcttgaatttatttaataataaaaaaaatttaacatatattttggctttttaatattgggaaatttactttgggtagtgtgtttcctacttttattttaattttaatgttgaacgctatatttttactgcctatattttatattgtgtactgactttttgctaaataaatttgttgttctattttaatttttaacttatacatgtcttctcatgaattattcatttttattgttttaataagtgtaaaagttatgatatgatagattatgttacttttgtggcagttatttttttttaaatgattattaaagctgaacaaatttaatcttacatatttactatcctatgtatttattttattattttaatgagtgtaaaaattatgatttgattgattatatcattttcgtggtagtttttttttatttatttattaaaaataatgatttaaaattgaacaaaccctctcttacaggtttactttttggataaatggcggcaaaacccccaatactttcattttggtttcattaaacccccacaacccaaacttctggggtaaacccccgtaaaaccactattctgttagcaatttacc

SEQ ID NO: 328043 - DNA, 773 bp, Cannabis indica
ggcataaaacccaacacccacaccacaaacacaaccatctattccccatactacagaaaccgattccattgatccaccacaatattgcataccagcaaccttatccccaacagacacgcatatcctcccaagcaacacccatgtgtcaccatcggctattaatcatgaacccgatatcatagttgaccctactgctagcatcaccaatgatccctctgtaaacactcaatcgcaacacactagtaacatacatcatatggtcattcgtgctaaagctggcattaggaaacccaaagcctataccgtaacctccaatgtcagcatcgaaccaaaaactcttaaggctgctcttcaagatcccctatgattgaattctatgcaaactgaaatcaaagccctcattaaaaacaacacatggaaaatggtcccctatgaacctggtatgacaatcattgacaacaaatgggtgcatcgtgtcaagtacaatcaagatggttctgtcaataggtataaatcaagacttgttgcaaaaggatttcaacaaacccatggccttgactattttgagatattcagccccgtcatcaaaccgtgtaccatccgccttatattctctcttgctgtcactaataactggccaatacagcaaatcgacatcaacaatgcattcttgaatggagatcttcaagaatgcgtttatatggctcaaccagctggattcaaaagtgagactcaccctcaccatgtctgcaaactcaacaaatccatttatg

SEQ ID NO: 328044 - DNA, 719 bp, Cannabis indica
cccgtttaacattcggggacaaaaagtaattcttgtccctgtcccgttccccacttagacgggaaatcaccgcccctaatccccgcggggccattcccgtgagaaaaatgtgcatccctatattcgtatttgccttcattaatgtaatatatatgatcaagatttgtgtagtaaataaaataaaataatttttataatcctatatgtttgagtcaactgaagtttaatatatttatatttctagatcaaaggattggagctcgacctccaatatggccacatctaatcaagtaaagtaatttgtaaaataactcctaaatattttataattaaatgatgttaatgtattaactatgccattatcaaaaaaaaaaaaaaacaaaactaaaacttaagtttaaatacagtaatagtactgcatataacttgcttgagcttgttcttactatttttttcagaacaaccaatcatttataattgcctgaaaagaggggagggggaacgtcaacctacatatcctaaatcttatagcattaagcaactatttccaatgaaggtacctcgcatggctatctgaatttgtagactatgaagcccattgcccagtcctgtatgcctgtacataaacaaagggaacaaatatcattaatcattgcaagtactaagttaagattttctttataaaagaaaatgggtgtggcaagaaatttctaccattt

SEQ ID NO: 328045 - DNA, 640 bp, Cannabis indica
aaaactaaccttactaattaaatttaacagaatatttttatttttattatttttaaagtatattctgttaaaccaacaaaaaataattaaatagtctatatgcataaataaaaatgtccaatataaacttttggtgacagatatctttccctttttttttgaacaattctaaaaattatcaaacatgtaatacttgaaatatcttcatattttaatttgtataattataattaataacgtgcataaatagtgtatacactgagacattacgtagtgttatttcccattttatgttcatggtttttctgtataattttaggttttgttgacatatttatacattcattgagggttaactttataattattatgcagtgtaattattaaggtaataattacttcgtattttaaattacaaaatgtgtttggacatcaaatgataattacatgtaacattttattattatattggagacagttagtaattacacaataaattaatattgtataatatttaatataataattattatcattctctaagaaatatttgaaataaattttatgtattaataatatttaaaattgaaattctgttttttataattaccaagtgaaattatcaaataatttaaataat

SEQ ID NO: 328046 - DNA, 906 bp, Cannabis indica
atatataaatgctatatctcatccaaatatttaaagcaaactaagtatcgcacgtaatttactttatgcaactataatagtcttacaatgtaaatttatgatcatttatgatcgcacaatataattcgttgtcgtttctacaaccatacaaagttatcctgcttataaattcttttgtaacattgttttgttaataaaaattttcataaagattatttttacaaaacaagtaaacaaaacaaaattttacccttctactcccttgcccatccaaacccagcaccactacttgtaaattggagctcttcgatatcactaggccactcctctttctaacatcactaaaagagatcgggtgaaatagtatacgagattagggtttgtaattttgagttattagggttttttttcgcaaacaaatcttatttgttttgacattaatttttaattgatgctaatactcaaatggtaggactaattaattaacacgtttaatcttagtctagaaaaggagtcaaacaacaatgttgattgacgttatagaataacgtacatacgttaaaggtagttttcgacacaggaaaataatattattacgtaatctcatatgaataaataaataattatttatttttagttatggtaaataatacaaatgaatttacttattagtaaaatactctttgtactataagcttaaatttgatgtcaaaacattttgtgatacttttaaactgacataataaattgcatgtgtccgtttaaaattataagcagctataagagttaaaatttttaacatttttaaaaataattaatttttttaatacacgatccttgaaaagcttcttgtaattaaaatttaagggaagttatatttgcaccccttaaacttataaatacacc

SEQ ID NO: 328047 - DNA, 938 bp, Cannabis indica
ttgtaatcctcctattctctcttgtaatgagaattttccaacaactgcaatatggattgatttgttcttgaaattggttttgattttgaggatattgtgcaatgggttttagattgggatctagggttacaaattgggtgttaattttaggggaaatgtgtgacgtggggttgcaatatagatttagatgggcaagaaaagatggagaagcgattcagatgaaatagaaggttacataagaaaaaatcgatggtatctcagatgaaaaagaagattaaaggaaaaaaaaaccaaaagaactattgttacgtaatatgaagaaacaatgatgatgatctacaatgtgaatcaaccgatagagaagaaagaaaactctatgaaaaagaaacgtaggtctctgagaatgatggatttgagagggaatatgagaatggaaagtttttttctttgataaaaggggagaatgaaaactgactgagaaccatgtaaaaataaaaaataaataaaaataatgtaaaagtaagtatatgaaaaaaataaaaaacttaaattaaaaaaaaaaaagtaacaactaaatgtataaaaagtgatttcccaaaaatttatttattaaaagttaagtgggatcatgtgcctcacatgactccactcccctccaccccaccttttgcatgaggtgggacatttagtcccttattgcttaatggaaaattataaatttgttcgttcttaactcacggggtttagtcactaaactaaaatgatcgtccgacattgaaggcttggtcccgaactcccattttagtagaatgtccaaatatgctgtgtacttgttttccataattagtaatgaaatgttttatgtattaaaatacaataacggctttattgacatgatatataattttattagcatcctatatatttttatttttatt

SEQ ID NO: 328048 - DNA, 571 bp, Cannabis indica
tcattccacaacctctcatttggagcaagccataggacataaaccaaagatgcaacaacaacacttagcgcctattttctggttttcgagtatcttcctttctcaatcttccttataatttcatctaataccttcgacttgatactcagcagagccaattcttcattagttccagcacctcctgtagagaaagagcaggagaaaaatatatgccctgttgtttcatcagcttgtgaacagaacaaacaaccagcattgtcaatgatgttatgcttgtgcagtctatctttggttttcaatctatcttggattgctaaccaaagaataaaattgtgtttaggtatattgattctgcaccagacatgtttacaccagaattatttctcagaaacaggttgcagtaggttataacctcctgcaatattgtatttttctgatgtgaacttatcctggctcatgatgctctccaccttatcttttgcatccacgattttcttccagtacctgttgggttttatgccctaaataaaactccatttcaatgtaatctatttattcaacatcaataaag

SEQ ID NO: 328049 - DNA, 2905 bp, Cannabis indica
gtgtgtgttcctgctccttcccaatcttcaaaactagaattcaaaagattgtcactagacgaggatgggtcaacacgaaggcgtgggtgatcttcgtacagaatttgaagcaagtcctgatcaatgtgatgcttgcctccccagaaattaccatggttcatctacaaaaggtgggaaacaagagaataagagttagttggggtaatgcatgaaaatagattatatatgccaaccaggcttgatcaagaatcaaaagaaaatatttcacccagaattggaatttctagtcctagaagttcaaaacttcaattggaacttagtattttgtcagaacattgtcattgcctgatcagacaatcgacaattacaaaacctgtcatgtcatgcggtacattatactttggctaattacggactttccccccccccccgaacctttgacatgtactaaatcatgacccctgaactttttttgccgttcaaaattccccctgaactattaagattgttagatttaaggacttttgtctaatttttgtaaaaaaattctaacatggatgaaagttcagggggcatgatttagtacatatcaaagtttgaggggcatgatttggtagatatcaaagtctagggagcatggtttagtacataaacaatctttgaaacagtaaaattgaatgaaatttttaacggccaaaaaagttctgggggcatgatttggtacatgtcaaagtttgggggaaaaaaatcctaattagccttttaggtatgttggctgacctgtatggagaacgatcaacgatcccaggccctatgtcacaacaacagtaaaccaataaatttctatcccaaaacactacctaatactcacataaaatggtctaagattatctaccaaaccttgtggtagaaaaccctaaaataaaatacataatttggctctaaaacatagaccatattatagatctcgtcccaagcttaaaacgatgtatagaacgtctaaaacaaataccagagtaaaaagttatggccaaaatacaaaattcaacgtttctcgaaaattaaccaaacggaattccggttctgaacagccagaacacaattttcctcaaccttaaaaccctccaaactaactccaaatctaaccaaataattccacacttcacataacacatatatatcatccatacaatatgttctacgtaacagaaatcaaaaccatgctctcaatcaaaatctaccatgaactcatatttaacctagcacctccaaaataaaagtcaacccttaaacctaagcttttcaaaaccaaaaggattcaaacttattaccttagctttcacctatagattgcttcactcctagatgctaatagcaaattagagagctggtttttgggcagaaaaaaatcaaagaaagtgatatggtggtggtggtggtgtttctttctcaagagagaaggaaagaagaaatgggttcttaggttatgctctttttttttcttaaattatatatagctgctgttttttaaacaacatataacaacaacaacaacaacaacaacaacaacaacattaataataataataaaagattattttattatttcttaaccactaagaaatccttaaccttagggtatttggtcaaccccgagtaccccaaaatatccttgtaattctataatcaatttatctcaatagttccatcaatattttactaactaaaactgttgtgatatttttggcccccgatcgagtctccaaggttgtcaaacctgaaaatatttttattccaccaataactcatattatattcacacatgctatataaatctctgtaattaataaattatacttatttatccacttctaacaaaattaaaatttatgctaaagtagattagtagaatcataatctagcttattacctaattagtccataatatatacaaaccctaattatttaccattaggcttatcgggatagtaaaaccatcccctcctaatagaaatttcatcctcagaatttaactgagcaactcgagatactgctcccgcagttacaactctaactctcaacttgcttcgtccaccttgttgtttttctacagcacttttagctagtgtaattgtcttattctaaagtactttctctttccagtttcaaaattggacaaggtggtttccacatataataaatctgtctgaattttaaaatcgtctcagctcagaatatggatcgagtcttatatatattttctcagcatgaaaatatgaaacaaattatacaccccagataatgcaggagttaagactagttgataggctacttggcctacttactctagtatcaaaatgtctaatgaatctagggtttaactttagtttctatatatcccttttataggcaatacttgaagaaaaacaaaatcttctatttggaacttgatattcctacgatttaaatcaatgtagcttttctgtgtactcaataaagtgagcatataacttgaattcactctatagttttataagtttcttagatccttccagtccatcatattctcttcttacttatattactccaatgaacaagtatccaatatttccttcgtaccacacttattaaagtacctaaccaatggtacattatcacttttagacaaacactccattattctaagataatctaacttttatcaattatacccacaacatgtttctaatattctattgatccttccaagttgcccacctttcaagaataaagcaccatactattttctctttaatctccatggttctcaataacttttttttaactcttaacatcctagccaaagatatcaactttggaatttcacaagattaaactattctttcgtatgaactccatatcctca

SEQ ID NO: 328050 - DNA, 624 bp, Cannabis indica
aacctcagattacaggaaaatggtccagaagcagttttttgctggggaagctttggagagttgattctcatgaatttgtacaatctgtatagctggggaatattgtcattttgaaaataaagattctcattcaatatattgcaaggttctatgaaatctatagttgtgttcctttgacaacagtataggaggcctaaagacaacaagaaggctatagttggttaaatttcggttttgaactacaaatttttaaaaccaggcttttaaatcaaaatatttttttactaagatttaaattcttccaatttgttctagtggtgaattggtattgaggctttagaaattcataaatcataatttaccgttgaaaaggaatcactattcaatcttattgtagtcatagatatcatatatgtatatggggtccgcaaccatttacactaacaaattccaaaagaataaatgtcttaaaagatggcctttgctaacattatttttaaataaaagtaaaattttgtttttaaaattttaattttgaaaaataagaatgtgttttataattatttttatttttttaattttaaaaacaaaaataaaagtgttttctgtaaattttatttttat

SEQ ID NO: 328051 - DNA, 558 bp, Cannabis indica
ctaagcagtgcacattaactatcagtggtagtagaaattggtgtacagaaaacgtcaccgaaaataggggtagtatatatatatatatcatgatcaccttggcgactaaattacactcatgccacctatttgttaaaacagtacacaatattgccagaaagttgccagaaaagggcagagctacaaaaacgtcaccagaaaaagtagcgagttgggtgaaatggcttagtgtaggttattctccttgacgagttgagtctaatggtgaagacgactcatcaaacggacaccagaggtggtcgaaaaatctgttcaaagtttgaacctccaaactttgatgcgatcccgggcgaatggcggcgaaaggggcagcaccacttggggttgaggtcattgacacttggggattcgaatggtccggcgcatggtgctagacagtggtcggagaagggttttcggagtcacgctagtgatggcgtttgtggtttgtttctcttgtggtctgaaagagagagagagagagagagagagagagatagaagagagagagagagagag

SEQ ID NO: 328052 - DNA, 677 bp, Cannabis indica
aaaaaattagttctgtaaagcaattaagattaaaacttagtacacacaaaaattatttaaataaaataactcaaacaaaaacatccattcaacatgctccaaccaccaaataattacactcatactatatctacccaaaaatactcattcattatgttatataactgattctattttagttataaccggtttgagttatttcgtatatagtataagacacggtttaaaactgtcacctataccctgttataggcaacgattttaaactgtcgagaagtcctcattagcgacagttgttaaccgccgcctattttgcccgttttgcgatggtcgtatagacgacggttatagaaactgataagaatactttaaatgactgtttaaaaacgttggaagaaactatttttctggtagtgcttttttcttctacccaataataagtactagcacgtattttttttctttattcttctattcccaacaataatttttatagtttagaaagaaaaaaaaattaccataaaaaattcaagggagaaaattttacaaaatatcgtaattcatccaaataatatttttcttataatatgtactactaattacataagacatcattttttgtaaaaaaattatatttttatgtttaaagaatttttttacatttttatagttttcta

SEQ ID NO: 328053 - DNA, 751 bp, Cannabis indica
ttttcaacaattttttttttaatataaccaactttaagataatttttatttcgaatacatatagaaaatgtaacaagttttgttttaacatctttagattaaattattattaagttttaatttaacaaaaaattaattcagggtcctatttgtataattttggaaaatacagggtctattttatcatttaataaaacagaatgtctaattaataacttttacaaaacacaaggtttaaaataatatttactcatttgtgagtagttcacgtgcggagcacgtattatttcactagtttttcatagaaatgggaataatcctaatttttttttttccaattatttgttattattattaatgtctttccttatgtgtgtgcatacctacttcacagataaatgaattaatgtaactttttcttcactattattttcttctgcagtttttaatctatgctttaacacctattagttattttaaataaaaaatagtatatagttaagtgcttaaatctgcaagagcttagatagtttagtttcattatgtagacattattgtaatattactttatttctaagaaaaaacttagtgctacttatctattatttagatttaaaatttaaactattatccaaagactcatgtaattggttttgattaatcaattataattctcatattagactatgtctatttgtgaaattttcactagtaaggcgaaattgtaaagaaagagttattaggggcatat

SEQ ID NO: 328054 - DNA, 794 bp, Cannabis indica
tagaagtaaatttgattaattgattaataaaagtggtatttttcgacttactctattgtaaaagttcatttaaatctaggcccatttcagaatacaaaccaacagaggcccatcttaagagataggcttatcgatggaccaaaaccattatttcttagcccaaaacacaaaacacatgaaaagttttatcaaaatcaatcaaacttcacctatcctattggaccttttggtcacaggtttcgtctttaacataccaaaaaacctagtatgaaaccttgttagtgtgtttgcaactaaattatattatataaactattcttatatggttattattccaaatccccaaatataaaattaaaataaaacaagtgttaaaaaacaaagaaaagggaacatttcattctaatccaatgagcaagagtagtagactaatacaacatatataaatatatacatcatcaaattaaatttaactacttcaaaccacaacaatgcttcttcatctgattcactaactgctggaaaaccatatattatttttggctgattttatgaccaacaatcccctttgacatttttccctttgactttgcttttttaaatttaatttattttaatgtttttcttccctttgactagctagttaacatttgtttcaaactttgctaactattttgtttggtcacacaaattaagttggtcaataaaacttattttgttatgaaattgttgacccaagagaaaaaaaaaaagagggtataatttgttttggaaagaaaatagacaacaccaaa

SEQ ID NO: 328055 - DNA, 1208 bp, Cannabis indica
attatttttttttatatgtgtatgtgggtattaataatgtgtatttaaaaatatatcaaaagataatataaagaagtttatggatagtgtaatttaaaagtttgatgtttaataaataaaatatgattttaggtaatgtattttagaaaatagagaataaaaactatattaagaatgctttaaaaccttatgtttttttaatttacttgaaacttttaaattatatcacctaaaagattacctttttaatctttaatatattttatttattttaaacatatataatattaatgtatacttatctacacataaaaaaaatatcaaaaactcaaacaattaatcaaatatatttagaataattaataatatcttataaatatataacatggataataaatttttaagaaattttaaaacgaatgcgttttaaatatctgatgcagtgtattatttacttttcggttggttcttcaaatattttaaaacttctttattttaaagtatctaatgtgagtgctcggtggtgttcgatattattaataccctttatagcattcgtcaaaggtttatcctatctttcaaatttcttcaagggcttggaatcatattaattaacaaaccaaaataatgagttgatatataatatatatattattttacttaaaaattaattttttaaagttaaaaataataaattatatatctattataaatttaattgaaatatttttatttattattttctagaatttttatttttatttaaaaattatttaaattaaattattatgtttttatttattaataaagtatttttatgaaattacaaacttatttaaaatatattttattttatttagtcatattgcactaaatacaatactaataaatctatccaatattaatttgaggtgttgtccagtctaatctcatccaatcccacatactaaatatgtcattaattaattatcattacaaccttttaatcacaataaaaaattacttgtgactaaaatatagtaattaaatataaattgttactaatttaattttaataacaacaagtattaactaaatacacatttaataatcgtaataaattataatttttatgactagctaatatttttaatcacacggattttttagtcataatataaaaatattaatttataattagtcacaattttttttacttttaatcacaa

SEQ ID NO: 328056 - DNA, 2099 bp, Cannabis indica
cccacaactgttcgaactgtgctatccttggctgttacacacaactggaatgtatctcaatttgatgttagtaatgcttttttgaatggtccattaaatgaaacagtatacatgtgccaacctccaggatttgaggactctactcaccctactcatgtgtgtaagttggaaaaagctttatatggtcttaagcaggccccacgtgcttggaatgataaattgagacaaactcttgtctcttggggttttcaaggttctagagcagatagttctttgtttgtctatgggacaggagctaatattgtgatcttattggtatatgtcgatgacatattaattacaggtcccaacacaactctcatctccaaacttatctcagatttgaataaatccttctccttgaaagatcttggtcctatacattattttttaggagttgaggtttatagagatcactctggtatgtacctgtctcaaacgaagtatatcactgacttgctggtgaaattgcacatggagggagccaaagcaagtcctaatcctactagcacaagtgttaaattgtccttagcagagggggaaccatttgaagacaccaaactttacagaagcaccctaggtgccctgcaatatctgtctcttacccgtcctgatgtggcattcatagtcaataagcttagccaatttcttcatgctcctacatcaacccattgggaggcatgtaagaaactgctaaggtatttgaaaggtactataaaagatggtctttggctcaaaccatcatctgctatgactctccaagtgtattcggatgctgattgggcgagttgcttggatgatcaagaaacaacaagtcgtagccaggtccagtacagagagtgagtttagagcattggctaatgctgcagcagagcttaaatgggtttgatcactgctatatgagcttcaggtgtccatagatcagatcccagtcatctgggtggacaatcaaagcgccactgccttagcagccaaccctgtatttcacgcacgatccaagcacatagagatcgatcttcattttatcagagaccaaatacttgccaaacaaatttcagttcgatatgtcccttctttggatcaagctgctgatgttctgaccaaggctttatcaacagagagatttctatacttaagatccaaactaaaaatggtgtctacaccatttagtttgaggggggatgttagtatagttgagtcagcttgttgagttagttatctgttataactaactttgtaactgttttctaaagtctgttacgttttagttttctctcttcctcttgtatataaacacattaagaattatcaagaaatacaagttctggttttaacctttcatacactctgtttcttttttctctggttccttgttactctgtttctcaagtttcatattctgaaactctacaatgagcaacgacaacagtaaaatgttcttattacttttgattttccatgtacaaacaaatattgtacggcttttttttctccctttaagacttatttaaaagtccactcatataatatattaattatatatatacacatcaaagaacaagttggagaatgggacttctcatctattgtattttctctcctagatttttatgttaattagttattaatatgaatacagtgatgaagtgcatggtaagatgtatgtggatacatctcaaaattaattaataaggattggactagttcatgcatatcttatatattatattgtcacattgtgagatttttcataaattatagtaaaatttaagaaattttttagtacaccttctaaatataaaaatgtattttggtagattttttttttatttgttttgatatttacaaaagtttttttagtttattttttttttataatcgcctatgttgtacttatttagggccgcatgtaaatttttagaaaattctaaatagtttataatgttgaaaataagatttaaacaggtcaactctattatatgtaccttagaaaattgaaagaaaaaaaaatatgcaccataataggaatgatttcaaaaaaataaaaaacacaaaataat

SEQ ID NO: 328057 - DNA, 1081 bp, Cannabis indica
tccattttgtcatttaacaaaacacagggtccaatctgtaacttttgtaaaacacagggtccaaaatggtatttaaacctttttcttttaacatatatctcaaatctttctcttattaacaaaaatatttctctcgatcgatagacaaagaatttaaacaagacgtatgctcatgcactttgataaataaacgacatcaccaaacaattttgaaaagttttaatagtttttatgaaggttagtagtttcagttacataatatgacactttcaaattttcgctgcacatataatttttctttcaataatccaaaatttcattatttttaccctttgttctctctctgtcattctcgatcgattatatgatgaaaccatgtacatgtattatatatatatattacaaaattatttcacaactattatttgtgatgcttttatctcaattttttcttttagtcaataatatgatcatcataataataggtatagttttttatgtattataatttaaattgttaaatttaataataggtatacttttatagcaatgaaactatttgcgcagctaataaaaaaatgttagagtactgtgattatttgatcaattgttttttttttatgctaatgtaaaattttgtttattataaatttttgttttcaatttttctctaagtatttaattaattgtttgttttatttttaaaaattcacacaaaatattaaataatcaattatttataattctttctttttttttttgttaaaaagagaaagaggcctttgtctaagactgacccctccccccgttactatatagataacctcactcgtggcggaggaataccatgattacaagtgctatatcataaaatatttaaaataaaatcagtccaacaattcataagacacatcaggacctattaaacaacattgcacaacagtctccaatctctattcaaatctaagaacgaaaactgctcaaaactcttagttttgtaaacccaaacagctgttcagaatctgactttttacccaatgagtcttcagctgaagcttcaattccttcaaaaattctgtta

SEQ ID NO: 328058 - DNA, 1034 bp, Cannabis indica
cacaaaacccaacaataataaaattaagattttaccattattgtgtcaaattataaaaatgctcctaactcataaataggatcttaaattcaataattctccaataatttcatataattaattatataataatatagttactcaattataattaattcattttaattagggttgctaatctattttactaatcatgagatattacacatactatcgtataattactaatgggatatgccgcctgactacgtaccacaatatcaagtagactttcgatacaaggcaccatacataattatatatcttcaatcgtgagatcacattgagggcttctcccacacaaaataattgcaacaactcttaaatttttggctctaatatcacttgttgggccccattaatccaacttactatgttacaagctcaccttaactcacattagtatgatatcgtcagttatggaactagcccgcacgaagtaatttttggacaccttcctaaaatctcttatagctaatagagtagatgaaacacttatattcaagtcaattgttatttattcttctgatgtgggacttgggttgatactacaataatatataagagtaattatataaggcattatgaattgatatagtattaacattacaaattagaattttctctagggtttctctctagaagttcttagacgccttgatttttttgcctaaccagggctcgccagccatttctcagccttacagcgcgactctgatcaggtcttgttaatttccatactattttcaattttatatattggggttgttgatatcgttctacctacgtgttcttttcttctccatcttctttctttagaggtgcctcaaagatttgatttctcattggctctagatttgatcttcactggtgttaatcctcttagtgtttttattttatttgctatgttattttatgttcaataatggtgttgctactgttcgaatttattttaccaggatcttagatctactcataagtatgttgatttaaca

SEQ ID NO: 328059 - DNA, 581 bp, Cannabis indica
acatgtgagtaagtgaaataatatgattctactcaataatataagaggtgagaggatcatcattcaaatttcaaattgatcatcttcatcatcattatcacttttgtttttggggtttggaactgtgaagaagcaaatagaaacaataataataatattattataaaacacatgtttgttttccttatcttattcaatcacatatcttcttttttatgcccacaacttccaaagatctacttcactacttatatttataaataattctcatatttttccataattcaaactgagatagattatccataacaatcctgaaaaaagtgaattttgtcctttatattatttcttctttttggaaaagatttggtgtagccaaaatcttctaaacacttcttctttcctacttgcttttgctttcccttccccattttgccactacaacatccttgcattcattattattttcagaaaaatattattttaatactcattattttaatataggttaattaaaatttttgtcctctgaactttaacatgtaccaaatcatatctcttgaattattgaaattgttgaa

SEQ ID NO: 328060 - DNA, 1774 bp, Cannabis indica
ccactggtgccctttagcatttaaacataagtaacaaaccaccatattaatgctcattaagaaaggtaatgggaaagaatttcagagaatcaaccatcaaaattttccaagaagaaaagcagaaaacacataagacatgaagaccaggttgcttatatcattggagcatttaactgatgtgttcttggttaaattccacaaaatcgatgtgctgaatcttaaaccagtcttgtcctcctttctcacagtgctgctttaccaaaggacattcgacgatgtttaactccgaaagagaagtaggaaggccttcttccggcaagcaccaaagcctttcacagtcaccaatacttaaagatgtaagggatataagttgttggaaggcattgccatttagcttctcaaggttgctacaatcataaatgtattatcttcccatccactgatacccaagtgttctaagcatgagagtctatgcaaatcccattgcttatggttctcaaagagtgtcttggtgtaccacaaattcaaaccctttactttcgagtgtgatccccaatcaagaagcgattccaataccggacaatgctctaaacatatgaaagcaagagagggaagggttgttgtgacagtgtgttgagtttctatgatgcaaaaccaccatttgttcacaatcagagatatacaaagattccaaggatggaagatttgaccttgttgcatagcttcactactaaatgaccaatctttccactccaacatatcataaatctctaatgattctagagagctgaatacaagactattgtgaggatactcatcacctattgagatcacactatcacatccaacaatttttagatcttttaagaaaatttagttctccaagtggtggtaaaatataacaatttttacaattttatagcttgatagatcttaaattagaaaattcagagtttccaatccaatctgagaagagtgtacctctgtaattttcaatctcaagaagctccaagtttgtatgaggtcgaagtcaactccaaaaggcccttcttctccttcaaattagcttctgaagcttctattgcatcattcatattttccaaccccgaaatgcaatgtaaattttcaagctttgccacacttttcatattaaatcctccactaattttgtcactcaaaatcacattagataagaaatgcaagtgtttcacatcactaatttcttgaggtaggtatctctttcaaaggtacaccatcaatctccaaatatcgcaaatcgtttaagcttcccattttctttggtaactgagaaagcagttataacaatcaaacaacaataaagtctgtagattatacaaagtacaaactgaatcgtgcaactcatcaatttcagtgtaagacaagtccaaataccttaaatgttttagatagctaatcgaattaggcagctccttgatagaagagttgtttaaggaaaccactcttaaacaactttttgctgtaagaaacatatcatacgaaactatcatctttacaaaaggatatccttgtaatggtaatgctagaaaggtacgcaaacaattagcttcactaatcgagcattcgagtgtgctagcttcactaattaagtcttttctactaaactcgtaatctttgggaaatatagaacaatacacaaaacatcgtttcagatgtgcaggtaaatggcgatagctcaaccataaagctggaataatgaaccctccttcttgtacaactcttcccatgtgtcact

SEQ ID NO: 328061 - DNA, 561 bp, Cannabis indica
tgctaagggaaggcctttgcacttttcaactattttccggccaattacttgtagttctttgtagtcattgagatcaattttactaccaaaagcatgtttgacaaataattgccagcaatcttcattcaacaaagttggtagatgatgaatctgcccagttgccatagtagaggccacaattgtgcttcgggtagtcactacaattttacttccatttgctccagactcgaaagaactcttcaaagtgtcccacaaagaataagactcgttccaaacatcatcgtggacaaagagaaacttcttccccttcagtgcttccttcaatctccttctaatcagttcgtctgagctctgagtatcgcatttgttgccactgaccccttcatagatctctcttgttatctttataatattaaactcatcggacacagtaacccatacttttagctcaaaatgactttgaactctttcatcatcataaacaagttgcgcaagagtggttttgcccaccccacccatccaaacaattgggatcacagaaatcttattaccaccattaac

SEQ ID NO: 328062 - DNA, 769 bp, Cannabis indica
atattaaaaaaaaaaaactgtcaaaaattaagctcagggtccttaattttaccattttggaaaatacaaggtttattttttcatttaacaaaacagatggttttaatcgataatttttgcaaaatagagaatttaaaatagtatttatcctacaaaaaatttatctatatcatcaaacatttttcataacatttctactagagttactctaatatttttgtgcaatttaatattaggacctacataattttactaattaataatcaattataaaatgaggattactaccgtcaacttcctgttacaatctcttagtcaacctccatcctcgaaaacacatgtcgaaatatttattttttaatttactgtgcagaaaatacgtttgaagttttttgaacgtgcgtggtaaattagaatatcagaaattatgttttcggtactgtaaactattcggaattttttaaaaatttacaaggatgataatgtaactatatcgaataccgttataaaaaaaattgaaaaaaaaaaaataatttacaacaatgtaatttacaaaacgttaaaaattaacgtaaaaggttagtaataagatgtagtaattaacaatctatcttataaaaatatttaacaatgctaaaattttaatctattggtttgtgtagtaaaatagttaccagttggtccgtacggtaataaactgtaacgtcacgtagtaagacaacttgtatgcaggtttgtttggtcttgaaacatttgaacaaaataaaga

SEQ ID NO: 328063 - DNA, 1096 bp, Cannabis indica
aagtttagcatccactctctatctaaactactaaccttttttggcatttttacttgaattctattcctagcctccacttgtagtagatgggagttgtatacattggagccaataagcttgattcttctccttccatataggtatatggtaaattgcagcagtaattacagtaataagcacttattttctgcatttagccatgttacttttttctaatccgcttcaattaggccgcacctattgtagaggcagaggtcttccatttaagtcatttcagcagctcctcaaggcatgcaccttctactaattggacactggaagaagaggttctctattgtttctctagctacttccctgccgcacaccatgcacaaaggtcattaggaaaaatgttcaagtgcagcagattgtctttagttttcttggaatttcactcttgggattttggttattttgattcattgctcttttacttacttgaggggtgccgatttgtaaataatatgtgaaattttacaaatatgtcacatgcacaaatcggcactccaagtatctaaaaggcattttactcttggatacagccacagcgatacacagcaaattttgatttattgggatataatcttgatgtctctgaaaaaaatttcaggccttgaagtgtaaggtatatggacttaaaatcaccatgactaaatatgaacacattatccgcgaaacacttatgatttaactcaagttccttgcatttatcatggaatttaaagtctcttttctgtcctattttcttcaagattctagataaatattctaccctaggacaaatagtagtggaaacatgaagtcctcttgtctcaaccctcatttaacttcaaaataaccatgcaatgctctattaaacatcaagaaaaatttaggagtttgtatacatactattattagttgaacgtactggatgacattatcttacgcagatcaaatataaaaatatggctaattagtaatttttctccctgaactttaatatgtactaaattgtgccccctgaatttttttttgccgttaaaaattcccccgaaccattgagattattaaattt

SEQ ID NO: 328064 - DNA, 874 bp, Cannabis indica
tcttcatcttctaattgctaaaacttgaagctattgaaatcctcgaacaaccaaaccccttgaatgcagattctcctcgaaaacccctcacttgaacgcaaacacctgcaaaccaaaaccgctgcaaacccataccaccaagaaccttcgccggaaaaaatggtagaatttcttctttgcgttttaatatcttagatctagggtttatgaatttgtgtggcagctgaatgttgaagttgcgtatttgggtttggagagattcttcgtcgataaaaatggtgggtggcagcttgaaagatgtgaacattatgtgtgtgagagagggcgtttgatagtgcacaagatatcaaaaaaatctgaagaaacacaaagaaaaatagatagacgaagaaagagatgattaagagagagatagtaacaatttttattttttttactttaatcagtttttaatttttatctacctaaaaaaatctttttatctattaaaataaatatgagctaattttcattttattttttttattaattatttaattattttttaaaattaattaattaattaaatgtgaaccaatactatattgacacgtggtatctcacttgtcaaatcagtacttaacagaaatagtagtaacatgagtaacgaaaattcaacataaggtatttattctgtcaaaatagaacatgtggtatttaagtgtataaaattgaaaacatgtggtatttatgccgcaaatatccatttatttatttacttcctactttcactagttttcttattttaattttcttttttttttattcaactaaatagaagtaaaagtttaattttaaagtacttaactacaatctcgatgggattgacctcact

SEQ ID NO: 328065 - DNA, 1176 bp, Cannabis indica
tatttttttatttttataatataggtaagttgtaattatttaaagtatataaatttttaaattttttaataaattacagtgttaaaataaaatttaattattttattgcatgtgtgattattttttatatatatatagtaagtaacgtttaaattttatttttagtactataaattatttaaaaaaatataaataactctaaataattacaacgtacataattattaagaaaaatagattaaaaatactcttttaaatattaaaataaataaaaatatctaccgaaaacacttctttgagtgttaattttttcaaaattatttatatatattaactcttcccaacaaagaaaaatcttttgaaattcatccaatgtatatattgaaaaaagaataataataataatgtaaaaagtaagttacattacaagatggcctcaaaaacctaaaccaaagtttaagctatgatgccaaacactgcaaaataataattttttttaccctaattaaattgcctttataataatatatattactaatagtatagtatccacatgattcagtgtcctactcctagagttccacactttcatttttacaacactactcttaaaaaattaataataatatatcaattagaaaaaagtgataataattttttaatattattattttattttttaaatcaaaaggaataacttgatgggctcaacatttgaacaactatatataattatatatagctcattataattaaagtgaaaaggaatatgctaaattattgtaataatattttagtttataatatataaattcatttattttctaaaaaaatatatttatttaaaagtatatatagtaggaaaaattatttatttttgataaatatttatacttttacgtctaagttttttttttttttactattgttacagtattttataaaaacacaaaaaaattatgtgaaagtaacacaaaaacaacaatgaaacaatattaaaataacatataaaataatatataaataataaaaacttaacaataaaataacaagagtagtataaggtaaaaatacatcaaaaaatatattttttgtaaataaaatcttaaaaaatataaaaatatttaaaatattatacaatgtagttttgtaatttttttaaaattatccctatat

SEQ ID NO: 328066 - DNA, 726 bp, Cannabis indica
tcctaccataatcttgccctatatatatatatatttgtatttatataagtaaaagttaaacaccttgaagaacatggaaggaccaacttcacaccctgagcagtaagcactgagttgcaacattattgcacagcagcgcacattcagtagcatcacgaacaacaataacttgattcgagaaagaaaccacaagtaacagcaatagttgaatcacataacaaaaatatataaagaataaaagttaacatttgaaatataaaggcagaattgtgtagccactcaattgcaagtgtttcacaaagatactcaaaccccaacaaggttccttgaaaatattttgcaaaaattccttgtttaaaaatagaaacaaataataaatattgatgcaatcttattaaaataattagagatattaattaagctaaaagaaaatgttcattggtgttagaatataataaatcaaaatggtaatttaattattacaaaaatggtaaacaaaatataggggcataaatcaaaattacaagcaacttcccattactctttttctttcctcatcgtagaaaaattgctaaaactgctataatatgataaggctaattagtaatttttccccatgaatttttacatgcaaattgtgtccctgaacttttttgaccgttaaaaatttcccccgaactattgagattgttaaatttaaggacttttctctaatttcattcaatt

SEQ ID NO: 328067 - DNA, 1041 bp, Cannabis indica
tttttttaataaaaaatcttcttttataattttaaaattacaaaaaatacacttttttcaacaaaaaaaattaaaaaaacaattaaaaaataacgaaaaatcgacatcacgacaactataaataaactataaaataacaaaaaaaatatgcaaaaaaaaaaaaataaaaatatatatatataaggacaactataaataaactatagaattaaaaaaataatttattatttttactacagaaatatttttgtaaataaaaaaattaaaaggaaaaaaataattttttttttcgttgttaaagtatggtaatttttttttttaaattattatgtgaactaacattaagtattgatcatgatctttataatatatgatccaatttaaagtagtatatatatatatatgatccaatgaagtagtacgtgttcatcccctatacataagtcattatatggtagggacaaaattgtccttatcaaattaattatatatatatatatatattgcatgtgaaagatggagtatagtaattattaatgtagttgtataatttatttaattaaatggagaaaatgatgaagtggtatttcctttccgaccatctcacagtcaaactaccatgccgttcggcgaccgcagcgcggtcgtcaccacagccccatgcaccactccaatttacaaggccacacactcttctttaattattcacatctatatttattattattacttaatattcacaccttatatctatatatattttgctttttcttcaagcattaaatatttaaaaattgttattgagtatctgtagtgtctaataccttttatacgtagtgccttacgattgattaataaaattctttttaatttattttcttaagttatataagacttgatatttaattgcacaaagtatgacactgagaagaatgttagacactaataatattaattagcaattctctaagccctatatatatataaagagtaattctataatgcacgtactactctttaaaagaaatgtaccgatatatt

SEQ ID NO: 328068 - DNA, 807 bp, Cannabis indica
atatgtataatagttagttacaatagatatttgtattaaaagatgatatttataagtagaatattaactttggtgtaatggttaagctacttagcatataagttaaaggataagggttctaatccaaccaaaaatattttttttcttttgccccccttacttaccaaaaaaaaaattatgccccctcacattaaatcttaggtttgtcactgatcttacttgagggctccatgacacctctaagaaactcataaaaatactgactgaccatttggtgtcaggatccacatacctaagtgtaccccacctaggatttatgggctcgtacgagcattttcattctaaagacctcaatctaccaatgaaaccaacaaatttttgacttatttaggcataaaatgactgaaactttaactaaaacttaaattagtcaagattgcacaagaaggtcatctcacggttcatggtcgacctgtgccatcttttggcatagatggcacaggtctcttctctcaaaataccaaagaagacttgtcaaaatgtggttcctcaataccaagaagtacaacacgaaagaagccatttttcacctaagaatcaagctaaataataaaaaaaaaaaggctaattaggatttttgccccctaaactttgacatgtaccaaatcatgccccctgaactttcaaggtcattgaaaatgcaccctgaactattgagattgttagatttaatgacttttttctaattttagtaaaaaagtctaacatggatgaaagtttaggggacataatttagtgcatgtcaaa

SEQ ID NO: 328069 - DNA, 1198 bp, Cannabis indica
gctttcgcctttcccttacctacacatgaaagcaaaactgtgagtcgacaaactcagtaagaaaagcatataacatatcatataataccgacttatatctaggcgcccatacacctatttacaaggcttaacatatgagcaagaacattccataccagggtacatccactataccacatacactacgtacctcattgtacgagtgttggtagggtttgtttcgtaccccgagtaccactgagtgatataccgtagacaccctgtactatcccgtacttgtgctggtatcactgtaatgtactctttaacaatattcactataccagtgcactcggtaccataaccgtacaagtgttggtggtgcaactaacatataatcatgcatatacacttaacatatatatacacttagatattcatattacacattatacatagttcttaccttctttccagattcaagtgtgctggccgacctgaatagattgccttgtgctaaatggatgccctaatcacataatgaaaccaggtaaattacatgatcaaaaccctaatccgggaaacccgaacccaccactctaggttctgttatactcttcagggattactctaactctaaaataggaaaacacccaactaaggcactgaaatggacgagaattgagaatacgggacattcggggaaccttgccaaaaccgatttaccagttttacaggtacaagtaaaaccggaaaaccggttataccagtttccaccaaaaattccatttcttgctcaaaactccaccaaatgcaaccaaacctttcagagtacctaattagggtatacacaataaattcccaccagtaattcacaaaaaaacacactaaatcaaattatgccattaaagatcaaagcttaggtttctaaattcaaacttgcataaatacaccaaaatcaactgcaagaagttatattcaactcaaattaagcttagaattcgaattacaacataacctaaccctaacagcccctataactcaaaatcactacatgaaactaactaaaagctttaaaaaaacacatagttaaaggttctagggttttagctttgcttcaaactcacaaagatcttgttgaatttttagaaaaaggttgaaacttgatgaattaccccctggtttttggtttggctgaacaaagagagagagagagaga

SEQ ID NO: 328070 - DNA, 639 bp, Cannabis indica
tttacatttgtttgttatattttctaatttttttatatgaagttagcatttttaaatttttttagcttttgtaatgtaaaaactaaaaagtgataattttaaaaatttgagatctccttcagttagggttctaaacacaaacctaaatggcctgtgctgggttcgggcttgagtataacatcaatgaattatgaacataaataaaatcaatttttttaaatggataaaatcaacctttaatgtcattaattgtataaaaatgtgtaaattaaaagtgtgtatatcataactattttaaatatcttctttcttagtaaaactaataaagttattttgtgttttttgagatagtttttttttttaaaaaagaaattaatctatatattatttttaattttttttttttacttttgaattattgggtgatttttatatgggttattatgtatattttaaatacaattttaattactccgttagttgttaggtgaattctttttctagatagtttttgaaaagcataatttgtaatttgtattagggctgaacattttgaacgggtttgacccgaacccgagcaacccgcccgaacccgaactagtgaacccgcaaaaaaaaaaaatttaaaaaagtttcggg

SEQ ID NO: 328071 - DNA, 657 bp, Cannabis indica
atcgataaaaaccatggcaataccctaaacaacacaaaaatgggaagaactagggttcccaattttccccaaccggtaaaccggttctacaaccggaattccggttctgagagtaacccaggacaacaacccgaattccggttcagtgcaggaaaccataaaaaaattcatatctcatgcaattcaaccccaaaacttacaaaactctccagacctactatatacatcccaaagaacattttcaaagcattaaaacaaagcttcatgcactaaaaccaaaattgccattgatgagtcaagcttgagttcaaaaactcaaagcttgctcatccaactaattaactatcaaaacctactttaacctactcaaataagcataatatagctgcagaaaacatccccaaacaaaagcaacattcacagaaactaattccacatttcatcattgaaattcaagattttgagttaaaaagattcaaacttggttaatccaactagcatgcaacaaacccactccaatttactcaatgaaacacatttaaactacagaacacaacacgtaattgcagcagcaacaacaaccaaaaactaagcatggaaattatcatatttcaccttaaaattcaagatatgatttataaatttcaaataaggaaa

SEQ ID NO: 328072 - DNA, 730 bp, Cannabis indica
cgacttaccggtggcatcagtttttgcttttgaagccgtttttgggatagatagatagatagatagtagatggggttttaggtatggttttatagggtacgggggacctacacactacacacacctttgctcagtttggggatgcatgttcattgttcaacaactttactaagtattattcttggactttgaatttgatgggcctgaacgtgtcatattcattgttccccatatcattataaggttttagacttttgagaagaaatatctcctacacttgtagtaaaatatgtggctttccaatttttttaatgaaagttttatttaaggttgatcaagagtataagttcaggggatcagttaactaaatcgattcaagaagagcattaagttcaaggttcacacaggagcataaaaaaggacaaacacccaaaaaagacccactaaagacaaaaggtgctcaacttcgaaataactcaaataaattgaaaaacacaaaatattcaaacaacaataaacatagaacagtttcaacaaccattcttctaacacactagagggaaaactcactgacaccgtagcactgccatcttctaataagaaatatcaacatcgtgcctgagcaaggacgcccgaaaagtaacctaaggaaaagtatttcgagtagggctgaacatcggtcggtttagtcattttttttattataaaaatgtgacagtcagtaatctcg

SEQ ID NO: 328073 - DNA, 686 bp, Cannabis indica
gggttttggaataaaaaagaaaaaaagaaaaaatataagcaatattttgttttgtttctttatccacttgtataaaaagaaaagaaaaaaagaaagtagaaatgataataaataatcttctttagttacaaatcacgtgttagtaaaacttggttggcaaaattggcttttattaaaaaaaaatcttctttagttggcgaatcggtctccttattggagtccatatatatatattgcctacacacctagtctacattattaattaattgttgccctaatagttttagtcataagaaaactttaaactttaaaccatccattccatatgattaattattaaatcactaaattacttcaaattgtttggcaaatagctggaacacaattttaatttattattaaattataacaaaatcaatttattaattaattatcatcatttaatataggtttacaaaaaataaattagatgggtggttgtaacttgtaacccaataaattcagtcttaccatttaccaagaaaaaataaaaataaaaagtaccaaattggtgtacttttgttctatgatgccagctagtacatagaagacattccattgactttgtgtagaagaactagtagtagtaaattgtttagactactatgactagtgtatagcacgtatgaaaataaaccaactagaat

SEQ ID NO: 328074 - DNA, 1346 bp, Cannabis indica
aatctttttaaagtttcaacaacaaaacacttaaatcaaaataacaaacttgaaactaattaagttccaacaacaatataaatgtacaactaacatacttacatcaatagattaaaaataaaacaaacacaaacttccaactccaaattttaatacacatgtatggacttgggtttgttgctaagaagagagggtttgtgaagagttatggattttgccctaagatttataggcttgggttgggctcatatgtatgggcttaataaaataaatataaaaattgaaattttaaaagatgcggtgcggtgcggtttgaatcgcggtttaataattcaaaaccgcaaaccgcaccgcaccgcgcggtttgggaaaaattcaaaccgcaaccgcaccgcgaagaatttcaaaccgcatttttttttgcagtgcgggcggtttgagcggtttgatgtacacccctagttatcatgttccatggtcagaagtatttattcacaatgatattaatataaataaataaatctgaaaaagctcaggccatgatttgacaatatgggctaataagctagacttcgaatttcaatattccgaggtatattaatgtacgtaatgtgcatgacacattatgccgctgccaatggtttaattatttattttttattaataatataaaaaaagttatgtagttcatatctttttcacttttttaatagttttgataattttgataatcacctgttagctataaatattttataccttattttattttatttagatcatcggtatcagtatgtacctcatgagagactctaattgtactacttacataaagttagccttccaaaaagttaaacataatccttcttaatgagagactttaatgggattcaaacttttaacctaaccaaaaaattttcctaccactacaccacaccacacatgattatgttgctgccaatagttatgccaaaggaatacgaatatttcttctcaatacagtacatacaaaaaagaaaaatatatatatatatatataaatttgtagtttttatttatcaagtctaataaaaaatgattgatgtgatcatgtgacagaaaaattattattttcgtttaactatatcttaagaaatttacatgtacaaatgggaatcgatcgtagagtatagtactagttgatctatatgtacaatattctcacatcatgaaaaataacaaactattattctcggccatgtcacaacaaataatatatatatatatataaatatataatttctagaagaatattaatttaaatccaatcaacattattcctttgtatattttaagaaagtataatt

SEQ ID NO: 328075 - DNA, 630 bp, Cannabis indica
tatagaaagatctataataaccaacttaaaaggtttccaaatgaaatttaattaaatatcaaaattaagtggtaactacttaatttaagaatattccattttaagtttaaaatcaacttaaaaaatgacagtagacaagggtacggggtgccagactacctccagcaactacaacatgcagcaggaaattgataattatttccaattagttatgaaatacttaattcaaacataacaaaaggggaagaaaagaaaattttttgaaaaaataaaaataaaatttgattttttttcgtacatgaaaaatttaagagcactcgatgaactaatgaagatgaacttactcaagctctcaaggaagctataggcggggacagtggagaaaagaatttgggataaattgaatatgagctctccttttcatagtgatccaagtatctaaatcctaaagcaattatgagtctttttaatttaatgtttgaaaagggaagattaatgataagtaaaggatagtcaacttttctcttctccttttttaaaattgattttcaaattttatattaaaaaattaatcggtattcaaattctgaaagatacaacaacttctaatttgtaaagtccttttttggc

SEQ ID NO: 328076 - DNA, 1117 bp, Cannabis indica
gtactcgcagtatctcgctggttttatcctgggcgaggtctaaacttcgagaagtctctcacggacatttcagctttcattggaaatctgaatacacgtgtcctttaaataggagcctggtctcgagtttctaggtgagagaaatctcactataacaggtaattttgtaattttattttaagattaggtgtcctttcttattgtggacaactatcccatttatgaacataatagccatattatgtttttatttttcagcctagaaattagagtagaacaaaaataagaaaaaaacctagaatgttttgccttctccctccttcgatccaacccaagagtgaagaaaaccagagtgaggcattagtttttcttggagattttagatagggtttgaggtgtttcaagtagaggtaagttctagcaactctattcttggattactaaggtttaattggatttagggttatatgataaagttatgtttctgtttaattaatctttgattagggttgtgttcaacaatttttaattgatgctgttttcttttggaaattgtccaaggagggtgtttcaggtattctggaaggtttggtggaaattgcggtcaaattggtaaagtttcgaagtttggggtttttcctccagtagaaaccggttaaccggctctgtaaccggttctacagaaccggttaacccattttctaggcaggccaagaaaccagtttaccagttttggacttttggtctgccggtttttgtagggccagaaccctagttttcatatttttctcggggtttagtgtagtattaggttgttggtctttaggactacccttgattttaagtttggggtttcgggaatggcctactcaaagttatttacccatttatgtaatgtgacataggacccccattcaactcgagaattttccattaaagttgaccggcatacttgaatctggaaacgaggtaagaaaagtatagaacgttttgtatatgcaaatgtctgtatgtgtgatatatatacatgatgtgttgtgattgtatatgatttgggtgatatcatagcggcacaaccattgtgttggtttgggagtacagtcatcgtactggttaa

SEQ ID NO: 328077 - DNA, 1039 bp, Cannabis indica
tagtttttattttttttaatttatgcatgttcaatctcaaatatacatcaatttagaattttgttcatcattctctgattttgttaaattttatatgttttgttgttctgtatgtgctatttgatgtttagtattatatacttgatttttgttctaaattatttgtttaatgtatttagggtaaggagaagttttctaaggtaaatgttgcctctcgtgatgttctgaaagtctccattgacaaaagagttattgatgtataatatttttttgtgattttatttagttattttattttgtagttttactattattttacagttgttttagttgattttttatgttattgtttgaggatcggaatcttgaatacttacattctgattggaataatcgttattttttggttgttctagtattgctctagtagtttggaccgtaggtgttgaaaattgaggctttgtatgtattttggggtatgtactatataaaaaaaaaaattaaggcgaggacaatatttttgtaaaaatttccgtgtggcagtataaatgttaaactaccccaaaaatctagtaattttgtaagatcccctattttttttttttttgataaaatagaagctcataaattgacaacgcaatgtagacatttgaatttttgaaaaattttcataatagatcaaaaatttacaaaaaaatcatcgacaaggaaaaaaatttacttttactatttgaacttttttatttacaaaatacctctttagtgaaaataatgaattattttttagttgttttatagtttatttatagttgtattatagttgtgatgatattttttttagttgttttatagttgatttatagttgtcgtggggttgattttacgttattttttagttattttttttttttactttttgctgaactaaatgtattttcataattttaaaactttacaagtgttataaatattaataattatatggatatccaaatcttttatttattattatttattgtaattaatatttttttttctt

SEQ ID NO: 328078 - DNA, 945 bp, Cannabis indica
agaatacgtaaatatatatacaatatatgtacaatctataatgagaacagtaatatacaattttgatacgtacacttctacagtgatcttgatattatatactaataaaatgaaattcatatagtttttgaaacgtacgttatatataatgtcggtttaagggtgaaatcatatattttataacgttcttaagagtggaattgtaaaagaaaagtgtgagtgtgaatatgtagtgtggtgagaatgagaagggtgtattgggaattagatagagagacatgagataggaaaagtgtgtgtaattatgtaaattataagtaaaatacatttttataccaaacctgtggtggatttagctcacttattcccttccacatgcgtcacaacgtaatcttatgtggtacaaagttagttaatttagctagtgtggaattaagccttggacagctccaaccaacaactatataaagagcagcccttccacttaatttgaatttggttttttggattcgttttgtatagaattgagttgtaattctagaaagaaacttgtgtgatttgagggatgttaaagctactctcatgtgtttgattgagagagctcatgtgaggtttattgtaattttctatttctctattttgcaattaatatgtacagtttggattcaattcctcttccatgtatatgttgatcgagattgaataaagggtttttagttttctcactcatttgtgttcattaatgtttctaatttgttgcttattgactaagtgttattttctggttttggtaaataattttgtcttttatttttggtttgagcaatcttgttacactgttaactacataacaatggggctttaagggtgaattcttcaccacaaatggtatcaaagccaaggctctaaaaagaggcttcaagatctgcattcaaatcttcaaga

SEQ ID NO: 328079 - DNA, 971 bp, Cannabis indica
cacacacacacacacacaccatagaacccagctagggttggtgtttttgctgcctaattcaaaggattcacagtaagatcttagtgattttaagctcaaggtgagttcctagtacttctctttttgatttcttgggttttaagttaagaaattatacatgatttgagttttggagtgatgtagttgctgttggtatttgaaattgttttctaaagtttaattaagataattcaggttgttttgaggtatatttaagggttgtagtgttgtttgagcaagttttgagttttagaactcaagcttggctgtttaatggtgaatctttgattttgagcatgttttctgtagcttgtattatgtttgttggggtataatatgcaggtctggaaggttttgtaaggtttcgattcgaattggttgaggttttaaaatttttaggttaccaggcataaaatcgtctaaccggatcagaaaccggtatcctgaacttttcgtgttgtcgattcgtgttagtttcaaagctttagttggttaattccctgttagtttagggtacgtatttccatgtcaactttcagtaggaaaacttttggtttaaaacctaagtccccggatgtgatttaccgtgtcacttacccatgttatgaactatgtgatttaggggcctataattcgccgggcagttattccactcaggttggtcggcacacatatattcagaaacaagataagattagtataatgttatgcatatgtattttcatgtttagcatacatgttgtttgtaatatcccgataagtctaatggtaaataattagagtttatatttatattttgagttaacaggtaataagtgggattataatcctactaatttatttcagcataaaatttaaattttgctataagtgagtaaataatcgcaatttatttattacggaaattttatatagcatgtgtgaatgtaata

SEQ ID NO: 328080 - DNA, 928 bp, Cannabis indica
ttgatgtattatatctttaatattatgtaaataatctaattaattgtgtatttcttttacattgggttgcatattaataataattttaaaacatatatattaaaccaaaaacggtcttataatcatattttaatataaaaaataaatatatttatatgatacccatcaagaaaatgaatataataatataaggcaaaaaaaataattatacatgtgattttgattggtttaccaaaaaaaaaggttggtaggaatttggtggcataactagttagaattgttaataaaattagagcaaaccaagccaatgcctactttcattatggtttaccaaactctgtccatttattaatgtgtttttattttttattttttggctaaataatgtgtttattatttagtgtacgtactagagaacaagcaccatgcattaatatgttcacaataaccctcaatatattgaccatatgtataaatatatatctgtcactactatacaaattcatcaatattatttatttattgtagaattgtcaagtttcttacaagcaattttttattgtatattaaaaataaaataaaaaaaatcattcctttaccaaataatggggcgtgacataattagtttttatatatttatacaaaaaatatacttcataacataaattctattatatattatgagcgaaagtgggtcaaaaaaagtcctatatatgacctcgtttagatctatcatcgttccaattttgtgatgaaatgatttttataatgattaaagttttctaaatacatcttaatgcataaactttacactgaactattaatacgtcttttaaagtgataattacatttagggaaaaaatttagttttcagttaaattacaaaaatagggatatgattttgtcccgtgatgtactttcacggaat

SEQ ID NO: 328081 - DNA, 945 bp, Cannabis indica
atatggggtaattccccttttttattggtcaaaattataattttaattacaaaaattcaaaataaaataagaaattgaaaaaattattttgttttattttatcttttctttttcttgttcgtcttcttcacccaaccatgacacctccactgaagcaccaccatgagatctcgggacttggagaggtcatcagtggcctccattatgacctacggtgaccggagctggcaccgtcgtgcacaaccaagaaggagagaggaagaaagacagacaaccaatgggctcgagggtagaaagtcgaggtttaagctttgagttttctagggctcattttgagcttggaggactgagaatggttggcgtcggggctagttgtggtttttcgacgagagagatagagagagagagagagagagatagagattgggggtaggagggagaactgatttttgggtttttagactcaaggattatgaatttttagtctgcttggaccaccgttatcggagatgttaaaccgacgtcgtacgtgaaaagacagagagagtgtcagcaagtaaaaattaggggtttccattttagatttttattttatttttaaaaaattattttaaaataggtgggtttttggtggtcgattgggaacatcagggctagggtgggtgtggctggggtcggctgggaatgttggacgatcgagatgtggttggggtggggatcaaagtgtgaccgaatatttagaagaagaaaaaaagaaaaaaaagaaataatatttagtatttaacatattaattagatgagtaatttgcggcaaaaccccctcaactatcaatttacttacaaaaaaccatccaacctcatattttggtgggaaaaccctccaaagtactgtttcgtttacatttttaaggtgtcgtctattcagcctcgttaagtcttaatttt

SEQ ID NO: 328082 - DNA, 499 bp, Cannabis indica
aaaaaatatactcatatatttaaaaaataaaatatttataatatcataaatattaatatagatttttttttataaatgacaattagatataatataactttaaaatattgatacaacagtataaatattaattattacaactaattattaattaatatgaattgtcattaatgacattaattaataataaaaatagagtaaaactaaatatatgtctacacaaccaaaatttatttcttcaaagatgttttccaatctattaattttgttttgcaacataatttatgtacaggcaaatcaacaaatctcactaaatcatgagagctctctccaagtcatttcaagcttaaaatgtccatgcatcaatataacctgaaacaatgcattcaaaaataataaatattataatcgtacactaagaatagaatatatgcataattagtaaagttaaaaaatttcatcattctcaataatcaatgtcataataaataatttttat

SEQ ID NO: 328083 - DNA, 620 bp, Cannabis indica
attggagaaagtagctttgaggacgctgaagttaacacttaggacataccaacggataagcaggaagaagtccctcaagaaaaggttgttagtgacgacatttgagagaaaagcctacatgatgagtgagatcatgtggtcatctttgatagacaacttcaacaggccaaaagtaggctcactcaacaagatcaatttaacgagttattactcaataagatgaccagaatggaggttggaatggctgccctaactaagatagctctcgacatacaagctcctccaacaactgatgcctctaagaaagcagatccaaaagatcctggaacgttaggggttcccaaagacaaaggcaaaggaatcattgttgaagaactaaacaagaatccttccaacaagcagcctaaaaagtctaaaagctactggacaacctcaacagaagaggaaaggaaaccacgcctcagggcacggtgacaagaaaaattgttgaggcagagttacgtagaaaaataagactcatgccagaatctagaagccagagtctcaaaggggaatgcctcctcccagtgattttagtaaccacaatgaggatgttgacgaagtacattcagtgacagatg

SEQ ID NO: 328084 - DNA, 749 bp, Cannabis indica
agaaaaaaaaagttaataaattaaggcaatagtatacacactctcccttgctctatttatatatttgtctactattaaagttatgttgtctctgttaactttctaggatttggtggcaactaatgaattacaagtgtttcattgaaaatcatgacttattcacacacgattttattcggttcctcaaatcttctttttaatatttcattaacacttattttttttttttttttttttgaaaaggttcattaactgataggtctgtatatgcaaccatagaggtgttcttttttttttctttggtcggtgtatttatattttttggtatttatataaaagagattattttataaatacacaaaaataataaaaaaaaattacaaatataccgttgtacggaattttaaatatttttacgatttttttttaatttatttacagaaaatacgatcattttatattgtactcttgttaatttgttgttgattttttgttatctgaatattattttttgttgttgtttgaatattattttcttgttacttttatgtaattttcttatggcatgtttactaataagtaatgagaattaatagtacggtaatcattcccttacatatgtttacttgcattattaaaattaagaaagggagaaattgattaaataagggagaaaataaagggagaactttccccaccaattttgtaaggaatgccattaagggtaatggatttttattatttttatt

SEQ ID NO: 328085 - DNA, 1300 bp, Cannabis indica
gtgaaaatttattaatggactacctggtggtattattttggttattaaacatgtaattataattataatttttttattttgattttgaaactcattttaattgaaataatttatttgtgctttaaaattagaaattaatttaaaaagtacagaaaaatgacaattttccatggtccgtttaaaggccatttgataaatatgggtcaaccatttcacatgggctggcccatttaggcccagtacgagtctgaccaaatataactaatatgtgtttatgggtcaggctgttacttcaaaaatataggccaggcttggcccgacccattttataatatgggtcgggctgggcctacataaaaaaatggacttttataaaaacgggctgggccgggctacccgaatgtacaactttagccatgtgttatcctaatttgtgtactatgatgtggcatctgactagatgatacgtgtatcatatttcataaccggggtggatggttttactcctaacaggccgtacaggttgatatgaagctcaaagccatatatattagtcggatatccgaacaagctcacatgtagacatccaaccagctctatcaaatggatagctcgcatgcattgaccaaggggtgcaagttaccaatttcagagatgaacattgttatttctaagcttgcatgtcacgaagacaatccctacatttgtgggattaattcaaaaaataaagaaaatcagcctagatttcccaatctctttattgtaattatggaaacatgctaatttcttattttatttgttatagattaagaaaaatcattctttatgtaattagtccttataaatagtggactcatatcactatttaggaagatgaaagaattcaaagagaaaagacttaagagtgaaatcatgatttaacagtaatttactcaaagattaagctttcgagagagaatattttattcttcatctcacaagttaatacaacaaaaaagaaactaggctatcaccaaacataaggggtcaaacttttactttatgctctttgctttttattatttaattattctcatcgctttaattaagactcactatcgattgctaaaagggaggtcaacaccatgtatatgtaaaattaattttcaaacccatatttaatctttaaataaattgcttaccaaagatccttcatcaagaaactggtttttccatcaagaatctagttttttttaattaagaaactagtttctgttgggttttgtgccctaaataaaactcttttcaatataatcagatt

SEQ ID NO: 328086 - DNA, 1384 bp, Cannabis indica
caaaattttaatttttgtagttatgtgttaaaaaatataaagttaaagtaattttgtcgtcaatttccttaataaaaataaaacatataaatatgaaatacttttaaaaacaaaattacaaatataaaattcaaatattatttattttaagtattttttccttgaatattcttattttttataatatataataaataattgaatatatttttagtagaaaataatttattaaataattttttaatctgacttttaattaatctcaaatgatttatttattttttttgttataattaatagggtaaaaatattcctattattaatggagaatataaattgagattcatgtttgaataatgatgcaaattaaagattgaaagatagtgaaataaagaaaaagccaccaagaacggcttttgctaatttattggcaagaattgcgatgcacttattccaataatgaaagcatttttataggtaaaaaatccataacaaagacaaaatttgaagaaaaaaaaagttcataagtaatttgtttttgtttgttatattattattgttattatatgacaaaaatttggagtgtgattgattcccaactatattacctattccttaaccataactcaattactataagaaaaagattctattatgttaatccagctagagaggatatggattcttcccaactagatgtaacaatctagtgtacattttccaaatatataaagatagtacatttatagctattaattcaaaataatgtaatatatttataaatattaataaatttatagatgttatttttttatttattattaattataattaatattttttttaatttcttaattttaaaaaaattcgcatatcttatctattttcttttctaaattataatattttatagtatcttatcagcatgagtctctaattaaggtataataatgtttgttagatctgattttgaattgtttcaaaatcataatatgctaaatatatatgcatacatatatatacttatctgactgaaatacattcgagctagtcattttatttatttatttatttattttgtaatgaatatttatacaatatgtgtctgtacttatacatatatagggatatgattttgtcccgttattatactttcacggtgtgtaatccgtgatgtacggcagccgttagataagggagttatttgatctgacagctgaaattgatctaggggtaattagggttaaaaagtaaaaacgtaccctgacactcatttaatattgtaccccgagacccatctaatgtaccacggaatacattccgtgaaagtacatctcgggacaaaatcatatccctacatatatatatctatatagatgcctgt

SEQ ID NO: 328087 - DNA, 831 bp, Cannabis indica
aaaaatcaatttttttttattaatgtttatttattaatttttctttatattagctcgtggaacttaatacgggacatagatattggtatatttatatataaaaaaaagtgtcaaattaaaataggggtgtaaatataaatggaaaattatatttggtatggctttttagaaaaattagtattttttatggtaaaaaatattaactacaaatatgctctacttgttttttgttaaagctatttgccaatatgtaatggatttataaatttgtaaaagttctctacaaatttgtatttttgtaaataggtttatgtatttttcagaatttgtgcatttatgatataatacccctaaaaaaattaaacctaaaacttagcccaaaacatttctggtccagttttctcttggatctgttttgtgaataagaaatgggcttacattggaaatggctactataataacactaaaccttgtgataaaagcccaattaattaaaagtttaatagtgtttgcaaatatactcataccccatggttgtaaatgtaattgttttggttgggaaactcagagatctatttataaataacattattatcttattgttcaaagatacaaaaagttcttaaccacctcctaactacaaaaatatggtgtcataacaattttataggttttgctacctttgcaaaatgccttaaaatatggcagttttagaaatagattagaaaatattgatattgtataatataaaattataacattatttgaacacagaaaattaattatactagaatattatgtgtaggaaatttaagataggaatttactatc

SEQ ID NO: 328088 - DNA, 784 bp, Cannabis indica
tctctctctctctctaatttctcataataactcttatagatgttgtatcttattcgaatattcaggctacgtcatatgaacaagacctccacatgatgcagtttcagatcccggagaccaccacatcatcattggataaatatacagaatttgattctagtatatttaggtaatcataattttatttccttcaggttcatgcttgtttgattaatcattaatattctcaatattaaatatatgtttgttcaaaattttattttaaaaaattgattaatttagaatcctcaatcacatctaattaattctttaattaagataattaatgaactcaatatattttttcttatttttttattattcaaaatttaattagttataatatttcttcaaaaataaatacgtatgccaaacaaataaatttaatactaggtcaaatatgagtggacatagaaaaacgacaaaaataaaaatatttatttgtaaggccatttacaattggacactaacattttaaatttagtgttgtttttattaaatttaatccaatcaaatactattctactattatttatgagacatgtagagtcaactaaaatttctttttatcttttttatagtttttaataattaaataataaaaaattaatgattaatttttcttaatatatttatgtattatatatttttgtgtaacttttaagtttatagttggaatagataaaaaaaaaattaatgttaaaattatttttttagtattagtttaacactaaatttaactttt

SEQ ID NO: 328089 - DNA, 520 bp, Cannabis indica
gaaatgattaaatttttatttgttaaaaaaatttaagtaaacatatcaagtatatcaatttaagcctatttccacaaaaaaaaaaaacgagtatattaattaaagtagttctaaccaatcaatagctatcatcttatttttgttgtccattgagcctctcttagtaatttgtttttgtttttttttagcatcttttatttttttagtatagcttttgcaaaattagtttctcctagtggttttagatgtggttttagatggtattaaatggagtctaaggacttgaaagaagtttttattcttcgaatcaggtggcgtttggttggaggtaatgaaatggaaaggaaacaatttttattccattcctttatttagttgcattttaaagtattagaatagcattccaatggaatgctctttccaccattttggtggaatggctattccattttttaaaaagaaaggaatgaccattccaatgtaacaagaaaaaaatttaataatttttttatcaaatttt

SEQ ID NO: 328090 - DNA, 480 bp, Cannabis indica
aaataatttccaacagtaatttacctccctgtggatacgacatagcccatttactactgcgaccgcagtgtaactaattgggctacatcactttttaacgcccaaccatgtaaaaatatgtgtgttccttattacattttctctatcatttattatttcttaagttcttattattttaattcgttttcgaaaatctcgtgaaacatttttgtattttcattgagagctaaaggaagcagtgaggaccacccactagttactcagatattctaatttttcgcaaaatagcaccttaaagtgattgttgttgagtttggcttaagaagataatcgcacctctcctaaagacaagaaatggaggtgatcaaagagtcgatttccttcccaaagtccaggcttgcaatttcctttgtagtagctgtcttgaccattggcaatggaagatggggatattctcgagccctaattctcagcaacagg

SEQ ID NO: 328091 - DNA, 1013 bp, Cannabis indica
aagaggaagagagagggacagttgggaaagtgggaggggtttttggggtttaggaaaaagttatcccattttacaaattatacatagtattagtttaaaaaaccaatttatgagtttattaagcatgaaaattcaaatttccctattataattcgataataactaatatataatactatatattttagacgctagctagttgtggtgatatatataaagtaagattacgttaagacttagcataaatttttattcacagaattttttttaattattaattttaaattatgtggttattataatataaaatatatatttttatgataaaattgttcttatatagttaaaactttgtacatattatgataatttttaattatatattattttaaaaaataaaataatattaataattcaaagaaatattaatttttaatttacattattatttttttaaaaaaaaattaatttaaattattatatacaaatatttattttcaaaaaataatttaatttataaattttgctatcaatatttttatactaatagttaactataataaaaataattacttaagtattttcgccaccaatttattatctagttctaccataattattatttttttttaaaataaatttgctatataattctttcttttaccaaaaaagataatttctatcaatccaattgatcgagtaaattaattcacaaaaagattctctattaaaagagaaactattttttttttttatattttttagaacaattttattttacatatataatttcttttcctatagaagattaagtctacttttaaggctatctttagtatactatctatacaactcgaattcatgtattttttttttcttatttataggtccaaattttaatttagtcaaatgctataaattgcatgtattaacacatttttatgaacataatatactttttatggtacattctaacatatatattcatttttaaaattatatatgtgtttttt

SEQ ID NO: 328092 - DNA, 635 bp, Cannabis indica
caaaacatcttaaatcatccaatcttgagtaatatttaaagagttatggttaaaatattatcagtcgtcgtactaagaagcttgttgccgaaaaatagccttcaggggtcgcgacatggagggtcaatgtcgcgacctgctatggtctgaaggcaaaaattaaggcttttagaccctaattttcagatttaaaagacacttttgacactttttgaggacagaactttgagagacgaaaattagaggtagaaggcggctctggagactttcaatattattttttcggcgaggtctttcttttactttattttttatgttcttaattagttgttatcaattgtttacaatgactgtgagtagctagacttttaattaatgttgttaattgagattgtttgacactttgttatagttttaacatgatatagttcttccctaattatttatgtgcatctatttcattcgtatttaattttttttaattgcatgatcactaattaattgtttatgatctcaacgcaaaatatgagaagtgagtattgactatgctgtagtgaaatagacacaaattttaatattggaggaaaatacatgtatagtttgtgtagcatttaggattttaatgcttaatgctt

SEQ ID NO: 328093 - DNA, 696 bp, Cannabis indica
attacattaataacagtataatactaagagtgttaaacaccaataatattttttaacaattctcttatatatatatattaaaaatgttaaaaagtacagtggtgcctaatatctttctatatatcaatattgctagtgattcaattaaatatcaaattttgatcttgtataatttaatataataatttttaaaaaatatcacgtgacatgttctaaatatcactcatgccaaataacaactctatatgtgtagggctcaaatatattgattcttacccgcacgtctctctaaaacttttgaaatgtgactattattatcaatcatcatgaaattaattcactatataaaactcttaatttataacgtacggtttagttaaatatatatttgatgtaaatagattgtcccatataatataataatatataatttgatattacaccgatcattaagttgaaaatattatcttaaattacttcctcgcaatttcctctgctctaatcctgtaattttctacttttcaacgttatcccacttgccataaattaaaatttataactaaaaaaataataatgcaatatttgtgtaaaatacttttgttacagtaaattaactttactattacgtatgacaatgtgaaaatatttaccattatatcactagttttttttaaagaaaaaaaatatatatcaaca

SEQ ID NO: 328094 - DNA, 1547 bp, Cannabis indica
catttagtgaagaagtcaactactactactgcgtacttggctcctcctcgcccagtgggtaatgcccctatcccccatatagcaaataggtaaggtgaggtcatcatccttagttctgtcgatggtacgcaaggtatatgtgaaaacctctaacacttatcacactttttgacaaactcgtgggtgtccttattgatcgttggtcagtaatatccttgtctgatgatcttttttgataagctctgccaacctgcatgatcctcacaaaagccttcatgaatttctctgatgatctcattttcctctgtagggaggacacaccgaagtagaggcatcgaataacctcttttgtatattttgttttcaattattttgtatcaaggcaccgaatactaaagtttttgtgactcgtttttgtcagtcagaagtttcccaccgagtagatagttgatgataggggtcatccatgtagctgagctgtctatcatctccacgtcttccttttcacatatacttggttcactcaaaatctccaccggaaccaagttcaattcatccaagttgctctgtgaggcccattttgccaaggcatcagcattggagttttgatctcttagaatttgctagattttaaagtaactgaatattccaaagttctttttaaccttctctaaataattagccatttccaggcccttggcctggtattcctcgagaacctgattcataataagctacgagtcactatggcaaatgagatttttgactttcaatgcttcggctatcttcaagccagcgatcaagggttcatattcaacctctttgttcgatgcgtcaaattgaaatctcaaaacataatgaaacttaaaaccttctggtaaaattaatattacccctacacccgagccctacttgttggatgcaccatccacatataacttccaagtgtccggtctcagtggagaggcaaaatttcttctcgagttatacctttattcataagtctaccaaggcttggcccttgatggttgtccgagggtggtatgttatgtcaaactgccctagttcgattgaccattttatcaattttccagaagcatctggttttgataaaacttgtctcaagggatcagttaacacttttatggggcttgcctggaagtactgttgtagcttgcgagacgcctggactaggcactaagcgagtttttcgatagggggatatgtagactctgcccctagtaaccttttacttacatagtaaataggttgttggtactaaccctcttctcgcactatagctgcactaatcgcaccttccgagatagccagatagaggagtagtgtttctctagttattggttttgccaacactagaggactcgctagatgccttttgatgttctgaaaggcctcttcacactcttctgtccacttaaatttcttgttgcctcgcaatacatttaagaatggaaaacacttatcagttgacctcgagatgaatctgttgagtgcagccatccatcctatcagggcttgtacttcct

SEQ ID NO: 328095 - DNA, 1195 bp, Cannabis indica
atctctgattcctttgttattaacttatgaaaaaaatctctgcataaataaatgtataaaagaagacaattagaaatatacatacaaacactacaatactaccaaaaaaatcataatgagctcccatatactactgcaaagttgcataaggattgattcttataattgatatctttaccttggctaggcgacactataaatcataacttctcacagaagtgtcctaactgaactcaactcactataaatcaacctgcatcgttgccgtttgcgagagaggagctgaggaagaagttgcggcgtcgtcgtctgcgagtaggggagaacctgcaccgccgtcgtcggcgagtgggggagtttccgtcgtcggcgactcttctgcgcagtgggcggctacaagaactgagagagaaagagaaagagtgattaatgattagggttttgtttaatgggaataatatataaatgattttttatatttatgtttgggtaaataacacttaaaattttaaatttataaacagcataaattcaatgtttatttaagaaatttgtaatccatattaatgtttatagttttttttttttcaatactactatattttcttaccttactaggtactacacactcatttatttatttttagtagtaattgatttgttagttaatttaaggctgaatattcgtcggtttgttcggtttttttctatataaaaatctaaaattcgattttcggtctggattcgtgcaattcaaaaaccgaccgaccaatctaaaacttatcttaaaactgaccgttttgaacttcggtttggtcggtttaaactgcccaaaccgaatttttttaaaaaaaaagaatgatccaatttattctataaatacattattttatattttacaactacaaacatacaaattaattgttcaaaaattaattatcttatttatttaattttaatattaataaaaaataatatattatttttatatatttttttgaataaaatcggtatctttattaactaatcaaatcgttaataacaatataaagtaattcagaggaacaatcctccaattgaagcacatgacctggagagaaacaagagtccttgactaagcagtgagtcaacttgtttgcagatcgtttgacaaaacacaattcaacattgtctaaagataaaagcaacgcacgaa

SEQ ID NO: 328096 - DNA, 574 bp, Cannabis indica
ggtcttttaattgagaatgctctttatttgtaaattagttttccaaagtaatgaaaacactaattaattcatcaaaaaataaataaatacataaataaagaattaattgcagcataattctaaatctttcattgcacttaactcttaaaattcaaattttagcattagaacttctaaaattataaaatccttaattatttatatatagtttctacatatccaatactgaactgttcatgtgtatatctatgtagacatagtgtacatatgacacaattatattggtttacgtaaaaattatttaaaaaaattataaataaaaatgaaggtctaaaaccctaccacaacatgtacataaaagatgacacaaaagtttaaccatgatcttgtaaaaatagcgttattagtgcatctccaatgctatctttttttaaattgcttgtctgagaatgggcccttatacaatataaatatttgattttttaatatttttaaacaaatatatgggtattgtggcctaacaacagcaacaatgctatctttttttattattattattatctcttatatatta

SEQ ID NO: 328097 - DNA, 480 bp, Cannabis indica
gagtgacgtactcgtgtataagaaaaaatatctactttttgtacaaaaaagaaaaatatctgacctttttattttaagcgaagtagtgacatatgtttctccactcacaggttctcttggtggaatccacttaatattgattacatttcccctccactcattcatgtgcatgcgtttcatgtacgctcttaaaagtgcgtcgaacacttcacttgttcaagcaaaatgcatattttttttttcttctgagcattttgcaacgttaaatcttgaacgaccagacaaaaccttcatatttgtttaaaaaaaaaccaaatacttcatcttcttcttatccttttatggcctgtttggaactcaggattgaattagacaaaattagattgtgctgaaagtaattctgtatttggtttaagaatagactgaactattttatttattttgtttttttaaaaaaaacttgaattaaaataaaaaata

SEQ ID NO: 328098 - DNA, 508 bp, Cannabis indica
ggtatagagtgtaatttcctcctcaaattatggcggtttgacgtgctcgggtttgagttttattaggctgagtttgaatattttatgtttgggctaaaataaaatttaatttttaaaaatgccatgttttttaatttttaacactttggggcgtttttttttctttatgtaatcacatcactcgaaattctatttgaattattacctccgcgagattagattacgatcagtcttgatttccccaacaataataacaacttataatgaaaagatgagacaaaggattattattacagaatgaataacaaaaatccttataacgaaacgaaagataataaaaaggctacgtccttttatccagtggcagaactacatatgtctatagagtggccatggaccccctaacttcttagaaaaaaaatatacataatatataaattaaattagtaataattagattttacttattagaaaaatgtgataattctcttattattaagcctaataa

SEQ ID NO: 328099 - DNA, 695 bp, Cannabis indica
taaaaaactatatatacaataacattaataatgtaaaaaaaaaaaagtaatttaaaaatctaatacatataatacaaatacatttaaaaatttaatatatcaaatgtacattctattcttatattattatttttctatatacaatttaaaataaaatcaaacatttctttttacatacaatcttttttcttctattaaatttgttatttttattttatttattttaatttattattgaagatataaaatatcaataatatatttattttgttctttttatgtgaaaaaataataattattcaataatttaatattaaaaagtaaataattcaatttacacttttacaaattagattggattatattcataatatgaaatttgcactttgtgcaaatcaaatctacgagaaaaatagtacaaaataaattggatgaacactcttatttacaataggacatttatattaggttagtaaaaatactaatgtatacccctagactttatatttttatatggcatgtttacttacttgccaagagaatagggtatttcttattgatttgtttacttttatctagtaatagggaaagttggtgggtcttattacttaaggtgtcgtttggtaacactaatgttttttaatttttttaatcacaaaataaaagtaaaatttttgtttttaaaaaatttattt

SEQ ID NO: 328100 - DNA, 663 bp, Cannabis indica
tttttttttttgacaaagaggagattcaaaatttgaattccttttcccgaatgtaaaaaatactaattttttagtgaatatcaaaataaaatttaaaatgaagagtaataaagtaaatgaaattattaatagatcgtaaattttttttttaaaaaaaaaaaatagtttgtttttaattctatactgaacttgatattatatatgtgtaaatatattatgtaataaaatgatattttgagtatgttgagaataattttatactaatacattaatgacattgtatttggtattaagtgaattagatttttgtaaactaaatagtataattgtattattatcccaaattttgcactctgacgtggcgtcacgagaatggtgatatgtcgagtccacttggaacatatgctcgggaagacaggccaagcaggatgcctcgctggcatgcctagagcaagatattcagcgatctgcgtagggcaatcaacacttagcgaatttagctttcgcatcatgagtcatcagcttaatccctataactcagggatcaatttacgtggatatggcatacacacgatcccactatcattgtattcagcctcaatcccacgatccttgcattcaacattgatcccacgatctttctgtttatgcgcattgtaacga

SEQ ID NO: 328101 - DNA, 809 bp, Cannabis indica
tttttatattttaataataatataactagctataaccacacattcataatatatatttatattaaaaattaaagaagcctcacagaaaattttattatataatttcaaaacttttgtttttactgtatctcacttgtagttattatagtactatatacattcatcgttaatattattattgtatcttaattatttgtaatcactactacatttattgtcacgtataaattttaagtagttacaataaattataaatattccttttcttattaaaaacaaattatagatattttttttccaaaaatttcatgaatagtacatgaatatatttcttttaattataattttacttaaaataaatcaaatattttaagaaaatgacatttaggatcttgaggaggagcacgaagttacgtttaggttgcaaaacctagaggaaatttaagtgtgtcgagcctgcgtgcacctttgaaagtgcacaataattagcaccaatggatttggcgatgaagtttcttcaacatttttgtagctcaaaggtgcactcaacaccactccttcccttggttcgaaaaattgactccttcatacagaagtctgttgggaatattttactaggatctagatttactaacaagtatattgattaacatcctaaatatgaattctctaaaacaatgaaataaacacataagggtttaagaaaatcttacattgattgtagcagaatataatgactccttgcgttcaagatctctagcccttgattcctttatgtaggagagcattatcaatatctaaacctggat

SEQ ID NO: 328102 - DNA, 524 bp, Cannabis indica
ataacgtatacgactacaaaaaaaaattagactaaattttttcctagatactgaaacaaataaaaagtgcattgtatatttttttttttcaagagagcattatagaatcacataaaaaaattgactttataaataataaaaattgtaattatatgctaagggacaccttaaaataataagcatgtaacatattattattaatgcattttaatattaaatcttatttaattcaatttaataaataatacaaaaaattactaattaattataaaatatcacatattaaacatcttaaaatatcaaataataatactcaccaataaatctcaactaaaaaaccatcatgatatgatatgatatgatatgatatgatatgatatagactcgtatataatagtgtgatatgatatatgtaaatatgcatattcgtttaacttatagataatattaataaaaattaagatatgtacatgtttaaataattgaaagatattcttttcaaaataaataaataattaaaagat

SEQ ID NO: 328103 - DNA, 858 bp, Cannabis indica
ttattttagaatacaatttaattatttttaattattgaataacaaaataatttagtaaaccatgaaatgtggttggaatatttaattttttagtaaagtttgtttttattttttatttttaatgtaactcatagatactattgggtttccttacaagttattttataaaataagattatttaaaattatatattgtaaaatctaaatgatagagtaagaaattactttttaataacttataatgtttttttttttttttgataagcaaacctataaagttgattgatataataaattttatttaaattcaaaaattaattacttgtttaactaaatataaaaaaaaactaaaatgttacttttacttttggttattcttttgtgatggttgaaaaaaaatatgcttctcacatattaaattgatcatatctaagtgtagatcacaattgtacaacttttgataccaaataacttcttatttagccaaaagtattttttaaaaggttaaaaaataaatataaataaaagtaatttttaatactaaaaatatattatataggtagaaaataaaaaaagaggaagatatctcatgcgtggacttctttttttagaaaaagatttcatcacttcttaattaacgatcctcaaaaataaatcctatatgttgacctcgcttttagccaacgacagtgagtctaatttagtaagcgacaagtaatttgtaacgattggaatataataaagcaatataaagacacatgaattttatagaggttcagccccgagcagttcgataatagcctaatccttcttatttgtattaactcaagaacaaggagaaaggttccttttcttata

SEQ ID NO: 328104 - DNA, 796 bp, Cannabis indica
tactctaaaatatttctattatgatataatattaatgattatttattgttattattgttacattgatatttttttattatttattaattttttttccagtgtatccctgtttagttataacctcctaattagaatataatttacttagtgccaagtgtattcttcaatagaggttctactgtaattagaattagaatatggcattcaaattgttgaatttgacgatttacaataaatctccccacacttgattactcgaaactaagcccagactcatctaatgccacctcagcttgatctcaaccaactgccacttactctctcaaccgatttcaatagacagaacaagaatagagactttttattctattttttcagttaagaaaaataaaaaataaaataaaagagatattgagactttttatcccacgtttaaatttagcgtctcaaatatgcagcaaaatttttttagacaagggccctgttttgaagaacgttaaaaaaaatatcaaaagaaaaaaaataagttcaagattcgatttttatgggttagccaaacgggaattaaggtttttagggagacctaaaaatcgggataaaaagtgtttccccaaaaacactttcatctcacgaaaaatcacgtatatctactataacctctcgacagaaaccctcccaaacccaaaaaccctcgcccaacaaacccatgttagcctccatctcgcccataccagaatcgcccaaacccagctgatcaaacggttaaaggttaaactttttttctttattatttttc

SEQ ID NO: 328105 - DNA, 955 bp, Cannabis indica
atatatatacactagtggaagaagcatactatgcccattgtaaaataataatatagtaaaaataaaatttacagctaatttataacttaaaataatgacatttttattctattttacatcatttcattattaactcaaaataaacataaaactatcactaaacagtttttatgaatttgatttaactaactaactaatgataaaatataatcttaattaagtatgattacatgattttaaatgtcttaaaactaactaattattcaaaaaaattaattatcatcttagaattaatatttattaatttaaacactacattattcaaaaaatttattttgtttgccattctaaatagctatctaaatttggcactcaatgaaataattttatatttatttaactatttaactaattaattatatagtctaaattatattttaaattttgttgttatttactcatttataattgagaaattagtacataattataaatatcaatttattattatgttactttaaaatataattatgataaaaattggttactttaaaatatagttataataaaaattgccaataatcagatttatacatatgagaataagaaagagtataaattattaaagagagttagttaatttggtagttagagttagttattctgttagttcgttaagtgagttgtataataacaaattttttgtttaatatttatagctgattcattaatgtgtatataatcatatatgtagcagcttaagatctctttctcatgatcatctttctttctttcttcttaatttgtcttatcataaatggcatatatatgtaataccatatatcctatatatatgatatctcttagggctcgtttggaacgccgtattaggtcgtattgtattgtattgtattatattgaattgagttatatatcatatttttatataatacta

SEQ ID NO: 328106 - DNA, 1408 bp, Cannabis indica
ttcaatagataaatcataccccagatagagaaaaaaacaccgaatcaaccagcaaacataccataaatacaacatttgtaatcgaaccaacttcgctagtgagcaggcgccttgcaaatactgcctgctcaattatctcagctgcagttagatttcttgtcaaacccatcctgaaaagtgtaaaagggagtaagaacatcaacatgtgactcaaactataaaatgaatataacaaagaaatgaaaaatgaaatcttagattacctgccagtaaagcagaactgacagttcatggcacagcccacttgactcgaaacacagacagtgttacggccactatcagaaggtataacaacagtctcaattattaaatcatcttccaacttaaataaaatctgcaacctcctgtgaggttcacaatcaatgagaatattctcaagaaagaaaacaaatacataattaaacagtacaagtgagagaggggaatgactatgcctaccttcttagttccatcagatgctgttataatttcattcaaagataacgccttgaactcagcattttcactcaacatgctcttaaaatccttgttcaaacctacaataagtagatttttaacaaagcaatttgtaaaagtaaatagaaaagacgcaagaccaaacatataccttctaactcatcactatgatgcgcccaaatattgtccccatataagcgtttccatagcattaaagcttgaccaggtctatatccatgtgattgaacccatttctacatacccaccacatcctcaaaattagaactatatttcatttcccaattttcaatcaacaaaattcattttcccactaaaaaaattacctcaagttcagagtaattcattcccttaagaacaaccttcgagcttttgtttgaaacatcatcagtgtcaactccttcagcgcagtcgaagggagctcgagggtttgaaggtgaaacggcggcggcggtcgtaagcaaacgacggtgggttcgaagaaactgaaagagaccctgtacgtgggttctacgtttccggaaaatgtacaaaatgggttctctgaaagctggagaggaggaggagccaatcggagtggtcacagaagtgatgagagaattgggtctcaaccgaattcgtctcatccacatgcacccaatctccatggcaaacctgtaagtctgttaatctgtgccctaactcgctagggttttcaaactaaagctgtttatagttagttagttgataatactttgaaactcacactgttttatcttcgaaatctgaaaatcgttatattcatggaaagactgtcgtctaaaaattagtgtataaaaattaaaacataaaggggttttgccaccaaaaataaagataagggggttaagtgtat

SEQ ID NO: 328107 - DNA, 1164 bp, Cannabis indica
gatggctctggaacatcacccattactttctttgcaatgcgcttcaaaccaatcttaggatcaactttagatgaatttgtaggaggtttcttagaatttttagaaaaaattttagctggcgatggtgacttggaaccctttctagtggtggccatttataaaagaagagaagacaatggggaaggaagaacttacagagattatcgaacaaaatggagatagtgacatagatgggaggttgacaaaaacgtgggttagggcttcgactgggtgatcgtgatttatggcaacgaagaacggaggaaagagaaacagaaaatcaaaaaaaaatcaaaaaaaagaagaagaaggcagttatggaggaggtggcgtattagaatgcataaaatcatgacacatgcaataaaaattgtaaataatcgagaatagataaaaagaaaagtaaaaaaaatggtaaaaaaggacaccaactgtaaaaattcctttttaaaataacttataaggaaaccctttaaggaaaaaatctagctacactgctattcatttgagccaagatcagtcataccactatgatttgttttttttcttttcgagatgatccttttgatatgtgggaaccacatgttttttcatcgaataaaatttttaaaattaaaagtaaccttataatttcttatatatatatttaataaaaaaaataaccaattaattaaacaaaatttaatatgtcaactgattttatatcattaaaaactatttgtagttttatatataaaagttactatatagtatgtattctatgtaaatttattttatagaattattttaataactattatacaattatatgtattttaaaaaaattacgcttattttactaatataaattatttaatatttttgtattttattataccttcttaaattttaaatatatttaaaagtaacgtggaagttattataaaaataacataatgatgaataatatataaattaatcaatctaaaattataatttttaaagttaaccagctagaataagtaacaaaaatatgtatatgaaataatattatcttacaaactatttagtatctcagtgtcttatttttttttaataacatctcctaattttaaataattttttttattaacaacatttaataaa

SEQ ID NO: 328108 - DNA, 1205 bp, Cannabis indica
aaatatactatttgaatttttcttacaaaaatatgatataggaaaacatgtaaaaatataaacaaaacaaaaaaacctatagttcaatgcaggtcgtgctacgttgatcaaatcaggtcgtgctacgttgatcaaatctgtaggccttgctttgcctgctatacgatgcaaacgacgaagctatcaaaaaagcttgcctcaaggattgacggaatggttagagatttttggtggggttgtgaacaaggtaacagagggatctgtcttagggcctgggaccacctgtgccttcccaagtctcatggtggacttggtttccgaaaatctttagaaatgaatcaagccctgttagccaagtggggctgggagcttctcaatgagaaccagtctttatgttgtagggtgcttagagcgaaataccttcgtgatacaaaattcttcgattgtactgttaagagttcagactcttggttttggaggaatgtggtgcgtaccaaagagatactaaagaaaggagcttgtaaattaattgctaatgggagaaatacaagaatttggaatgaccctaggattagtcatggtacggatttttacccaaaacccaagcacaacctccaaggaatgcccgaagttgtggcggatcttctcctacctgacgggaattgggacattcggaagcttaatgatatctttcatagggaaacagttaacaatatttgaggggtggcaaaccgagtggtcaggatagggatagatgggtttggaccaagaactctaatggtagactctctactaaatcagcctacctcgtccaagccatggaacgggctcctttgtgtaatgtggctccaaatctttggaataagctttggaattcaaaagttttggagcgtcataaagtcctctggtggagcatcctctcgaaaggtctacctattagggctatcctctctaagagaatggttgttgatgagacctcctgccccttgtgtggcaatggtgaggaaactatggagcatttattcctgttttgcgatttggcttcccacctttggagatcctccccttgggaggttatgcctatagtgggatctggggcgcgcatgtgggactaggttagctttctttggaaccttaggaccagaggagtggatactgacagattatttctttatgcttcaatcgtggttgacacgatttggagg

SEQ ID NO: 328109 - DNA, 533 bp, Cannabis indica
ggtctaaggtccttggctgggttcgggttcgagtttggactggggtccaggtttggggttcgggtccgagttcaagaccggggtgtgggtctgggcctgggtttgagatctgagtttgagtccgagttggggtccgggactaggatttgggtttggatccgggtccaggtctggggtctcgggttcgggtccagatgggatctgagtccagtcttggtcggggtcggggtcgaggtttgggttgggggtctcgggtctgggttcaggttccgggtccaagttcggtgtctagtgtctggtgtttgggtcggggtcggtgtcaagtgttagtatccaagtctggaccggggttcgggatttggggtctgggtcggggttcggggtccaggtttggtttcgggcctagagtccgtatataagttatgaagtcaaacaatccctaaacaatccctaagcataagtgctatacatacgtaccataaataagaatttttttttttaatttgattaactcacaaatagaattttaaacc

SEQ ID NO: 328110 - DNA, 893 bp, Cannabis indica
agtttacttatagttgtattatatttatcatgatggtaatattttagcttattttttttttgttgtcgtgaggttgatttctcgttattttttagttatatttttattttttgctgaacaaagtgcatttttataattttaaaactttgctagtgtatttttataattaaaaattttaaattgtaaaattgtaaataaaacataaaataaagtatttttgaaaattcccgttttattattatatattctccacatatatagcatattttataagaatgagttgaggaatatatcttttttgtatttattaattaaaaatattttgacattatattttattaaaatgtatctatttttgtgagtgggttgctcaatatactctcaccttccacttaagtatagcacgtaatttacattaatctaagaagtataatagggacatcatttatgaaagtgagtatatcttaaaaatataaaaataaaggtaaaatttgatccttggatcaattttggagatttcaatgctatgtttaacttccaagaccgagttgggtaaaagtaaatttcaactaaagaaattgaagaactggctttcttgtggtcaactgaatgagcttaaatgttcgggggctcattatacttggcctaataaacatgaggttagtgacaaaaaaatttctaagcttgatcgagttttcactaataacagttgccttatttcatttcccaaaacagaggcatgctttaaatgagagtgcattttgttagactttttatttgggcttacattaaattttattggttttattaaaacttgggttgattggatagttatttgctgtgttagcccatattgttggtgattaatagttaatgggcttagcatctgtgtg

SEQ ID NO: 328111 - DNA, 824 bp, Cannabis indica
aaattgtgtcaatttgtgtgcggcttttttttaaaactatcttaaaaaaataattcaatttttcaatctcataaaaattacacttaatcaagcaaatcttttttcttttactaacactaacagagtagttaaaataacatttttaaaatcgatattgctgataacatataatttgttaaacaaaattttcacttactttcgttttcccttagtttatagccatttcatacattactcaaaactattaattaccctagtaaaatgacatacttcaactaataatctatgtaatcaaagaaacaaagatcccaatcaagttagatgatgtgaatctcactcaccaacaaattcataaattaatctttcacaaaattatgacacttgaaaacggaagaatagagtatgaatcactgttgtatgtgaatctttttcaaaacagattttaaaattacttagcattaataattattaactatttttataaacaaaatcctaatcattcgtttccacaaatgcaacaagaaatatagatgacaaataaattttaaatatacaaattgacaacacagacttttcaaccaaatattgctcaaacaatctctatttatccaatccccaaaaaatcaaaatccaaccaaatcaactaacacattctaaaaatacctaaattacagtacaatgcaaccaattcaatttaaacaatgcaactctttattgcaacaacctaaatcaaaataccaaatcacagattcaaaaaaaaactaaaacgaaaaccaaaacaaatacagtacattgcacactaagaatcagaacacatgcacggg

SEQ ID NO: 328112 - DNA, 1184 bp, Cannabis indica
gtaaaataatttccaacacgtagttcatgtggtacaacacttactggtactcggggtacaatttagccctaccaacactagtacaggacgagtacttagtgcatgtggtacaagggtcgtacttctgctaagaacgtttttgatgcatctgaagccttataaatagttatatgggcgtctagatacaagtcagttttatgttatttgttttgtgcttttcttactaagtctgtcaactcacagttattgttgcatatgtaggtaaataaaaggtgaaggctgagcactagtgagtccagagcttgaagatggttgtacatatcaagatggttagacttggagagttaggtcttgagacgagttggacctttattttgtagttgcgaagcgacatgtttataaaatgtattttggaattttgctgtaaacttttaagactggatttcaaattttatgtacgactgtatgtttataaagatttaaagtttaattaaaagttttaatttaacacattttttgagaaaacttttgattagggcgtgcacagtaattagtaaatcactgtagcgtgcctagcaaagaggtcgttacatcaatgcacttactcttttctcccaccgtaaattgaaatctgattatagaatcataataaattaatagagaaagttaacagaataaataaggaaaaattagaatcaatatttgtaatatgttatttactaaaattattttcaaattgaataacaataatttttttttactttattaaaaaaatataattaaaatacttaaattgactaattagcctgtacggttataatataaactatgataattattttataagatatattttaaaagataaaattgttattaaataggtaatgttaaaaaataaaataaaaataaataaaagttattagttttaatgacatttcttaaaaaattagttagagaattattcacttctttaattccttattcaattgagttcttcaatttcttatttgaataatttactgcataaatattccagttataaataaatatctaaatttaatttttgacggtaataatacttaagttatatttgtgaaacttttatgggtacttgactattaagtgttaattaaattgtcacgtgtcaatccatgattaatccacattattaaatttttattttt

SEQ ID NO: 328113 - DNA, 657 bp, Cannabis indica
aatcacttaaaatagttttatcttaattttttatttttaattctttttataaatattaattgattaattaactataaaaatatttatatataattcaaaaaaaatactaactaactaaaataacaatcggtagcaaccaaaacaaaatattattattattattattattattattattattattattaacaatcaaaaataatatttattaataagaaaaaaaataaattctctaaactaatatagaaaaaaagatatatatataagtagcaaccataaaaatatattttttattgttattattaaaaataacatgcatgtgtatagtaaaaaaaccatatttgaaagtattagaaaaaaaatatattgtgtcaaaaaataaaattcaaatacgagtcatgtagcccgtttataaatgatgtagtgaaatacaatgatgacaataatgactttgaatataataataaaatatatcaacagttttgaattataactacaagataatgatacaacaattttgagatcatatatatgattatttttctatagattaataactaaattattttttttagacctcaattttttgtaaaggttcttcaaatttatttttcactactacaaaaagctgctacttttagtaacaactttttagtc

SEQ ID NO: 328114 - DNA, 1023 bp, Cannabis indica
tactacctactactacatactaataaaaacaaaaaaaaaaaacaaaaaattaaacaaaataggggatcccaattacatatacattatgatattgtattaaacaaagtaatacataatacccttttgtatggctgtatacaggcttcacgttgcagtgtctttctccacatcattcacttgaaactacaaaattttgcctagaatattagaggtagcagtgacggttatgcactaagattttttcattgaaagaaggctcatagatattccaacgctttgcttcctcttatacttagaacttttattgacgatggcattttgtttcggatttcttaggacacaaacatctccgtcgcatatgtatcgtttgggctgggaagagaagcacccaaagatgtttgagagcaaagccatattggaccttgaaacgaaagagaatatcagaagacgactcttctgttcttgtgttgtgtttgattttgtgtttttcagccaaatgcatgttagaaaaaccagacatatatattggttatgacaatgagaatagagtcaatgttggtgggtttaattcgtacgaagattgatgtgacacgcttcaaattatggacttttcaaccagaccaaacgtgtcggtatccacttctggatgctctataaaactattgtatcataataatatatgttatttcattgacccatgttttaagaattttattctaactctgaacacagaagtttaaaataataataataataataataataataataaataataataattaaaattctgtttttttttttaattaaacttataaaccatattataaaagtctcgggatcccgatttataaaatcatttacaaacgttttaactgtttaacttttacatcaaaatgaaagtcgtctaacgacagttacaaaaatctcagccttgctgtcccgaggatcgtacgctccaggcctaaccgccccgacatgtacaatctcataagctcgctcacggtccatcagctacagcct

SEQ ID NO: 328115 - DNA, 776 bp, Cannabis indica
gggcataaaacccaacattagtacatattaaaatttgaggggcatgatttggtagatatcaaaatatgaggagcatggtttagtacataaacaatcactgaaacagtaaaattgaatgaaattagacaacagtccttaaatttaacaatctcaatagttcgggggaatttctaacggccaaaaaacttcaggggcacgatttagtacatgtcaatgttcggaggaaaaaattactaattagcctactataaatgaaaaaaatcagtaaaattacaactataccctcaaaatatctaactattacaacttacatttaaaaacaaaatgaaaaataaaataaaataatttcatctacttacaaatatcgggaataacatgtaaacaaagaaatgacaaacagtaacattattcttgtcatatttgaagtttttaatccctggaaagtaactaaagaactacataagggccctttaaatatattacctaaaaggagagttgtatttggatcccacaaaataataagtacattctaacattaaaaaaaaataagcttaaaataatttttaaaaatcactctttatattttttttatgtaattttattacttattttaattttaattttacatttttttaaatcatgaatattttttttttaattttttcctaataattttccatattattttttatttaattttttttataatatttaaaatacaatttatttttgtttgataagtataattttgaagaatatgaattggaagaataatt

SEQ ID NO: 328116 - DNA, 988 bp, Cannabis indica
agtcagttgttttggcatccattctggtttgcgttgcttatcaatgttgatttatttatttccctaattatatatatgtaaaaagagtgagatgaaacgtgaacttgtaagccttttttcttgtaggcaaagacctcgttctactactactaggcaattgctgatggtcatttaaaattgttataaaatttaggaatatcatacttctataagtttcaaattttgtttatggttttaagtggtgtgctttgcctccttttccaggcactgagtaggaaaaaccgaagatttatgatttatgttcactcaaaaaggcatgatagttgatgacgagtatgtaatcattggatctgccaacatcaatcaaccctctatgaaaggcactagagccactgaaatcgcaatgggagtttaccagccccatcatacctaggcacggaaatttcgcaatcctcttggacaggtaactactgaataggtgacatagttttggataatttattagagtgctaatatacagtcgaaatttttcagttcaaaattttattttctcaacatattagtaaagaaacgtgttgttgccaatatgttcattaaatgaaaatcattgtatgtagtttgattttgaaagattataaagcaaggacttggttgtaacatatttaggatatgttttctatactgttatgaaaagaataaaaaatggggtttggagagggagtggatgaataaaaatcgagacattagttagttaaattaactaattatgtgaggaatcagggaccttgtgcctgaatcgttaagtaaacacttaattagagagaaaattgaaacaccagtttgacttctatttcctttactgtttgttcatttctattaggaaacatggccttaccaattgtgaaaaaacaaatttaatttcgttgctttgataataattttatttggtgttgtgaataatgtgtggttggcagatatacggttatag

SEQ ID NO: 328117 - DNA, 1063 bp, Cannabis indica
ttatggggtgtaaataaaattttacaaaaataattataactggtgagttttaattgcactcataaaattataagtgcaatactatattaataaaaaaaataataattttaaaaaatgactcctaatattttgaaatcttctttttcacagttttatatacattcataaaatttatatttgtactacaatattggtttttaaagatttaatcataataatggttttcatatatttttatgttaattttaatcattttattttattttcgtaattgtttaatagtgtacattttcttgtttgatttttactatgaaattatatataaaaaaaaagtgagtacaaattaaaaatgtgtcaatataatataataaaagctaattagtaatttttcttcctaaattttgatatgtagtaaatcgtgccctctgagcttttttggccgttaaaaattccgctcgaactatttagattattaaatttaaggactcttgtctaatttcattcaattttactgtttcagtaattgtttatgcactaaaccatgctccctagactttgatatctaccaaatgcccctcaaactttgatatgtactaaatcatgccccttgaactttcatgcatgtaagaattttttactaaaattagacaaaagtccttaaatttaacaatctcaatagttcatagggaatttttaacgaccaaaaaagttcaggggacacgatttagtacatgtcaaagttcaggggaaaaaattactaattagcctataataaaataattttatagtttgtttggatgcaaagaacacttccctagtaagagattgattaaaatttaaggtaatatccttcactttaaagtttattcatatctcaagacaagaaagcagaacaaaaccataagcattgggaaggatccaacagacaagagttgttccgatgtagtaagaataagctagtgaaatctctgaacaacttgaaaaagtatttgaggcaagagaacgctatctatctaaaaggatgtctgtcaacacaagatttcatggtatcccaaatgcggtc

SEQ ID NO: 328118 - DNA, 1707 bp, Cannabis indica
atcagattgtaatgggttttatttagggcacaaaaccaaacacttcaatggtcatggcgctgagcacggagacaaggaggggtaatgacatgctctagtattatctaaaccgatcacttcctaaactgtgtgatcaactgtccagggcggacaagtagctgtatttggaactggtcttaggaggagtcctgaaggtaggtacacaggtaaatatttccttctttgttttattctcttttttgtagcttagatttgaacactttttgtgcaggtcaatctgaagatggcttacgcttactcccgagccaaatccactgctgccaagaaccttgacacaaccaacacatttacagaggtaggtggatgtagctaaaaaggaggttcaagacgtgaggaaggagctcggggaggtgaacaaaaaacatccttgctattgaaaaccgggttagtgagctaatgaaggaattgcaagaaatgccctctactgcccagcttaaggaaggtaatgaggctcacaccaaggatgtcaatgctctcaaagacgagagggagagtctccgtactctccttataaacctgcaagaggatgtcttgactaggcagaacagggagaaggagctagagaaggaggtggaaagcctagaaatgtctgcccttgaggtcttctacgaattctggaaggctaaccccacaggaagctttgattaccttggcgattctaaagggatgtatcttgatttctgtgcaagttaggtgaccaaagaaaaccctgaggcaaccacttctacaatttaggcctaccaaagcaccgacactcatgctactcagaacattgaatctctagcccacacagactagactaatccatacagagagcccgacacccctaccgtctaaaaattttttcttatatttttttatttgtatctgttcggcccataggcctttttttacagacaaagatgaccaaccaagcagtttttaaacgggtttatgtttttgcattttaagacaattggctgactagggggcttttaatctcgcgtttacagtactttgtgatctttttaaatgaatattgtcctttgttttgataatcatcagttcaagtgtgttgttttttttttttgtagcttgttatttatttttaccaacgctttgtacaggtatattttccccccaagtgaccgagcagacttttgactcttggtcacttgtatttcacaagtacaatttttgtctgttcgcttctttggattcgagcaggcctttgtatgcatttaacagtaaatttataccttgctaatagatatgacacaatcagaatttagatagacatctttactcattcattggtcgaaagagttttgttactgtagtaacttacataaagctattacatgatctaatcagatccttagctaaatttaaacaaaaaaaattgcacttaaagagaaattgtacattcaaaggtggtcatccgacctgagtacttaatcacttcatccgaacctttgggcgggatccgtagttttgcacttaaagtggtcatccgatcttgtacttttactgaaagtaattttttaaatgttacccattccaataccttggcactagaacaagttccatatttttgtcataccacccaagttttatgctcctaattcaagaacttcaaccacctgatatggtccttcccagtttggt

SEQ ID NO: 328119 - DNA, 2450 bp, Cannabis indica
ggtttcaagtttggggatggtttgagctcgaattgagacttggtatttttttgcagtagaaaacggcagaccgtgactggcagattatcgagaaaaacggcctaccattttttctagcagttttctaaagtctcgttttttcatgtttcctcaatatttaagacattgtcatgctacttatcgatagagaaatttctaatttttagtttaggtcctcgtaaagtttttagcaagttgtttacccattttgcgtgactgtgatatagagactcccttcagcacgtaaatttctattcacgttaaccgacacacttgaattaaaaaatgaagtaatattagtataaaatgtgtatgtgtattatatgaatgcagtattatgtgatttatatactagcaacactggtaaggttgcggtactgagtgtagtggtacagtatatgatgtctaagggtacgacacagtcttaccaacaatagtacgggaagagtacgtagtgcatgtggtataacactcagtggtactcggggtacgattcagccctaccaacactagtacgggacaaatatctagtgcatgtagtacagaggtcgtacttctgttaagaacgttcttgatgcatctgaagccttgtaaataggtgtatggccgcctagatacaagttgttattatgttataagttttgtgcttttgttacttagtttgtcgactcacagttactgtttacatgtgtaggtaaaggaaagacgaaggttgagcaccagtgagtcaaatgcttgaggagattgtacatatcaggattgttagacttggagagtttggtctcaggacgacttgggcctttattttgtagtcgcagagcaatgaagcaacatatttacaaaatgtattctgaatggttataaacttttaagacgggatcccgacttttatgtacggttgtaaatttataaatgtttaaagtttaattaaaagtttaaatttgacatgattttcaagaaatcatttgattagcaaaggcatgcacaataattagaaaattattgtagcgtgcctaaataagtaaggcattacaatatagtaccagagttgccaagttatttaccaaagaccatcaagatatgtataatcatcgttagagacaaactcaacttacggttcagtaagcctttacttgtttggtgatttatttggttataaaagcatgataggaagcatgttagtaatatactaattgaataatgtgttgcctaaaatcctatgtatgcagtaatttaattgtacgtgatcgttgtttgacctacttgacttatgggttcacaggctaagtcatatattatggacgcccaatgaaatacaaggagtccgggtaatatggttgagactggagatagttggggaggtcgttatcctctaaatctttgtggacgcgacaaaggccctggtagatttcaaggaagtggttatgaaaatccattacaggctcctcaagattgggagaaaaggtttgtagaaatgcaatcccaaattaattagcaagatgaagagatccagaggctgagacagtagggtcctcctgctatgcctccccagcaaatgacattcgctttggttctagtggtgccagtagaacaacctgttgctagtaaccgcatcgatcctttgtatgagaaattccgcaaataaatgcctccaacttttctaggaggtcctaatgtcatgaaggcagaacaatggctgaaagtgattgaaaggatcctgatttttatgggtgtcaccggaaatgactgggtgacttgtgccacgtttcaattctagggggacaccctcgtgtggtgggaattggtgtccctcacatgggacgtcactacaatgacctaggaagagttccaagatctgtttaatgttaaatatgacaatgaggcaatttgtagtgctaagagaaaggagtacattgagttggtttagggagagaccatgttagtgacagagtatacaactaagtttgatcgacttgccaagttggcttcaggtatagtacctacagattttagaaagaaagaaaaatatttggcaggtttgaatgccaagattagacatgatttgatcatcactaaaaacgacacaacaacctatgctgagatggttgagaaggctcttcgagtcgaaagtgaaattaaatttctacaggagcctcaagggactccaagtgttggtaggattaccacttttcttactcctagttttggtagggatggtggttgtaacaccctaaataattaggcacgttacccaaaatacttatgaaaccgtaatcccctaaatgggatcactaattaaaatagcacagaatttaaactcttataataaacaaagaaaataaaacttgtaataatttaaactttacagcaattgggatcccaaaaatatttacaaactttattacaagtct

SEQ ID NO: 328120 - DNA, 1733 bp, Cannabis indica
cctttcgtagctaacctatatatacacacacatatatatatttatttatatgtgagattccatggcttgttagccaagatctgatttttcagcctttcataaaccactaccaccataatactccccatggtttgaacttcaaagccagtacctcgttgcaccattcacgactcttgagggcagcacagtcgcgagccactgtcattgaccaagctaaaatttttcaatattgtgactcgtttcgaactatagaaacaaactgttaaactcatcaagaaatcaatggtatatatccatctctgattgagaattattcaaatttatagaatttaattgaggttagctataatgcaatcattattgtttggctatctttttatataattatattgttaagatactaaattgatacgaggctattatttgtaggtgtaggatttttataaacatgtttatactggttttatttttttttttgggggggggttgtttcattaacattgatatgcaatcccattctatagaaaataatgaaactttaacaatatacttttgtgcaggacatgaagtacatacatgctgctgaaaaaaattaggtggactgagatttctaaacttataattgtcttgattctgagttcctaccaagaactaatatggtaacaaattaattaagggtttattatgaaatggagagttctattttgctttaattattttttttctggcttcaatttcgtttcaaattctctgccctgtatgtgttcttctttattttatttttcttgcagatttagtgattgcaagtagtaaaggatagtctcttgctcattcttcaaaggtatactattatatattgcctttaaaagatgagttactttataatatcataaagatattaattgtcataacaaaaaattaggtccaaacttatgatttgttgtcatgagaaataattcatgtaattagatagactttacctttagaagcaatgttgagttcttgtgctaaattacctagaatattcaaaattattgtttctaattatagcactttctctatgttcaggttttgcagcatatgatgagtggtctcattacttgcgtgtgcatctcaatctgtggttgataagtaaaaaatagtttattccatagccatattttacacttgattatttccgttggattattttaaaaaaactgaacatgtatgttctgctgttctagaacaatagaaatggaaagtagtatcgatagagagggaggatgacttggatactcttttggaaaagtaattgatgtatgtgcaaaatataaccatgattgctttcgactattaataaaatttcattcatatttatccttttttttttctcacatttccttttagcatttttgcatggtaatttcattcatattttcatatgttctcactgttttctatttgtactctgttttcaatttaccttgttatttttttgtaccctgttatttgatgccttacatatattttcatattttgtattctgttttgcagattttattctatgagaattgcacagaaagcttcaatgtgttggacttcaaagacttagcaatattaaaaaattggtgtaattagattgcaatattaaaaaattggtgtaattagatttataatacatttacaagtccaagaaaaaaaatattgtatgaaactaaaacaataattattttttaagtttattaaataat

SEQ ID NO: 328121 - DNA, 515 bp, Cannabis indica
gaatgagatggcgtcggttactttgtgataacagctcaacaaatggcattccaatgtcggacagctcaaggaataggctgaagtaatacctcctgcaacacacagacaaccaataatcctttttggagcttgtttgaaattgctgaaacagatattatcactttaaacaatataaagcaaaaaaggaaaaagggggaaatggtaaaaagagcttaccaccctgccagggccctcaattccttggtccgcttaactgacatggaaaagtggtttagggacacataagataatgatgatgatgcaattttagattttttctgaataagccctttccaccaagaattttctgtagaactattggttggttcctcaactagtcttctttgaagtgtacataagtcaaagcgatcttcatacattgaaacaactgcttccaaattttgatacagccactggtttaaagctacctaatgatgaggtcatttctttattaaatttagaattcatattagagc

SEQ ID NO: 328122 - DNA, 611 bp, Cannabis indica
tattttgaagatagaagggtttcatcatatccaattctctgtccatcggcggcctttttgggtttcttctcatcaaaaccctagaaagctttactaactgatcggagaggacgaattgggttcattacaattgcttcactcacactcacataagtatggcttcattccatttagatttcatcaaatcaattaaattaactggtctttaatttgttctttaaaaaatagttcctgatttgattcttccaacatagacccaattgagttctctctgttttgttttgtatacagttcaattcaattcagttctacattgaggattttgtatatttggagagagctaaattgtatggatcatccaggtaattgaattcttgattgaaaaagataaaacaagatgaattttaagaaaactcaactgacagatcaaagaaaaagattcaaatctcttgtttttatatgtcttatcatattataccaatttcattaggttataaatttttaatttcttctgaaaattacttttcagtgttcatttctcgccgtataaaaccaactctggaactgaatccaggtaattaaattataagtttatttatttatttatgcat

SEQ ID NO: 328123 - DNA, 1076 bp, Cannabis indica
cagaatactcttctaattaagagtttttgagtttgtttcgagctctgaaaacctcgtaaaaaacactaataataaagtgtttacataggctaacaaagtcacctcaaagatactaaaaagatttaaaaagttaaacctaaaaaaaaataaaaattgcaactttacttgaaaaactatctttttatcattttttttcagaaattttctactgcgacaactgatagtattttggccataactctcttgatattactctgaagtaaacgattcaagatgttccgaaaagctaacgagatctaaaactttcatgttgagctctaagtccagttcttcttttaagatcatccaaatctacaattaagtttttccttatgaaaccgagtttgtcaacttcaactattttttaccaaaatatgctaacaaccctccaaatgactctaaatgcatgactagtctttaaaatatcctaaacaattaaaatcaaactaatgaataatttaaagaaccagtttaggaatattaatatataaattagctatatttataagataaaatatctccttatcaaatcccccacacttgactcttgatcgtcctcgagtaagttaatgataaaatgaatgatgcttcaactaatcggtctttatgaaaaataattttagttcaaaaattgtagatctacttataattccaaaaaaatccaaactcttcaatcattagaatttaaactcaacataattacttttcaaactcaatttgtgtgtgtttgtgagttcaatcaactcatcatattactaacattcaaatcaattcatgcaggccaacaatcaatgtttatctcaaaataaatgtgtatttcaatgaaaatctactccataagcttaattatcaaaccattctctactaatgtaattacatacaatctaaagatcaatagaactttataggcttataatgtaaggctagggtgaaaggttgataaagaaggttaatttgggctcaaattacaccatagcatacatctacaacattctctcaaataatttccatttgtattccccaatcactctcctcaa

SEQ ID NO: 328124 - DNA, 1201 bp, Cannabis indica
agccttttggagttgtaacttctggataattggggtcttaaccagcttgcatttttatttttgtcttctgatcctttcctggtgctgatccttgtgttcttgtttttagttcaagggagaagtaacatatgagctaaaagaccaagccttctgctatacaattgtgcaagttcctacggatctttgttcactgtcagcggttctaacaaaatggttatcagaggttgaaagttgtaaggtattatcatgatagacaagactaagaagctgaatttccttatatataaactgagataaacagtccattgcagctgcacataatgcatgctgaaaataatgtttgctttctcaagtttacgaaatcttattgattggcttgtcacattttttaatattgttttgataaaaactaagaatgttcttgtttttcctgaattccgacctgtgaataaatttctgttctggccttaggtgtggaagtttgatgcaatgtatgatgcggtcgtatttgctgttaattcatgcgaaaagttgcaaggttgctgtggtgcagagcacacactatgcttacaaaaaagaatactggattatttcaacgaaactgataataatgatcatcctaataagatgggtcaaagcaggtttgtccagatcttacctctgacagttgtagtactactactaacaccagatgatgattcatcatgaaagctattccacagctcttcatatactcgatccttttttattctttaatcttattatcaattgttatatactgatagtcttatcattcccatgcagcccatttttgcgagcagatataaaagtaagaagcttttagcctataatccatacttgaattctgtaatcagcaggtcactagtgattttaactttaacttttttttttgtttttgttttggaataacaggtatttctgcagggaaactcacaagtaaaatttactcccagatctattgcaaggataatgcatggcattgcaagtccagcttatccatctacaatgtggtcaaaaactcacttctggtaccttaaacaaagctatatactcattttgaatactagcccctgaagttgatctgatatgaaaggcagcataccactcattactgttaggtttagaaagtaggattagattaggataaaatcaaattatgaaatataaggaacaaagaaat

SEQ ID NO: 328125 - DNA, 545 bp, Cannabis indica
actttagaaactcaaaccgtaaatttttttaaaaaaaaaagtaacatagtatatggggtaattcccttttttttatacattaataaaaaaaaaaactcatattatattttattaaacggtataatgggaacatcatacataaaagtgggtatatcttaaagaatatgaaaataaaagtaaaaattaaaataaataaagtaaaataggtatgcaatgtaattttctcatgtaaaaaaattaattcttgacttaataatggcctgaccaaagacgcccatctcattattcctcataataatactgattatatagttatcattatatattaatattgatctattgagtaaacaacacttaattattttagttcatttttataatagacatatataaatattttatgtctaaatgcatatttaaatgttgtttgttttttttaaaaaaaaataattaattaatttaaagtatattataattatattttgttataaaataatataatataatatagaatagatgagaagaaagaagaagaagatgaagag

SEQ ID NO: 328126 - DNA, 863 bp, Cannabis indica
tttttataaaaaaaaattatatttttatgtttaaagattttttttttgttacatttttacggttttctataaaaacaacaagaaaataacaagaaaactacataaaagtaacatgcaaataacatctaaataacatcaaaacaataacaaaaaataacatacaaataacaaaaaatcaacaacaaattaacaagagtataatataaaaagatcgtattttttgtaaataaaataaaaaaattgtaaaaatatttaaaattttgtgaaaccatatttttgtaatttttttttattgtttttgtgtatttgtgaaataatcccataagactaagacacgtggataatgacttgacatttaatggtcaggtacctactaaagttttagaaatataacataggtattaagattgtcaaaaattaaacataaatatttatccataactaaaaattaaatttatatatttacgccataaattactcttataacaatagttgataatagcatttgatcaaaatggatcatcacttgctcaaaaatttaatgagaatgtcattgttattagcatttgataaactcaaatattagtgataaaaatgatattgattgtttaaaaagataatgatattattattaatagtaataataataacttttggaaaaaattgtactttggtgcctaaatcttatcagccatatattattattaatttgaaattagattatgatgaaaatgtcatggagtgaaacactattatttaattggttggcatgaattaattatgtataattatgattttgatataattacgagtttaatttgaggaaattatagtaatgaccctaaattatagaaatatgttag

SEQ ID NO: 328127 - DNA, 648 bp, Cannabis indica
gtcaaagtttgagagaaaaaattactaattagcctttacattataacggacaaagagcaaagtttcctactaccaattttccattcttttattccaaaaaaataaataaataaagcaagtagtttttaaaaacacaaataaaaaaatcttaaaatttctgctatttataatttattttaattttaattaaatgaaatattattattaataatcttttatttaataatgataataataaatgatatgtataatcacaaatttgaaaatattagattggatcttatttggttatgaaggttagactaaccctatatttatcaaaaatgaataaaaagctgtgttgttatttatcttaatagaaatagaagtaataattcatttgagttaatgtatgactcgaaacactcaaagcacaagagaaatatatgagggtgatgaaacaccttacaatctctccacactattctatttattttctcgttagtttttattgttttaattctaatttttaaaatatatatttattttttcagttttaatttatagtatttggtaatatgttgtaacgtccccgcttcaagcctctattgggtccttacacccacagaatgaatggctctatacacgagtacgccactctggctgctt

SEQ ID NO: 328128 - DNA, 1233 bp, Cannabis indica
aagagagaggatgagagggagggtttaatgggggtagtttaggaaaattaggaaagttgtcacatagtgccaattttaataactatgcatttagggaaaaaattataagacattttaaacatggaatttcaaattttacaattccccctcccccttcctcctctcacaaaaaaaaaaaaaataaaacaaacaaaaaacttctcttactatactaatattacgatattatattgttaaaaaaatattataatattataagttttaaactaacttaattattaatgttaataaatttgaagaaacaatattaataactaaataataaaatagacaaagataaatttgaaaaatttaacatgtcgaaaacaaggttcaaagagtcaattgtacgcgtaacttttttattttatacgcatgtgaattagacgatttgaacattgatttctatattgtaaattattttaaattttttaaaattttgaaagatgtcttaaattacaataacgtacacaactatacaaaaatttagactaaaaaattcctaaagatgctgaaacagttagggattacatcagtacacccattttagtgaggtgcatgtaaaatcaccctataatcataattatgaataatattaataatgtgatgaattaaaaaaaaaattcttattttatggaactttttccaataaataaattaacaagaataatatacaatcacataatataatttaatattattagattttgaaataattttttttttaaattcttatttattttattaataaattttattttttctattatactaaaaaaattaaattactttcttagttgtatatagatattaattttgaaatagtttgatttaatttttcaaaaaaataatattttgaatttgtactactaataattttagccagccacacctatatgaaaaaatgtttttattatattctttaatacggtaggcagaacatcaatcttgcttttttttttttaaaaaaaaaaaaaaataatttattaatgaacgtatggggctttttaattttcctaattaattagcatctttaattggacaaatgaccttatactgaaaggcaaaaagcattcaaagttcaatacaaattactcatccgcatcataccaattgaataataattcatttatgagaataaattcattcgtgtgtatatatagccatagtttacaatgtggcacactttaccgt

SEQ ID NO: 328129 - DNA, 1230 bp, Cannabis indica
tttttttttattatcttatcttttttcttggttttcttcatcttcttcatccaacttaatccttacccctatgaccttgatctaccacaacctcatgacatgcacggccacactctcgctcttgtcaactaggtagcaaaaaacccaccacccaccaccccatcctctcaatctctccttgtcactgagatctcaccctctcaatctctcccgtcgttctcctttagatctgacaaatcgtaccaatgttttcaccatgacaacaaggtctttgctcgtctccggctccaacgaccacgacagcaaggtattcattcatctctggcttcagcgagtttctgactactaattcctccagtcgaaggccaaggcagtaccaccgactttctcagtcgaacccacatttgcatctaaatccctagtaatgggtttgggtcttgggttatttgttgttgtgattatcaatgattgagtgaggaattttgaccactgaatgtatttaaggatttttgattatgagatatttgttattgtttttttgttctcggggtggtggtcttgccggaattggggtctcattggggtttgggttttttcggtggggtggtgctgggttttggggtgggagttagtaggtggtgggttttttagggggtggcttctggaaagcatgaagaagaagaataagaaagaaaataaaaaaaaattaaaacaatttatttagttttttaatttaaattatttaaattaaactaataattcgaaaattagttagatatttgaatttaagttagaattgaggatatttaggagattttaaatatttttcaaatattctctaacaacctaaattttaaattctagttaagatatattttaaatatttcaattttaaaatagaaatatcttaacctactttccagttatctattacatgtttatttgtaatgtttatttatttatatatttatttattcaaatttttttacaaaccttttatttatttgatataaattgctatgattaacttgttgacagatccaatgatcttattttaatcatagtccaattgtcaatagatcttataaataatttgtaatagataaaatttgcaatttctttcatctgtgtaaacctagtaacatgatagggcacatccaaatcatttgacctgtgtgagcctatgtgcttgcttttgggcttagatgcatataagaagcccatttaagt

SEQ ID NO: 328130 - DNA, 1665 bp, Cannabis indica
tgaataatttatattaaatataaaaaaaatcattattcatatatgaggttgtggcttgtagctgtacaaagaactaagaccgcttagctattaataaaacaattagcaaaatattaaagttatagaatctttaatcaatggttgctagtagagttgactaatgcacattctttagtgcaagtaatctttgttcagattacgaatgtaatgagacatcaaagtgaaggtactgtatataatatgattatataagacagtgaccgatatgaatacaactatctttatcaacatgttgttgatcataaagatctaattcatatcataataatgatcaatagtaaagcggcctaaatcttgagttatcataaactcatgttcatgttattggtttctttaattaactcattaaagtttctcagagaagatgattcttaaaacttcttatttgggaatctaataatatggatgactatggatatgatgtaaaattaaatcctaattttcctaacggattgaatattggttccctttaagtgttaattctagaattgtaatgttgtgcacgaattcagatgggatcttccattatacttctactagtaaattaatagaactagaggtaaagaagtaattagaagagataaaacagtattttgaccaaaactcattacaaaccaatatatggagggctaatcactggaattgattatattaatagacactgtagttaaacttagtaaatataattctataattactaagagtggaattccatatttattgtggagtaatagtggaactaataaacaagaaattattttgttgatgagactcaataaataatttagtttattagagcttatatttataggtccatagaacctgaattgccaccttaaaaaatggtcaagggttggaataaagagttcgaagaaaatctattttgaattagaaaaataataattatttattttttttttaatcaagaagaagaggaacttcattaatcaagtcgccaatacaaacaaataaacttctccaagagaagcacaaccacaaagcctactagttacaaatcaatctttgtagtaaattcttctccactctagtacctttcctatctttgatcaataagagcctatacttcacatcatttttaattttgttcactatacaaatgatagaattagagtaaaaagagaataaacaagtgtttcggttactccataagtggtaaaccacggctgccaataaaagagttctcacactatccacaatgttagaccttgcagtgcccaaccaaaccgtccagctatcaaagttccttgaccaaccatcaaaccccagccaattaaagagcatagacagcacctgttgggaaaagatgcagctgaaaaagaggtggtggtggctctcggcttcactgtcacacaccacacaatttttgttggggatgggaatgttcaaacggctcaacatatcccttgtcagaagcttggattgagcagcctgccaaagctgaaacgcatgttttggcacatttagcctactccaaattgccctagcagccgagaaagaatcctggtgaagcatgcttctgtacaaaattgttaaatagggaaaaagataaaaattgttaagataaaatttgtcgagacaagattt

SEQ ID NO: 328131 - DNA, 685 bp, Cannabis indica
actataacataaattttagaatttatgggacattaataatgtctttctttttatttgatttaattatcaaacattacatgacatatatatatatataattatgattgttgaatcctctttaaaacaacaaagagctgaactttttggttgcaccaaagttgaagcaagtgagagtggtccaaatgcattttggtcaagcgtgtgaagagttgatcaacaagtagtagggctttattattagtattattattaaaatgtttaatgaaattgccctccattacagctcgcacgtgcttcatccacacgtgtatcatctcttctacttgttccatttctttattatcaagccaagaagatggctttgaaagctccaacctttcaatggtgaaacaaccatttctttcaaccaaatccttcatatcttctggacttgctgagttgtataaaggcatgttgaatgagtccacttcactttcttcaatcattccctacaaaataatattactaaaatgttgatccacacttaattttagttaattttgacttaattatatacccctattaaaagaatctctttttattttaattttaaatagagcattgctataaggcactagttgtgcctagcatcttctcgacatgttgcgttgcgattgactagtgatactccttaaaagctattata

SEQ ID NO: 328132 - DNA, 1025 bp, Cannabis indica
aatttgaacatttttgcatgaaatttatagacacacctgtcaaataattaactttcacacaatatttttttttttgaagaaaactttcacacaatattaatttctaatccaacaagttttgttttatttataattaataagataggactatgcatggaagaacattgggaatggccgatattaaaaagcaagtgttttttggtcaaagggagcaaggattctttaagccattttaagctaaagtaatattttcaaaggcattttgggagacaaaatcagagaagctatcacttagaatatgttatataatatattttatgtatacatataatcacatagtatggtaggatttaaaaaaagctctagtactatcattttcgacctaccatattcccttcctttcttctcacaaggagatatagttattatttagttaatatatagagaaaattatggctctttaagtttgaagtattatttgttttatttaattatttgagttttaggttatattataaatgaagctgtcatcaatggggaaccttcaaaaggtttactctttatctagaataaccccactcaactcaagttcacctattgggtttgggtttccttctaagtctcatcaattgcaatgggccgagtaagaaaggccaaatatttggaggaccaaaagcaagagacatatagtccataatataatagtttttttttggaataatttgacaaatacacaaaaataacaaaaaaattacaaaaatatggtttcacggaattttaaatatatttacaatttttttgattttatttacagaaaatacggtctttttatgttgtattcatgttaattttttgttgattttttgttatctgtatattattttttgttgttgttttgatgttatttaactgttattttcatgttacttttatgcagttttcttattgtttttgtgttatttttacggaaaaccgtaaaaatgtaaaaaaaatcattaaacgtaaaaaataatttttttacaaaa

SEQ ID NO: 328133 - DNA, 822 bp, Cannabis indica
tatctttctctccctatctgatcaatctccccttgtttattttgcgtggctccagagtgaccacggctgggttgtcatggtccagccatggcttcctcaacccaagaaacccaaagccctaacctctctctctcatctctctttccttttttcctactgcgatggtgctaccagggtacgatggccgctctttgactatggtggtccaaatggaccacatcataatgctcacaacatctggaaactcaaacaacagtcggttcccctttcgtttctcgcaaccaaagcagatggttcttttttttgcaccctcacgtggcccaggctccgcacgactcattcgtctttggtcttcttctcaaatgacagactacccagtctcgttgacgagccaaatggaggtcactgccacctaaatttttactgggatttaataggaaaatttgttaaaatatacttaaaaatttagactattcttttaatataccacctttaaataaatattctaaatattctccaaacaccccgaaactccaaaattacccttacaattcaaaagctcccttctcccactctctctgtctaacttcccccctctctctctctttgttattcccatccagccctaaacctttcaagccccctgtcacgagctccgactgaccaagatgacccacgaccgagaagacccatgacgactcgcaacgacccacgacaagcacccaagacaacccacgactactgcattttttttttctggtttctgacccatctagcgcttgttttctgcattttttttctggtttttgacgatgtcgcgaa

SEQ ID NO: 328134 - DNA, 1305 bp, Cannabis indica
ttagtcttttccttttagtttctggttcgagccttgccttttagcatgagttgtgtagctcagaatcatcatggtgctatggtagaagcattcaaaaagggaaagattggatgtgttcaacccgaaattactgagataataggcagtaaacaaacattgagttggattgcaactcattcgtgggatagagtcatgttggaaacaaatagcttggtgtgtgtccaagcgattcagagcgatattaatatactttcacaatttgtgttttgtaaaacgatctgcaaataagttggttcattgcttggcaagagactcttgtttctatactagtcgtgtgctttagttggaggattattcctctgaagtgcattctattcttttaaacgaatttattaattaatagatcttataatttttattcaaaaaaaaaattattacacttaaatatttaacttttattttttatataaaaatttatttaaaaattaaaaattaaatgtaaactaatttaaaatctaataaaaattaaaacaacaattataaagttaatttttatttaagatattacacatcacactagtgaaattagatgacaaactcatcaattaaattatgtttgatagtcctaacttatatttttttttctttttatgaaagggggttgacagagacacccaaatagatcgataaacaaaagattacaatggcaaaactaccacgaaaccaaaggtgaacaaaaaacttaaaccaaccaactaacagtcaaacaaaaacaaaatgaaaaagactcctaacatctccaccatctaatgagctaaacaacattaatatgccactccaaataatcatttagcaccagagaattcaaactgtctagagaaatagattctatgtcaaactcataattaaccaaattgaattgtatccttttaatagtagttcaaaaatagcaaagtaataaagtaaaataacttagatcaaacaaagttgagagctaaacacttatactaatcaaaattaaatttataataactcaattcagatgaagactgacatcatttcaacctcaaatttaagcaaaaacaaaaaaaattatttgcagtataaatacctcatgtcttcaaatttatacacttatataccattttgtttttttacaaattaaatacataaagttctattcttattatttctattattgtcaatttgttaagtattgattggacttgttatgttgttatgtgttatgttctcattggttcatcttattttaatatgaaaaaataattaaaaattaaaaaaaaa

SEQ ID NO: 328135 - DNA, 886 bp, Cannabis indica
ctttttgttttattatttttgaacaaagatttatatagtcaagctaatttagttgaggaataactaacttaactgaaactcttataaaacccgccaagaaaaacaatcctaagagaataactaacacctagtcttgatagtcccctcaaggtgatgtgtagatgttgaatacacttatcttggaaactatattgttgaaagacgagggtaacagagctttggtgaagatgtctgctaggttttgttgagattgaacatagaggagtttgaggatgccttgctgaattttttctcggataaagtggcaatctgtttcaacatgtttggtgcgcttatgatagacaggattttcactgatgtagatggcaacagtgttgtcacagtatagagacgcaggttgttgaggaggatgccaaaatccttgagaagagcaatgatccaaagtgacttcagaggtggcatttgccatggctcggtactcggcttcagctgaagagcgagagaggacttgctatttttttgatttccaggagacaagatcagggcctaagaagacacagtagccaaaaattgaacgtcgagtgtcctggcatgccccccaatatgcatcagcaaagaaagatagctgaacgttggagggggacaggcttgtttcagcataagctgagatgttgggagatgagtttgatgggaaaaaaaggcattggccaggagtgcgttttagatattgtaggacacgatgtgtggcctgaagatgaggcacccgaggacaagtgagaaattggctaaggtgattgacggcataagagatgtccggtcgagtgatggtgaggtaaattagtttgccaataaggcttctataggtggttaactgttacaaaccgta

SEQ ID NO: 328136 - DNA, 797 bp, Cannabis indica
gttagatcctcaaaagccattgcatgtcttcttctttgagctttgttgacagccctaatattctaagtttactctcttgctgaatcctctgtactatcactttggtacgccgtagtttttgatgccaaaggacttcattccgagccctccttatgtgataaaccctcatagcccaagtttgcaaccttagttttatcttctatattaatatatcttattattattaatattatgattgatatttacggtaagtatttgattgcatatacttccatactgaatttactaatcaattctctgacctcgaacaagctatcaaaacaatgatggagatgtggatggttatgtgtgactcacttagaagtttggcacctgtatagcgcaccaaattaaatgacccacagtttctgtataagtattttccatcacaatatgtcggtgatatgtcttctcaaagttacgctgctcatcctgaccttcatactcaacctcaatagttgtaccagttattagaatacttgtatttatcgaataaaattaaataatttattttgagataaatgaatattttatattcattgaatctagacaaaattaattaggtaatatatatatggtcagatttcgatattcattacccgattttattttctaattaattgtcaaaatattttgataattgatatggcccagatactgatagagtgtctcacctataaatataaagtctcgttcctcgagctcttcactaattctgtgcaaacaacaaaattctatctaaagagagattgagagac

SEQ ID NO: 328137 - DNA, 693 bp, Cannabis indica
ctactgttgttttgagttgtttgctttgtgttttactggtattttataaaaacacagtatttttgaaaaaatttccgtgtgacagtatttttgtaaaagttaacttaaattccaaaatttttgtaagttttcctttaaaataaaagaatacaatatctaaaacaaaaactaactaaatatacgtgcattgcacgtaacaattatctagtatttaaaacaaatgtcttgactcaaatttaatataattttattctttttacatttttttttaatatcttaatcttaatatcttattttattctttttaatttaatttaatttattatattctttttaaatatcataatctttttatattttaaaaacaaaaagtatatatactgtacattagagcattgtaagtacgattttatttgagtaatagcaatagccatggacctccgaataacaatgatattttttctttctcaatcttaatttccaagaaaaccaaattaatcatgtaattatataatgggaatatactcatttagtacttgtgtttttatggaaaatatatttggtaccttatgttttcaataatacttaattggtacctcatatttttaaattgtacatatttagtaccctaaaataaaatttaatcaatacagttttattaatttaaccaaacagttctcaattatatgtaat

SEQ ID NO: 328138 - DNA, 1231 bp, Cannabis indica
cacttcgagctgagggcgcagttgagtgcacacaagagtcccaaggcacttaggttgctggtggggcccctaatcctcctactgttggtcatggaaggtggtagtggctcgaccaccgatcagaaacgtaaggcaccatttgcactcggtggctcaggtcagaataagagattttgagggaaccagggtcgaggcaaccgtcagggtggtttcgaaacccgatacacttagccagagtgtcccagttgtaagaagcatcatttgggtgagtgtagagggcaaggatgtttccagtgtgggttgccaggacactataaaagagattgcccacaatttaagaaagaagaatagaaggcaactacaaaacctgctccagcaaaggtgttggctttaactcaggctgatgcagaagctagcccctcagctattacaggtcagctctcggtcaacaactcttacttctctgcattgtttgactctggggccactcactcttatgtggcagccatgatttttagtaaattggatagaccgcatgatagttatgataaagggtttggaatcctactgcctggcgaaaaattagttatctccaaaaggtgggttaggtctatgccgatcagaattgaggatagggagttgactgctgacttgatagaattgggtttagcagattttgttactatacttagaatggatttcttatccaagtactcggctagtattgactgtaaacgaaagatggtgatatttcaacttgagggcaaggaaccgtttgtatttgtggggtcggttcagggatctcggatacaagtgatttcagtattaacaactagagatttgctacaggacgaatgtataagatttctagcagtggtatcggataccacacgacttgagacagttcggccagaggatatcaaggtggttcatgaatttccagatgttattcctaatgaaattctgggtataccacctcagagagaaataaatttcattattgatttggcactaggagcaggaccagtttctaaggtaccttatagaatgactccagcagaactcaaagaattgaagattcaacttcaggggatgcttgacctagggttttcccagcctagtgtgttaccttggggagctcccgtattgtttgtaaagaaaaagatgtatccttacgcatgtgtattgaatactgggaattaaataaattgactatcaagaataagtatcc

SEQ ID NO: 328139 - DNA, 3740 bp, Cannabis indica
agttgtaaatgagatataactcataaaaataacattaagctacatgcaaagctgaatgctaacagctcgcattttgtaggaaattattaaacgagacaccaagatgccttgaaaaaatacttaaacctaaaatataaatagaaggtctaactattcatataagcaatcaaaaatatacaaagtgatgaatcattaaaagtatatctaagtttgcttaaaacagattacaactgtttatgcgaagcagaattgataattgctcgcaaatagaaagtatggcagataataactgctcgcgcatattgtagattactaactactcaaaataacatcaaaggaaaataagagcaatggaagtgcttcaagtgttttaaatttgatcaaaatataattgtttaagttgtgaatgaaaaatgcaaacaagcaaatatatcaagttcaaatataaaaatatgaggcattcaataacaggtaaaataagagcaaagttggccatccaaccttgtaaatttgtcattacaaaagtgccacaaaaagcaaaccattgtctcggccttatggccattttcctaaaaattaaaaagaaaaaaaaagtgaatgattaaaaaccaagcctacatagtaggagacttggatggttcttctccaataacttctcctgctatctcggcttcctcttttacctttttagcttgctcgcagtaagcaaggacttccctcatggcctttcttaggaaactcaaattcatttatggattcaccatccaagctcgatagatgaagcacatggaaacaacattgcattactccttggtgtcagcctctttcgcctcaagcactgcattggctgcattgagttcctcctggagtttctggcatagctcagacttgtccttcgcctccttctgagcagcttcaagctcagctttttggccctcttcacctcctcaacttccttgtttaagtgagtgatttctgccttagcgtcattccattccttggacacagcctcgcgctgactaatcaccttctggatctcgctctccaggtatttcatcctttccagaccctaatgttgggcaacgaaggagatgcaagtttaatgaaaacaaataaataaaaatgcataggtattttttgagattgttaaaaaaagaggtaaaacgagaagagtatagaagcttaccgagaggccaaaggcgacactcctctcgagcatctcgtctaagtggacattgttgattaagtcctagtcgttgagaaggaagggtcagaaatgacgccaacaaactgcagtgtactttgtagtatactccgagccagccctcccagcctcgatgcgcatagtctcaagtgcttggctcgacgaggtagcagcctgatttgccttaagaatgggctctttagtatgcgcgggggccggagggtgagtctaaacctggttctcaggggcatcaaggtcaatggactaaaaggctcgcttcttgtcggcagttgtcttcttgggccttttgagaggctccacgttgacattagaggaagtctccgaggcaattaaccttttcttaccttttttgctcgaggaatgaagaaggtcttcgagatccatttcttctagacaaaacaatgtgttaacatttgtttgaaaacaagaaaaagaagttgggaaattatttcccgcctaaggagtttaccataatcataagaagacgaagaatgaggacaataatattcactaaagtctctacatcctgtgatcttgaatatgtcgtaggagttaattggttctaaatcccaactcgaatctatatatcctaacctatccaacatggtcccatactgctcggctatcccatagtaggagttagtataactaatttggacgtggaattctgggtaccaactatcaaacctatgtacaatgcgatctatgaggaggggattccaggtgtagaaattataacggctatctcgaaaagacactaatgtagtatgctcgaccctaagcactgtgggtgaccaaccacattgattacctcgggatgctccttctttggcttcccgagggactgcattctggaggtagtgtgcccaagccgcatagtcctgggtttccctgctgccacgatgcatacttaggatatttataatcactagtatactcgttctcaacaaggaggcccacagacctcaagttaacctcgttcagaaagaattcagctgatcgaagaccatatggaagacccaataagagcctgcgtcgctcagccatcttgggagtaaggattggtcttttcgagaccgctgtcaaaataataagattacaagtcagcgagacaaaaactaaaaacatggaataatttaaaacaatgtttattgcaaatagtcacttacgtattatacgaaaagtggttgtgttgattggggagaggccaatcgtctagaagaagtcatctttgaaaagggttttgtttggtaacccaacaatgatcttacgatcgcctgtgtgagtcccaagataataaaaacctcctgcaacattcttcctcgcaggaacgaccttgacagagtagagatactctatttccaggggagtggggcactcccatcctaaaatcttgtacagaaccttcaagcttgtaaggattctgtatgaaataggaaccaactggaatggggaaattccaagatggttaaggaaatccttaaactaatttcatggggggataatttctccggccctgatgtgttcgaggctccaagtgcctatccctgtcgagccactcgtactcgccttgccacttgtcccctcagatgctttgcgagtgagtcgttctggtgggtaacaactaaactcgccagcaactactaatctaacccatcatttttgcttgtattcaataccacaagtccttaagatgctacctacgtaatctctgatggctcgcatcctcgactcgattagttcagcctcgaaggtgacattagggtcttggggagtctttgatttacgtggcttggaagtcatgatttcaaaatccaggtcacctggttcaaaagcaatcatgactctgggtaaaaataaaggcctgggaggttcatgccaagtagcatctagcaagaaacgacgtttgccttctgttatttcttgcaagaagcgcctttgcgactagcaatattgtcttggtgggattttactaagtggtccctcattattgcatcatttatctctaatttggatttggattttgaaattctgggttcatacgtgatggcaagttcattggggcactttgtttctaaaatttctggacgataaacttctgaaccagattgggacattgttacaaaaagaaagcaatctcagttcctggatgaaatttatcaaaccagaatcttataaatttgagaaacccaaaagtctacggtctgcctaaaccctgaaatttacccagaaaaaattcaacctaaaatcgctaaaaccaaataaggtgacaaaggtgaaaactaagaaagtagtgatcaaacccagaaatgtgaaacaaaaagcatataagaaaatagagaaagatgaatcagttactgtttgaagtcgggttttggtgtaacaaacggttctgcaatcgacgatgcagcgaacgacgtggtaatttctctgaatgcttgaggtcgaaaaacaaatctgacgaaactcgcaagaagtatgtcaaagacaaagatggcatgcaaagcttcaaaaa

SEQ ID NO: 328140 - DNA, 1567 bp, Cannabis indica
cacagaagaattcatcaacaattgcaatgaaaaatgcttggaagggtaatgtttgttttgtgtataagtaaatagtttccatagtctaaatttgctcaaatatacaagcatgattttggcaacctcttgtagagctttcctaacatgattctgattttttgtccctagaaaatttgaagtaccaaagaaatggccactctcttctaacattgcatgttttgaggatctttccatgaaccaagctgggaatgactttatagctcattttcagaatttaaggatcaatgagagctcattggtgatgaaattctactccctttcgaattgtgtagtgaatcacttgttgtctgaccgtgatggtagagaactcgatctccctttcgaagtaccagaacgagaaagagagatcatccttttccatggaaatacatttatattgggacggtcgggtactggaaaaactactgtcttatccattaagttgttccaaaaagagtatgtgcaccacctgactttagaaggactttatggagccaaccgaaatgggaatggaaaatttaacaaaagaaatgctgttacaaggaactcaagaaagaccacaggaaaggctttacgccagctttttgtaacagcaactcctaagctatgcgattctgtcaagcaatgcatttcatacttgagaaggtgcgtaaaaacattcatgaagaagctagtttttagtattaaatttgtgtgaatggaatagaagttggcttttgattctttgtggtaaggtagttacttgcctccaaatgaaattgatatccatatttacctgaaaatttactaatttatattgggaatgaacttatcaaatttacataaccttgtcttgactcatgcctaagaagtatgaatttatgcaaaaatcttggtatgatgaactaactagtatcacttttctatgtctccaattgtatgattaaaatcatagtcatttaacatttccacaaatttccttgcagtggtagtagtaaatcagctgaagacaatatgattgataaggataatatcgatgatgaagattcgggaattaagaacattccagattcttttcgtgacattcccgttagttcataccctcttgtcataacattccataagttcttgatgatgcttgatggaacactgagtaaatcttatttccaaagatttcttggtatggatgaagtttcccaaaatcaaatgcccagttcaagatcacatatgtttcattccttcttaaggaccaaggaagttgattttaagagattttgttcacaatattggcctcgttttgattcccagttacgaaaaagcttgatccttcttgtgtctttactcagatagtttctcacatcaaaggcagcctacaagctttggaaacaaatgatggtaaactcacaaggaagaactatgttatgctgtcaaaggaatgtggctcaactttaagggggaagaaagagagatgatatatgacatatttcaggcttatgaaaaactgaaagttggaaaatgatgcatttgatttggctgactttgtaaaatg

SEQ ID NO: 328141 - DNA, 1124 bp, Cannabis indica
gtctaataaaccgccccaaactactaacatactaagttgtgatttctactgagccaaacactgagttccaaaataccgggcaccgaaaatgcaaaatatgaaaactactgaatgacataaccatgcatttctgaattccataaataacagcataataaattatttaaatagctataaataattttcataattaatcataattaactgctaatttccaaattaaactaagcgggctttacacaatggtctagttagatttggcatttgagcaattgaaaccaacgcaccaagttgattgtcaacttgggtgttgggcccagcactaggtcaccttggcactaggccctgtttcgagggtcttaagtttttattttatccttgtgttttcttaaatcttcattatttctgatggcgaaaaaaattctctaacttttttaagagcattattggaaatggcccaggttgacaatatgtcaacttgggcactaggcccagtgctaggtatcaacttgggcattgtgtccccattttggccctttgaatgttccatttggtctaaaaaatagttgaatcttagtattttaggaaaacagagaatattttgggaagatttcttggaaaaaatcatcgaaaatcaacctgggcactacgcctttcttttggcacctaaaaagtgttatttcttccccaaaagtacctatttccccatttttcttacaaagatgaagaagatgcaaaagtcaaatcgtcaatctgatacttggaaggcatccaaattgacaaattgttaacctgggcgttgggtgcctgggcactgggtgttttgggtgctcaaaaataaacttgctccgaatctgattatgatgcctcaaacatgtccatggtatgcctagttgatgtcacaatgcaagtttggacccattttcactaagacagtcccaaaaattgaaacccttgttgggaatgtcaacttgggcattgggtcaaaccttaggtgaccggattgccttccgaagtgcaggttcgtgttattttagctcccaatggcttggatttgattgctccatgtcttcatgatgcagaatgttaattccattttttgcatatttaattgacaaaaatat

SEQ ID NO: 328142 - DNA, 652 bp, Cannabis indica
gagtatcactaatcaatcgtaagacggcacgtcttaaaggtactaggcactactcgtgccgaataataatgctcatgattatatccctacctgcctgttccaatatttaattccatctgtatatggatgaaatatcaactcaaggtcggaggatcacttatatatttttttttcattaaataccattttagatttgttttatatgcaaaagatatatttcagcattgctacaagtcattttacatgtattaacgaatactaacttgatgtggtgcattataagcagttaaaaaatttcttatattaattgttaaaacataatgtgtgagactctatatttatcatattagttgaattttttaacttatcaaataagaatattgttatttgacatcttaatgtgtaacaatattaatatgatattttattatttagtaattttttatattatttattaaattaaaatgtgtggagctcattattaaaatacacctataataatttgtcacttttgtagtacttggtaccttagcatctctaacggtgatactttttaatagtgtcaaaaatcttcatatcacataaaaaaaaaaaagtaatattttattcaaactctcttattatttttgatatttttttgttctaaaatatt

SEQ ID NO: 328143 - DNA, 1143 bp, Cannabis indica
aattaaaatttttttaaaaaagtctttagaacgtaaaaaatattaaattttttacaaattaatactttatgtaattatccctatattaaaacacatataactaccaaattaataaacaaatatcagtactcttaaatctacttaccttaaataataaaataaaagaaaagaaaagaaatactaaaaaaaaatctctcttctctatattgttcctaaataaatttcatcattttgttgctcgttgctcgttgcttgttgcttgttggtcacctttgttgctcgccgatttctaatagttgcttgcaactatctgattgaacaagaggttatcttaattttcttatcttctctaattaaaagatttttcagtctattccttattttgatttatttatattattttttttttttgaaagagtaacttttcaatagataggcaaataaacacaagttatacattacaaagaaactaaaataacactattccagatcaactcctcatcaagctctaaagccttcttagccaaattatgaacactaacattacattgcctagatacatatctaatacaagctttcaaagaatacagataaagagctattaatattctcaattacatcagataaaaccgaaagatctttttccttacttctaactaggtaatatagtcgctcttcgcgcggctatttaattttatttttgtgtaataataaaaaaataagtaattatcaatataataaataataacttaaaaagaatagtctaatagaatactattaaagttatattatctaatttttttattaataataataatattttatttattagaaaatattttttttattaagagaattggaaagttctattatttattgattaaaagtttaaaatttatacaattattgtatatatagaattttaaattattttattataaattattaatataaaataaataaatagggtggtatagagaaaattaaaatattattattcactacaacatttttcttaattagcagcgaattatttaatcaatattaattttacatctcgatcattcaaactcgttgttattattgtatcttaaccgttatgagtactgtatccaacttgtagttgatactattgttattccc

SEQ ID NO: 328144 - DNA, 1182 bp, Cannabis indica
tacttatcttgaaggcagcttctttggcgagatactcaaaatataccctcatatttttctgtaatattggaaatgactaagcatatgagatgctaattgaggtgttttcttctacttttttttttgtccaagataagtcttaagatagcatttaaaagtgaatcttttgtgctcactagggtcagccctctcacgtcgtttatgagcattctaagatgaatcgtcttttgctcatatcccttagtcttttaacatactcacaagtatgtgagtcaataagttacaagttcttaaagaactcgttatctactctttccagttgcttatcctttcgtattctataattgtcttgtttatctcggtcaagtccgaagataaactttatgatgttgttatcttgctaatcattgtgtttatttattttatcacttttatttgacaatcatattataaaatacaatgcgagacaaacgtatcattaattatagcatatcctaaggtgagaaacatatctcattccttacatttatagttacccataattttttagacttatatccacgtgtcatgttcatatttgatgcttgaaatatgagcgtaacaattgccccttaaaaaatatttttcttttgaaaaagaatttttaattacattcatcatttattatattttgtgtatgagtaagtttcttgagttttatgacagtttttgtcttcctaataaaaagttaatcatgagcttttgcaattaatgtttgtcttcttaactaacgtgtcagttaatcactcttgatttaatttttctttaatcgaagggtgattacaaaattattataagactagcattttaattcaaacacgattcatcttagaatgctcataaacgacgtcttagaatcaacactactaccttcaagataatacgtaagtatttattaaaagattattattattatatttttcttgttgaagttttatgcttgatattcaattctatttacttttgcatttatatttttcaacctttctaaaaagacaaatcccaactactgccattcaaaggcgtcatgagcttttgatgaatcttccttatggcttacaagcaacgaattttcttcttcatgataaaaatttactggcttgtggccttctcacaaaaaaatcaatggattatggatataaa

SEQ ID NO: 328145 - DNA, 617 bp, Cannabis indica
ctcctagttttttttttttttttttgtaattattatcattaaaaaatatactcatcattttgaggctatatagatgattttctttggtctaacttaatcatggctagtagtagtagctggtgaaagtggggacatcatatgtcttaagaagtacacatttttttaaaatttttttttgacacatattggttgaaaggatcaaatatgatacaaaataaataagcttgtgaaaagcttttcacttatggaaatgggaaaggaaaaaaaagggggtctccaagtagatgataaaaaatgcttgtgatgtagaaataaagggaaatatgattcttaaaaaagctttcaagttttggaagatccaaagataatagagtaatttgcggcaaaaccccctcaactatcaatttacttgcaaaaaaccatccaacctcatatttggtgggaaaaccctccaaagtactgtttcgtttacatttttaaggtgtcgtctatttagcctcgttaagtcttaattttgcccacgtggcaatgacaggtcaataaaaaattatcctacgtggccatattttacaaaataaaaattaaaataaaaacaaaaaatttaagagtaatttgcg

SEQ ID NO: 328146 - DNA, 539 bp, Cannabis indica
gttaaatgttaaataatttaaagttcaaataatttagccgtcaatatctttttgttatttaagataattaaataaaatataaactgaatatataattactgccaaataaacaaactaatatgatttctatgttagactactcttaagtaatgttataatgtttaatatgatcttattagactcttatctcgtatgctcatcctatttggttcattttaatattttatgttaaagaaaataaaaattactataaaaaaaaagactaatattgcataaattatactattagtttcattaaaatataaagaaagtgcaaaatagagtgtaaaatagagtgtgattaacaatttaacactcttcatagatcaatagattattaatgaactatatatatacttgatgttacctgtaatagttaatttttttaatttagatttaattagataatgttaagtaaaattttatttcttttagttagataatatatatataaatatatatgttttttttttaatttttgaaataggatttaagatttt

SEQ ID NO: 328147 - DNA, 790 bp, Cannabis indica
ataaaatattcatttatcagaatcaataatattattttatttccttaattagaaatattctaatatggtcgtgagtggactactacagggaaggagggctttgaatttgactagtcaattgagcaagttttattgtgctcttacttgctttcaattatcttatgccaggttttgagaattatagagttccatcttaaaattaattggcgatgagtggagtagtccatattcttatatatgactcaatatttttacatttgatccatgtgagacaatttttgcttgctaattcttgttcgcggctgtgagtaccattttgctcgcttgcggctgactaactctttgataagtgtggatcggaagcttgctaggaatatgactctgataccatattgaggatcatggggttctatcaaaaccaattggtaatgagtggagtagcccatattcttatatatgactcaatatttttatattgatccacaatattgtccaatacatgactcatatccaagtaagttgacgattattttatgggtatgcaattagcggcaaaatggaggaatagagaagattgttcgggaaaatgactatgaaaaccataatttcttcaaataatacaatcttagctagcactgtgtgtatttcaggaacagggaaattaataattgataaggatttggttctttttgaaattaacaaaccaaaggtaaaagggggattctgtgacccaaaactcaatgatgtcgtcaagttatatattcctatgtttatgttgggacatatccct

SEQ ID NO: 328148 - DNA, 1989 bp, Cannabis indica
tttatttatttggttattggataaattttattattgttgtttttgttttttgtttttttatttttgtttttagtgataatcttattatagttacttagtttggtaggtcatataagctattttattgtattaagagctactttattttttaaaatacattataaaaatctcttaattttttttttatttttaccttcaaatttttatattacactgtacacgtaattttttaatttttttctctacatcattaaattattatattttaaaatatatacttattcatgttaaatatataatattcatttatgcaaacataaaataataaaaaattaataatgtataagaatgaacaatatatttagatgatattttgtactgtattaattattaatatcataagtattaatttaattgaatcctattgtttaatataggaaaatgatctgtatttaattttttttttgtatgaaatatcaaatgattcgtattaattagtattgtaatattttgaaatatctgaggtcggggtttgggtggctgggtatggattcgaggtcagggttaacgtccgggtccgagtcaaggtttaggattcaaggacagctttgggtctagggatcgtgtcgcgtctgaggtcgcggcctagtctgggctcccgtgctaaggttcggggtcggggttgatgttgagtgtattgtaaaaatagtataattttatacaacctaataatatgatataatgtcaaacaaagtattgtatgaaataatactatacaatgcaatacaatagaatacaatacaacctaacacaatactatacaatacaacacaacgcaatataatatactaaggtgctatttggtaacacttttgttttctaattttttaatcacaaaataaaagtaaaatttttattttttaaaattttgattttgaaaaacaaaaatgtgttctgtaaccacttttgtttttcaattttaaaaaagaaaataaaattgtgttttgtcaaatttattttcatttttattttttgattttatttaagtcgggtttaggtccggggtcggattcaggtttgggtcagaggccgggttcaacaccagggccattggaggggggatttgggtccaagtctggtcagagtctaaaatattgattaagaaaaaactgtttaaaaaaatattaaaagtgattgtttttgtttttaaaattttgattctcaattaaaaaattataaagtgaaaataattttatagaacatgtttttgaaaatattttcacttttttaattttaaaaacataaaaataattaaaaaagtattaccaaacgccacctaaacagactcataattatgttcgtaaaaaatcatgatgtactattcttttctagtattctatttttctctcgaatgagcttttgggtattggcctagctaaacttaattgtgaacaatgttgatattttgaatttaaataataaaactttatcaatataattaaattattttcaattatttgaatttaaattttattacttaattacatataatgtatgatagtatgattaataaaattttatttagaaaatttgagtgtaaagagttaaatatgtaaaattttaaaatagagatcaaagcattatttgataatatagatactttacaaaaatgaaaaccatataagtaaattttaagttaaaatatcacttgtttcattaacaaatttacaaatgtttgaaactaaagaaaatcacacaactttaaatttagggtttaagtttttggttgcatgtgtgagctatttccttctcaccttaatttctttctttgtgaattctctttaatatgcgaccatggacactaagtgtcaatggttgtgtattggtgatgtcatcttgtcttttatactagtttattccaaacaagttaaaccttttagcttcttattgaaactcttattagattagaattttgaagtgaattacctt

SEQ ID NO: 328149 - DNA, 1156 bp, Cannabis indica
atattttacacatatatattaatatatttatttatttgttgagacacatagattaattattatataaatgttgtgtgtattgtgtcattaccatttgcttcgatagatctatttactttgttgaatataggttgatcacatgaacaaattataatatattaagcaaaagctagctccatctgttatacaaacaattgatacatcgctttgtggctgtggtaatttatagagaatattatcttgtcttttttatgacaaaaatttagtacctgttttaaataatatttagtcggtatttcatatttttaaattttacatatttaataccttaaataaaatttaatcaatataattttatcaatttaactaaacagatcttaattatatatataatcaaataattaaatttaaatttaaaatatataaaatttaaatttaaagtactaaatataaatatgtatgattttaaaatacaaaatactaaattaataaatattattaaaaactcataatatatataacttgtatttaaataaaatatagtcccaatatattgacaccctaattaatataaaattccaagggaaactaaaaaaataagaatatatatggtcacaaagaaaaagagaagaaaaaatctaccaagagagcataatgcaatccaaactagttcaactatatatctcgtgaataatataaggtttaaattattataaacgtgatctttattcccaacaactacatagtccccattttcttgtcccttagtgcttgtctctctagctacacttaaatcgttccacctaattgccaacaaacagatatttaataaatactgggttatttgaggttaaatatctttatattttaaattttatacacttaaatttttttttttactaaaacctactttatatttgctttttaatttataaatttaaaaaaagtcagttagatattacggttaaataactaattaaattaattattgtattagcttcgaagtttaacttttctacgtctacacatatatacacagtgattatttagtttggtcttccacagatatttttaactgatgcatcaaatttacaaagataaacaaacttaaacgagttttatcaaaaaaaaaactaaaaataaatgtataaaaatt

SEQ ID NO: 328150 - DNA, 890 bp, Cannabis indica
aaaacacagtaaaaaagtaaaaactgccgcctagcagtatttttgtaataaaatgaaaaaagttagtataccatgtaaatttccctataatatatgcgctgtcattgggccataaatgcacccttcggatccatacaaaaagtactaacaattaattcaaatttttctttgtttgtttttctttaaagttttttgatcgcgattgattgtaactgtactttctttttcatcgatacagtatacatacagtatagtggtcaatgtgtacttaattttatgtctgatattataacaaattggctatagccagaaaagttgcatgtcaatgcatgcacatttcccatgctactataacaaaaatcattcaaaagctttgtcctttcccttttccccatgtgcagcaatttttcctatggaccactaaaaatgcaacaggacaagaggtacacaaagtgccaccgagtgccgctagtaagtctccccagatctatatatttatatttatatcaattttatataaaatataacaatatatattaaaaaaaaaatggagaagctgcggcctctcttttagtcatggagatagtagtctcattgcatcatccttttgttttagtggagagtggttcagagactgttatcaagaacctaaaagggatgaccctttttggggattaagaactatgtgcgttattgcaacatcctctctacttttatgactaaaaataatttttcttctgttgctagaaactgtaattacgcggctcataatgtggccaaataggcatttgccaacaatgttatgagcatagtaaagatatttattatacatgttaataatttttgtaatgaccatgaggtctaacttcagttttatttatgaacgcatt

SEQ ID NO: 328151 - DNA, 633 bp, Cannabis indica
agtatgagattgcatgagccaatccttgaactatcttcacccttgaatcccaatcaaaatttgttgaaccatataatactttacctagactgcctctgtttgcatactgatacaccaagtacatttcaccctttcttaaacaaaatccataaagctttacgatgtttcgatgtcgaacttctgtcagagttcgaatctcattctcgaaactaatacgactagcttctaaaatctcacttgaatctgacaagtgcaaccgcttaaccgcaacaactaactcatgtgatctcaatatggctttgtaaacagtaccaaaacctccattcccaatgcaatacttgtcatcaaagttttcagtggcatctacaatttctccaaatgtgaattttgcttctttctcccatatcaatgattgacgagtgtcattttggttagaacttttccttttcttatccaaaactttgaatttgtaacgcaatacgagagtgattataattgcagtaacaaacactactataccagcacaaacaagacaaatgactaaaataagattagtcctagttttatttcttttcattttgcagggtttaagtcctgaagcttttccacacaatccaagatttccatcataaa

SEQ ID NO: 328152 - DNA, 1598 bp, Cannabis indica
acacttatcagtccactgaaactttatttccttttaaaatttgaaaaatttctctacacttatcagaggaacgtgatataaagagatttagtgcagggactttacctgtaaggctctggacctcttttggtttggtgggagatcgcatctccaccaaagcttttatttttgtgggatttcctcgattcctcgctggttcaccataaagtcgaggaacttttttgagcctacaccaaagacgcattttagggggttaagtcgcattttataatgttgtaggattctgaacatggcatcaaggtgggtgacatggtctctcgcatgttgagatcttacgagcatatcgtcaacatacacttccatcgtctctcctatcagatctgtgaatatcgtgttaaccagcctctgatatgttgctcctgcgtttattaaaccaaagggcattactttataatagtacaaaccttgatctgtaatgaaagaagtatgctcctggtctggttcatacattgaaatttggttgtatcccgagtatgcatccataaaactaaggagctcatgacctgcggtggcatcaacaagttgatcaatgctcggtaaagggaagttgtccttaggacatgctttatttaaatttgtgaaatcggcacatgtgcgccatgagccatttggctttggcacaagaacgtggtttgctaaccagcttggatagaatgactcccttatgaagctacatgccaaaatgcgatcaacttcctcttcaagcgcgtacctcgtggggtccgcttctgtcggacacctcacacttctaggtctatgttcaatcgatgacacatgacctgcagtgatattctcaccatgtccgaatgtttccaagcgaaaacatccagattctgcttgagaaaagtgacaagcttttctcgcttttgaaaggttagtttagaactaatttttaaaactttattatgatcgaaaggatcgattggtacctcaattgtttcttctgccgcttgtgcagtattggtgtaatcaaggattcttggatccaaatcaagtttttcaatatgcagtatctcctcgattctaaaaatttcctgtcgaggaagaggtgcttcgagtaaatatataacatttactgattttttcttttctatgagcttcagcgctatgttatagcactctcttgaatccgattggactcctcgcactctgttattcacctaatagtccaagattctaagtgtttgtgataaattacaatttttaaaattgttaaaagtatttttaattgtgatgaagaatagaacttaggttacatgaattatatacttccttaatttattacctagattaatctatctcctttaaatttaaagttttatcaaatttaaataaattgtatgcttcatagatttattttttaattaaaagaattaattattgagcgtttcgtcttgattaattacaataagaaaattataataattgactgttttaacattatctataggattaataatttatttgaaaaattgaaataacattcgatattaataactaaggatgattgttaaatgtgaagactaacctttaactat

SEQ ID NO: 328153 - DNA, 1417 bp, Cannabis indica
ttcttatatacaactgacatttgcaaaaacacggtttttcagtagtgtgtaactcaaaatattaggaatgccaatgaaacatttgacataattttacattgcataaccgaacaatctaaatccctctaataacttttattcatagttaatatgagtgtgaggcattcatactttatttttttgcaggtggagcatccggttaccgaatagaatattgaagttaatatgcttaggttgttgttgggatgggtattcctctttgaaaaattccttatcggtactctactaactttctttttccctctctggatgataatatttcttttctccaattttagtattttccattctcttcttaatatggttgaagagataagaagtagctggctctttttaatgattctactcttagattttgttgtacttggaactgattcccttcacacggtactaaaactaatacttcattcagtttgttatacaaatgcattatatatcaccatcgttactattttttttttcagtttttcttacagtgaaagtccaaagagtcaaatttttttaattagtgaatgggttaattaaccaaaacagcataaaatattctcatacctctacacttcttgattgggggaagggtgccacaggtgagaggctgaaatagcttcactaagaggttgacacttgaacagtcctaacctctctccattattaatttacttataaataggagtactatactttgaatagcaatgaaaaattgggactctttttcatttatcaattgcaatagctgtgtgtgaaactatagctcctgtgtagttaatacaaaatatgacataacaactaatccagttttccattattttttagccaaagattaaagaaaattggaatccaaggtgttggtaaaaatagtgtgtgagaaagagttctttgagcgctcttgagatgatgcatagaagaaagatgggttcactaaattttctagcttgaaattgccttaatacgaaatatacgtgggtgagtaagattatgaatcttgaggaatgcagggctaaatgcttgagcacatgctcttgtaaaacttatacaaactcggatatcagtggagaaggcagagtgactgcttcttcttatttagagatctgcttgatattcaaaaatttcaatcttatggacacttgtgcattcactaacaatagtcatttaatttctagatcaaagtagtgaagacaccgttttaatttaaatatatattcccattaacaatctacaaactaacaccatttccgtaatttatttaccactgataattaacagtctaatataaaaattagcatcgtgcattgcacgtaaaattctgctagtatatttatatatacaaataaatagcatacaatgaatacagcgccac

SEQ ID NO: 328154 - DNA, 1535 bp, Cannabis indica
ccttgaaaaagaaattattcaagccctcactgaaccgaatttctggctccgtcactgtttgtggtaggtgttaggtgagacaagatttgtcacacatggggctgatatgacagtgcatagctgtcactttttctcagcctaggtgaatgggtcgtcagaataagtatgactttgtaatcatactaatcatgtgccattgtggtcatgtatagtaatctgcttcgcaatctgtgttaggctcatgatgatctctcggagggcctctaattcgggggcttggcgcctcccagacaactagaagcttgctctattatttttcttggcaacgggaaggccacttctgggtgtcccctcactcgtataatgcgggagtggatttaatcgacaaggggtgctaatttgcctatgcatgagtctctctctaccacgtggggcttcatgtgcatgccacatattttggtaaaaattgaatctaatatttaccccttaattttcaggtcaattttttttttgttatatttaggagtgtaaatggatcgagtcggatctaattctactatgatccaaccctattcgtatcatgtattgaactactctcgccctgccccattgaatcggatcaaatttgacccaacttattcagatcaaatctgcttatctttttgttttcttaagaattttatatctaaacttatataattttttttttctaaatctattttattttaaagaactaataataataaaacacaaatagttaattttgtgttcttaacacagttaaataatcatttcatttcattgttgccacttttaataaaagtatcattttattcacaaacgagccattgcaaaagagatcaagtcatagtcatagacccttggcatttggtagaaaccaatccccactccaatgtcctaaaactaaatcatgttccatgttttttcagcagtttggcatatggtcgttcagatgcaaatatatgcataatgcatcttcaccagtaaaaatagtttgaagctttatcacatcatatttcatccctttataataataactatacagtgtcagtgagtatattacgataagataaaaaaaagcgtgaataaactatcgtaggcaaagtttaaaaggctaattttgttacacaaaggttattgaacaaagaaaaaattgatacacgagcataaacaaattttgttttctaaattaaagtcatattatatgtaataaggcaagaaaattttgaggtttcatgggttggatatccaaaattaggagagtgacaagaaatttgattgggaattagtttgggatcaatcattttttttaatatttgaaaccagatcgggttaaattcgatccgatcaataaaaaaataaagcagggtgagatagatttaatctaaaattcgataagtatttaaaaatgggaaatttcaatttttgaccctaataatacaagccatttcaaaatttatacccttccttaatttgtacaaatttagtccattaattacatgaacttcccattt

SEQ ID NO: 328155 - DNA, 1757 bp, Cannabis indica
tagttgaaaaaaaaatacaaaaatcaaaattttagtggtgtgcaaaattttcaacggtttataagacgcattaagaatatattaacataccattcaaaaaaagaatatattaacataaaaaaattaaaagaaaactatggtagctaaactaatcaacttttgaaaatgggatacaatttatttaattttatttaatattttctttttgttttcaaaaatattaattttattattacaagaccaattacttacaatccggattggaggagcttgtaaaattaaataaataaataaaaatgaaaaagtaatataaagacttctcttatgaaaagcttcatgggaaatagacttccatgatgaactttagcaaagcatctggatccaaattgggcccacaccttactttgattatggcccactaactcattgctgtggttgatgggcccactccaacccatttgctgcccaatttttatttatttatttatttaaaaaaaaaggaataaataaaataaaataatgaaatggagctggcaagaatcaccacacaacataatcacataaaacattagcctcttaaaatattcaaaattactctttaggggttttacaacacttacttaaaccctatttaacattcacttcacttcaactcattcaattttttatttcttttcttttctatttggcaaaaattatatatatttggaaaagaatttggcaaaaatagttcttttatttttttttgtgtaataattttttacaaaataactttcatcaccaacatgtctctagataaaatttttgtacaccctatttaaattccaaactaattttattttttaagtaaaaaaatacaaagaaactacatttaataaaataacatcataaaaataagtttattttaagataaatactattttgaactttatgttttgtaaaaattattaattggactatttattttattagatgataaattggattatatattttctaaaatggtacaaaatagtacattgaactgattttttattaaaataaaaaaacaataacgcaatttaaagttgttatgataaaactaaatatatttttcgtatttgttcataaaaaaatatcgaaaattgagttcatagtactatgttgtactattttaaaaaaatataaaatttaatttattattttacaaaacagatatttcaatatataatttttacaaaatgtaaaatttaaaatagtattaaccatttattttatccactaactttttaaataaaagaaagaatactcttaagtcacttccacacaaaaaatatagtaaaataaatcaatagataattaagtaccttatatgactttttttttcctttaaatgtacacaaaaaatggtgttgtatttattgaaatgtacacaaaatgaaatttcacttgaacaagaatctagtgcatcattttcttctctctctctctctcttttatttatttttcttaaaaaatgccaattggttagtaaaaataaaaatagatgacaatagtaccttattggatgaaacctttatttatatacataaaagaaaaagaaaacattaattaaatttgactccaatccaatatatatttatcttaataatattattatttatttatttaaattaattaattttttaaaaaaaaattggaagctctatatgggtcttctttggctgtcattccactcaaaaccccttcttcttcatctacttcctctctctctctct

SEQ ID NO: 328156 - DNA, 690 bp, Cannabis indica
tttttatgccatatatatcaaaacatatattcatattcccatatttttgtaaatagccctttattatattctattctattcatgagtgtgttatgaatgaattttatatataaatatataaagaaatcgtgcaaaatagaaaaatgaaaacttggaaataagagtctcacacatctttatttcatttatgaaaattataattttttttcttcaaaatttaatttttttattaatccaaataataataaaatattagtataagactaaaattagatgtcttatcatagcaaatgccaaatataatttgtttggtagtaagcttagataaagagcttttacctaacattgttttaggtgaattattattattgaaaaggcttttcacacttataaattaaatcaaataaatatatatttattttattattattgaaaaggcttttgacacttataaattaacttaaataattatacattttttaaaaattattatttcaatggaattgtcatattctcccacttctagtgcaattttctcactttagaatataatattattcatttcaaaaaaaaaaaaaaaaaacaaaaaaaaaaacacacactaatattattatttagataagacagttcattcatatactattcaataataataataataataataataataataataataaaacacat

SEQ ID NO: 328157 - DNA, 1320 bp, Cannabis indica
tttttaggttaaattattgggtttaaacgtttaaaaaaaaaaagaaatttacaaaaatactggaatttgggttaacttttacataaatactgtcacacggaaatcttttcaaaaatactgtgtttttataaaacaccaataaaacacaaagcagaacaactcaaaacaacagtaaaacaactaaaaaacaccagtagaacaccagtaaaacttaacacaatatactgcagtatgaaacttataaaaaaaacgcagtaaaaaagtaaaaaataccgcctgacagtatttttgtaaaaaaatgacaaagttagtataccgtgtaaatttcccttaaaaaaaagattatttaattttttgagtttaattatttataaatttttgaaagttaacgggaggatcaaacctactaatatcgttaaatttaacataatattcttttatttttaaagtatattctgttaaaccaagaaatgctgttagatagacacttttaatatataaaaagatatatacatacaaacaccttgagttaacacgggttagtccggtgtttaagacccacctaaatttagagcacaaaatttgtatacaatatgttaatgtgttgaagagaaaaaatagtaattttgtaaaattttgttaatagataacacccaccaattatctatacttcgatacaacccataaaaagttttagctagacccatttttttaggccaagccctattgtacttatttatttttagtaatttatttttttaaatttattcatcaataaataaataactagtatattaattttatttagatatagcataattataataagatgataataaaaggcctaaacaatctaaaaaatatgatatttatcattctcaaagagagagtgtaaaagtcaaaagagtgtttgcattttgaaatgagtattgttattagacataattattttttagactatcgattgattaacgatatatattatattaaattatataaaatttaatacttaattgaatcaataataatattgaaacataagagaatactagcaacaactaaactcctttagctacgtaaatatgtcatatgtccacgttgttcactctggttggagagattttttctctctctctcttttttataattttttaagagaggttggagagatttatgtccacacataatcacaacttttaagaggtaataaaatcctattatatagttattttttgtttctttagatttctgtccacatataatcacaacttttaaggtaatataatcctattatataattccttttttttttaaagatat

SEQ ID NO: 328158 - DNA, 1001 bp, Cannabis indica
taattaattttaaacttattattatttttttaaaaaagaaaaagctttaaaacttaagtttgcagtgcatttattattattattattattattattattttattttcttaattacagattttaattatttgggttatcattcatcatggtatttttaatgaatttaatatttatttatttattttagatgtagagctaaaaatgtaatgaaatcattacattatatatttaagaatatcaagagagtgtgttattataagtacttatgcatgcttttcttcctttttaagtttaatttaaagacatttattatatataaaaatacagaaattatatttaataaaaacctaatgtgcattattttaataaagacattcatgactgcgtacaattttgctagagtgttatattcttttccagatcgaattttcagtggaaaagatgttcctacagaattacagttttgtcttttggctgatttagtaaattaataaaattctaatttacattaaaaaaaataatgaatcttgatttaacttttttttagcaattaaggaattatattatatgaggtaaggtacccaaaaattggaccatgtatacatttttgtagtcatataaatttaattacaaatattattcatgtatacatttttgtagtcatataaatttaattacaaatattattcaatttttgctttgctaattaaaatctttttgaaataatgaaactttagtccaaccacatgatctttcaaaaattaattaatagaaaatgataatacttttacattcaatgacctaatagaaatgctaaaggtgtttaacacttttgtaagatgtaatattgttattaatgtaatttaatattgaatcttatttgttttacattaataaagagatcgagcattattattaggcaccagtagtgtgtatcatcacttagagatgtcatcctacgattatttggttagcgatattctctaaaagttattacctta

SEQ ID NO: 328159 - DNA, 755 bp, Cannabis indica
tctttgagtcacgaagaacccaaagaacacgaagaatgcatttgagttcttgaaaaaatacatgctcagatcttgtacaccttctcgtctgccaaggaggtcttgtttaagacatggccagccaaggtggtcacctggggtctggtaaacctatagggtggcctatgactggaatcaaagtttctggccgaccctaggctgggtcatgggacctggccaaccctctagggcttggaaacccttgccggtaaggccaaggttcatagtgggcaaccagttttttgtcctctattgacctcatctagggtctcgtgacacccttggaggcatatacaactgtagtcttatgtgtggttccccttggaaaccttatatgagacttggtagtgagtccattatagtcgagtgcacgacttaggactcactatttgtctaagtaaatgtatttactttgctgataattagccctgtacattgtgatttacttggaagtacccttaggtacaatcgattaaaattgtgtttgtagctttgtcaggctgctcacctccccttgtctcttctatgcaggtgattctaagagttgaattggggaggtgacagctgcataggtccccttgctacccttgtgtgattcaaagctgaccatcatggctagaacaaaacaaacatgccgtagagtgttgccatgtgatcctcatgttaccagggtggtaacaatgggtagagtcagagttgtagaggaggccacacaa

SEQ ID NO: 328160 - DNA, 809 bp, Cannabis indica
actccgagtgttggtggaacccccactcttcctactcttttctatgggagggatggtggtgattccaccattgagcagaaaaggaaagtcacctcaacatctggtaataagggcaaagcaagcggtttcatggaaaccaaggcagaggtggattccagggttactcttaccttgtattagaacacatcccataccttgtctagatgcattacaataaaccacgaacttttcttgatctgaaggtagggctaacactagagctgtgatcaatcgatgctttagctcttggaaacttccttcacccttgtacgtccatacaaaacactaattatttttagttaattctgtcaagggcattgagatcttggaaaaacccttcaacaaattgttgataatatccagctaaatccaaaaaatttctgactttagcgattgtcttcggccttggccgatccctggcagattcaatctttcccaaatcaaccatgatcccatccttactaacaatgtgccctaaaaaggacaatcacgatagtcaacattcacacttcttagatttgacgtaaagcttatgctctcgtagtcattgttgagccattcctagatgctgctcatgctccgcttctgattggaagtacacaatgatatcattaataaacactataacatagatgatgctgaagttttagttagtccaatagacataaccagaaactcataatagtcatacctattacgaaagtcaatctttggaacgttctcctcttagattctcaacagatgatagcctgagcgaagatcaatcttag

SEQ ID NO: 328161 - DNA, 747 bp, Cannabis indica
gcatgaaagcagtcaattcgaaggccatggccacgattggagtggccgggaaggtgaatgtcaagatcgacggatgggaggggcaacttgaccttgtagttgttcgcatggatgactttaatgtggtactgggaatggagtttctggtagagaagggggccattccaaatttaacgcatttttttaactttttatttccttttctctattatgccataaatactaattattatttataagcaaagataaaattaaatctaaataaaatattttcaacataataatatattgcattaatttcttgaaaatattataaagaattaattttattttatatttttacactataaagtatgtaatattttggcatttaataatatcatcatcatctcgtctataattaattggaagaatgatttcatttttcggttactagggctcttattatggttgtggctgtggctctgcatcaggtgtcggccttccaggatcttgtaggagtctcattatggtcttcaaatgacccataatcttgttctgtccttcaaaagagaagtgtgacctcgcttcagtgcaagttgttctctctctacaatcaccaaccttgccatcatggcagaggataccgatttccaatgctctgaagtgctaggaatagatatagatggggaaacaccagactcatctggtagtgaagacggtgcaggtggtggagaaggtgcaggtggtgtagtgtctctaaagatt

SEQ ID NO: 328162 - DNA, 677 bp, Cannabis indica
ttagactatcactaaataattaattctatcacaactacagcaaagcttgagcaatacttgtcaaaactaccataagggtttaaaataaatatgaaaaaaatttaagttttaacaatacaataattagtgcgctttggtctggaccttcacatattagacctaaataaatataaaaattaatatttttataataagcagtgcagttctatttgtaccgtatattaataattcaaaaccgcaaaccgcaccgcgcagtttaagaaaattcaaactatgaccgcattggaaatattttcaaatcgtattttttttttgcagtgcggtgcagccagtttgagcagtttgatgaataaccctacttaattcccaagatatcgcccgaggatcatatcttcccaaatatgaaaagattgtaattgatgatcaagcattaatgtgtctttattatctataaaagtatgacacaattttgacaactatcaacatgatgtggcatccacgtcagcatacagccagtgcttcgtgagccaagcttcactaaatgggcccatgatcaatatattatgtgtatttactcctttagtggacaaggtcgaacccatataatgtaaaaatgagagatttttttaattagataaaaaaactaagcataaaaactcaaattttcatgatattat

SEQ ID NO: 328163 - DNA, 1605 bp, Cannabis indica
ctaatattattgctgaactcaacggtaaagatgaactcgaccgccgataatgaaggccagtggcgatctagcatggtggacctgaaaaacaacactctgaatctgagaatgaatgaatgataaaataaatctgagatacatatctacatagagagatacatatatatatatatatatagagagagagagaacagaccaccaagagtaggagacaacatgatcgagcttgagaacgagcataaccgtgaaggagaagaggaggatgtgggcagctagagcctgcacagacttcaatactcttcgccagttcatcgtcaaatccaaccgtgacaacttgaatactctctcttcacccctacccaccctctctgtgttaattatatgtatattcctgaaatcgtcttcggatttctacctcttagaaattgtgcttcttctcaagaatttaaaaatccttagtcagagtcagatacgagaagaggttttcagtgggcgccattgaaaaggggaaagataaataaaagctttctctctctaaaaaactaaaaagctctctgtgtggaacaaaaagcatttacccttcttttggttgggttttaaaataaagaaataatttttatttatccctatttctctctctctcgcttcgcctccacggcaaagtaacactactacccgcttaactgccttttgttcgttgtagttgctgtactttctcttttccatatttttttaatcttggggcgcccacattttttttatgagtaacattaggttaagagctcgtcgtatgttgtattaagtcgtattgtattgtattatattatattcaattggattatataacatatttttatataatattattttaaactttaatttatactgaaatattataaatttatgtgtccatacaagtcaataacacatatagttttacataaaattattacataaaatataattcaataaaatactacacaatacaataggatataatacagcgtaccaaacgaactttaaaaaaataataaaaaaaaatttcaaaaaaaaataaaataataataataaaaaaataaataaaatagaatccaaaccaaaagggaacaaaaccccaactaccaaaaaactgaaaaaaaaaaaaaatcaaagagaacaattgcagagaaaacaaaactattctcactggacctgagaaaggcaagtataaaaaagtacagaaaaaacgaagctgaaaacaacccaaaaacgaaccacattgaacagttgaccatcaaaataaaaaaataccataagagaaaagagaaaacgagattgtatacctgaaacacagaagagaagcgaaggaagaaaccctagaaacttgaagcgatctctgtttctctctctatagctaattttctctctcagaaaagaaaattgaagagtgagtgagagagtgataacagtggagctatgtagtcccttccgtgtgtccccgttttaagtgctgtgaaacccctcaacgtatcacactctacagttcgtaaagtctaaaaaccatttaccctctgatcaacggcccagatttataagctcaataacgtaacgcattaattgctacgg

SEQ ID NO: 328164 - DNA, 500 bp, Cannabis indica
tatatatatgtatatatatataatattatgcatatatatatatgatatatataggtgtaccccactcagccacttgaaactctatctctctctctcgattgaatggaaagaaaaatagggtgaatgggttggagagatggaagcatgtgcaacagtgcatgaaaaccttgaattctatggagttttctctccttttcatgaaaatatatatattgggagctatgaccaattgccctttataattatatatatatataaataatataatatcatcatgatgatcgttaatttcccactttactctattacatactctagccaaggccatgttttcaatattggtttatataattaattaaaatatataataaatatttgcaagaacaaaaataaaagaaacactccaaatgcaacataacaaaagctagctatagagatatgacagagattgctatataaatacatacatagtgttatatttatatatatatatagctttc

SEQ ID NO: 328165 - DNA, 683 bp, Cannabis indica
aatattttctccactaaaattagtggccggagttataaccaccacattatttcttggtttcagtttacattgaaagcagggaaaaaattgaaactttttgggtgtataggtttaggtatgaaaaacagaagattaaaaaaaatgggctcaatggtgtaaaaatggagatatggaaaattttcgtggtggttggtgagggtttttgtcgttgggttctttatgcttgtgctggttggtgtggtttcatgatgaagaagaagatgaagaatgggagaagacgaagctcatagggtttttatataaccatatcccgtcgcttattaagaaataatcgacgacatagggcacacatgttagttatttcgtttgcctatgcagtcggttatttcttaataaccgacaggatagggttaataaatagcgctcccttcagcattctcaaatccccaaccgactctataggtgtagtttaattctatatctacgatttttataaaataaccgcctttaaatgccaatttttaacaggtaagtatttttacatcctttagtttctgtttatataaaacttatggaaaaagcagcttctaaaaggttgttttccagtagtgtacaaatgacgtctagttttctatgcccaaaaaattctgtcaaattgtaatttcactacaagaaatgtcact

SEQ ID NO: 328166 - DNA, 937 bp, Cannabis indica
ccagttctggtgtagattgaacattgaataaccttgtatggccatggatgaatagcccccgatgatctcttgctacccaaccaactccaaactgttgagaaccttcgaagatcgctgcgtcaacgttaacctttacattattttttggaggcacccaatgctcgactccatcaccttggtttaaaccagcagccaggagctcaaaaccagaaaagtgagcatgtttccattgagaaaggtaactttttgctgacgtaacaatgatttcgggagacttgaatttattttgccaaacacggtcatttcgagcattccaaattgcccaagtaacggccaccagcagctctcgatcctctttctccatccgctgaaaattacttatacaccagtccagaaaacagtgttgctgctgcattgttgctgggataccagctctgtcccaacagtccttagcaaaagggcagcagactaaagcatgagaaatggactcttcttcgatggaacacacggggcattgtgaatgggggactgcacgtttgatcctaagttgaaccattgtgggaaggcaatttgtacaagcccgccacactaaatttttcatcttcggaggcacttttagattccagaattttttccaaaaaaggttcacttgtgattcctcaaaattcaccagccctttcagttcttggaggcgtttataggcactcttaacagtgtataaacccgacagctctcctatccaggttaaatggtcttcagtggtagttaaattaagaggaatttgcacaattagctctctatctcgagactcaaacaaatcattcaagacttccatatcccaactaagcccgtccatggtcaggagattggctactttagcattatgaagccccggatgtgaagaaataacccaaggattgtctttatctggtaacca

SEQ ID NO: 328167 - DNA, 597 bp, Cannabis indica
agagagaacctgataagatgggggttttgggattctgaggctgggaaatcccgtggtgcatgtcgatcggaccgtcgaggaccagagctggcctggatggatggagcagtgacgccaagtagttgagagggaaactagagatagggggctcgcggttagggcaacgacaaaggcagctttctgctcgcggttggatctcgtcgatgatgaacacacaattacatctgaaatcaaatgaaaaatacaataaatacatattcaaacatatacaataatttacatattcaaaaaacttatgactctgcctctagctggaattggaaggagtgccaatggtggtggtggctccgcctccggctgtgttttgggttagggatggtggaaggtggatcgatagagataggagctgatagagatggagggttaagggcgaagatggagggttagcgtgtctgaatgtgttgatgagagaggagtttttttattttaggatccccttccccgacaattttgaaccgtcggtcaaagtatgggccacaggtttaaactgtggctaatactttcaccaatagttttaaactgtcgagaataatgcat

SEQ ID NO: 328168 - DNA, 815 bp, Cannabis indica
atgtatgtaggtgctcacacaattggagtgacacattgcacattcatattccggaggctatacaacttcaccggcaaaggagacactgatccagcttttgacccagtgtttgcaaaggagctaaagaagaggtgcccaccacgggcatcaatccttccaatttcggtggatttggacagccacagcgctctctcattcgacagcaattactataatagtatttccaccaataaaggtgtgttgtcatctgacgccgctcttctcacaaacccagcctctgctgccctagtcgcaaagttcaaaaacttcaacaacttcatcgaagcttttgctaaatccatggtcaaaatgggctcccttaatgttcttactggtaaaaaaggagaaatcaggcagaattgtcgagttatcaacaaataattaataatatagtacaaagtattatttacatattgttctatatatataattattaataataataacgtcaactactacgtatatacgtatgtatcttattattaacctataatttattaattatcttcattaataataacgttaatatatatatcgacgttaatttgttgaataatcttttatttaatttccacttgttgaaatatagtcttttagctttcgatttggatttaataagatgttattaatatatgaatatctaaataaaaaccaataaagaatgaaattctcagctcaattgatactgagtttagtcagcttcattaaataagataaaagtgaaatacaaaatacaaccaatacagtgcaacacggcatcacagaactcaaatgac

SEQ ID NO: 328169 - DNA, 1245 bp, Cannabis indica
aagagaaacgctcaacacctttgtgaggtgtaatatcattactagtgcaattgaatatcgagtgacactttattttaaataaaaattataaagaattactaactggcgctacttcatagtaatgtttaacactttggtaccccatatcattgctcaaaatttaattcaagattcttctatataaaatgggaataataatatatgtacatataaaatcacataaacttaagttatttttaacaagtaaacttgaaaaatataattagttaaaattacttattttatttttttttcaattaaatagaacttaaattgccagagtaatatgagtatatgaccaacaaataacaataagctcctgatttaaattattacttcatccctataacttttttaggactttatccctatactattattaaggaagataggtaattttatagggatgggggaccaaaacaccctacaattttttttattattattttgatagatgtttgatattttatattagaaaaaaaggacctcaaaattgagaaaattagcatctaaattcccctaaaaaatattatgtattttttttcttaaaaaaaaaaagaggaaagtaggtaaatctcattaataaagtcaaatcacatgtgtagcatttttcttaataaggtttgactcttgtctttgctctctataatatctcaatttgtatatatggaaagagacatgcaccccaaatttaccctttttcttcttagaaaaacaattaataatttgggaatttattacattggtcacaaaacatatcattgagaagagaaatctaggagacacatatttggtagataattaattgaaaaaaaaaatatgtcattaatttatgtaaaattattatttcatccctagactataggatattgataattttctcctctccctttcttgtcaaagcacaaactctataataattcttaacaagtgggaaaatagcaagggaattttctcaacaagttggaaaatatcaaaagaatttatttggtaacaaaatataatataagaatggtgtttgattatatatataaaatgtaattatttaacagttttttttagtttaataaaatattttaagaatataagaatattcttttaaatttaaagtgttagtagggttagttttattaatatacataaatattatttgttttaggttaattgaacttatactaattttagattaatttaaatatataaata

SEQ ID NO: 328170 - DNA, 653 bp, Cannabis indica
aaaaaaaaaaatcaaattcaaatgccaaaagccaaaagccaaactcagtatatttaaataatttcaataccattccaaaattcatattcccaaatcaatttaacatcacactcacgaaaaaaatttaaatttcagatttgaacccaagaacaatacctcaagaaaaacacaaatctaaaccctatgtggtgagtgaacacccccgaaaaccccaaatctcgtttgaccttaaaacttagatttggaatctatccagatacacaaccatccttgtcccccgtccctgtcgtcaacaacccaaaacttgggttatccattcaccttcgtcaccgacgcgaataatccaaaagtccacaacaccaaacacaacaaaagctacctctaactagctatcacaaggacgatgatcactcaaacccagattcgacattgtcgatctcttgccatcgctaacatctaccttaccctcaccacaccattgtatcattgaagaaagatgaagaaatataaaaatcatgaaagcatagaagaaaaaaaagtatagaatttatttacggggaattactccgtatattatttttaactttttagttgtaataggaatttgttgcaatttaggttgcagcactagttgcaataggagtttctaggta

SEQ ID NO: 328171 - DNA, 722 bp, Cannabis indica
tagcaaaaaagtagaagttccttaaccattctctattatagagagtcatttttgtatggttggagctcatattttcaagtcacactcccttatttacctgagtgtgtttagagagcatgtttggagatactcttgaggaccataataatgtgttgtaattaactctaattgtttctctcttctagggttttctccttttctcttctcttcttctcgactagggtggtcgtcgccggcctttgctgtgcatctggtgctccttagtagagggggattcgttgtgcgattttattgaggatggtgcttttgcttttgattggaatgtagagtttggcaaggggtgagtcttctcagaggcgtctttggaagggtgctgtgaagcgttgggcttcttcgtcaataacgaatgtgcctcaacgatagggtggttggggtattccgtgtgcactcgatggatcttcggttgaaaccattgatttgtgcctttcatcatccattatgctatttgggtgggtagaaattttcaaacctatctagtaaggcatggggttctagtgtggtggatcagtggtccgagttcgtggttcctctgacgtcggaaatatgaagcttgtggttggttggatctcactctccgatggattagtgatttttgcttttgtttgttattattttattttagatttattttgtttttttgctttatgttgtttgtttgtccc

SEQ ID NO: 328172 - DNA, 701 bp, Cannabis indica
cacactcttttagtcttattagacatgtttataaattgaattgaggcaaaattttgtattttcaaaatcagaaatgggttgtgtagcttaatcaaattagattaattaccagtatcgtaaagtggttgccaagaacaatgcaagtaggaaaagacctatcaacagtggaagcagcagtagtcaaaattgttagtaactttcttgagttttgctttcaatgaaagcaccaaaatattgactcataaatctagactagacttttaagccacacccgctcgctgggatggtggaatgaaaaagtagttaagtattttaagagagagagacaacaaatttatactagttcactccctgtatcacgacagtaatggagcttcgtttacatcgagaatttatttgtcgcgagatggtaattacaggaaaagactaagtgtcagaggctccaatttctagagagagaaaagctttgaccttgtgggtatttttctgaatgtgaaaaatatggggaaaatataaataagatatttttgaccgttgatgatgatctaacggtgaaaattaactttggtggtgatggccattttttggtagcccgagggtccgctgcgggtaaccgaaaaacttaatttagttactaccttcgtggagtgaaaattagatgatgatagctccagaattacgtactggagtgtgagatgtga

SEQ ID NO: 328173 - DNA, 1724 bp, Cannabis indica
tgcaacataaaatgtgatttctgatctttattaattagtaaatctgattatattgaaatggcttttatttaggacacaaaacccaacattgcgtgtcactatagcacattagattctttacttttaaagcttcatccattcttaaaccaacctataaagcctcgtattcggcctcgttgtttgaagtgtcaaattggaatcttaaggcatagtgatatttgaaattgtctggtgagatcattgtcactcctacacctgagccattttcatttgatgctccatccccatataatttccaaggttttgtatcttgcttgacaagtggatcttcatctaacactacccattctattagaaaatcttccaaagcttggcccttgatggatattctcgggtgataggttatatcaaattcccccagctcgattgatcattttatcaatcttcctgaagcatcaggttttgataaagtcttaaaatggttgatccgttaagacttttaggggatgtgcttggaaataagctcgtagtttacgagatgcatgaatcggtcatagggtaagtttttcaagaggggataactcaattctaccccagtaaccttttactaaaatagtaaacagaattccagtgctttccctcttttcgcaccaaggctgcattgattgcactttctgagacagctatgtaaaggtataaagtttctccagttatcggttaggccaacactagaggggttgatagatgtttctttatgcctttaaaagctttctcgcattcttttgtccattcgaacttcttgttgcctcgtaaaatattaacgaatggtagacacttatcagttaattttgaaataaatctgtttaatgctgccattcctcctattaaggcttggacttcttttggcttcgtgggtgatggcatctctattaaggatttaatttttttaggatttcctcgttgcccctctcattaactatgaaacccagaaactttcccgaggagactccaaaagaacatttctttgggttgagcttcatattatactttctgagtatttcaaagcattctataaggtcctttgtatgatcttcacactttatcaatttcactaacatataatcgacatagacttccatatttcttttcgaacattccattcacttatcgctgatatgttgcaccagcattcttcaaactaaagggcatgactttataacaataaagtcccatgttggttacaaaacttgtatgctcttgttctgggacatgcattttgatcttgttatatccagaatatgcatccatgaatgtcatcagctcatgccatgcagttgcatctaccaactggtcgatcctcggtagtggaaaataatcttttggacattccttgtttaggtctaaaaaatcgatacaagttctccagacgccgtttggttttggaacaagaacaggatttgaaatccacaaaggatagaaggcctcgtagatgaaatcattgtttaataacttgtccacttcctctttaagtgccccttgtctctcaaaatctagaggtcatcttttttgtcttttggctgggtcattggggtcgatattcaagtgatgacagataattttagggtcaatccctaccacgtctgaatggctctaagaaattgatcctagtttgccttcagaaaatttgttaactgctattttagtttttcatccagatttttccc

SEQ ID NO: 328174 - DNA, 973 bp, Cannabis indica
ttaaaattaaaaatatgaaaatatagtttcactttttctatgtgcaaaatatatgcacattcttctttaaagccttattaattaatagtgagaacaatcttctggttcttcaacaaattttagtaaaattatttgacaatttattgcatatgattgatcatgtcaaaataactcaattcacgagcttccacattcaagtcatttttagctaggatttgaggagaaaccttaagccaagataaaaggtaagccctagatactttattccttgttgtttttgaagttttaagcttggttctcttttgtaatttttaggaatttgggggtttagttgtttatggcttgtttttggaagtattagtagctgtaacagatttgaagaagtttgggttctgagaactcaagcttttctcatccatattgaattttattgcatgttgttttagatgcttttgagttgtgggttatgtttagattaccccaaattgctattttggaaagtttagtagcttttggttctggtaggagtgagctttgggggtctgaaaatagaaatttttgagcccttgctgcccaattttggcttccccgaaggttagcttccctaaaggttagcttccccaaaggttggcttccccgaaggttagcttccctgaaaggtagcttccctgatggttagcttcccttaaggttagcttcctcaaagattagttccttgaaggttggcttccccactcgggtgtccgttttagatgttctacataccgttttgaagctattgagaagctctatagcacgagtttgtttttagggccaaaatacgtaggtagattggtggaaaatctttgtttctattcggattttagagaagtgttctagagtaaacacttaccagttttacattgtgacataggactgttgggttttgtaccccaaataaaactcattttaatataatcagatttactaaata

SEQ ID NO: 328175 - DNA, 553 bp, Cannabis indica
tttatttattattttttttctatattttaaactttaattattttttaatttcatatttttttgcattatttatttatgctatatacaagtaaattctactatattttctcatatctttatatataaattgttccaaagtttattccagaggttttgtggcggagttttctttctaacgtgttgtatatcaagtcaattctaaatgaaagatgtcatatcgaaactcctctttgcactatttgcggaattgagaatgaaaatatagagcacctgttcttttagtgcaacttagcttatcacttatggcggtcttccccttaggacatctttcctattgtttggcactctcattccgactcagacaaatgttcggcacccccctccgcaggactggatcaaatttataaaccaggatgttagagtagagttgaagtttatgtgtattgttgttgttgctagagatcaccaggggatgttttgttgggctgccactgccagacttgatttttcagatccactttgtggtgaggctgctgcctgttgcttggcttta

SEQ ID NO: 328176 - DNA, 544 bp, Cannabis indica
atactaactaccacgtgtaggcacatgaaatttcactagtatggatattaaaataaataataatataaaacaaatatatttagagtaattaataaataaataattgatttttgtaatgtgattagaacaattagtggatttgctgttatagtattagtttgtcctctcattttagtatagtaatattttgtatttatatgacaaagttagtattattttatccataattaactttaatgtattagaaaaattaataagatttgtatataatttaaaatacaataattagatatgcgtacttgattaatccataacaattacaataatttaatagtgcaatatatactatcaactaagtctttcttcataaatttctaaatcagaaacaattttatttatcttattatcaaaagaatatacaattgtgatcagtacaatatgtatttatagagttagaaaatgcacataacttcataaccctagttagattgggtctgctcattaaaagtttcagtcaactaaaaaatctcacatttacatctgc

SEQ ID NO: 328177 - DNA, 1120 bp, Cannabis indica
ggaaggctatggtctcattatccaactaatgcctcttaagctaaaaacctagttttctctctaggtttatgagacctcttccttcttcttcttcttctattttcgaaatactatagcctctcttcacaaacaatttcaagccttagtgattgagtgcatgcccacacatatcaagtaagtcctcaatcatagtgtgtaagactgtgaagaatccaaacaacaagaaggagtttcgggctcagatcttggtgatactctgctacagaaaggatacaagggttagagatctgagcggaaggagtcatttaattccgctgcaaccaatgtaaggtttctcataccttttatgtgtttattttatatcgttttagaagttcatgtttaggatgttaaaaacatacttgttagtaaatctagatcctggtaaaatatattccaacaatggatcgatatgtaattaagctgtctttatcaaacatgtcgtttaccataaagacctaattcatatcataaatataatcaatagtagaccagcctaaatcttgagtaatcacgaactcctgttcatgttgtaagtttctttgattcactcgtcaaagtttcttagagaagacgattgttacaacttctattttaggaatccaatagtcttaaagtttcaccacagggagctcatatctcgccccagcgagagcgtaatttcaaaatgttaatttttttaattgcaattaaagggatataaaaggggtttttgggagaacgattgaggggactcctaattgcgattttagaaagaaaaaactcaatagagacctagagatagaagacttggagcatccatcatctacatcaaacctagtttttcttttactcttttaactctattacttcatttatgattatgtctatgattataattgtgattatggagtagtttctttttagaataagagttatttctaaatcctataacatgaattcttgatttataataatgaatgttattctttatttctctaatattaaattgtttctacttttctaattgaatgcaatgagttgtgtgatatcttgttaggtgtgcaactaattaaatatttttaataattcttgttataaa

SEQ ID NO: 328178 - DNA, 2116 bp, Cannabis indica
tcaggagacaactacaagacctaagtcaactggagtacaagaatgacttggaagaccaagagaccttcgtgacctcttgaacaagagaaaaatggtggatgtgggaacttctaaaaaagacagtgtctcggtaacaaaagcttcgtctgggacacacaccaccaatcacggggtcaattaagcagaatttgacaccttagctgctttagtgaaggagatcacgacacctaagttgtttgaatttaaactcgatagagaacaacgctcaccactcttcaaaagaatcaaagctcttcccattcttctaaagttcaagaaccctttctggcatcaatacattggaaaggaagatccactgcctcacatccactattttgaaatgcaaaccaatatgcaaggtgtgagagacgacgtccggtgtagaatcttccctgccacgatgataggcctagctcaatggtggtaccttaagctcctggtgtgagagacgacgtcatgaaaagatctagttgatacttttggtaaccaatttgctccttcccgacaatgctagatcaagcccaatgatttggtggatgtcaagcaataggaagacgagcccctcaaggactacattcaatagttcttagaggcagctgctaagaccaaaagtcttagcgagcacgcaagggttatggcactcatcgataggctcatggagatgagtcctctatggtccgaccattgtctcaaggtagtataaaccatgaacgacttcttagatagagtagatggctttatcaaacttgaagaagccggcacccaagcaaagggctcctggggtggcaagaagaagtcgccaaacactaaagctcctgctactgaggtgtagggcaatgttaagaagggaggttcaaacagagggaagagagccaacaacggtggcaagcaaggtaattctcccaaagaaaagaagcctaagactgggggcaagcccttaagagattatgagcccttaaatttttggttttagtatttagtgtcactccatatttttagtgacccacattttgtgtaataaacactgaatatttagagtctaatgttgtgtgtcactaaaaactacttttaattttttagtgacccacacttttatgcgtgtcactaaaagcctaatttttagtagttgatattaaaataaaaggataatgcacataataacatatctcatatttaatcttttattttattttttctaattattaaaataaataaaatataatataatatatatacacaaatacaacgcatatacatagatatactcctggggccgacctattggtcgtgtatggtggtggtcgttgaccacctaggttggatagggaggagttggctggtgcaaaaccgacgttgggagaaagctagacaaagctctagtttagagatttacgggtcgtgagacccgattagagtcgtgaggctcaaagacaggctaaattatatatacaaattatgtgtacatataatttgtagtagtgatattaaaataaaaggataatgcacataataacatatctcatattttatcttttattttattttaataatctaattattaaaataaataaaatataatatatatacatatacacgcatatacatatatatactcgtggggccgacttattggtcgtgtatggtggtggtcgttgagtactacctaggttggagagggaggagttggctggtgcaagactgacgttgggagaaagctagaaggagcaaagctctagtttagagatttataggtcgtgagacccgattagagtcgtgaggctcaaggacagtcattcctcctccctagctctatcgttgatcacgggaaccttcaggaggtccggtcaaccatgccctgtagccatagggccaatcggagtcccttcagtggttgtcaacccaaaacccaaaccaatcacgttcctcctccttgctcacatcgggtcaaccatgcatgggaatgcatggattacatgcacacgtaaaaaattacgtgtttgacccttttgagcctcttggcttgctgtcgcaaccctttgggatttgtggctcgttatttaaggttcaaaacttgtca

SEQ ID NO: 328179 - DNA, 1062 bp, Cannabis indica
tttttttttttttttgtgtatggcatgttagatatcaatcaattgtagaaaagagaccaaaaaaaaaattcaagatatttattttttttatctgaaaataaaagtgtataaagtaggttttttctatgaaagggaactccacccatgagtcatatcgttttgaaaattaattacattcaactactttggagaaaaatcattaatttaaacttctagactgtattttgttggtgtgtgtgtgaagaaaaccattttaattttttttttttttttttttttactaaagtaaaaaaccattaaaagttaaatggcaaattcttttgttaagtgatgatacccaattggactcccacatttaatttctcctttgacctgctagccggttttgttgaatggtgtgaaaacaaagctgatctctaattctctaccatgtaaaggaagaccattgttattcaacattttttttatagttagtggttgattattagttaatgatattttttttgaaagttattaatagtggtataatacttaagaatgtattggacactaataatgcattttaagtgttctttgtaaaggatagttaaatctagagtattagatatctaatgcactattaattaattataatcttataattttttttatgcataatagaaaatgttagaattagatctagataagttgtaatctttctttgtggatggtttggcaagaagtgctagattttctaacaatcttgctagtataatttagaggaaggaatacttcctgtgattcttatttatttgtcttagattattaagattacactaaaattaggcatatctgatttcatgatattggatatgaaatgagatagtgggttctcattaatcttctctctctcgattctcactcaaattgatgaaaataaaagaaaaagtggttaagattagccttgagaatcaaatcttaatattttttatataacaaagtaattagagcctcataaatcctgattaggtttattatgagaaatttataaaaatactgacctttggcccaaattttacaaaa

SEQ ID NO: 328180 - DNA, 2380 bp, Cannabis indica
tcgctaaaggtgaatagcgaggctctggagaaaagagacacataccttagcttgcaataagcaaactaagtgtaaaagtcagatcggctcgaagaacaagtatgcgagatgaccatctctctatgaggagacttcttatagcttcatccaactaacaggagtgaggctcataaccccggcaagtcagaagatttctttatacccgcgatcgacgtaagacatacattgtcgatctcagaaagaagaatggtcccagctcgctattaggatcactgcaattcagtttctgtctagacatctacagattcaacaattaaagacgtgtttaatacacaatatttttttgacccagtaaagcgggaaaatcacagctatacgattttcaaaatcatacaccacatttacatttcgtgatatgtaatcagatctcacgattttagggataatggctgtaaacacgttctggtcaactttgtaattaaccacccactatgtaattataaatagtggcaaacaatctcaaaagggggacgaaaaaactcatatgaaagaggctctaaaaaaatactcagaaatctaaataagatttactcgtggactatgcagaattttaattgtaaaaccacgtaaaaaccctgtgttcatatattatttttctatagcttttactttttctgtgtgtaattattaccgtgaggctcaaattcggttaacgaaaatttgcgttaacacaaatatttactgcgaaatgctcaatattaaatttttttaactaagcaacagacccacgaagtatgctatctatttaacttaggaaaagtattaaattctgcagagacaagttaatctaagcaaaaaattattttggcatataattcatttaacttaagttctattcttcataaaaaataataatacccgtcacaatatcattaaaaacaatttattagttaaacttagaatcctagactattgggtgaatagaaattgtaagaatcatagtagaataatgtaaaacctaatttagcagccgtctaaacaagatcaagacattaatcataaaatcaagcatataagacaattcaatatgaaggaataaaataataatattaatcaaaacattcaagaacttatgtctcgatttttgaaataacccttacttaaagaggactactccataatcacaaacatgataataagtataattacaaatgaaaattaataagtttaagaagaaaaactagatgaagatttagattctactcttctcttgagttctctccttcgaaagcgtaatgaaaacttgctgaaatatactttaaaagtcttatttatagaaacttaaaaataaacttaatttaaacttaaaaattgatttttcgtaaatcgtatagacgatgtacggacgtgagtgtctgggtgaagtttaagtggcaccttggtgctacttcctgagttgtcactatcgcgtgttcatatcagtattttacccataaattcttcaatattgctcagaattagacgattgaagatgttttgaaaagctaagaacgagatctaaaaacttttatattgagctctattatcccgatatttgcccacctgacgtagcatgcttatgtggacaatatcaatgtcacgtggcagtacagctcaccaacaaggaggtcaagtcaacaccttagcaaataggggtcccaacactcaaatgggatgacaagctacaacccaaccacctcaagggggctgaccagccaccccttgctggccctatggtttgccagcttctggacagcacaaggccgaccagcctgcatcctataggtgtatggccggttaggattggacgtggtaggactttggtgcatagccttacacgtggattgcaagctagactacaaattaggccttagcagcccacgaaatacacaaaaaatacttttttttaaggggcattttagtcatctatattttaccaatttaatatgtaaatatctacttattttattttctaattagggtttaagctctcctatataaagagccttaactcaaccctaaaaccctaagtcattaagtaataactaagtgagatctaagccaaaaagctctaagtctgataacattctctctcacacacacatgcccactataacatccctcaatacttgagattttccatctttgattcctactttgtaaccttaagagagctatatcagatcccacctatagtgatttgaatattattatctctcagtatcaatacaactaaaaggggagtaggtcattacctgctaactaagggggttgaacctctataaaaatccttgtgttcttttactttctaattctaactgtgtaacacatggcaagcatc

SEQ ID NO: 328181 - DNA, 573 bp, Cannabis indica
ttttattttactcttttaattttaattttctcaaaatatctctcctatcattttttgagtttgttcatttttgcatttaaaattactttattttcatttatacggtaaaattggtataaattacaaatatacggtacttcacagtacagtaaatgacttaatcgcaacacacacaataatctaactcgattcataatccacattacaatctacgcaacaatcgtacgtaaaataaaataatgtaaaattatattgttcatgtaattttaccgtcaatatatatcaaagttgaataattaaaatgctgttaaaaatatggcaaacaaatcaaacgtgcataataatcaaaacttaaaacaaatatgtacaagattactatatcaattgacaatgagagcttctaacgtttttcttatctcttccattttttcttattgaggtcaagagaacttaccgcatcaccaacaacgttacgggcatggtagatatatctactatacctcttaatatcttttgtaatgaccatgaggtctaacttcaattttatttataaatacatttttgaaaaaaaaa

SEQ ID NO: 328182 - DNA, 898 bp, Cannabis indica
gatctcaacgttaaaatggtgcatataaatccaaattggagcaattggatcacaaaagtttgattatttagaatgtgtagaaccataatgaagtttgtctattaaataattaaaaacacactccaaatatggacatatatgcactgcaatttccaaacatgtaaatctaaatactgaaaaagttgaaaagaaaaaaaaatctaaaacacaaatttaaaaaaaaaaaaaaatatattcaccgtttagtgagatgtgattgaaaagttcactcactaaaaatttgttagcaaattttattgtgtcgctaagcatcaattttgcgtcaaaaaatacattttaattgtatcattattgtaaatgcatcattaaatatcattaaatgcatcattaaatatcattttttgcaacaacaaataaacaaattcagtttttaattgcaccatcataaatccaattattttaataaaaaaaatcaatatctggagaggaaaaattttattttacatgtatttacaaattttatgtttgtttttatttgtttctttttactagctattcaaatagtattaatttaatatatgtttaaaagtatacgagaccacacatgtttttgtactattttttttatatagttttgatacattttacgacttatgtgccttttatatgacttttgtgtcattttttatgatttgcccctatttgtttaggatagttttatgatatcgtcaattggtaagagaagtgatcctgtttgtgctcgtgatttctattttaatgactttttttcttttaacaaataagtatttcaagtttaactctttatattaaatatatattagtttaatatcgttatttcacattatcctttccattatattgtgtggtaatagagttt

SEQ ID NO: 328183 - DNA, 809 bp, Cannabis indica
agactataaattaccttagtaaacctgctattgcatagaaatcggtaataggaagataatcatattaagccataaacaatattagatacaattgaaattgaaagctctaacttttattcactatcacttcttttattaatttacatgcttcttactttcactgtgtttagtgtttcctagttttaaatttttcttaaaatttatatagccaaatagaagtaaggatttaattttaacgtacttaactacacgtgatgtcaacctggacgttgggtgagtgagaaaacgcaccgagatgtattttttgatgcctaagtaatattttgacatcacttagtccatttttgtgttctaacgaagctggttactagttctcgaagatattattttgcagaaacaggaaactcaaaactatctagtttttgagtaaatcaccttgtcgaaaaaatgaaaatatgaagttgtgaatttgactcttttaagttcatggatctcagttactatgaaaaaataaatgaacaatcgagacagaatcagaatcggattagcagaaccaaacacaccaagccatttgtcaacatgggcgccaggtgcttattttggagcttttgtgatgttgttttggcacttccaatgttcttaaactttagggcgaggtctcctaccccatttttgactatttcagagagaatgcttggagtaaaatttacatttgagagatcaaaaccagcacaccaggttgattgtcagcctgggggccgttagacccagcaccaggtcaacctgggcactgggctcagttttgatgc

SEQ ID NO: 328184 - DNA, 825 bp, Cannabis indica
tcaaagttcgggaagaaaaaatcctaattaaatctttctttattatatataataataaatacataatatttttggaaattaattataagaatttgttttgtttatgtttttttaacatgcccaatggaaatcggtctcttttttacttttctacattttagtttgcctaattataatttttatcttccaaattttaatatatactaaataatgtttttaaattttaattctctcaaactattaaaatagttagatttttaaaaaaaaaatgtccatttgtattaacacgataattgttcacgtattaaattgtgttttcaaattttaatatcaaccaaatcgtaccccaaattttaatatttattaaattgtggcacttaaattttcattcataccacatttttttgttagtaaaattgaataaaaatatttaaattcaacaattttaataatttgagcagaatctttaccgcgaaaaagaatattattataattttattgggtaaaaaattaaagatacttactagaaataaataaagaaaaatctacaatacagccatgtaaaagatgtttccgtatactttctttttattttgttatttaaaataggagagttttttagtataaattttagggtgattctacactgcactcccttaaaagtgatgtacaaatgcaccattgacttgtttcggtatccagaagaactttttaatctaatttttttcatattcatgtacgttatagctctataagataacctacaaaattttgagaatttaaaataatttacattatgaaaacaatattcaaacagtctatttt

SEQ ID NO: 328185 - DNA, 1030 bp, Cannabis indica
ttttcgaaatcatgagatttatataatttccttatcgtaatattggagattaattatatgcacacattaaagaaaagaaaaaaaaaaagtcctattaacacacactgatgtcattattcagaactctttgcccccaccatcaaaaccccctttttgacctcagaacttctttatttattgatctccttttcaggggtcacgccctaacaataaaaactaaaaagcaaacgaaaaagaaaggcaagaaagataacaataatgtgtttataattaagtttattttgtttctatctagctatctatagctttgttaagtatattattataatatttttattattatcatgcaagcaatggggttccgatagttttttaaaaaaagtattaagtggtactttaaaatgccaaatatgttattattaatgtaacttaatattaaattttacatattttaatttacatttaacattaaattatatatattttaattaaataaataatataaaaaaccactgaaaaaaattacaatactctatatttgtatgatattagacacaaattacaccgcaatttgagaaaagtactatgcgtcttgggttgataactagtgataatgatcaagctatatatgcacacatatatatagctctagagccaataatagcgaggcaacaaagtgaatcacaaagcagtcatagaaaattacagtaccactggcatgcatatacattatctaaatatataagtatatttagcttttaaagcatgattttgatgagttcagttgtttattgaattattatttaattattatattatatacatatatagaaaactttttaacgtgtgtattaacatgaatgattactaataaatttaactataaatattaattttaaaaatatcaaactatcgaattttgatctagtaacgaataataaaatcacaaatttgaatttttatgcttaatttaactactaattaaaaatatcaaaaaaatatctctttttacactctatcaaaaatatgt

SEQ ID NO: 328186 - DNA, 614 bp, Cannabis indica
tttcatgtacatatatattttgaatttttgaattttttcaataaaatagctttttttaaaaataccatatgtttacatacattgtatacaaacctataaaatgtgcaatttactcttataacaattcaaaggaatgtatgagaactctaagatgacctacattcacaagaagacacgcaatatttttcttcttattaaagggaaatgaactttcattcaatggttttaaaagaggagatatcatgcaatagccaaattacaatgatagaacataaattcaagaacaaagtatcccaacaataactttgagattaaaatactaaataaacaattgtgtgaactttatacaaattatgttatgattctcattcttctttacattattcttattttttttcctccttccgattaaagcttcaaaaatagtgcttttatttttttggatacgagtttaaaatatttatataaagaccgtatatttttttgttgatattgggtagatgtgaagtatactcttgaaagaccatactttttgtaataaaaactatatttagaaaaagggtacttttaaaaatggggtaagttgaaaaatacctcttttattaatcaattaa

SEQ ID NO: 328187 - DNA, 538 bp, Cannabis indica
atattagtgtttaaaaaaacttgataataataataattcttaagttttgataatttaaagaaaacattgtacaaaatttgcaaaacataaagaaaacattgtaaatatagtttttaaaattaaaggggaagaattcttaaataaaattttaagaaaaaataactaaaagaaaatattatgaagttaattttaataatttataacccagtgaataaaattaaatattattgtaataaatatcaaataaaattaataattaccgatcttctaattgtacaataattatttagataaaataattaattacagtaaaactctcttaaatttagaaaattgtagagaaaataaataaataaatttatttctcttcatttttaattcatacgaataaaagagctataaacgattacaataataaaagatttgtcaccactcataagtgtaggagtattcaattcaatttaatctgcacatctaatccgcacgattcaatctaggggtgttcacaaagtatccgatccaatccaatccgcacgat

SEQ ID NO: 328188 - DNA, 1134 bp, Cannabis indica
agttaagtctagctagtattcagttacaacaagtaaaatccttaaaagcttcaatctcgatagttaagtcagttggggacaatcctgtctttccaacactcttagacaatgcctttaaataccaacctctactacacataaaaataactttcatgaacttctcttcctcctctccaaaattctctttgtacagaaatgaaagctataaaactcgatcctattatgagtttatagttgttggtgatcattaccattgtaacaccaagtgtgaatcaataaagattgaagctaaagcctgttctatctaaagagtagacagttgccactgccaagcaactgatcgaacctcattaaattggtgtgatttgatttctgttttgcattttatattttttttcattctcttaattagttagttcaatttattgcactaattttcatatcttgattgcttttcgaggtgattaaaacaccacagactctttaaattgttatttgaaaattgtttcagctagttattatcacaacatttagtaacatataacttaaagatctgaatatatagtatgagggtttgttttcctaatattattgtaggattcccggacaataatttagtaaagtttggtttgctcaaacttgtaatatttatctctcataataaagttaggtattttcaattttatggtcattgtaatatataggaggccaagaagcatatgagggttttatgttgagtgatatgttgtaaaaagctaatttttttcctcatcaaaagacaaagtacaattattttaattttgaggaagattgtgattgattaaaagatcatcttaacgtcatactagcttagattatctctaatggttacactaatttggtatagaatcttttacttttaggacgccgactccaataattcgtaccaaatatctcacgaaataaatatattttaagtattttatattaataacccaaaatagctacattataatataattatagcatgacttctaataagaatttaaaatcttaaataacttagtaaaataaaataattgttaaatcaataagacattacatttttttttaaaaaaaaaaaaaaacttaaaaacttaaactaactcaactaac

SEQ ID NO: 328189 - DNA, 681 bp, Cannabis indica
ttttagcatttaggtctaattttttttttatgattgcgtatgttgcagctataaaggattacttacaatttttttaaaaaaattgagaaatttatactgccaaaaaggttcaaatattttgttacacgtgcgataatttttcttatatgcatagtgaacaattgtttgaactttattttcagcactgtaaactctttataattttttgaaaatttatttgtgatcctacataggtataacgtacacgatcatgaaaaaagttagagtagaatatatttttggttaccaaatagataaaagatctaccaaaatatctctttaacggtgttctacgaaacaatttctatagttttttattttgcgaaataattttctaggatgctaagatattgagtattgaatgtgaaacataatgttgagttagcattatatttatttgtgcacatttttataacaaaaaatataggaaatttttatagtacacccattaaagtagtgttttggtaaacttattgcctgtttcggcatagaaaaaatttttttaatctaattttattttacgaccgcgtaagagcaacaattggtttagtcaggtttttacacaaaaaaaattagaatttggttttcgattatcatggttataatttaaaaaccggttgactattatataaatataaaaaa

SEQ ID NO: 328190 - DNA, 921 bp, Cannabis indica
gctcgccttgaacgatctacagatctgcactatttgatgaagattgatacaaaaggtgagaaatccaagtcacaaaactttgactggtatttcagattgtctctctttttctttctatgtgtttatctctctgtattttcttgtttctcactcactaacacttgtttctttctttgcatgaacatggaacactgagatctggagctgaagcttccagatctggaaatctggggttcgagtttctggtatctcttgactgagagatctggtatggatctagtgccctttttatacttgtagtttagggttgatcatagatctggaagttagttacagcttcggttgtaactaacaaccagatcttgatccactagaggcgaagccacataggatctgtttttagtctttgtgttctgttgtattttatttgtattttctcttcatcttgtaaaactgtaataataaaaattacagtgagatctaatttaacagtattatctcaaattaaattgaccaagttgaaaacccaggtgaataataagctgacttttttattttattgaaaacgaaatgttgacttatgtgttcaagtttattatttacattttttttttcaaaaagaaaagtttattatttacatcatcactaacgatataagttaggaaattaggagaccgattgtacttctataattatcactgagaagactaatttattatataaaaatattgagaaagctaaaaggaagggattattatcacatttagggtctgtttggtatacatgatactggattggactgaaaaagattagactggactggactggacaagattgaattaaataaattttaagaatagtctgaactattttatttatttcttttttagaaaaaaaaaacttaaattaaataaaaatata

SEQ ID NO: 328191 - DNA, 2025 bp, Cannabis indica
gtttataaaatcacacacgtggcgttcctatagattagggcattacaacttggtatcagagtagccatggtcttaaaggtcctgaagactggtggaatatgtacattttctgcgaggacaggtcgactcatggtatacgaagtatctatattattctctattggattaccagcctaggctattataaagtatgttgggaaaagtagcatagtgatcattgtgataagaatatgtgtatggtatttgcatattgatattgatatccgtctgagttctaaatggttagaagatgtggactaactgtgtgataagtaatgcagtaagggaaatcaaatactctgattagcgagctatttgggctcggggcaaacagtatggaagagaattctttattgccataaaattgggaacatgtaaattcttctatgcaggatatgattagacaacaagcaaaaatagatttgagatcttaaaaaacaacaggctcaccttgtgtttgttcttgtattaccggcacatcttgttgtaccactagatgtggtggaatatatgaagccaacttactagtagatcaggaagcaaaaactaaatgaaccaccaatattgggacaggataaaaaaggttccagggtggtcaggatagaggttaagatgaaaataagaaatggtgaccttatcctgagtgtttaagatgcaaaaaggctcgtagcatatcttctagtatttgaattgtccgttcggactgtccattagtctgacgatggtaaattgtactaaacttcagtttggtacccctagctctttgaagactttgctagaatttcgaggtaaactttggatctctatcaaatataattgacttcggaattccatgtaatcttactatttctttcacacaaagctctgcatactggtccgctgtaaaggttgttttcactggtaaaaaatgtgtagactttgtaaatcgatctaccacaacccaaatagaatcatacattctcgtggttctaggtaacccaacctctaaattcatagagacatcctcccacttccattagggaagtgttagtgcctgcaataatcctaccagtctctgatgttctgccttgatctgctaacaaattaagcaccgagatacaatttccacaacatctttcttcaatccacaccaccagtagtagggtcttagatcttggtacatcttggtagtgctaggatgcagtgaatatggagtggtatgagcttcctctaaaatctcattcctaagttccatactacctggaacataaactctggtcttgtataacagcatcctattatctgaaactgcaaaatctttagcttgaccagctaaaacctcttctcggatcttcaccagttccgaaccagttaactgagcggctttaattctgtgtaacagatcaaattgtaatatcaaattatgaagtttgcctacaacaaactcaatacttgatttgactgtgtcatctgctaactgaggtaaaatcttaatcatactagttaccttcccgaaacccttcctgcttagagcatcaaccactaggagtgttcatcgaaccgctcaaaccgcccgcaccgcaccacaccgcaaaaaaaagcgatttaaaattttttgcggtgtggttgcggtttgaatttttcctaaaccgcgcggtgcggtttggttttcggttttgaattgttaatatgcggttcaaactgcaccacactgcatcatgtaaaaataccaatttttatatttatttaggtccaatatgtaaaggcccaacctaagcccactaattattgtattgtgtaaacttgaaacttttttttcatatttattgtcaagccttattgtatttttgacaagtgttgctcaaactttattgtatttgtgatattttaattatttagtgatagtccacatagcataaactgcaccgcaccgtaccatttttgacggttttttagtttcgcggtgcgagtgtggtctaggaaattgaaaaaactgcatgtgcgggt

SEQ ID NO: 328192 - DNA, 711 bp, Cannabis indica
attatccaacccaagaatatgacaattggatacctacatgacgaagagcaagggcttccgaagttttagctggaaaaaagccaaccatgtgtcagtagccaaggcaaagtcattcccatgagcatcacgaataatcatacccatacaacaaaaaccaccatccaagtttaaacccacatcaatattaaccttaaaataacccctaaagaaggtacccaacaaggcacaataggaggagatagattaggcatgacattcccatgagaactccgaagaatagcctctttgaaaaccaagagaggtttttgacaatcacttaaaaaagtacgagcccaattaaccaccaactcaggggacataaagtaattattatggaccattgtatttctcctataccaaatagggccgaacatcaggcgggtttaccgagtttcgggttcgcgggtttcgggttcaaaaaaatgaaaccgaacccggacccgaatagggcacgggttggcaggttcgcgggttcgcggatttctggttcgcgggtttgggttggccgggctgaccgggttggcgggttgacccggtcaactcggtcaactctttaaaaaaaataattttctattcaaaactataaaataacaataaattaaaataaaatttatatatattattaaaaattattatatatttctgaatataaattatttaatataatatata

SEQ ID NO: 328193 - DNA, 882 bp, Cannabis indica
cttagtcgtatcagtttaatgggcagttcaaaaccaactcaccccacgtttcagaaaacgttattcttcccgttatttttattcaatccattcgcctatataatgcgattgaactgatgggaagaaaacctctcttttgtatcagaaaaatacagttttcataaaattaaaaattccatctgcggtatcaaattttctgggtgtattcgacggtgctctacagtgcagtggggttccgatacagtacaacgactgggctgttttatcctggggacgaccgacaattttcgactgcttgcacactcctgggcagttccgcgaacgtcttaaagagagcgacatagtccgcgactcaacccagaattcttcattcggtaatatcgttcctcttttattttgctagcagtttgttcaacatatatacatgggttacttttagatttcattgagtattatggcttacagattggaatactgcaaaatttaggctaaaccttttactgaaaacattgagtaacatttcaggtttttttcaattgtttttctttatgatttttttgtataaaaaagcgtaattatctttttattttgttggtttctatttgataattatttgtgaagaggagaataacaaataaagaataaaagagatatagagaaattagggttttcttcaattgtaaagttagaagtaaaaaaataccgttaataagaaagtcttatataggcaactaatataaaagattaaaataactctaaataattatttcacaccctctctcaaactcacgatgttgctgtaagaagcattgagagtttgcttaaaaaaacacgaaaaatgagaaagcgtatacgacttagtaaaaaactcagcaagctgcg

SEQ ID NO: 328194 - DNA, 1205 bp, Cannabis indica
attctcttcaaatccaaaggaagagatgacatcatgaaattttaaataccattggcgggatgcttgttttaatccatagatggacttcttgagcttgcataccaaatcctgaccttcactagaggagaatccttctggttgtttcatgtatacctcctcctctagatcaccattcagaaaagcagtttttacatccatctgctccagctctaaatcaaaatgagcaactaatgccaagatgactctgagggaatctttctttgatacaggagaaaaagtctccgtatagtcaattccttcctcttgagtgaatcctttagcaacaagtctcgctttgtacctctcagtgttgcctaatgagtcttttttagttttatagacccatttacatccaatggctctcgccccattagacaactttacatgttcctagactttgttgcacttcatagaatttatttcatcatccatggcattgtaccacaattttaattctctattgttcatagcttgtaaaaatatttctaaatcatttctaattccaatatcagattctaataaatacacaacataacctttataaatctttggtttgacaggtctagtagatcttcttaagacacctgaagaatgtcgacttttgccgacgctattaagtaatagcgccgacaaaagttacgcaatgccggcgcaagtcaacacatgcgccgggaaagaaggtcaactttgttttcccacctccagcctttcccggtgcttaatctcgccggtaatagttaattatgccggcaaagttcactcactgcgccggcaaaggttggcaccaaactgccaaaacgtgggaattgttggcaaccttttgtcggcgcatgctagtgcgctggcaaaactattcatttattattttatttattatttacttttgccagcgccgaggaacaaaaagcggtccattttccctcgcagtggaaaaacgtgcccgtaaaagtaggtgggacttttgccggggacatcaattgccccggcaaaagttgagcccttttgaccaaagggacatgttgcatcagtttttactttcaccggcgcataaacgcgccggcaaaagcgccaaaaaaattggcggtcaacttcccgcccaagtgaagacgtgggacaaatttaggtgggaaaagctcagacttcaccaacaggctcttggggagcag

SEQ ID NO: 328195 - DNA, 720 bp, Cannabis indica
ttccaatagatcgcttttctttcccaagattcatttaaggctcggcgaatctcacattcccggttccagtcgcgggacccagtgggaaggctctgtaaagagttgagttgattttcaaggtgcttgatctccaaatcaagcttcccaaattaagtacgattccagtgcaggagggcaactctcgtggcgccaacttttttaaacactcgcgcaggggcccaagagtgaataaccgacttccaagcgcttgctaccaccaatctgctcctctcatcacgagtccacccttcctcaaacttgaaacatctcttggtctttggttcgaaaccacccgattgaaggaacaacggcctgtggtcagagttactcgtatggaccgagtagagaacgactcttggaaaaagattgaaccaagcaccgttggctaatcctttatcgagggcagactttacatgtcctctaccagaacgatgattatcccaagtcatcttatctccttggatagacatattgataaaaccatgggagtcaatgagattcgagataatcgggataaaagggtcccttcccgatgatccttctctttcagaagcacaaagaacaaaattgaaatctcccataataagccaaggaccgccaaatctatctcccaatttcaaaaatttagtccaaaaatttttcttagcatgcaaatagtgagggccatacacacaagagagt

SEQ ID NO: 328196 - DNA, 688 bp, Cannabis indica
aaaagaaaagaaaagaaaaaatacaaaataaacaagtgaatggatagaaatgttgaaatatttatttcgattaaaaccgcatcgcaacactaccttctctagtgagaacagacgagtcaggagacaacggcacaatgttagatcgaggtctctttgaccttggaactggtagaggatttagcgccggaggagcaagagcaggctctattttccaaggtgaaactctctcaggacgtggtattgctgaggtttcatcccatctcacctaaaagtagtaaatatgatagctttagaatgccaaatatggttttaacactgcaaccccttcgatgaaacagactccaacttaccttcaggcatctccatttagaatctttccatctgttgggatcaaattcttcaatcccaattattgtgcctgtaaacctgcaacattacaaaaaaaaaataaagcaagatcggaaaactacatggacatcagctaagtattggagccagaacccctgtacgaatcgaaattattcagaggaaagaaaattggggcaaggattcacaaaactaagatagagaaagattctaatatcttgaaataaaatgttacgataaaatgcaaaacaaatcattaggatggcaaattgatgtctttctgtagagtgaaaaaaaacacttgctatttgggttttatttt

SEQ ID NO: 328197 - DNA, 1562 bp, Cannabis indica
ggacccaatggttagctcagggagacaagaacactaaattcttccaccgctacgcctcccacagaaagaaaataaacaaaatccaaaagctccacttggccaacggcggtatcgtctctgatgaggagagcataacccgtgaaatggaatcccattttcaccaacttttcacatcaacgaatccctcggcggaagatgtgaataaggccttggaaggagttacgtgctctctctccgagttggataaatctttcctggctgaggatttctctctcgaggaaattgaaaaagccttttttcaacttccctcggataaagcccccggtcctaatggttttaactctaatttctacaaagctaactggtcctctgtcaagaatgatgttctcaaagctgcggccaactttctcaatgaaaacggggacattgctcctctcaatacaaccctcatcactcttatccccaaagtcaaacaaccaacctccctttccgagtatcggcctatcaacctttgcaataccatctacaaagttatctctaagactattgcaaatcggctaaagctcgttctcaacactttgatttctcccaaccaaagcactttcctccctgatggactcatttcggacaaattattgcccaggaagtagcgcattccatcaagctcaagactaggggcaaaaaaggttggatggcggtcaaggttgatatggccaaagcttttgatagagtggaatggaccttcattgatgctatccttcggaaattccaattccctacccggttttcccatctggtgttctcctgcatctccacggctacattcaaattcaatcttaacggtagggttttaggcaatgtctctccgtctagagggattcgccagggcgatcctctctctctccttatctctttctcctctgtgcggaaagtttctcctctcttctgcgccagaaagaaagagataagtcccttccaggtataaaagtggccaggagagcccccgccatatcccacttgctctttgcggatgacagttttctcttctgtcaagggtctattaattcttgcaatgtcatcaaagaggttctcgaggtgtacgaaagggccactgggcaaaaagttaacttccaaaaatcctctttgtacttttctcctaatgtggagctgcgagaccaaaccttaatctctgatttcatgaggattcctgttcgtccctcttttgagaaatatctgggccttccacaatacattggccgaacgaagaaacaactgttccattatcttcatgacagagtctggggccatcttcataattggcgaaacaaagtcttttcaaaagggggcaaagagactctccttaaatcggtcatccaagccatccctacttacagcatgacctgtttccgtctcccggtggctacttgccgctctctcgaatccaccatggcaaatttctggtggggctctagtgacaataatcgccccaaaatccactggcaaagctggaaaaaactctgcaattccaaaacgaatggtgggcttggttttcgttctctggt

SEQ ID NO: 328198 - DNA, 857 bp, Cannabis indica
ttgggaaattgaggtagttctttcctgaatttgatggatttctagttgattatattttatggaaaaacatgttttggggttgtgttgttcttgagtgtatgctataagaattgatgtttaactttgttgagtctgagtgtgaatagcatgatattgttgtgatatatgttggattgtgtttgggtaagctttgattgtaattctaggactttttcccatgtttgaacctagttttatttgatgttgagctgctgaaagatattgataatatgtgggtttgaagctcaagtttgagagcttgaagttgtgagttttaagcatgttttgagttgattttgtaatctggttttttcgggtttaatattgaaagttgatgcttgaattatgtttatttgagcatctagtaattgctagcaactctgtttgttaatttgtggatttgagcaagttttgggttgatttagaagtggatggttgttgaaattccatgaaaatgcatgttggtttctgggtttggaacccaggtgccgcggcatgctctgggcatggctagggcatgccgcagcccgccctggtattttttgggcagttttgagttcgaactttaaaatttcataacttttgaaaccgaactccgatttgggagttctttatatcgttggaaagcttcttacgagctctgtatgattatctgaattttaaatgccatgattgaattttatgagtatggaatcaggggttaccccagtgtgaaatcccagatttgtgtgactaggattaccggcacctgatcaggagcactcggggattcgaaagtctctgacatgtggacgaacaggtaaagacagtgattagca

SEQ ID NO: 328199 - DNA, 744 bp, Cannabis indica
tttcattgtgtggataaaaagttaatgttagttttctcaaccctagacttatgtgttggttgaattaatattaagggtgagaatatttcttcaataaagagatgagaaagtggggttgggttgtgcatatactttctttgtcaatacttttaaaagagagtgagagagaattgaagtagccacaaacatggtgacacatacgtatgtactaattcatcttccaaatacaaccaacatatatacaacaacaagaaaaaattaaaatgagttgagaaagtgacctatgatgcttaggtatatatatgcagaaaatgtggaaaataatttatactatatttaatcattcattcattatttatatatacataagttccttacatctatatatatataatacatgttaaaagaaaaaataaagtattttatttctgagaatgaatgcttttctttttttgtcttttccttttatttttggttaattttagatatggataattttaatattgaaataagtagatgacttaaatacataccctctttatatatatcattgatcatatgcataaaagagaaactaattatattttttttttattacaatatatatagggaaagtttagtagttttggttagtgtatttgtagagagatatttttaggtattttagtataaagtaggtcatatattttctaatagtgtatatagtattaatttagtaaataaaaaaattagatatatataagt

SEQ ID NO: 328200 - DNA, 723 bp, Cannabis indica
gctaatatttagcacaaatataatgtaaaaaaatataaccagtctaatactaacatgagtcgggttattattaagtattgatttgacaatcaatttaaaaaaaaaaacataaggtctgaattattatttaataaaataaagaatttaattgataaaaattataaaaaaaaaatatgaaataaaatagtattcacctcaatattaaaaagaaaaaacaattacaaataaataatacttaagtattgattacaactttacatttattaattttataattaaaatttatttgtatgtaacatatattaataattagattaaacaataatgagtgaacaaaattttaaaaaattatttactatcaatcaaatcacataattgaaatttaattaaaaaaaaaataacacagagaaaattcaaagtattataaattattttaacatgtttaaaatactaattaaaaatatttatttgaaaaatataattattatatatatttgaattattggcagcaaaatttcatttttttttactagttagtgacacttaaatctgaatcaaaaaactttagtggcattggcctctgttaattccatttttggtcatatttaattgtcaaaaaatattttattattcattgtatattttcggtctggtatactattaatatggtttcctatttggtgtattcaaacttgtaaaggaaaagttgtctagctttcctat

SEQ ID NO: 328201 - DNA, 588 bp, Cannabis indica
tatttaatttttttaaaaaaaaaaactcaaattttcagtaaactaacatacatttaataatgtggctattattattttattttattagtaactatttttatttttattttcaaataggagcttaagtagtgaaggcctaaaacggtcgcatataataatactaaaataatttgcaccatttttaaatgggagccttaagtagtggaggcctaaatcggtcgcatatagtaattctaaaataatttgcacacgtccaagtctttcaacaagtatactaatacattttacaaaaaagacataaaaaaactagtatactcatacatgctaaaaaaagagtatagtcatgaatgaaatatcacacgtttgatcacccttattaacaataagctaaatattatttaactaaattctatttattaataacttgagcttgtacgtgttatatgtaaatgtcatcccaaagtacacgtgaagaccactactgtaatgaccgctttagtaatttggattagtaaaagcaattagcactaatttttattattttattattatttatgaattaatttaattgtggaccccaatatttag

SEQ ID NO: 328202 - DNA, 621 bp, Cannabis indica
atgatgaatggcttgttagtgaaagtgaagatgaaaatgagacaaggccatagaataaggatactcaacttggagaattagaattgattcattctactaacaattcaaactagcaagtagtttaaaaaggggttcgttaactctaattcttgttttaatttacatattgcattatgttaatcaattattgattattagtttgtaattattttttcttagaaaaacgaaagcgcttggtagaggttgatgaagatgaatgggaggatattcatgatcacgatgggggtagtagtagtgatgatgatgataaggagggcaacaatttctcaagaatttagtgatttctaaatcatcatgtcattattgctgaaatttgttctaggataatggaatatgattctagttctagaaacaaaaatatatttacttacgtttgagttttattagacatttgatgctatgtttttgttttatgagacattttttaatatgtttagtatttataagacatttatcattggtatttttagtaactttaaaaatattattttaattaaataattgaggcttacacctcaatttacgcctcaatgcgctttgaggcatacgcctcacctcaca

SEQ ID NO: 328203 - DNA, 1733 bp, Cannabis indica
agaggaagtgaggaagagagattttatcaaacttagacttaaagcttggatgcaggtttcaggcttagaggcaacttagatttctaggctaaggttaaggcctttatataggacgtcgaaaaccctaggttacagtttagatccctagatattttcatagtttgttaaataattataacagaccaaagtacccttgattctagatattattcagctattctgttgggcttttagggcccaatttgtagcccatgagttgttatccacgtgtagaagtgcccaggaaagcctgctgagcacctcttagttggccaagtctctgtggagggcaggctagccggtcgtggtgcaatcccggccatgggtccgaccaagggtggtcggccagctcctgagagggagctagttcgtcacttgatgcatttttaagtgtcggggtctccgtttgttcaggttctgacttggccttcctattggtgaactatactgccatgcggcactgattttgtccatgtaatcatgtcaggcaaatgttatcccaatttatgtcctcatggcgtactactttgatctgaagtatgcgccaaagtaaaataggattggatatttttatttcagccagattggtcacgaatggatgggtgacactaattgcacaaccatgtcgaaggtttgtgagtatgctaaaagtactttatttcatatggtcttcgtaggattgggcactacaaatttcaaccagtgccatccttcagacgctctatccctgctttgcaaataagggatagggcaaaccacatcatgttctatcgacataacagagaaacataacccgattgaccagtatggacaatttctgaaagtacggcttatatccttctgcccttggagttgcaagagtgtcaatgcatatagggcctgcctttgtgatgggcaagttcctggcttagatgatgatgaagtacctttgtctcgcattgtgcggaatctagagaagaagagaaggctctccaccgacgcttggtcagtgggggtcctataggtgatgcttctcttcatatcaggcctagaggccaggtttttaatagacctacacaccccgtgcccgcatctaagggcaaggacaaggctgccattgaggactctgatagtttctcttctgatgatgatggtatttgatactttcgttcttgtattaaatgtttatgattactttctgactttgctactttctttttgcagatatgtcttccaagttgagaggtcttatcgggagacctttggatgggccttcaggacaggtaagggccaaggtggccaagagttctcatgttgagaatgttgtcaggccatcactacctccaagtctaccagggcctataccagccagatagcatgtgatacggcctaccggccaaggtactaagaggcccagcagaggagcgaggtcaattgttagatagagggctgctggggtagccaactagtgcatagtctcttcctttcttggacgaggatctaaaggagctaggtgatagtggacctaggctttactctaccggtcttcaggatctttctctggtaagttgtactttcaactctattcatcttcttggcattgtactggctggccgaccatgtggcttcttgcatgtggttggtcgaccttggaagcttatgtggggggttggccgatgttaaatgccaaaatattacatattttatagtgtaaa

SEQ ID NO: 328204 - DNA, 455 bp, Cannabis indica
taaaacgatgtttgtgttgatttggatggtttcatgatggtttatgtgcttatttgatgttgtatgaatgtatgttataaaatatttttcgttccaaacaacacattttttagtttcagcctcttcagtgtcatatttcttttgtaacacatcctagatttcacttgcttatttatttgagttataataatcataaagatcgtcagattaaccgttaagaataaaatgcttacacagaaagttattttcaacccaagaatcaaattccttctgttgcttctcgcgttcagcctctttttccttgtcggtgaaaggttcagggacgaaaggctttagagcagtgagaacgaaagcaactttattcatcgacaagcagaataacatcttctttttctatcgctaaaagtgcaatccctcaaaatgaaaagacttgttaatatcgttagaagcagaac

SEQ ID NO: 328205 - DNA, 1270 bp, Cannabis indica
gacgttttttgcctggtcacatgaggatatggtcggtattgatcccattgtaatgtctcacgccctaaacattgacccaaacttttgtcctgtccagcaaaagagaagactattggacaaagaacgggcgcaaggacttaaagaagaggtagagagactacatgaaaacaagttcatcattgaagctttctacccagcttgggtagccaaccccgtactagtgcccaagtcgaataaaaaatggtgagtatgtattgatttcatcgacctcaacaaggcgtgccccaaggattattttccactttcaagaattgatcaacgagtggatacaacacctgggcatgaaatcttgagcttcatggacccctattcggggtacaatcaaataagaatacatccaccaaaacaagaacattcaagtttctgaatagatatgggtctatactgttataagcttatgccatatggtctaaagaatactagagctacctaccatagactagtaaacaaaaggtttaaagatcatatcagagggaatatgcaggtatatgtggaagatattctcgtcaaatccaagaaggctggaggcacatagaggatatggatgaatgcttcaaaatccttagaaaatataacatgaaactcaatcctttgaagtgttccttcggggttagctcaggtaagtttcttggttttattgtcaatgctcggggaatagaggctagtccagagaaaatagaagccctcctggatataaaattgccaaaaaagacaaaagaagttaaaagattgactggttggatagcctcactcagcagattcattttaattttaacagacaagtgtgttcctttcttcaacatcatttgaggtaataaaaagtttgaatggatggaggaatacgggaacgcctttaaagaattaaaaagacagcttgcaaagcttcctgtactctcaaaacccctagacggaggagaattaggaatatacttggctgtcacagaatatgctgtaagtgccgtgctaatatgagaagaaaacaatgtccaacatccaatctactatatcagcaaaagactcgttgaagctgaaagacaatatattttaatagaaaagctcccttactgcctgatcttatcaacaaggaagttaaggccctgtttccaagctcaccctgttcgagtatacaccgaccaaccattggccaagtattgtaaaagcctgttgcctctgggcggttacttaaatgggcaatagagttgggtcagta

SEQ ID NO: 328206 - DNA, 953 bp, Cannabis indica
gtatttgatcaattgaaatttcaagtaaaggaaagaaaattaatttgaaatttattaagaacttaaatgtacatattacagatatttctcatacaataatctgtaattattaacacaatctaattattaacagtaattaaataaaacagagaaatatctttcataagaattctgtgcagatatattttatatattaaggtatattccttcaaatatattcgaatatcaaagaatgtaattaatatagacataatctttttgataatatttagtaattaaggctattattattatcattaattgtagaaaactatgcgttacatatataattaacatcacttttaatatttaactccttaattactatacattgtggtggaatatgtaactatatatttacacaaaatttatgtggttaacatttgcatgggacgtagttaattatttaattaaaattataatattatttatatttttctaaggcgccaatattctcaattattatgatccattgagtttgagtattacattagggaccaaactagctagattgtccatttcatgggggccaagctaaaacggaaaaatcttataaagatttttttaagggggccatacctatataatagcttaatgataaaactctcttaaattttattttctatacttaatacttatatatttttcttgacaatactcctttaagttcacattcatttgtaagtttaaggtgtctgttattttattttattttttttgaatgcataaggtgtttgttattaatttagagctaactacactttgatatgtttttattggtctagataattacgttaatttaaaataaaaaaaaatgagaaaattaccctcaatattttttttatattgtcctcttttatttttaacctttttttaaagcctatcattttacttttttttaaacattgtaccaa

SEQ ID NO: 328207 - DNA, 973 bp, Cannabis indica
aaacgacaaaaaggacatcattaaatttcttaatgacataaagggaggaactcattgaaaatgcaaacaatgagttaaaaaaatattaatacacacaaaataagaacgacaataatttggaaataaatataacccaaaaactaaaacgacaacaaaattgtacacgacatcaactacaatagtacacgacataacaatgatataaacgacaatatatagaatcacatacctaaaaaacgacaatatcttttgtgaacgacattaatcagcaactaacaacaggagaacaagtgagctgtgctaacaatgaaaagaagcaaaaacattgaaaacgaccataaaccaacagaaacataaagtggaaaaacgacagcaaccttagaaacgacaaccaatctataatgacaacgacaaaatgtcaaaatatgctaatacttatcactttaataaagttattacctttccaaagtataattaacgactcattaatatttaaatacagtaaattatgtattaattgtaataccctaaaattcttcaaaatagataatagaagtcgaaaaacgacactaacctgaaaacccatatacaaaaaacgacaactgatatggtggggtacaccaaaccaaagcatatttccttcttctatttattttttcctagtaatagcaatactaaaataaagacgtaaaacaggaaaacagtactaaaacgtaaaaaaccaataattactctgaaaaacgacaagaaacttttataaagagaggcaaagtgagatactaaaataacatgctatggataaaacgacaacacacattgtcgtcatggtggccactggccaagccaaccactaatggaagaagatgaatccttatccaccacacactagtaatctcattacttattaattaagggaaatttttctcaatttctttcttttatactgttacacgctggaatcaacttttatact

SEQ ID NO: 328208 - DNA, 2150 bp, Cannabis indica
tttttcttttattttctctctaatttgtatgggtctcactacttctctctttttaaaaattagtaaataattgtaattccctctaagaaaacatatcattaatgtaataatttttaaaaaatatcactaattaatggtgccgaataataatactcattaactaaatactacaattactactcgaaagtctgatgaattaatgaaaagttcaaagtatcttttttttaaaaaagtcttttatttattttttagtattttggttttaattttgcatagaagttgaaagattccaaagttagaatgggacctaaaatgtaaggtgaaaagtgattatcaatattgtaaaatgggatatatattgaatatacattatatatatatatatatatatacttttggatctatagccgacgtgttggtgtggcatgtgggtgggtcgtcgtcggaagtattcttattaactgcatttatatgggaaaataagaagaaagttaggattttgattagacctctaaacaatcaagtgcttttggacctcattcatctattcagcctttatttctcttttattttggggaagagaaatgcaaattataacctcctattacaattttttaattaacttctacgtttgaaattaaatgtctaaatatttttttatagcggtattcgttatagttacagtatcatccctgtaaatttttgaaaaattcctaatagtttacaatatcaaaaatagagttcctgatattccaatttaccacgctcgttcaaaaacttcaaacatatgttcggcactgtaaactatttgaaatttacatggatgatattgtaagtataatgaacacccccgtgaaaaaaaaaatctaaaaaaaatattccgacgtgtgttttcgggcatggaggttgactaagaggttgtaacaggaagttgacggtagcactcatctttttcagaaatattaaaaggcattaatggtatttagtacacgtgttaatatcactattagtttaactaaatatcgagtctcatataatttaatacaataacttttaaagagtattgctagccatcgtaaaatgacatattttttcttgcttgagaacaaaaagaaagaagacaatcccattcaaattaaattaccctaataattactttcttacactataataaatattatcattttatttactttataatgtaattaataactttttatatttttatttatatatttaatatgaattttttacatatatttcaataaaattttaatatttttattaatttttttatacatttttattaaaataaaatttattttatcctaaatgcatttgagcacaatgataaaattttaattaaatataatattatctcatttttttagctaaatttagcataaaatttacaccatccattaaagatgatctaaaagcatctccaataaagtgctataaagatggtatatatgtattttttagcttatattcataaaattaaactctaacactatttgacgcgtcaggaatgaaaaggcgcacaataattatcattgtaatgtgaaccaatgtattgatgatatctgctatttttatgccgatttaaaaggtgctctccttcttgttgttttctcgatccagagagaggtttggttgccttctcctcgggattggctaaaacttaattgtgatgttagagtgggatcggaaagctcttgcattgcggtggtggctaaaaaccattctagtgaggtggtttgggctaatacagcaaggttggatttctctgatgcttgttgtggcgaggcagctgcatgttgtttagctcttgaaacggcaaagcgcgctcaaggggcacaagttcatcatcgtagaaagtgactcaagagtgatgatcgatgctcttaatcaagtgtcatcggtttgggggattgagaactattcttctttgtgttggaaactctcaagatgttttgatggatgcgtgtttacttgtatacccagattttgtaactttgccgctcacaatgtggccaagtgagcctttacccacagacaatttgataacttaggaatctcttcaattcctcaagatttattttgtaatgaccgtgaggtctaattttatttatcaatgaacgcttatt

SEQ ID NO: 328209 - DNA, 986 bp, Cannabis indica
taacctcgctcactccgccatgcaacaaccgagcaaaatgggggtcagactccaaagctttcctcgtggtttattttgtccttgccattattctatgcttggacgacaaattcaattcagatgtgtgccttgcaacaataataacaatttctggtatgacagtatgcctagccgatggagctggttgaccttctagtaatgtgtcaacaacaccaagttggaccctatatgtccaggaagcaggaagatggtgtctctaaccttttttcagttcctaaatagatcgattgtacccttctccacttatctggtcgggatattgatgatgttgcaccataggctctggagattctgaatggtcactactgacctcccaatcttcaaaacttgaagttgaagagctttcactagacgaagaggaatctgcactgagccgaggatgattctcgtagagaaaataaagaagatcatggttgatatgatgttcacctccccaaaatgctcagagatcattgtaagagcttttgagagagaataaattattctcgctcacaagtcaatacgacaaagatgggagtaggttattaccaactttaaggtgtcgaacctttctaaaatccagtattttctttactttaaactatttactttttgttatttaattattctcaatcgatttattttgattcattgtcattggctaaaagcgaggtcaacaaagtctatttataatttaacttttaattaattaattaattaattaattaacatgtgatcaacatatgtcttttagttggcattttacaaatctagttagtacataacaatgaaaatgacatcgctgtaaaaaaatagtaacaaaaaagactgtaaatgtaattataaataggctacttaggatttttgcctcctgaactttgacatgtaccaaataatgtctcctgaacttttaaggtcgttaaaaatgccccttgaactattgagat

SEQ ID NO: 328210 - DNA, 1347 bp, Cannabis indica
tgtgcgtgtttgttttatgtcaataacgaagtaaggcatgtgactcctgaaaaggtcagtccattgttattagtgccttcactaataacaattttaaaatgtcactaaaactattttaaatattataaaattaataaaaaatatttattagtcacattttcaattatcattaaaagtaaactacttagtaacatttgattgattttacctcataactatttagtaacctttgattttacttcacatgagcatatccaatattttttataaatgttactaaaattataaaattgtgatatttttaagtgttattaaaactcatttttagtataatgccactcactacaatcccaacaccataattcttaataagactcgtacacaaaagatgcacatcattaatttggtagttgacaataaaaatgaatcaacagaaatttgttaccatagatgtaacaattacctatattataaattagtagctacagctatcaagataacttgttaggttagaggtaaccagttaccatcaggattactggctactattatattctagtaacgagtagcctatattatagtaatcgattaattgttattcgttactatatatcttagctaacttactactttcttaccataatggcttcatgtattatagtaatcagtttcagagacttaaatttagtatcatatacttaatagttaatacatgtggtgttcaattatcattacaaaatacaattagtattagtgataatattttagtcacaaaaaattaattttttataattaaatatgacttttaatcataataaaaacttatttactactaaagcataatatttaaatataagttgtcactaatttatatttaatcacaataaatatattgtgactaaaaacacatttagttacaacaaattgtaatttttgtgactaatttttttagtcaccgactttttaattataattaatataagaatgatgatttataattagtcaatttttttataaaggattatttcacaaaaatataaaaacaacaaaaaattacaaaaatacgatttcacggaattttaaacatttttacgatttttttgattttatttacataaaatacggtctttttttatgttgtaatcttgttaatttgttattgattttttgttatatgtatgttattttttgttgttattttgatgttactttatgtagttttcttgttgaatttatgttgttttcgtgttattttttggaaaaccgtaaaaatataaaaaaacattttttgaacgtaaaaatgtaaatatttttatgtagttttcttgttgattttatgttgttttc

SEQ ID NO: 328211 - DNA, 755 bp, Cannabis indica
attttatattttaaattaatttatttttaaaattatatgtagatcgataaaattatgccacgtttacactatatctgtatagataatccacagtagcagttaactgtcaaaaatagatggaaatggctaaatacaaacaaaatacgagttttgctatcaaaatttaagttttgtaagttaattactagtgaagtgaaaatattaaggattatgccacaattaactccgaacttaattttaataaaaagaggtaaaaaaatcaacaaaaacattaatgttttatgcaaaatatataaaattatattaaatatataattaaaaatataaaacgttattaattgtattaatgggtggtaaaagaataaataaaaaataatatttattgtagtaaaacatttggtctatgacatattttgtgcttaatttgatacaacttttaagatattctaaatttggactgcattatacacgttcaattttatgaacatggattaaaaaaaaagaatttttaaactaccattcttttatattttatttatacttttacggtctaaaatttttaattacaaaaatacactttatttagcaaaaagtaaaaatacaactaaaatataatgagaaatcaatttcacaacaactataaatcaacaagaaataacttataaaaaaattaaaaaaaaaaaaccagaaaacaacctcatgacaactaaaatacaaataaacaaaccataaaacaaaaaacaaaaaaaaaaaaa

SEQ ID NO: 328212 - DNA, 1253 bp, Cannabis indica
cagaaagtagatgcttctttgtcattcttaattgtatttcttactttaattctttcattaattaaatgtaatttccatcactcacttcattagcatcttacaattcctcatcagtttattattcattaaaacttgaaggatttctattttattgtcaacttgaatcttgttcatctccacctattttgacttgtatcaattttccttgaactgacacaacttttaaattccccaatcacttacagttaaccaccgttataaagtgaattaatgtaacccatatagtagaggcaatattgctcatactgggcaccaataactaaattggaaatgtccatttcttgaattctcaactgataacaattaattaaagatcatccttgatcctaaagtttcttttctatgtttggtataaatcttaataatcctttcaaacacatcaaatatatatatatacctcaagtgtattccttattttattcaataacccttagtatgaactaccataccaacttatagtgagtctcccgttgatggtgctgattcatcaacatctaagactctcatattattttctcgtcattactactaaggttttactctatagttcatatgctactattgctcacttgcaatcatcactatcttcatacttgattaaccactgtaaaactttttttacattgaattatatagttcattgtttaacaaacaacatactttgtgatccaatattcaccaactacttgaatacatgcccatcaaattgcatctcagtttataagattttcccattttgggtgagtgtatataccttttcattattgcttaataaggtaatcttttctcagaatttcaatggtcaactcatataccagattgaccacctggtcaaatataaaagtattctccatcattaccgtatcaccatcagtaattcatgtaatcttctttaccttatggataccactactctttctaacgttctgttatacgttacctttgtaacgtccctacttcaagcctccactgggcccttacacccacggaatgagggctcttatacacgagtacatcactctggctgcttcatggactaacgactggccctacagaccagcacgagtgtttctagcattctttgtcctcactcgcatgcttcttgggaaaacttcctgaatgaaatcaccctaggtcaaggaaacttaaccgtggagttctttcgggatgggctaccgaaaaacaagatgcac

SEQ ID NO: 328213 - DNA, 656 bp, Cannabis indica
aaaaaataaaaaacttaaaaatagaacaaaaaaaaacacaacatttttttaatgacactagtgtattagcacgtgctttgcacgtgaatattaattttgttatataaaattaaaattaaaataaaataactttttttttttgaataaaaagagaaaacttccattaagatagaacagccaaatcggtcattaaagcgttggtaatagcatcagggacattgctaccaacaaaaaaacaatctgactaataacaaacaccgcgagcaagacagtgagcgacattgttagcagatcgtataacataacaaacatcaacatgaattatagactttaataaactaagacagttagtgatagttgaaccaaaaatagaatgcattacaacattactttgaagagcttgaaccaccactaaagaatcgatttccacaacaacatgctcccaccgtttttttcttgatctaacttgatgcctctttgacaccaatggcctccactaagctaggttgaacacaaccagctttatgcaagcaaagcgcctcgataagccgaccatcaacaccttgggcaagacagcccacaccaaaggaatgagttgctgcaaaaatagcaccatccacattcacttttattacaccagtcccaggcgcaatcca

SEQ ID NO: 328214 - DNA, 704 bp, Cannabis indica
gaaaataaccatgcattaaaggctcaaaagagagcaaacaaaccagttcaaatgtccacaagaggggtcactactacaaaatgtacttttggtatcagttttaaactgacacttacacttctagtgtcagttcataaaactgacacctatttctaagtcacaaaaagtatattctttgatgtcaattctaaaccgagacttttgtgcattggtgttagttttaaactaacacatatgggtgtgcaatttatttttgcatgtctcggtttagaaccgagacaaaaaacaattaattaatgatttttagattttatttaaataaaagtttaaaatatttacataatgcttaaactagattttattcaaaattaaataataatttttagattttattcaaaataaattcgttgaagcaaataataaattatttccaaacaatatttcagcaaacatttcataacaggtgttataacagaaataataataataataataaatatttacactgaaaaaattaatgagaaaaatgaaaatctaaaaaacaaatgcaatttccctctcctacaacagttactaccatctccacgtggtggttcgttggcatcggaggcccaagaaggaagaactttcatgttgaaactcagactgagaagatctgagaccaagggagaagcacagaacaatagaaccatgagcaatcttct

SEQ ID NO: 328215 - DNA, 1049 bp, Cannabis indica
ttcctctctgttatagatgattacagcagaaaggtatgggttttcttgcttaaacagaaaaatgattgtcttaataagtttagaaattggaaaatatttgttgagaatcaaactgataaaagggttaaatctttgagaactgataatggtcttgagtttattaatgatgagtttgatgagttatgtgtagaaacaggtattagaagacatagaactgttgtgaaaaatccccaacagaatggggttgctgaaagaatgaataggacacttctgaacaaagtgagatgtgtcctactcgattctggtctgcctaagaagtattggggagaagctctatacacttcttgttatctaataaacagaagtcctagtagagccattgatctaaaaactcctgaagagttatggaatggtaagcccccttccttaatgcacttaagatcatttggttgtgttgcatatgcacatacagtagaagacaaactaggaaaaaggtctacaaatgtgttttccttggataccaagttggtgtcaaaggctatagactactttcaattgaaaataataaaattttgattagtagagatgttattttcaatgaaaatgattttccctttaaaagaaatgagaaaggtattcttcctactgtttcaggtgataactctcagcccaagatacaaatcgaggtggagccattgcagcacaccagtggagatcttaaaatcctagatgggactgatcaagacatagaggaagataaccaatctgaaaatttggagaactatcaactggccagagatagaacaaggagagaaataaagccccctgccagatttggagaagctgatataattgcttatgctattgctatagcaaaagaatcaaatgaaaatgtacctagaagctaccaagaagcaatcaacagcaagcactcaaagaaatggaatgcagcaatgaatgaagagataaactcactaaagaagaacaaaacatggattgttgtaataaaaccagatggacagaaagtagttggatgtaaatggattttt

SEQ ID NO: 328216 - DNA, 1087 bp, Cannabis indica
aaaaaaaaagaaaaagaaagacatatatagatacagagatataaacaaagccatgacctcattcaaaaaccgtaatttcaaaaagaaaaacccaagttcttaaaattgcgtaataaacataaaagaaatatgaacaaactaacactcttcttctaataaattatataagaaattacctatatatatatatattatattaaccaactatcacgaaagacagagtggaactgaagcagaaccagtaagagaaggatgagagcagccacgccccagggcgagctaccctccgacggtacgtggtgggttctccggcgacggtcccagggtgagatggcaaaaagagcatctgggttttccatagatgagagccaacgaacgatgagcaaaataataattgggactacaaagagaacccaattgatttgttcttcggcggtttcgacggcttcctcgtaagaaaagtaccaggatgtaccaagaaagatgaaagcaactgctagaatgaggagaacagggtacggcagcggtgacagagtgaacccttctaagattgatgtggttgttgagcttcttcttccgtagtaggaggccattgttgaggagggccctttagctggttcttaaattcaaaattactatatatgtgtctgtgtatgtatttatagcaaacaagtatggtgtaaagtgtcttctaagaaggcataaagtattaaagatgttatgtgtgagactgtgagtgtgtgactgactatttcaacatttcagtacaattgatacaaatgcgacatctggcaaactatggttagcgtgtgaaaaaaaagctaattaaaatttctgtttcttaaatttttacatacattaaattatatctctaaaaaaaaaattcccttaagctgtttttaaatctaaccattttcataattaagaaaaatttttaatagccttaaaaattcgagaaacataatttggtatatactaaagtttgtaggcaaaaatttacttcttgatatatattaaagtttggaggcaatcgatggaacacctgttcctctattgcaactttgcgtaccatctttggaggtcctcc

SEQ ID NO: 328217 - DNA, 1367 bp, Cannabis indica
gataaaataattcaaatacacctagatattttaaaattagttttaaattttgaagagattttaaggtgtttttaacaaccctaaattttcaaaatagttggttagttaaaataataatttaattatataagtaataaatatcttatttcacaatttgttacatggacattatttgtttatttaaattatttattcaaaaacttctttttaacaaacctgttggactactctgtattgaatgatcttaggatctgttgcaagtttagctagcatgacagcgaacgaatttttatcttttggaccttggaggatgttataacttttgaatccttaccacactgatattcttatttattgtgttgtcaacacaatggaaagtaatcaagattgtgtgattaaatgtattcctatgatttattagtacagagggtttaactgatatgataattagtttaaggtttttcataccttttatatgtttattttcatcgttttaaagattcatatttaggatgttaaaaatatacttgttagtaaatctagatcctcgtaaaagatattccaacagaatcaatgtgtacttacatctgttgggctcctacttccttagctaacattaagcctgctagcatagcttcatgtcctgctagtgcccttgtggggaaataagaatgaccccaacttcagctccctttttgttggaatctctatctacgtagaccttccaggtgggtagctctaggattgggtctttcggaagatcatttaagctcaaatgctctactatgaagtcggcaagggcttgaccctttatacatacccgtggttggtagtggatatcgaaatggctaagttccatggcctattttagcaacctaccagaagactctgacttctaaaacacttgacagagtggatgattcatgagtacttttatggtgtgggcttggaagtatggcctcagctttcgacacacggtcagtaagataaatgtcaacttctcaatcataggatacgtggattctacacccagcaatcttttgcttacgtagttgactaggaactggaccttttcttcctcccgtacaattgcagcactaatggcatgattagacactgccaagtacaaatacaaatcttctccttccacgggcttcaataaattgggagcttaggttaagtgctccttcaacttcaataaagaaattttgcactcttcagtccatttaaagttcatgtttcctcaaaacatattaaagaacgatatacacttattcgtagacttcaaaatgaacctgctaggtgcaacaatctaaccagtgacactttgaacatccttgtacttcttgggagaaggcatgtcaatg

SEQ ID NO: 328218 - DNA, 1052 bp, Cannabis indica
cgggccatacaattacatgatctagaccgtaaaacaaaataaacaggtaataaaagaaagaacgattcatttacaatataaagagtagttttcaatttcccattgagattccacaccgttgagagtgttgatcactatctgtgatcgttttctaccaggataaactgatgtcctttgccctttgcagcctcaagcgccaagcaaaccgcagttgttttgccacaaagaacattagaaaagtccattgtggccataaacacccaaaacaccttgcacaggtagtctctagcaaaattgctacacacatatgctcccctccaaccttagcatcacaatttaatttgatccagtcttgaggttaagaagcaaacctgtttctctcttgttccttcccactgctcctcatgctcacgctttcttttccacatctctttggtttctttttcatcctttttcagcataccttcctcttcggatatctaaatttaaatagacaaaacatcaaagtcaagaaagcctaaatgcttaaaaacaatagccaaaataatggaaatagccaagacttcaacatacctcatctgcatttttcttctccaccatttttgtttagttaataattctctaacctttaatttcttgtttaaattcttctgactgttcatactgttgatcgtatttttcctgcatcataggtacataataattagtacaactagaatctgaaatcattaaaaaaattaactgtaattaggcaatgtaatctagtgtcgtctttataataataaaaatcacataatattttacttaaaaagtttttttttttttatatgttacaagactaaattataaataaatatatgttataaaactattttcatagatgtataaaataacttgtaaataaactaaatagtatcgtaaacatcatataagttacgctaagtcaaacattaaatttaattagacaaaattaaatgtactaaccaattccataagttactaaaaaaattattttttaattattaaaagtaaagtttacttgttagtttctt

SEQ ID NO: 328219 - DNA, 1755 bp, Cannabis indica
acacattttcactactctcctcaaaatatttttagctttaaagcataaaaaataactatataccatagagttatcagatgacccactattggcgcctcccactgaaggaaggactcatgggtgatagcctcaaagaacaaaaattggatctcgtctcaagtactacaatggaaagataggtccaggagttggcgagcctgcaatcaacaagccccatgttgacttgggagaagatcttgagttagccagacttaaagaagtcgtaagctggcctaattgaagaaccacacgctattgattgcgatgtattcactcagtagagacgcggatggatgaccaagagtacatgcttcgatctcaccaagaggagttggatcgctgtaatagagaggtcaacaatctaataaggcactttaaccagagaactgatggaagaggccaagatctcatcagagatacacttcaaggaagactcgttgataaatcagggaggatctattgacaagctaaccaacctagttccttaaggactaggatagatcttcccttgccagagggaggatcgaccttgcctcaaaagtctaatggtgagaacagtcagatccaaacaaccagcaacatgggggctggctagggatctctagctcagcaacatcccccatcattcagcctttggctgcccagcaatctgcaggagttcccttggctgaccagaggagagcactccctccttgagtggagcgaggcacccagaggtcaatcttcaaccgacaaggactgagagtgggtggaaacacccaaaacaatgattgaagaagtgagattgatcacttcagacatatagatccaccaaactccaataacgggtttgatctacctactgttaacacacaggcaaaattagtcgaccaaagagtcgtgggtggccaaaccctgccctttgcaggtttggccagccatggaggcattacgggccgccaaagcctaccttctgcaggtctggccagctatggaagagtcgcgagtggccataccctaccctttgcaagtttggctggctatgaagaagttatgggtgaccagactctgcctaatgtaggtttggccagccatggacagcagccaagtgtagacctggccagccaaagccaacacccatacctaggaatggccaaccaaggtctgtaattcaacacaggcctagctaacctccaccatacactttcttagactatgttcggccaaaccctatcgcaccagaatctataacccctccaacgagggccagttagtcaagtcccaacaacaacaaatcctttagtgaaagcacagttggaccaacttagggacatgattcaatgcatagctggtctgaagccttcagatcttgaattagatcggtcaaggggatcaccaatctcggcatacataaatgccttgcccttgcccaaattcaagatgctagtatggaagatgtatgtcggatgagaagacccgttggctgatatcaaatactttgagatgcggctcgatctctagaaggttactggtgatgtgcaatgtcacatatttccatccactttgtccaaaatagctcaataatggtacttcaaactcaccccaagaatatttaactcttaggtagagttctcttgagaattcttgttgtacccaaaagtgagtgttttaatatttatacttgcaagtgcacgaattgtttcggaatataatgttcatgtaagtgcaaggtcgaac

SEQ ID NO: 328220 - DNA, 1478 bp, Cannabis indica
acccccaagagtaaacaccatgccagatgtaggctttttgtcaccaagacaagcctaaaaatctgagtcggtatagcctacgggatttaaagcaccacccttatggactaacacgtaatgccatgtacttttcaagtacttcagaatattcttaactttagtccaatgttcctctcctagatttgtctaatacctgctaacaattcctactgcatagcaaatgtcaggtctagtgcataatattgcatacattagactcccgactgctgaatcataaggaacccttctcatgtcctctatctcttggagatcagtaggagactgttccttagatagacgaataccatatctagaaggcttctgtcccccattggtatttgtcatggagaatctctctaacaccttatcaatgagcactcccagggatttaaaaaccctcatgtctgatcgaatgatggaaccaccaatccagtctcacatatgattaaattcaacacaataatgcgacctagtaatgtgacaaacaatttaagtaatgtgacaaacaatttacgttttattttgtttcccacctcgctagttggagcagcaagcagctggttcaacaagtttactcatcattccataatttcctgggagagctgttcaaggacttcaaaaaacaattccagtcagcaacggccagacgacccgaggcgttctcactaaccaatataaagtaacagccaggcgagatgcttaaggtgtacttaagtcattttaccatggctcctacaagagttagaaatatagatgacagtacacaacttactgccctacaggtggggatcattactgatccatcaacaactgggggcgaactgtgggatgacttgaagggtcgtccactgaagaacatcactgagttcaatgaaagggctcgggtgttcatccaaaaagaggaagctcaaaaagagatgaatttgttgaaaacaggctcgggaggcaaacccagcaatgtttcaacaagtactgtctcaactagagttgataactcaggggcctctatcgtcaaaggataaaaagaaacaaaagaagcacaatacgtacgtgtcagtttatactgtttataccgagcttaattaaactcgtgaaaatatttaccataaggcatgcaaggcacaaaatagaccctactaggtattgcaaataccataaggaaattgggcacataacaaacgaatgttgtcagttgaaagacgagatagaaagtctcatcggttggggccacttcaagcagtatttgaaaagacggggcaatggatataaatgttgggaatattttaccaggatctagatttactaacaatgtaataaacacatagtgtttatgaaaaccttacattgattgcagcgcaatataatgactccttccgttccagatctccagcccttgattcctttctgtagcagagcattatcgagatctgaacctggat

SEQ ID NO: 328221 - DNA, 979 bp, Cannabis indica
accgtttttttttttttagaatagtgaacagtgtgaaaaataagaattacaaattttcaactttattttttttagatttattatttcctcttctcatcgcctaacctagctagagtagtgtaatatatattattgatataatatatttcttataataaaataaacactggtgaagattttaattttaatttttttttcttgtaaaaatcttgaatatatgttagttttatttattaaattatatataaatatatataataaggacactgtatttgattgaatttatgtatatgtccaatgaccaaatgtcttggtcttcaagtcataaaactaattatataaatatatatatcttcaaaacattgttatggtgccccaatagttaattataattattaatattatttattaaattaaaatatacgtgggatttaatattagtactaaagtaccttaaaagtttagtaccttaaaagtgtgttttcatatttttcgtatattcatgtaagttattaatttataacacctcggaataaaaatatgagaaatgctaaaagtatcttcttatatgtcaatatcactattggtccaattaagtatcgggtcccatataatttagtataataatttttagagagtattgctagccaattacaaagcgacatgtcgagaagtgataggcaccactactgcttaatagcaatggtctaaaaatatgtatacataaataaatgaatttgatttttaattgaaaaaaagaaaaggaataagaggaagagtagaaacatagcaataaattagtaagtgaggcacacatgggaatgtgaagaaattgtatataatctaattaagaagagtatgggcaatagtaactatatacagtcacccatatatataatattggtagttttcttgggcaaagagttatataaaaatatacatatctatatatatatatatatatatatataataaacag

SEQ ID NO: 328222 - DNA, 976 bp, Cannabis indica
ttttcaccacacaccctctcttaactcatactaaacacatattacccttttatatacaacacttaaccctaagggggttatattaggcttattggggtaatgagtataattaatggtggactataatttaatgggccaattatagttttagggtgctcccatgtgcctctaatacatttattaattattaaccatcccattatggtagtgaataaatattgggcacatagctaatgattgtgattatggtattatattagtccacaaataaataattctaacatttgataatgaagtaaaaccttcaataagccaataattaaaataaccatataattagtattctattttatatacaagttatgaaatgaatgaattttatatatttatgttgtattgtttttttttttgaaatattttggtagaaaaatatacaagtgaaacatattaagatcgatcacttaaagttttataaaacgatggatagaatcaaattttgttttgtcattcttatccccacattattatgtaattatacatgtatatattaatataaactatatgccttgatctttgaatttttaatgcttaatttctttcatggattaattgtaatgactaataaggcatgtgatgtttattgtgttaatttgaaaattcaattctaaaaatgacacaccacaataaattaaattatttgcggcaattttttaattgaaaaaaaaaacaaaaaaattactgcaaataacttaagaatttgcaacattttttatcgcgttatatcaccacaaaaaacttatgtttttaattgtaatatttacgacaacataaaaatgttgtacgtcacaaatagagaaattttattggtttttttttttttatttttttttttattttttttactatttcaaaataattttttattttacattgttaaggaatgatctacatggaaatctctattgcaactagcgct

SEQ ID NO: 328223 - DNA, 898 bp, Cannabis indica
ttcttttgtcattagaaagaaatgctatcctatgttcctattgaatttaatcaagccgatttgcaggcataactatatttatttgttcatatcataaattataaattatattagagatgttcttttattatttattgatttataatttacataaatttacataataatttaaaataaaataaaaaataaatattcaagtatgaataaatcagaacaaataaatattcaagtatttcaataaattcataaacaaataaatcagaacaattcaaaatctcaaatcaagaaaattaaaagtttagatttataatctttacaaatatgaaaaacttaaatagatctatctaccattgttgttgccgttgcttagttactgaattcttaaacaaaaatcactagaacttatataaaactaatatttacgtggctcgccacgtaactctcatctagtatatatatatatatatatatatatatagcatagcaactttttttttttgaacattaagcaatccaatagttacaaaaggataggctagtcctccactatagcgaggcagccattggaggaactcatccatcctagaaacaagaagttttacaacataaaatattcttagctattaaatgtgttgcattattcgccaatcttggttgaaaaaagacacctaaaataccattctcagccattaacttgtaaatatcacagaccattaaatcctactccccacacagctctggcggcctaccaagcatcgccactgccatgttgcaatcacgaacaatactacaccgctccagagacagcaacctagccaataaattattatgtatataagatgaatgaggtttcatctcaaaactaattggctatggaaggagtagctcattcatctta

SEQ ID NO: 328224 - DNA, 1243 bp, Cannabis indica
cagcaccaagtttagtctctctctctctcaattgtaaggggggtaccctagtgatgctattgtaattagtgtgatacaccattgatgagtgtaaaataattgtaagaactctggttgtaatgtgttaataatcaataaaagaatacattcttgctgccattgaattttgagataagctcctctatttttattcattttttggtttgaagttttaattctgatttaaagtttgaatttgtgattcttatgagctattatttatcataacagctaatttaatgtgaatctatctcacatcaaatgatatcaaagcacgagttctagttgaatgtttcaagatccgcattcaaagtcttgaagaaccacatttaaactttaaagaatcagattcaacttccaagaaccaaactttaatggctactactagatttgaggtggaaaaatttaatggctcaaatgactttagcttgtggagaataaagaaagatttttacggttcattcagggatctcaaaggcattaaatgatgaagctatgaatctcatagaggacaagatgaagaaaattgagattgtggccaaggcacacagtgccattcttctaagtcttggtgatgaagtgttgagaaaattttctgctgttgaaaaggcagttgatctgtggaaccagttgtcatcaatctacgtaaagaaatatctaccaaacaagttgtatctcaagaaaagactacacacttcagatggatgaaactagagaactcagaaaacatattgctcagctctttgccaaagaggggagagcaatagagaaggattgttgattgtcaaaggaaattaccccaagaaagaatacaagggaaaccataattcaaatgggtacaaagggaatcaatctaagacaaacatcaggaactctataaagggtttaaattccaaaagaaactcaaggaaatagtgttattattgtaagaaagaggggacttcagatataactgtttggcattgaaggttaagctgagaagagacaataatcaaggtaagaacaagaaccaaggggaggctgatgttgcagataattatgaatctgcaggagttcttgctgcatccagttcagagttaggtggaaatggatcatggattcagggtgctcatttcatatgacatcaaatgagatttattgagttctctactaaagacacaataacaaagccagtagcatcaaagggattggtctaatcaagatt

SEQ ID NO: 328225 - DNA, 1693 bp, Cannabis indica
aggcaaaatacacactaccagaagcctcctcccctgtacaaggacagttcgcgaagggatcccaacaagagatgcaaatatcacaacgacattggtcacaataccaatgagtgcaagaacttgaaggacgagatcgaaaacttaatctgattgggtcatttttatgaatggattaagaaccggctaccccatctcaacccggtcccagtaggggggtcgttacctcaagaagcaccagggggcgcaccaggagaaccagaactcgttgtaccctccgcatgagcaatcccttagcaggtccctgggctcccaccaagagccaatgggagagtggccatgatctccggtggatcccatattgggggaaccacaagaaaagagttgaaacgctacgctggagccattaaacacaacgaagtgtgagaagtcacccaacttccagcacaaaggccccgactcatggatcagcccattactttcacggaagaggacgccaaactggtgcgttttcctcaccatgacagtcaccctcgtgctcggataccctcagagtacttttaagtactgcacattagtggtggtagactgcccaaccgcatacaacgccatccttggccgaccgaccttggttgacttcggcgtaatcacatccatctggcacttacgcctgaaattccccactcaggaggctgaagtagggaccgtaaggggcaatcaaggagaggccaggtagtgctataatgttgcagcacatttgccagtgctgatggtccgtgagggtattgagcaagatttagcagaagaagatgagttggatcgccgtgtgggatccgaaaaaactgtagaacctatggaggacgtcaaagaagtacaagtgtgcgacctcgaccctaccaagatcctccgcctaagaacaaacctagagtcggaggagagagacaaaattattgaagcattaagggcggccacaaatgttttcgcgtggtgccaaagagacatgagcggcataagcccacatgtgattacccatgtcctaaacgttaacccagatgtgctgccagtacggcagaagcactgtccccttgatccgataaaagcggacgccgtggaaaaggaggcagacaagctactgaccaatgacctgatccaggatgtgtactacccaaaatggctggctaatccggtactggtgccaaagccgaatgggacatggcgggtatgtatagacttcaacgacctcaacaaggcctacccgaaagactccttccctttacctcggatcgaccagatggtagatgccacctctgggttcaagctactgtctttcatggacgcctactcctgatacaaccagattaagatgcacgttgcagatcaagagtgcactagcttcaggaccgataaaggggtatactgctacctagttatgcctttcagattaaaaacactggtgcaacatatcagagaatggtgaaccagatgtttgaaggcctcctaggaagaaatatggaggtttacgtggacgacatgttagtcaaacccaaagcatgtgtgagccatgtcgacgacctcaaagaatgctttgaagtagttccggaggtatggaattttcctcaaccctaagaaatgcactttcgaagtcaagtcagggaaatttttggaattcatcgtcacgccaaaggggcatagaggc

SEQ ID NO: 328226 - DNA, 573 bp, Cannabis indica
cataaaacccaacaaattcttcatagtattagcatgttgttttttagggattaaaacaattagggtattattaatattagaaaaatcaacctggttatttaaacactctaaaacagcatgaataaaatcttaaccaaatgtaccccaatttttctggtagaaaaaagcattaaggctgtcaaggccaggagctttatcaccagaaaggctaaaaatagccttcttcacttcctgagatgtgaaaggctgagccaaaaaatcaatttcagactcctctaggggggccctaagcagcctaaaatttgattagtagcttcaacatcacaaccttcagaacaaaaaagagttgagaaaaaagaagagattatgtcaaacatagcctcgggatcactggtggtattaccagcatcatcttttaaatacctgatggtattattctttttcctataaggaagcaaacctatgaaaaaatttggtgtttttatcccctgccttaagccaactaacttgagctcgttgcctccaatattgtaatgaccgctctagtaatgtggattagtaaaggcaattagc

SEQ ID NO: 328227 - DNA, 677 bp, Cannabis indica
gtcttgtgtgttgacttttttttagtataccaaatagctacatacgtagccatcttgtatttactatggtcatacaatcatagtaatatgtatatgtattttaatcccatgtttttcaagatatatatatacacacatttatgagattctttttgttagaatatgctttttgaatcaatttttatggagtgtactatctacgaactttccttacaaagcatcttaggaaacgcaccaaactaggcattatcaacctatggttagctcaatatgttttaaggagattaacatataaataatcttatgaggtgggaaaatctaggtgaaaaaccttatcctaattataaacaaacaaaaaacatagtcacatacacaaacgaaatatatatttatatatattttggtaacttattaggtagggcatcactattgtaaagaggttgtttatataacattgtctatacatgttacaagtctcgtgagtaaggagacatacggtataagttgtgcaattccacatcgtctagagaaagtaagtatgatgattctgagactgtataagtatgagactacacagttaaaaatgacttaaatggattgatgggtaatacttatatcaacaaggtgcatcttattttttggtggcccatcacttaagaactccaaaattaagcatg

SEQ ID NO: 328228 - DNA, 604 bp, Cannabis indica
taagtaaaaattatattattaatatgagtggttaattaattaagttgtataaaatgcaacaacacaacaggatcaagatcaaagaggtgctgctaatggcattgctatgactgcaatgtctctttttaaagctattggtccagctgcaggaggtgcaatgtaagtaactaattaataataatcatttgtaaattttctaaatcaataatagattttgtaaatttttaaaatctaagcttatattgttataggttgttacttttatgctatattttgaataaaatttctcaaacaacatattaataacaaatatcttacccatttaatatgcattttgtaagatgttagatcatgttcttgacgaaaaaatgatcatgatctgataaaagaatttttctttttaagtcaagatttatctttaaataaaaagattacgaatcccttaaataattatttgtattcaacagattttcttggggagaaacgcgtttgaacgtatccttccttccaggtaatattaatatatctttatttttaatttacaagttaattttttatttttattgtaaggtattattattatttattaagggctcgtttgcaa

SEQ ID NO: 328229 - DNA, 1019 bp, Cannabis indica
aaaaaaaaattctaccaatctatttaccctattatttatagtggtataatttatatattaagacatattccgtgatttgagtaatgaaaactgtaaaataagaatggaaatgagaaataaaaatataaataaaatagaatagaataaagtttaagaagatcatttattttattttatttttgtcatgtaatttcttttcattttttattttgtgggggaaaagtcattattagtgtgtatatagatttgttttaataatattaagtaaaataagggtatcaatgcagatgaagtctttatatatgtatacttttattgtggtggatactatttgacgcgtcaggaatgaaaaagtgcacaataattatttatataatgtgaactaatatattgattatatccactgttcttgtgcagatttgcaaggtattctccttcccgttgtctcctcgatccagagagagaaatggcagtctccttctcagaattgactaaaacttaactgtgatgttaaagtgggattagaaaactcttacattgcggtggtggctagaaattattctagtggtggtttgggctagtacggaaaggttagaatttttggatgcttgttgtggctaggcggctgcgtgttgcttaactcttgaaacggcaaagctgggcacaagttcatcatcatggagagcgaccagagtggtgatcaatgctcttaataacttattttttaattgggagattaagaactattctttttttttttttttgttggaaactctctagatgttttgatagttgtgttttatttgtattccagaacttgtaactttgccgtccataatgtagtcaagtggggttttacccacatacaatatggcaacttgtatgtttctaattctattctgttagacttattttttgtaatgatcgtgaggtctactatattattaaggctaattagtaatttttcccctcgaactttgacatataccaaatcatgccccctgaacttttttggccgt

SEQ ID NO: 328230 - DNA, 501 bp, Cannabis indica
tttagtaaaagtgattataatgtagctataaatatttttctataataaataagtcactacaaaataaaaatactgagtccgtcactagtttagttgaattggaccggacgtttctatgctagccactatttgcttgttgcaagcacgtacaatgaagaagcttcaactaatctaacagaattcttttgactccgttattggtcgaccacactccaaaccagtaatactatctactccgttattggtcaactaattattaagagtttctatacttaaaaacaacggaaaaaatttattacaaaaaaaaaaaaaaaaacaacggaaaaaatttaattataatgactcaccattgcaaaatatatagaaattaaattaaccatgcaatattaggagcagggccggccctgaaaatatatgggcccaagacgaattaaattttggggccttcaaaaatacataaaaaaaatagggctatttacaaaaatatgggaaaataaagat

SEQ ID NO: 328231 - DNA, 1258 bp, Cannabis indica
ggctttttgatttgagagaaggttttgattttaatattttttgtttcatttttacctcaacgatgttttgcttttaattctaaaatatatgtaggctgtcgttaaaaattttataagttctccgatgtttgaattttgtggctatcaagaatccagtctttcttcaattcccagtataattcaaaattgcatcctcactagatgcctcaaattaacaaatatataagaacgataaattgtatgaatttgtattttgtaagaacgataaaattaacaaatgtataaacgataatatgtcgtgaggtttggtaggtggcaattcaagtcaggacgaaatgagttggtggccattcaggtcagaacacaataacactaattcatacggattattgtgggttaggacgagtgaaacgatactttgtttttttttgtcctaattttttcattttagtggatatgtactcccgtgtaaacaaactcttcataattaaaatttgggtacagtaaatgaggtgcattttgtaataatttcttatacatataattttccatcggaaaaaatgacaattggtaataatatattatatataataaatacgttaattcgttttaaacttttttactaaaataaaaagattatataaacagtatatttggaacatattttatgaagattttatttactaatatttattttaataattaatttaattattgaattatttacaacatgctttataaaatagaaattaaacaccttaaatttgagtatacttacatcggtgacatatcaaaattaatgattccttccgtttagtactccaatccttgatttctttctgtagcagagtatcaccaagtactaaaattaaattttttttttcctaatatgtggttgatgttcacatactctttaagtgtcctgagtatcacagatgactagtatgactgaaatatttgagaaagagaggtgaaaaaattcaaaatctataaagaaagagaagagacttggttatcttatttttttgacagctagagtgaataaagtcattaacataattctaacaacatatatgtttttttttatatagatattcaaatagacttaggttaaataaaaaataataaatattttaattgattttattatttaaatcttattaataatataaaaatataaatcttattttattagaaaatactaattaaacaatatttattatttttaattttaaacctttaaattaattaatcaaat

SEQ ID NO: 328232 - DNA, 1496 bp, Cannabis indica
ataggaatattagtatgagaagttgctgcagaaagtgagtgagcagcagtggctgcagcagatgcaaaaggaaaaacattctcatcaaaaaatacatcccgcgagatgtataatctaccatctttagaaaggcacttgtatcctttatgagataaactgtatccaagaaagacacaaggaagggatctatagttgagtttgtatctattgtatggtctgagatttggataacacaggcagccaaagactcgaagtgaagtgtattcaggtttggtgtgaaaaaggacctcaagtggagacttgtaagcaagtgtgggagttggcattcgatttataagaaacacaacagtacgatatgcctcatcccagtatttcaaaggtaaagaggcttgggcaagaagagtgaggccactctcgactatgtgtctgtgcttacgctcaaccactccattttgctcatgtgtgtgaggacatgagactttgtgaatgataccacattgttgtaacaaagtggtaaaggcttggtattcaccccccaatcggtttgaatggtttttattttatggcccaattgcagctcaacttgagttttaaaagtggtgaaagtaggaagtgcctcacatttagtacgtaacatgtatatccatgtgtgcctagaataggcatctacaaaactaatgtagtacctataaccactagatgaattaaggggagcagggccccacaaatcagaatgaagtaattgaagtggttgagtgtagacagtggtggagtttgagaaaggaagtttatgatgttttcccaaacaacatgcagcacatagatcagaaaaaccagactgagttttattattgatggttatattacaagattgcaaggcactttgaactattctagcagtgggatgtcctagcctgttgtgccaaagagaaaaatcagcattatgaacaggtaaggagtgtgaattacatgctggaatacaagaagaaatgctggaacaattggttcgagtggactgagctggtgactgactgagagattgcagtgggagagagtcaaacttgtacaagccattgtcaagcctcccaaccagcaagatcttcttggtagccaaatccttgacacaacaagaggtagggaaaaattcaaatgagacattattgtctgtggcaaattgggagacactcataagattcttagtgatcaatggaacatgcagaaggttatttaatgctaagaattgagagtgattaggggagtaaaaagtggtatgaccaatggttttgataggcaaacctgatccatctcccataagaatttgctgatcaccatttaattcagtgggatggttgatattctgagcataaggtgtgagatggtgagtggcaccggagtcgggataccagctattatctccaaaaacttcaggataaggcatagggagattgtatttctgcaatattagcactaccagcaaaggtttgaaatgattcagg

SEQ ID NO: 328233 - DNA, 1225 bp, Cannabis indica
aattagtaacaacttgtatctaaatactatgtgttttagtcacaaataatttttttttataactaaaagtcacatttagtaacaaaaaattatgttgtgactgattttttttattgaagagttggtttagtgtttttgtgccttttatttttgttagatactttaattaattaattaaatcactaattaattaattaattaaccacctcatattgcattagcaaatagcaattaatgattcatgagatctatcaactttgaatctaatttttatttttatttttttttaataaaaaggacagaaaattctcaatgaagttgaaacttcaactatataaatcaaaactaattattataataacttcattttcatttttaatataaatatatatatatatttaaaaattaaatgagtgtgttgtgtgtgcatgcacaacccaacactttgatttctagctaagttgtaagaatgaagcaaagaccccacaaataaaagtctcactgtgttgcaggctatatatagtacactatatatacatatatataaatatatatatatatatatatatatatttacacaatttcatgttctattgcagaatcattgtataacagaagcaaatgtctaaactcatcatgtagttgttttgcatacttggattctgtcttgtgaagaaaagcatttcatttattatcataacggttagattatatatgattgagttgatctaacggttatagttaattagttaatagatatcccttgttattttttttatgaaaacaacaaaattcatcctattatatattatgtgtgagcaattaatcccctaaaaagagtgttttcagctggtagatgttttgatatttagaaaaaaaaaaaaattagtctatatttttatttataattgcatatagttatttaggattacttgtaaattatttagaaaattcttaatagtttacagtaccgaaaataaggttatttaaacagttacttaccacgcgtacgtaacgaaaaacagacataatttagattttcggtattgtaaactactcaaaattttctaagggtgcgtttggaagtaactatgtaattactaggtatggtaattactagggtggtaattacacagtgtagtaattatactatattttaaaatgctatgtttggatatgaggtggtaattacatatgaatttctcatatcttgtttagcaaaata

SEQ ID NO: 328234 - DNA, 1101 bp, Cannabis indica
gttttagctttacattttaggatatcctgacccctgagatattttgcatcaagaattctacagcataaggagtgacaccttgtcagcagcttctaaccccatttagccagaaaagcttgattcatctccttagttttcctaaaatcaaggtcgccccgcgatttagggaggcacagcttgtcccaagctcttcaatgaactccatgattacctttttcaaaaccccaacagaaatcctgtacgataccatcaattctagagcataatcggttagtaagcttggtagattgcatggcatagacaggcattgccaagcccacagatttgataagggttgctgttcccgccttttacagtgttttctctttccatctgtgaagcttggatgttagattctccgcaatgaagttaaaatctgcaaccgtacctttagaatggaaaaggggtagccctaagtacttggggacacccactgggcccttaatgcctaaagccgatttaatttccactttcaaggactccgaagggttcttaatgaagaagatagtcattttaagcttattgacacgttgccccaaccagtttctctagacaattccacatacttccggcatcccctacagtagcccttcccgcaaggatgaggtcgtccacaaaaaatatgcgagaaatggttggtccaccacggctcagtttgattcctttgatactaccatttctcaatgcatcatggataagtcttgagaggatttcagcggcccaaatgaacaagtagggggataggggatcaccttgccgaataccgcacgagggataaattctacccacttggcccccattcaggcaaacattaaaagaagtcattgttatacactgggagactaaattgcagaataactctaggacccaacaacacctcaacacatggtccaccaattgctagctgagcttgtcctacgctttagtaaagtcaattttgatggcaaacaacccctcctttcctcaaaactaaaaatattaatacataataaactctacatcgtactttctttatttataaacttggaaatgttgggtttatgcctaataaaactcatttca

SEQ ID NO: 328235 - DNA, 1758 bp, Cannabis indica
gcaactaatgtatggctttagcgaaacatgcataactccatgtggtaagatcaaactaccactaacagtcaacattgccccaaggaagaccaccatcatggccacgttcataatggaagatttgatgtcttcgtacaatgtgatgcttagacgactgactctgtatgaccttcgagctatctcgtcaatgtaacacttgtccgtcaaattcctaacggtggctggtaaagggactgcccgcgagtgttacaatgcctcattaactcttgccaataagacctcctccactgctttggcaccattaggaatgagaaaggctctcctacaaaagctagagagatgaccaagacctctagggttgaaaccatagagaagatgaagatgacacctaaagccacttgaaggtgcacccaagacggggatgacatcaaccctcattttggggaaattgactcgggagttggtccaactgtagaactcaaagaactttccctagacacgatgcacctgaccaaggttaacaagattggaacaaacctgatagaggctttgagtgagatgctgatggcttgcctcaagagaaatcaagacattctttcttggtcgtatgaggacatgattaggatcaatcctcaggtcacatgtcatgctcttaacatagacaaagaatactttaaactagtgcaacagaaacgcaggctccttgacagagaacggtctaatctctcaaggaagaagtttaaaggttatgagagaacaacttcattagggaagctttctacctggtttgggtatcaaaccctgttctggtgcctaagacgaatggtaagtggaggacttgtgtctaattcactaacgcaaacaaagcatgttgtgaagattgttttcctctacctcgaataaatcaattggtggatgctacaaccaaccatgaactcctcacattcatggatgcttattttgggtacaatcaaatcagcatgcacacaccagacaaagaacatactagtttctgaacagacatcgatctttattgctacaaagtaatggcctttggactcagaatgcaggtgctacatatcaaagactagcaactgtatgtttcatgacttaattggaaacaatatggaagtccatgttgttgacatgctggtcaaataaaaaagatctgaagaccacatcaaaggcttagaggaatgcttcaacatcttacgagaatatcaaatgaagcttaaccctttaagacgtgcttttggcatccaatcaagaaagatttttggattcatcatcaacttaagaagaattgaagcgaatctagaaaaaatcaaggcactgcatgacatgaagtcaccatcatgagtaaaagacttgcaaaggcttaccgagcaaattggtgcacttagcaaatttgtctccaagtccaccgacaagtgtgttcctttctttaatctacgaaaagaaagcaacaagaggttttaatggactgatgaatgtgagcaagccttccaagctctcaaacatcacgtagtcaaacctcctatcctatccaaaccgatagaagggaaagaattattcatctatttggctatcactggacatgcaaccagtactagtctagggcatgaggaaaaagggatacaccacttggtttactacattagcaagcatctcgttggggccaagtctaggtatcccccattgagaagctggcttattgcttagtattggcttcaagaaaaataaggccatacttccaag

SEQ ID NO: 328236 - DNA, 523 bp, Cannabis indica
aacattaaatgttatttctgatctatgttaataagtaaatctgattatattgaaatgagtttcatttagggcataaaacccaacagtctcccattactaccaccaaccaaaagacaaaagggaatatggaaatactatagaaatctcaaaattcttctttgcaagtaaagtaagaaaaggaagttataattttcaacagtgaaaagattggagctttaaagaaaccaatagaaaattcgaaaggttgacattgagtcaagttggacttccaacactctcacccagagagaaaacaccttaatttaatgatttttggattaccacatatgattacttataataattacaactaaaaatcaatatgtaccacaaatagttacttacaataattacaactaatgtgttgcatcatgacctattttcgataccgtgttttaaaataaattaacactacaaaaaatcttatttttattcacaataaaatttgtgattaaaagtgaaaaaatttgttactaattataaa

SEQ ID NO: 328237 - DNA, 574 bp, Cannabis indica
gtttttggtaccaagaagaagcagcgtcttcttcgtccccatctatccaaacggcaccgttcgtacctcggcaacatatcaaaaacgagaaagagagagagagaaacgggtttaaggtctttagtactattctgcaacttttacagaatggaaagaaagaaactttttttcacttttcagaacatggtttcagagattttcagagatgaaggagaagaaagagattccaatgtttgaacgttagtgtattttctgcaaatgaaaaaaaaaatgaatgggaaatgtatggagattgggttatcttatgtgtatgttaaattttatttattttattttatattttaatgttgttttactattttgcccctattgacaatactacccataatagagttcttataattaccaatagtaccactctttgggggtaattctatgtcaatgtacttaatgttatcaacatcctcttatagttttggaaagagatacaccgatacatctctatgtgttttagtatttgaaataattttttagtcaaatttttttttttacatgtaaattatagttatttaag

SEQ ID NO: 328238 - DNA, 846 bp, Cannabis indica
ccaaaatttatatttttattattctattattttattattataatgagaatattttaatactaaatatatataattatttagttcttcctcttaaagtattatttaattattaaaaacttttattaaaaaaatagtgtggtctacagtgccctactaaatttgatgggacattgtagagaaagtcatttattagtatagttttagtgtctcattggagtaaatatagtgtgaaactatactatatttagtgttttgaagtccggttggagatgccctaagaaattataaactaagggtaaaatgatcataacccaataacctcacataacctcacacttcaaactattcataaatcttccgtaatacctctagaatactaatctctactattatgacacgattgcccaattcgtcgagtttccactgttgctgaacataaactatgaaaatgtcaaattttatatataacatattttgcacacctaaaattcaataaattctccgtaattgaaaaatcatatcttatgtgcctctttatcataatagtaggtcttatttcataataatacacatatatattcataaataataatttattattaataatctattaattatgtgctgattttatgcctatacatagagtcattacagttgggatttggttaaaaggaatgaagacataagaataagaatgaaaatagaaattaagggtgttcataaaatagccgatcatgtttaatccgcacaatccaatccaatccaattggcaaagtatggatattcgcacttgtgcgaattagattggattagaaaattcaaaatccgcacttgtgtggattggat

SEQ ID NO: 328239 - DNA, 1395 bp, Cannabis indica
ttttttctctagttctcttgtaaagcaattcgcttttgcgataataaatgctcaaagtagatgtagctccatagatatgaggaattaactactataaattgtagtgttctctatttaattattattttttctgtttgccatttttgcttattagacgataaagagttggcctttttttagcgtcaacattacccaatatattttttaattactagttaaattaaaaatttgaaattaaatttgaaaagatttttaattttgtaatttatataattaaaatggttttaattatgttttatattaaaatttgtttaattaaaatatatattttttttcataatttgaattgttttaattataatatccattattaaaattattattaattttaataattgtaattaaattgtttatttattatggtaaattactataacccaattcgaaacttttttggtgttaaagcccaatgtttaattaatcagaatcaattaggcaggagaggatagaggcaaaaggaagcaaacaggtgtggacaatggaggagggggacgaggtcatcaattggcggggaacaaccgcgcttgggagggagagatggtatttgagagagagacaagagagacagagaaggatatacgagagtcttttttaggtttaaaactcattaaaactaagagacatgagagagaaaacaaagttgattttatttctttatttgcttggattttgggttatcctactcaataggttaatagtgtagacacctgaacctggacccgactgtgtgtattcagatgggtgtgcggaacttaaaattttttgtttttccatttttcttggttttttgggcgcacgttggtcgagggtagtttgttctagttttctgagtcaagatgttcaccccgaaattaaataaacatagaatattgtatataactaacgagaatagtaaaatgttgtaaagtccttttatggtaatttagatgccaaaatattttttatttatggtgagatttctttgcattcttaaccgattttctctacttaattatttggttttattgattttttctatcttagggaacaatcattttttagatggacttttccatgtttggaaacttcttgtaagagaagaaattctcttatgaaaagtttatttttatggaaactttgactattattattttccttaatgagtttgattgtgtcttgataagatcagatcaaacacactgtttatggcaagtatcaagaccaaatacatgatcgaacatgtttttggcaagttttcttttcttgtctgattcgctgcgacagaatctgtatttgatgctgcaaatcaggattttatttaggaaagttttgtacagctgtagattcaactttgtg

SEQ ID NO: 328240 - DNA, 886 bp, Cannabis indica
tgattcatcaaaaaaaaaaatgtagacaatttatagaataaatgaggatatgaagttcatacgaaggaatagtctaatcttgtgaaatcccaaagttgatatctttggttataatgttaagaattaatgaaggttatctaagaggatcaatagaatattagaaacatactgtgagcatatttgataaatgttagattatcttagaataatatcttcccctgacgaagtgtttgtcttaaagtgataattaaatattctattggttaggtactttaataagtgtggtatgagagaaatattagacacctattcactggagtaatacaggtgagaaaagagtacaatggaccaaaaagacccgaggaacataaaaaaatcatggagtgaatctgagtagtatgctcacttcatttagtacatagaaaagctacactgatttaaagcgtaggaatatcaagttctaaataggagattttgtttttctccaagtatttcctatgaaagagatatgtagagatggaagttaaaccctaaattcattagacccttttgagactggagtaagaagggcatgtagcctattagctatccttgactcctgcattgtccagagtgtataatgtatttcatatctccatgttcagaaaatatgtattagactcgacccatattctgagttgtgacgatgttaagcttcagtcaaatttattatatagaaaaaacatcatgttcaagttttgatctggaaaaagaaagtaatatggaatgagacaattctactagttaaggaagtactgtaaagaaacagcaagatggaagaagcaacttgagagttagaattgtgaatacgagagtaatatcccgaattgtttaggtaaattttgag

SEQ ID NO: 328241 - DNA, 667 bp, Cannabis indica
taatctttactggcaaaaaatgacccataccgaatcatacattctcgtggttctatgcaaactaaccacgaaatccattgcaatttcttcccacttccacttaggaaaggctaatggttgtagtaaccctgccggcctatgatgttcagctttggtttctttgccgcaactgaaattcctacttgttgtcgagtggaagtagtaaaggttggtcgagaattaactaccaacaaaaagaaagggaagtccaaataacgatttcgatcttttcgatgacatatcaaaagactgatgtgtgggaattgtgaaggtaactctcattctagggatagctttcaaatttgcagcgttggaggacaattctcttcttttggtacaagggcccttatgaatgcaatgggtggactatatcctagttgaactttgcaaccatcattatcaccgccatattgatgtggcgctcaagtaagttcccttttctttatgtcacattgaggacaatgtgtcactttagtttggggggtgaactttaatttttttttttattaatttttagtttttagtgtttctttgttttgcatcaatttgaaagtaggtagatagcatgatttgaaaagttcatttatttttcgaaaaatctgtgggcttggtgatattacattcttga

SEQ ID NO: 328242 - DNA, 931 bp, Cannabis indica
atactagatattataacataaaagaccaacttatttattcttacacgtatacttattatttgccaactaactcttacaaacctaaatcgtggacttatcacattataagttttttctatctgtgatcaattatattgaacattagtagtttcaagttagctatgatacagtcccctccccattttaagaaaaaagtgaactatgttctacaatagaaaatgttatcggtaaggaagcttcatgttagattattaatttattgacactatttgcttttgtaaactataaaataggaacgaaaataataataaataaaaaaaaaattactatcaaccaaatttaaccaattagaatttagaagtttttaaaacctttttaagaaagcagtaccaaaagcttacatgcactcttccaaacgcacatgcagttttagtggttaccatcaacattattaattggctagaaactcacaaaaattacatatatccacttgtcgagatacaatttattcaacagctagtaaatacatatttttattttttgactttatgtaaacatagttattattttttattttgcacattttaaaattgtcttcctcgttggggaatgtggccggtgtacaacagtgcattagcaaaagagagttctcttgcgtacaagaaaaagaaagcagagagaatgatatattaatagttataaattatttacaattacaataagaaataaaaattttaaccggcaatacccggtaaaaacgcagtaatgtagtgaatatactgacgaccttttagcgcgggtgtctcgtcaaataccggcagccagtgccactttccttatttcatcagagggaacttgtatttgccggtatcaaatcaatgatttagaagattgttcattgttatggcattattttgagtttttttttttt

SEQ ID NO: 328243 - DNA, 1253 bp, Cannabis indica
acttcgggaggaagtaagcactcacacttcaaagacgaagggagttcgggcttgaaggtgtttcaagaagtcagattcataaagtggattacaaaggattgcggcaatactttagagggattctaaatttgtttaagtcaattgtctttgtaattttgatactttattaattgatttcattctctgggcgtggccccgtggactaggagtgttcgggagaacactgataccacgtataaatctcttgtgtcaagttatttatttttctgcaaatattttatattctgcctgttcagttctgctgtagcagaattactttctgctgctgcaaacgcgtacagtttttatattttcgtatatacaactgacatttgcaaaaacacggtttttcaaaactctttcaaaatgggttattagtttttttttttggtcaaggatcactttatttcatcaaaaaagaaaacaccttcacagaaaaataaggcatcccttttatttaaaaaaaattcattatctatcgtaataacatggttaactaatctataagccgcaaacgactaacatgactaaatgaattattagacatattttattgtaataaaaatatagactattaatatagcacattagtagtacacaacttaaaaaagtttttttgttttttaggagtttttaatttttttttacatttcaaagtaatttttcttttttgtatttttacggaaatctacatagcaaccaatggagcaacttaagtcgcaacctaaatatacataacaacccacatagcaatcaccgaagcaacccaaaccggaaaaataaaaaaaaagttaagaagtaggatatggagtgattctccttatttttatcataggacttttattattatatttttgatatatagagtaattatatcatttttttttaatgtgacaatgtagattatagttatagtaacaattttttataattatttattttttgtttccaattttttttttgaataatttatagtgtcaaaaataagatttaactagtgagttgcacacgtatacatgtatcttttttaatatgtgtgaaacaaattattttgaacattatttttgacaccataaattattcaaaaaaatttcataaataggtgagaggaattataaatataatatataacatcatatctataaggaatattggcagctaaaccacctgaactttacggtttgtaacacttaatcacaaaaaccgaatttttg

SEQ ID NO: 328244 - DNA, 1001 bp, Cannabis indica
aaccgtacttagcagttctatattaaagattctccttactttaatacactaccggcttattttattcatattgtataatcttaattctcttatacattcttacaaaattataccttctccatatgaataagtaatttttagatttttaataattatactcttataattaaaatattatttatcttataattatatttcatatattttctaatacattatcctttaattacttgcttttagggcataaaacctaacaatcttctacttgcactaaaagtaagtgcatctcattctataacccttatagacgttttatctcattcgactgttcaggctaagtcatatgacgagaacctccacataatgtagttctagatcccaaagatcatcacatcatcattggataaatgtacagaatttaattctagtatatttagtttgttcattcttttatttctttcaagttcattctgtttgattaatcatttaatattctcaatattaaatatatgtctattcacacttaattttgaaattgattaatctagaaccctctattagtcatatctaattaattttattaatgaagtcaatagattccatagctaatcatgttaaatatttggaataatccgtttcatttcacattcttgtcacatttaagtgcttctttaatttaagattacataattaataagaatatttatttctcgtttttgaaacgatactataatatatattcttcgattaattttctctctttaatcttaaattctaataactctttcaaatcgattcacctcggcatacttaatgctctcactaaattagacagacacttattgttcataggggtgttcacaatgtatccgattcaatccaatccgcacgatccaatccaatccaatccgcaaaatgcggatatctgcacttgtgcggattggattggattgaaaaatctaaaatccgcacttgtgcggattggatgtgtttgacctcaa

SEQ ID NO: 328245 - DNA, 618 bp, Cannabis indica
gatggactaccgaaaaataagatgcaccttgttgatataggtagtaccaatcaatctatttaagccatcttcaaccgtgtagtctcatagctacacagtctcagaatcatcctacttgacctttcctaggcggtgtgacattacacaaattactcgatattttcccttacggatcacgggactactgattgtcacacaatccaacctttaaattaagatgatcttcatttataggctgatgtcaaacactaagcaaacatcaagaattgccctgtatctcaacaaagatgtgtctaaaatttgtatcaatactctacgccaattgatgatagcatcaaatctgtaaaattaattaatcactttatacactaaaatatgatgttgatgatacgtaacatattattcataaatccaaactacccaaactataaaaataatcaaaagatcacataaacaaaacaataaaatgaatatctaacaaaatcatggcctcatttacggtaataataataataagaataatgattcacacttctttgtagaatttatacatgtatcattccatcttgccaggagaatagatgtttcttgtaacgccctaatgctaaggcacgctac

SEQ ID NO: 328246 - DNA, 718 bp, Cannabis indica
cctatttttgatttgagttcagaatattaaacatttataaacaatataaaatacttttttttttgaaagaaaaatacagaatacaaaattagcagtcactattttttaaatggcaactaacataataaatgaatatatgaatattttatctttctttttacaattataaaacgcaatttgaaaagttgtattgtccaattcgtatattttagaaatattataaaatttgctcatcctagaaacttttatgtaaacgttgacaaaagagttggcataatatgtaatatattatttggactgattgtaatttgtaaaatacctactaaactataattgttgtattttttttttttttgaataaactataattgttgtattgttttctcctcagttggttatgtcctttttgtattttgtgtaatgcttcaattttatttatttatttatttattttgtttacaaaagtgctcgtggaagctgaaataattttcaataattaatatattttagaaacaaaaattaatattattaaatactataaaattaatcacaataaaacttaataattaaatcgtatataattaattatttataaataatattagggtgattctacaatgcacccctttaaaaatgatgtattgatgcactcttaactttttcggtcatccaaaagaatttttaagtctaattttttttctatattcatgtacgttat

SEQ ID NO: 328247 - DNA, 1561 bp, Cannabis indica
tcaaattcaacaagtaaacattaaaactagttctatagctacccaagaacaattttatgaagtcaaaacttgtataaccactctaaatcactaaaccactatataaaaccaatcgtattaactttaaaacaaaatcaatcattacattaagctctccctcttcaatgatttactattctactactaccggagcttgaattactaggtttcgggttaaaatttaaagaaaattaaataatatgggtgaggatttcattgcaccgaaggaggagggtttcgttcaattttcagtttatattttttaaaaacttaataatatatatattaaactgataaggatacatttattaataataatattaataaaacttttattattgttagctatattattttttttagccactaagaaatatctaattttagggtatttggttaacttcgagtaccctaaaatattctggtatttctaaaatcaacttatctcaataatctcattaataataataactaaaatttttgtgatatttttgtcctccaattagatctccagggtagccgaatctaaaaatatttttatttcacaaacaatttacattatatccacatatttcagataaatctctgtaattaacaaattatacttatttatccacttaaagcaaaaatttataatttatgttacattaggttagcaggatcgtaatcatactcattactacctaattaatccataatatataataaatcataattattcataattaggattctgggatattacactttaacaatggaaagagggccaacaatgataacagtggaaacaactttattaacaacaaaaagccaaaaaagcatcatcgttgatgactatgtcctcgtaattgatacaatcttcatcacgcgtgatatttctcttgtctttgcctatgggtatgataacccatcatcccaccaaaagatgacttactacctagtacgaagtaattgaggtcatctcacctaaaatatataagttagcacgttatggtgccaatgcaaagttagtactagtgccttgctattcgaatggagagcacctaaaaaagtactactaatataagctgcttttcaacaacgacttaagccggttggtgtacttgcaaagtgcatttccatagttggtcattatacctaccagtaaagtttgataatgtaaacgcactaattacccacttttgatgtaataagggatgttttctcattttattcatcaataaaaaattgcaagttattttttatataacgacgcaacttgtatgattgttattgaattaaattgcaagcctaactaaggtcaaaagtgtgtgaaatcatagtggaaaacccatgacaatgacagttcctatgtgaaagctctgattacttaataagtgatcaagaggtgaacctacttagtcacttgggggcaaccacactcatacatggactagtaagcataaaacacacccacttaaatagattttacaagtttaaaaatttcttttcaaattctaaagtgtttgtgcattgctcaatg

SEQ ID NO: 328248 - DNA, 1026 bp, Cannabis indica
aagaacattatcaaaagaaaaatgcaagttgccaaaggggggaaactttcctcaaccaaagccttaaccaaggtctagttatccgaaaagaaagtgcccacatccacctccagcaacgcagccatattgagcccaaaccgcacggcttcgagctcaccctgcaacaccgaatgaactcgcaccttagaagcaaccgcaacaaagatatcacctgcaacatcataggaaacagctgcaaccgcgccatcgtctctcgcagatgcaaaatccacatagcatcgcattctagcaggtcgaggtaagccccaccgaactgcacaaatacccctttggttgctttcaatgtcccagccaacattcaagagaggtttgtgctccgcaaaactcaaatcgattgccttccgcacctccgccaaactcagcacccctttgttatggaaaatatcattcctaacattccacaatttactgatacaaaatcgcaccataaagaaaaaactcattcaaaatcttaccaccacaatcgtttagaaaccttggttctaagagcaaagaaaccacctctctacttcccaccaaattaaatctctgaattcttaaaccccacagggaggagaaccaaagagatctagtaacatcacaccccgagacaaagtgagaaacaacatccatctcccctaagccacaaagcatgcaccgcccaatgttggggccaaaaatggaagccagtttagatccgaaagggagaacatcttgagctagcctccaaaggaacaatttcaatctctcgtgaatacgcgtcttccaaatacgcttacaaacatcatccttatattcaaagcgagagttatttagagcccaataggcacttttgagagaaaaccgccccgaaggattgactttccaacaaagatggtccaaaggttgggaagagggaagaggaatcttcaaaatggcatcagccgaagacggtctaaaccaggtagagaccaattgtgtaatgaccgctttagtaatttggattag

SEQ ID NO: 328249 - DNA, 771 bp, Cannabis indica
tctctctctctctctctttacacgacacacatactcacatagtagtgtgttgtgtattttcccgatttcaatcatagtgtctcatgattcgagaatacactgcgatcaaaaaattatttcatctcgttatatttaaaagtttactcttttcctaagtgttgaggctgatctggaagacattggtgtgaaatcttcgacgagttcttatattagatgtttgttttatttatacaaaaagtagcaatgaaattctaataggaaaaaagaggtaaatctctatataattaattaggtttgtattatatattattctattgagattcggggtttaagtttcatatcaaatttaacaaatatttttttaaaaactaaattcaattctgctcttccgttgtgactctgatatgaaccctaaaaactaatactataaataaaaaatatataaatataaacacacttatatataaaatacaaatcaatatacataaaaatactaagctaatatatatgagaagagaatgagagtaataaattacactactgaaagatggcagcagcagtagcgcggaggtggttcgttgaagcttcgggcggtggagagggaggtggcagcagcgtggtggtggttcggcaaagcttcaagcaatggagagggttatgtgttttatagagagaagataagagatagatggagaggacttggacaaggaaggatatggggagggtttagaatttggagaagatgatgagcttagagagagagagagagag

SEQ ID NO: 328250 - DNA, 592 bp, Cannabis indica
aaaaaaaaaaaatatatgtaattctatctcaaaattattaataatgggtgaagtaactcatatatattaatagatcttgtattttgtattttcttgtatcattatttcactatattaaaacttaggtagctagaaacattacttttgatgaagtgagtccccttacaaatgattaattaagctatttgtaattggtgattcatgataattcattagcgatttcataaagttaattttatacccctcttcataaattttgggtcctctctctagctagttaaattaaatagcgtgtggtttgtagggcattacatatttagttgtatattttatacatggtaagtatataatatatatcatcatatatatattcttcatgtggtctatatataacaaacttttcactttcacttctaccattgtagaagcatttcctatttttcgttcattatgaaattaaatcccaatttcttcatataatgtaatatattagagtaattataatatataggcattatgtccgtcttcaaaaaattctgaatactttgtagtgtggaaaaataaaattcaaaatatgcacccggacaattga

SEQ ID NO: 328251 - DNA, 553 bp, Cannabis indica
agtcaattcatacatgctcctacatccacacattgggatgcctgtaagaggttgtttaggtacctcaagggcactatacatgaagggttattcatcaaacctgctgtcagaatggacctccaagcctactcggatgccgattgggctagttgcccggatgacaggcgatccactggtgggtatgctgtcttcttaggagacaatttaatatcatggtcagcaaaaaagcaacaagtggttgctcgatccagtacagaaagtgagtttcgggcacttacgaatactgctgctaaggttaattggatctgttatgtgcttcaagaacttcaagtacacttaccttgctgtccaataatctgggttgacaatcaaagtgctgcctctcttgcagcaaacccagtatttcatgctcgctcaaaacacatagaaatcgatcaacacttcattcgggatcaattgttagcaaaaaaactagaggttcgttatgtaccgtctaggggtgaaaatcggtcggttatggtcggttttaaaattttataaccgaccggacggt

SEQ ID NO: 328252 - DNA, 780 bp, Cannabis indica
gaaaacattaagtatttatgtcgaaatttatttaaataaaaaataaaaactagcatatagaattgttggtgttcgtgtcgaaaccgttttgcacccctatttttaatagaaaaacttggtggtggtgggccacggtatcctattagtaatccccagttttgatgtcagccttccaagtgtcattttcaaaacgaattcaaacacgattcatctcctatcacaaaagaaaagaaaaaaacaaacaaccaactccaagtcagttcagcttcactatttatttatatatttattcagagatataagattggatttagtcttatcggtagcaaaataggtaccattgcacttcacattaagagttactgtaattattgtgcatatattaataatttctatatttatttaccatctccaatctaatagagtccatcatatccaaacacctgtaaaaaagacagtgtaaaataattaacatcatcataacttaaggggacctacctacaattccatgttatattacaaatcatggagcacccaccgctcgctagtctaaaaatctgctgacaaaacacacagtattactttatatcaagttccaacattaaataaaaatatgctaacccaaattaaaatatgtgtaaaaagtaatatgtgttatcagagaatattgtcccatatgtgtcatcgtcgattagttttgagatggaaccccataattttcaacatggtatcagagccatatctctagcggactttcgatccacacctatcaaagagtta

SEQ ID NO: 328253 - DNA, 635 bp, Cannabis indica
acctattgtattagctcccatatctaaatacataaaaactcacacaacatttaatatatatataaataatagaactgctctggtaccaatttttagttttatggtactaaattaggtaggtaggtaggtaaaagaacagttacctctcgaagcctatcaggatattctcgattctttttgtatgttgttttcttgacacggtgataacaaaactcataccttatcttctagcaccatacacaaagactactgtgaactagtaggataatagtgtatataaatattacaatacaaattaatacaaataattttataatataatttttgtattatattaaaatttctggtacctaataattaatttaatacaaaattttaaccaaacataatatatttttcttatttagtatctcttatacaacctaccattagtccgaccttctgaatagtacttctcaaatcgaatacaacatttaatcaaaaaaaaaaataatcgaatacaacatttaatcaaatatatatctaactatatactagatagagttacgtggcaagccacgtaaatattagttttattttaagttcttgtggtttttgtttaagaatttagtcactaattgtaaattatgttataa

SEQ ID NO: 328254 - DNA, 682 bp, Cannabis indica
cccaattctcaattctttatttgctttctcttttaataataattgagttttatttctttaatatttagttaattcaattcaccgacaattttttttatccagtattcattataagggatgactgagctagacaataaaggatatacatgttggaattttgttaaagttaaagaatattttaacaaaaaacatgaaatggactcgaaagagttccacataaaatgaatctttgtttataaggatatataatgtggaattttgatacttggaatagggctcaaggagtatttagttttgtgcgaatagatgagaacacacactaaacccaccagcgcgcgttgtcagttcgactgattggagctggctagtgtgctactttatttttatagaaaatttatttaataaaataattatgttttatcttattttatttatttgaaaacgtgcttaatataaaattgaaaacttaggcgtataagttatgggacatgtttagcaacaactccttcacgattcaaaaatgttcttcttcccgttatattttttcaatttattcatctatataatgcgattgaactcatgggacgaatatatctttttcatatcaaaaaaacaaaacacagtttcactaacaaaaaaaaaaaaaaaaccaatctgcgatatcataatttttaaggtgtat

SEQ ID NO: 328255 - DNA, 1151 bp, Cannabis indica
ctctctctctctctctctctcttgcgcccttgatcttcccactaccccctctctctttttcagccctgaatccctccgccactatctctcagcccccaatcgctcataggtgtataggcgtcatccccaattgaaagcttttgcagccaaagcttcttctcatcaagctccaaaaaatcacatcaaggacctcaaactgcttctttcgtggttctagcttgggctcctcatcgatctttagtcgcacaatctcgtcctgctcgtaaatgtagagactaagaatcaataacttggattggtcttgatctgggttttgatgattttcctttggaaggagcttagctgtgagctcaccattgacgatggcgacatcatgggcaacgggggcgcatgaaccagggttgcgatgccaggcttgattgcaaaatggtgtctgattgtaattcctgaattcttccttcttccatgagagaaccgagctcaaattttactacgtcgagagagacaagagaggttcgagagcgagacagaatgggggttttctggttctagggacttagggcagagatcctgtttctccgatcttcttcaatgggaacgaccaacagtggccagtcaaaatgctctacaaaaactactacttttagtgacaatcttttagtcacaacataaatttttgtgactaaatgtgacttttagtcacaacaactaaatgtgacttttagtcataacaaaatattacttgtgactaaaacatagtatttagttacaagttgtcactaatttagttttagtcacaacaaatattgtgactaaaaatacatttagccacatcaaattgtaatttttgtgactaatactttagccgcggagtaccttttagtcacaacacaataatgataatttataattagtcacaactttttttatctttagtcacaaattttattgtgactaaaagtaagattttttgtagtgatagcagcgccgtcgaacgtaaagtcaaagggaataagggagcaaaaaaaacatgaacagtgaaagagaatgagagagaggttgagagaggaagaagagtgggaattagggttttaaattttaggttactaaaattagggttttttatttttaagtttttaatttaatttttt

SEQ ID NO: 328256 - DNA, 680 bp, Cannabis indica
gtgtgttctgacaggttggcgcggtatagtcacaactgggtattttgggccgaactgggttcgggcccgaaatgggaattgaattgaattatttgtcattttatttgataatgattaatcttaaattaaatgggtttgaaatatgcatgaaatgactaaactatccatgtttgaggtgtatgctttattttggccctaggggccatttttgtctttttgaggcatttgggttattagcaaaaaaatgaaattttgaggaaaagaaaaatgaatttctggtttcctctctctcttactcgaaccctcactctctcaaaacctctttggaatctcactttgatttggtgagaaaattatttggaagcttgcctaaaatcttgctattttggaacttggaattgaaggaggttcttgctttatatgaggtagtgtttctactgatttaatttgaaaattcttactgaaattttaggttgaaagagcatgaaaaaggttgttgttgagcttaggttgcatgagttggatattggtaaaatcttggtggttcatgcttgtttgagtaggaatttgtgtttggatgagctttgaatgtaattctagggtgttttccatggttcaacctaattttaattgttgattttgctgctgaaagtaattggggttgaatggtgttgaagttc

SEQ ID NO: 328257 - DNA, 711 bp, Cannabis indica
gagtttgagattttaatctttaagaaattttttgtagctattactacattggtgtgacatttgaatgtgataatatatatatacacacgtagtttttaacttttttaattaggtaacgtatttgataatgcatatattgtactttactatatttttaatcaaaactcacataatcaaatttgagtgtgtctatatataggctagattcgtaaatttgatataaaaagattttattcccaaactttacaaaaaaatatatggtgtgaattgatttaccataataaaatggaaaacaataaattccttaatataatcatttcaatttaaaatataaaataaataataataaaattaaaaatatttataatattttaaatttcaatttctttctataaaatatctacatcatttttgtttttattttaatttgaagttaaaccaataaatttaaaaataattataatatttaagtatttaaatttaaattaattttttattataaaatttctatataattttattttaaatatataataatataattaaattaataaagaataaactgttaagtaataggattttccgttaaagttaacatagaaacctaaaaaataatcgttaaaccgataatttcgttacataaccacattttatataaatatatatatatatggatcacttcttaataggtattacccatgaatggttact

SEQ ID NO: 328258 - DNA, 940 bp, Cannabis indica
aatagatctaagatcctggataaatataataccaacatccaaaccctctcttaatgtaatcataaggtctacccaattgattaattactcgtgacaccacatatgagtttgtagccccaaagtcaaacaatacagtaaaaataggagtcgttgacaagaagctaacctgttaccatagaaagactggctgcaacatctatttgagtaatgataagcactcgagaaggtacggactttgtctcttgttctaattcctctcctttcagtaaaggacaatctttcttgtagtggcctaccagaccgcattgaaaacatgccttacgattacattctcctagatgatgcttcttatagtgaaagctctatagataagtataacgtctccaaaaaccaccctgcgaacaaccttgacctttggtcccctgaaacctcttgttccatcttgaacccaccaatgtcaatgcaggtttcctcttttgctcaaccaaggagacactacaacctctgccataattggaaataaaaggaacaatgatcccaccatctgctataatcttctaagaccttaaaacaaattctgtagggctctcggcccaaagagcatccttcacatctaagtctccttaaagggctaggggtccttgcatccaaattctcccatgcaaaggtcccacttggttaccagccatacattgttctgctggtaacaatagaacaaaaatgattggcatatgaggtaaaggtacgtcaggagatccttgttgtctcaacctctgaatctcctcatcttgacattgaatcctagcttccatctctacaaacctttactccgaatctagcagagcctgtgggggatttcataaccatcttcttgaaaccttccacaacttctactgtgtacacgaggttttgggggaatttattgttggaaatattttac

SEQ ID NO: 328259 - DNA, 932 bp, Cannabis indica
atttcagcaaatcataaaggaaaacagaggaatattttttcatgtagtatggataacatttagctttagggctcccatatttttggggacatgtagtctcatgtgaaagcacatattaaaagctcgtacaaaagactaataccagtcttggttgatacttgatagtgacatgtgtgatataatgtatatgttaatgttattaaagttgggttctttgttatgtaatttagtatttgaaaatgttctattctatattagattagattgactggactagcataatatataacataatataatacatgagcaattactaagttagtatccaaagaaacataattaacaaatgtaaaagatgatatagacttgttcataaatttatataatcaattatatttttaaggttgacattagcttatagtgacataataagtgggactctcattatgtttcttgtgatgtacccatccaattctatatgtgaaaattgaaatgtattagattaattgagaaatgaatcaggcttcatgatcaaaaaagtattaatattagcgatatatatttatgatagtaattagcttaaatttgtaaatatcatgatgataagaactatgtaagggatcacaagttaattcatcattagttaggtggggaaagttttaatgtgatattgttaatcacatgatataaaatgatgatacaatacgtgcagggcacttgaatcatccattcatagtcagtgcatggattttttgttctaacatcattaatatcttactgatttataatctttttaaaaaaagaatatatatcaactatatattatgtcacaaataaaaaccacaaaatatatttatctcttataccttataagagaaaggaatgataattgatattcatttaagtttcactcaaattttgataatatcatt

SEQ ID NO: 328260 - DNA, 556 bp, Cannabis indica
aaagaaaaaaaaatactaaagtagattctttcaaaggagagaggtttgctggaatgattttcaattattgagatggtggtagaaatagagagttaggagaattgtaagtggtacataattgattttattttatatgaaataatgtccacaatattatacatatttcaaatattgtctactatatatttgggtttgatatagtgacatgttgatgaaaatattaaaattttgatccaacataatcaaaatctttattacatttgatcaatcaatgttatgcaaatcataaaaaattgtacttaattgactctaacccaatacatatctaatttatcgaaatgagagaagcatgcataattagtggaagtagtatatgagagaagcattgaaagataaatttatcgaaatacaaatttaaaattttatattgtcaataatttataacacttttttgaatggaaaatcatcattttattaaccattgaattcagttaccaaatcaggtaacaaatcaattgggacagacccaaaattgaaagtgcaatcaggatagaat

SEQ ID NO: 328261 - DNA, 1076 bp, Cannabis indica
gatgatgcttgtccttcctggaaacaaacttcttaactctggtatcagtcttatctttctatgcgactctgcctctagaatcacgctagtcaccctgtcctgaagcatggtttcctttagttttttttattgaggttggctgatagttttagacttcttttgctgcttagtcgaaggattcttcttcaaagtgtcgcctgctattcctttccctttatccttgcaaggatttgaggttccaagatcttttggatcaactctttcaggagcatcagttgttggaggcatttgcacattagagattcctttggtcagggttgtgatcacgaccttcattcttatcatctttccaagcagtatctcgttgaactgatcctgacgagatagcctacttttagttaactagaacttttggccatgaagaccacaagatctaactcgtcgggagtgttttttcctccaacaatgccttcagtaggtttgccttgatgatcgtcctttggcgtgtcttaacgatcatcttttgaggtctcttgaagatcgtcatcagcatcatcaaaactgttctctttcgaatcatcatctccgaatacaggagcatctaggtttgtatctttgcgaacctgatctttatgacggctagtcacctcgttctgatcttctgcatctcctgtcttggcattaggatcagtgaagtgaagaccagacttattacgggtgagtaccatgattgctgacgcaacctctagatggtatcactgcttccttcaactctcaatgaaagtaccaaaatatttaccgagtaaaagagaaagaataagaataacacaaatattttttacgtgattggggctttaacgaaacttaatccacgagtcaatattattatgtaactttaagctagaaaagccttagaaatacaatgataataagttctcaagtttgactgagcaaatattgcaagagatttcaacccttaatccgaagtattcattaggtatttatagtttttcagagaatcatacttagttttcattttccctctactggggagtttacattgaattacataactt

SEQ ID NO: 328262 - DNA, 528 bp, Cannabis indica
aaaaaaaaatcacaagtaaacattcgaaatataaaactaattccaagccaacatttatttattttaaaaatttagcttcaagcccaggccaaaattcatagggcaaagagagtttccatgtgagtgatgatgcaccgcccttctacttttcctttgtcttcttctaggtttttttttttgtttttgaaaacaacaaccattatctttggagtcgtgacctccatggaatctcagcgaattgaagcttcattcacactctgaaatatttgcaaaaattaaacaaaaaggatgtatatatatttcttctgcaaaccagtgattatgaagaccaagtcaacgtcctttgctccgatggtcttttgctattctgcaagaccatgctacccttcaacagtgactacttgttgggttttgtgccctaaataaaacttatttcaatataagcagatttactaattaataaagatcaaaaatcgttttatgtttcatggttcacataatttatttcatgattatgtttaatgtata

SEQ ID NO: 328263 - DNA, 2118 bp, Cannabis indica
aaaaaaaaaatagtatatgggtaattcctttttttttaattaaatagcaaaattaattataaaaattaaaaattttctaataatacttattgataggtaatagttttgaagagataataagtacactaaacttttgaattaccactaacctgagattttttaatgaagtcatgacctttagttagaattggtccaatttcatcagcaaggttacttgcaagaagagcttgaactgcaaatgtagcatcccacaattggctaccaaagctctacaaacaaaggtgtaaattatatatatgttagattttattttgttcataataaaatgaaaaattatgtatatgttagattgaattttctgtttttgtaaaatgataaattggaccctgtattttttaaaatagtactcgtaactaattttatatcaaaataaaacttaataataactcgataatatatagaggtattatgacaaatctagttactttttctatacatgttcatgttaaaaagtgtcttcaaattgtttatattaaaaaaaattgtcaaaaattgagcttagggtcctatttgtactatttaaaaaatacaaatttttttttgtcatttaacaaaatagatggtccaatcaataacttttacaaaatataagatccaaaataatatttatcatatggtaaatatcacataaatctctctctctctctatatttttattcattaattcgtaaacaatatgaatggtgaaattttatgtgtgttttcaaattttttgatgcttatctaaaataattatgttttaatttttgctttataataagtataaatactaacttgtatcttcaatccatcatcaccaatccatatgaagtctggaaccctagcaagatgttttttgaaatagtctccgtttggatcttcaacccaacaagccagcatacataatgtctgttttaaataagaagtgtgagtaactttataaaatatacgagaatttttaagtatacagagaaataataactcaatatttttatatgatggtatacagttgtacactatacttgtagtatgtatttagctaatattctgaaaataaattgttacatgtgtgtttgatatgttcttttataagaatggaaaatgaactattttaactctaatttcaacatttattcacattattgtattgtaatctcccaaaatactaaaaacagttgcatggtggttaaatttttatagcatataagtcatgtaaatttcaaagataagaaaatttctgaattatcaaattgtattctatgcaataagtagaatcttatttttgaaacatgatcataataaacaatatctcaatgatacttgaatatttctatcaccttttcaacacacccaatagtaatatatcgactattctcatcttcataatgaatatgcttcatcgttatttgaagagctttttctcttataaattttttcagcggccaacgacttaagaaaggctcggtgcataggtaaagactatcccatacaaaatcttgtatccaatgaggtggataataaagatcctcctacaatattatataataaagtcatgtacaatattaacttatgaagatagaaatataaataccaacctattaagtgatgtacaatagatgttttagttgtgtgttaaagagtattgatatgtgtatacagataaaatatacacaaacttattacatatatttatgtagcaagtaacttttaataagaacgatctgtcgtaagtaagattcgataattatttataacaataacgaagtaataaaggggtttagacattctaattaagatgctcaatctttagtatttaaagttaataatattttagaccctgcgttttacaaaaattagcgactaaactctttaatttgtaaaataataaattggactctctattttctaaaatagtacaaaatatacccgaaaccaaatttttggatttttttaatataacgaacttgaaacaatttatagtataaaaagatacagaaaatgtatccattttgtcataattaataaacaacactggatcaggtcattattaacttttattttgaacaaaaaatcaattca

SEQ ID NO: 328264 - DNA, 1428 bp, Cannabis indica
tgacttgccaaatgacaacctttttttatctttttattttaatcaacatgagtttgtggaagattaatattaattaatactattcttatagagttctgtgagcttggtactgggaagaaatctggatatgatgaggaggaagaggaccacgttagtgttgaacttggttatagagttgcacaagagcaagccaacacatcaacttttgaaaagcaatttcaggatgaagccatagactctatgaagttagaagtacagaaattaaatcaaaaagcccaacagatattacaacatttttcagcaaacaattaattcttggcttggtaatgttatttggtcagagtcttacctgaatttgctggtgtgtttgaatactaatcgtgaccgtagcctactttacaatgttgtcgcggctacctgtgcagtatcagtttacttaatttggtgaaaccgaaatatttgtatctttgaacaaaaaaatgtttgtagtctcttatatgaataatttaattagagtggtgtttagagtgagattacttcttattaataggagaaaacttttaaaagaaattaacaaatttttgattttgtttgtaattttaagtgagtccgtctcttgttggattgtgaatactaatttgtgtagcatttactctgattattaaaagtctcctttaataaaaaaataattgatcattaatagtcattcaattcatttatttgtcaagactaacactactagttgtttcgtacaataattaagtatttggccttcttttatatttcgtgtcacacgtgttgacttatcttttgacttgtatcgaattttctcaatcctaatccaacctgtaaaaaattgtatcgtgttactgttcgtgtcgatccaccataacccattttacagaaaaattataaatttaaattctattaaaaaacttatatatatttatatgttatataatttgttagagaaatttgattttttatgcattttataagggataattggttagaaaaaccaataattagggtaattttaaaaataggatacttttaccaaaacccttaaaatattctcataatttctaaccctttctctctccttctcaaacaaactctctctacccacttcgcctgaaccaaaccgcgcgacccccaccttccaccacgagacgacccccacctccgaccgagacgaccgccacctccgaccgagacgcctccgacggagacccaaagaaccactccgatcgagaccgcacggtaccgactatacattggtcggatccaagaacaacatactcgtcaagaccatcaaaccccaatcccatcggacccaaggacaagaccatcggacccatcgatccgagcatcggaccaatcaatttttgggggtccgatggtccgattgatagtgtgcatcggacc

SEQ ID NO: 328265 - DNA, 624 bp, Cannabis indica
tttttttttttaaaaaaaagggtcggatcagatccgatccgtataagacgggtcggatcagatccgatccgagtatctgatccagcggggcggggcaggacagatccgtacataatctggatcaggtcggatcagagtcggatcagatccgacccgccccattgacattcctaacttcaaacactgcttagtcgtgactcacatcagtagaaaaaataacttggttgctcattctttggctaaattggctatatcttctaattgtaataagttgtggttggggaattaccctacttgtgcgtctgcctatataatggcagacttgccgaaaattttgtaattttctttgattgaatatacatctttcaaaaaaaaaaaaaattatctagcaagaatattatttataacttaatacctaaaatatttctaaataatgtatgacttctagtttgtaattgtatgtgtggtttgattttcaaacaaaaataaaaatgtgttagaaaattaaaaaaagaaaattgtaagataacacctgtattttcttttttatatattggttggctgattatatttactttattttgtttaagatcgatggacgacattatgtatttggttgtttat

SEQ ID NO: 328266 - DNA, 577 bp, Cannabis indica
tgtttttgctttacaaactaataaatgccagaatgatcactagtgagccccattctgtaaaatatataggctctgcattatagacctatcggccaatgattgttgttatggtcatggtattttgtgaatatgctgagtcagtagtattactaagggaaagctcatctcttgcttgcaaatttgtgtccatgaagtagccaggtggattgggttgaggcaatattacattctcattttccaacataaaaaccacagatgacatgctaggtctatccataagattttgttgaacacataagagaccaacatggatgcatcgcaccacttcctcaagattctcacatgagtcccttaacaacacgtcgatcaaatcaaaggcccttccttcttttagcaaactccatgcctatgatcaaagaaaaaaccaaaaacatgtcttatagtttcatattaaaatgagaaataccaaaaggtagtagtggtatcagcatcttccgggtcccaacttttagggagtatcgctaactaatcacaaagcaacacgtctagaaggtgctagacaccactggtgcccaat

SEQ ID NO: 328267 - DNA, 694 bp, Cannabis indica
tttttgcagatagaccggctcgacctgcagtagacgcaacccgcagagaaactgctaaaattctcggaagcctccatgttcaagatcgtgactggcgactactgtgcacgaccttaaagctacgggaacataagcgaattccagagaacgcgagccttcaaagggagacaaacgcctttccaagcagacttctcggccgtcatcaggtaacatatatggcatgtatggactaatgtatttaaattgattgttatttaaacttatcttttcttgtccttacagaattgactttcctgaagtccgcaccaattctcaaccgcaagccaaaaactggaacagcgacgacatctcctatcgttccctagaagagaaaaagcgatgtcgtggttactcctgccgcgcattcctccaagaagctagctaagcctacgaaggacaaggggaagaaagccgtgatcgatccagctgttcgagctcgcgatttcctagttctacaggaaaagtttgcgggggaggagttcatgtctaaggtagagagaactccttctaaggaacttattcctcgctctgtggagttggcttcgcagtccatgaccatgcttacgaaactcctcgtgctctttgtccttgtcagccgcttcctattttagcttcttgacgctctcctgaagctgggcattctgcctctttaaca

SEQ ID NO: 328268 - DNA, 958 bp, Cannabis indica
cgctggaaagaggccccctccaaatgaatgtctagaggaatcaaatgattcgcagtgaggcacatggggaacgtaagccaaaaattcttcgacttcaccccctttaatattaataataacaaatataaaatttaatgacagaagaaaaagaaacgcatcatcggccatccactgaaggaggtgtcacacaggcggcaaccatgaccatcattcgagaaaaaacaaacaaagcagacaaacatgcacattatttcccaagaaaagccactactactactttccctagcaaacaaagaagaggtatttatatagaaagaaggacttacacaatgagggcaaggcaggggtagagcacgacgtacaacggtagtgcttcgcctagcaacggcggaggaagagcaggaggaaattgagaacgtctggaatttcgttaagtgggtttgaaaatctaaaaatcgaagggtagtaaaaataacccagttgagagaagtgtttgtttttgtaggccatttggggtatgaaacagcatcaaataagtacggtcggggatcataacagttcaaatcccctaatccaacagacaggatgaaaaagcatgatgagaagaaagggtgattgagacatttgagtatctttctgacatcggcattgatggaggggtctgtcaatagacgggaaacaaatcgttacatgttaaagagacaagggagaatgatgatgatcataaatatggcccacgtgctcgaggcacgtgtcatagcattcattgaggctggagacagtgtaaaagtcttatttatctacgactaaataaggcgtgggggtaaatgttgtcccaagttttttacaatatacgtggcagtctcagcataggacacgggcaaactaagacccattactcagagatgagcaaagtacttaaccaaatccccttcaaaggaaccaatatctagttcaa

SEQ ID NO: 328269 - DNA, 943 bp, Cannabis indica
taagtgagtttaatcccaacaattccacttgattagagttacttaatccttgaccctaatagaaatgagaggacattaactgtcctaaatgctcaacaaacttatttctagttacatttttagtgaaaatgtctattgggttatcatgtgtgcttattttctttacttgcaattgcttggatgacacaatattccttatgaagtgtaacttgatatctatcaatgtgctttggcttctcatgaaacattaaattttttatgagatgcaaaacactttgatcgccacagtaaattgtgatatactcagatttaaaacctagctcctatgttaaccccttaagccatataatctctttaatggtttctgtaggcacaatcatgtattcaacttctgttgatgacaaggctactactttctgtaggttagatttctagctaatgtagcccccgagagtagtaaacataaaacttgttaggttctgtctaggtttgctgtaaaatctgagtccacacaaccaattatttcttccttgaactagttctctttactaaacaccagttttcagagtaccttgcaggtatctcatagttcatttcaatgcttcctaatgtttagtgcatgggtctgaaatgtacttgctgaccacactcatgagctagatcaggtcttgaacacaccatggagtacatgagactcctaacacaacttgcatagggaaccttgctcatcttggctctttctgcatatgtttttggtaactgagatgcagacaacttgaaatgttgagcaaggggtgttgcaactggtttgcacttgatcgtgccaaaattattcaatactttctgtaggtaggaagcttgagaaagtattatcatgccaaacttaggtttctttatgtctatcccaaggattctctttactttatcccaatctttcatctca

SEQ ID NO: 328270 - DNA, 989 bp, Cannabis indica
caattctttccaagaattgcacttgcaacctcacacaccataggtgaatcatacaactagagcaaatgtcgataactgttcttttttatatttatgttgctgtctgtacgtatagcatatgatttgatttcttttgctgtatgatgtttccagctgctattccttatgtatattgttttcttactatattcttttcctgttttttttcatttataaattgtgtcgattggcttggtgttctctgatacataacaggagtttgttcaatatatgtacactacacagtataggtttgaccttttaaatattaaaaattattaggggcataaaaaaggacatgctttccaataatgaacatatttaacttcatttttatgagttttcagtggcctagttaagtccttgtgtctgagaacatggtctatttggggtttctttataagatggtttgtgtgtttatctattctatgctcttttgattatgaatttactataaaactggatttcacagtatttacgatcaaagttttttttttttttacaatatctaagatcaaaggttatcaaactggattttacagtatttaggatcaaagtttttttttttgacaatatttaagatcaaaggtttaaatcctcatatgctagattattagcattcaacatctttagcttgtgctattattcaatatttataaaagtcttgctggaataaactgtacttgaatttctcttatgtaagagtacaggtgctcagcttgctgggaaccaattaacatgaaaaaaaattaaaaattaaagaggaaacttatgagtctatgacagctgcatttgatgattagactgtaaactatttatgtaccccctttcgccaaggcatatgtacacacacataaaattttatctttgcaaaaacaggggcattccgagaatcgaactcgggacctctcgcacccaaagcgagaatcataccactagaccaaatgccc

SEQ ID NO: 328271 - DNA, 788 bp, Cannabis indica
aaaattaaaagtcacccataaaatctcaaaaaccagaatttcagttatataggtatactttatatagaatagatatatatgtaggaacacgattttgccccgtactttcacggaatgtattccgtgatataccgaatacattagatggatcttaggtgacgttaacattttttaaccttaattacccctagatcaatcctaacccttagattaaataactctcccagttaacggctttcgtacatcactgaatacattccgtaaaagtacaatcatagaacaaaatcgtgtccatatatatatgtatattgagtttgtaatgtgaataaaaacataccattagtttgatggtcgccatatacaatgtgtatgtgtgtaacgatacaatacaatatggtggtatctctatcattactcataatatttgtcaagagaacaataatgaaaaagaaaaagaaaaaaataatataaaaaatgaaatcttacaataacatcccacctctcttaattttagaattagatagatcgataaatattttaagggaaatagtaacagaaatcataatttataaattatataacatagttaatttgtacttcaatatatataactgtacattattgtaggaacaaagatagaaactattaatacatatgttcttttgatcagtttttaccttgattattatcatgagcatccatagtatcccttactcacacattgaggagacaatatttcaaatctctttgttaattccatttttggcatatttaattgacaaaaatat

SEQ ID NO: 328272 - DNA, 521 bp, Cannabis indica
aagaagaagaagaagagagagaaagagagaacgagagatcgagagagagagagagagcagaatttggggatttgggaatttgggaaaaaccagatttgataaaatgatgccaattgagacaacctcctccaactcctctctctttcaccacttcatttcattttcattatttattatttatgtctttttaacaaaaaaataatatagggtgttttggaactattttttaattatttaagacattttataaattttaagaatttataatgatttgtaataataaaaaattaaatactaaataaataagagtgtattagtaaaaatgcataattaaattttttaaaaatatatataatttgttaattatttcttttaaaataatataattaattattgtgagaccgtttgtggtttacaagtcttttaggatttgtttaaaacgctgtattaaatcgtattttattatattaaattatattttatgtaaaattatgtgtagtattaacttttatggacaccta

SEQ ID NO: 328273 - DNA, 1664 bp, Cannabis indica
aaaaaaaattataaaaatttaagaagaaaaaagtaacctggtgtgtctgtcatgctttacataataacctaactatataagaaagtaacctaatgtctgtattttgaaactaagtatgaagtctcaaagagcctacctaagacataaggaatctaaccaaaagacaataacatcagacaataatgaaataaaggactaagaaaattcagtagcagtacaaagttaacagtacatgttagccattatcaaacattcactttgtataatcttccagcagatttggttccactgcagcagagttatgagtcattgagaataagaactgaatttatgttcacaaaaaaaatataaaactactacatcttcttcttctcaggtttttcaggtgcctcttgaataacctttttttcttcttctcaagttttctaggtgcttcttcaacaaccttctttctcgggctttcaagtgcctctgcatcagtcttcttctttttcttctcgcgcttttcaagttcctctacatcagtcttcttcttcgttttcttaggtttttcaggttcctctacatcactcttgcttctttttagcatgatggtgaagacaaatagcaaggtcatcgcgataattgacaatattgagtttaggagatgtgccatttatgttgtcatgaattatattatcagcaaaagcaatcaatagtgcaccaaagtcactacaaataagtatgaaaacactttaaaagtataacatttcaaattaataaaaaactaccacataaaaatttaaatatgttacttaccaatcttcttgttgaggaacaccttttgcaaattttatagccaaaggattggaccttgcaactgcatatggaccttgattgaagtcaatgtctgccctcgtattatagaagccaatacactccataaacaaaggaatcaacacagagaatgtcgtaacagttttatcaacgggttccttattcactttcagagttatagaattatacaacaccaagcacctctctctaatattgaaatgtgcaagaatataatgcacttcatctgtaacatgagctggaatcgcaacatgatcaaggtaataccgtggaatactacatgataatgattgtccagacatgtattttgcaataatgctttcctggttgatcacattgttgtcgttagctaagtaactctcataagtagttctaacaactttatagaaaattgaatcagtagtcgtaaccaatacgttgatggtaccattgtgcatgatcgttttcctaagataatacataataatatcaatatgctgcaattaaaaagacaggataatcaattaaccacgtaatttataacaaattgaaaaataaaaggcataaattaaagaaatgaaaaactttgaatcaaactataaaataaataataatgtaacatggtcttgaacaaataaaataatatacttacagaatcagacaaaaattgaccacaagtctgaagttggtaaaaccaatatttctttttatatgcatgatcccgaaatgaaaatcaacgtcattagcgtcagccatgaacttatttctataatcgaaaaacaaaaaatgcatttattatagaaatgtgaataattcataaaattatgtaagtgaaattttttttaaaaaaa

SEQ ID NO: 328274 - DNA, 960 bp, Cannabis indica
aaatcaaaattgagatattattcgaattaatgaaaattaaatcatgaatttattaaaaaagaaactatattatgtagggtgattagtggctaaaaatatattttttttaaagtcagtaaaactttaaaatcagtaaaaataaaaataataatacaatcaagttaatatttaatagtaagatttaatgtttcaaattttaaaaaataaattaaatttaagcatataaaattaaaacacaaatgagcttcaatggcaattaatattaatattaatttagtatcttataagttgtaatcaatacatgcattaattcgattgtatggaaaaaaacttttgttatgttttttacaataaaagaaaaagaaattaattgtatcgcaaaaaacaacttttgcaaacacaaattttccccaaacaagaaaaatggaacataatattaatattctaagagattacgacatagaaaattaaatatataaagagagaagaaaacaacaagaaaatcaaataaaaaatttataattttactatcacagatttttttaacaacaataactgtctttttataaaataaactgtaaaataataaaatagaacaattaaaataatagtggaacaactaaaaaataaccgtgaaacaatattgaaaactgtacatagtgcacaatataaaatttatatagtatttattgaaaaaaatttcaatcttataaatttcagcatgaggagggggtaagttgaaaaatgtattatacccaaaataccctgacataagagtcacatggaaagtatcttgaaataacaggaacaaaattagtataatatttaaaaaaaaataaaaatgatagactttaaaaaagaaggtaaaaataaaagagaacaatataaaaatggtatagagtgtagttttcttttacaaaaatcagaccaagacgaatgggcccgatcaataaagtccac

SEQ ID NO: 328275 - DNA, 759 bp, Cannabis indica
tttttttttttttgttcaagagctatatggttaaagctaattaggccatgttaacaataataatatatattaatataaagttaaaaagctttcatggtatcattattgtctctatcaacatatggaaaaatcaagaagagattgagaatcaattagtataaattaaatggtcttattttgctacaatcattcttttgttgacatatttatgatgaactcattgactttaggggagaaatagatgagcttgaagaaagggcaacctactttcatatggggtggaaaatagaatggatcataatctattgacccattttgagaaatatgctaataaagagcattagcggtgtttaccatctacagaagtagcagctccattaatttaagaggtcaaaatgcaataataataataataataaaaataattaaagggggcatgggagcacaaaaatgcatagtttttgtttttcataatttaaaaaatatgatattaagtataatttcattaaaaaaaagtaagtaaattgtgaagagggacgactatggtggccctcttttggttgcacactatcaaaaaaaaaaaattaaatggtgattttttagttataacgtaaactttttgtgactaaatatgacttttattagtcacaacaaaatgttacttgtgactaaaacataatatttagatacaaattatcattaatttagttttagtcacaataaattgtaatttttgtgactaatatttttagtcacgga

SEQ ID NO: 328276 - DNA, 665 bp, Cannabis indica
tgagctcaatgtcttatttttacaattttagaaaatataggatttatttgtcatttaacaaaacagatggtccaattattaacttttacaaaacacaagatctaaaataatatttacccttatatatggattgaataataataaaactatagctaactctttgctgatagtctacataatttcttgtattttcatttcttcctttatcgaatattctcgtttgtaatcttatgagatctttttacttatttttaacaaattaataacaataatttgtaaaattttaccctcattttaaattttatactattattagtgtaattttttttaataattattagtataattaaatattaacttttaattttaataactatattatacaaaattgttaattattggatagacatttactagagtcaaataaaaatacaaacaaactatattttagggaaatttgcggcaaaaatctcctaaaagttgactttcatgcagattagtccccaacctcaaaaaataacaacaatagtcctcaaggtcatgttttttctaagtccgttgatacccagtttgacagtcatgttaagtactggcaagaatgccacgtgttgaagtattattagtctaaattttaattttaattaaaaataaataaaaattttaat

SEQ ID NO: 328277 - DNA, 1658 bp, Cannabis indica
tgtcattttgatacttctaaggttcttgaaattgaggacaacgtctcctaccccaattttttactattcaggagagaatgcttggatcagatttggcatttgaaagatcaaaaccagtgcaccaggtccacctgggcgctgggctcagcattgaggctctcaggttggtggttttttttctcgagttttcttgaatcttcattattttttatgacggacaaaattcctagaacattttttcaagaaattgattagaaatacccaggttgaaaatatatcaacttgggccctgggcccagtgccaggtgtcaacctaggcgatgggtcccagttttggccccttggaagtttcgtttcgtccccagaagtagttgaatcttaatgtttgttgaaaacgaagaatattcctagaacagttctcagaaaacatcatcggatttggcccgggttgacaaaatgtaaacctgggcgctagcccttgtttctatcacccaagaaatgttgtttcttctttgaaagtacttatttccccatttttaatgaagacaaagaatatgcaaaagtcagatagtcgatctaatacttggaaaccgcccagattgacaaattgtctacttgggcgctggggtgcctggagagtgcccgggcaccgagtgctctgggtgctaaaaaataaacttttttttgaatctaatttgatgcctcaagtatatttgtgctatgtttagttcatgtaccaatgtaaaagtttgacccattttcactaagatggtcctgaaaactgaaccctaggtgcctaggttgacatctaggtgtaggttcatgtaattttagctctcagacctagatttgattgctccatgtctttatggtacaaaatactgaaagatagtgagttagaaatgagttattgaagtccaaacttccaccccaaagttcccgaagtcaacttgggcgcaaggctagggaccattcctaggtcaactgctatgactcgagactacacagctctgcgatgtcatctttcttgtcacgtatcaaatattcatgtctacatcacaagggaaaatttatgagttaataatatttatttaattcaaatgaaataagagattaatgaaaattaatcaactattattgattgcgaaataaataataaatcttatttaagacaaaattgagaaatcaattttaggctttaaaatatggcccacacttgtggtagtgttagattttattccctgaaaaagtctgtaaacacatttttgattatgaataaaagttaaacattttgatatacgcatgaatgttaaattattgatatttaatattgaataatttatgtataaatattagaaaattcctaattcatacatgagtcagtgacttgtattgtacagagaattaagatcacttagccatgaataatatagtcagcaacataagtttaggaatttttaatcaatagttgctagtacggttcactgatgcccgttatttggtgtaagtaatctcgatttagattacaaatatagcatgacatctaagtgaaggtattgtatataatagagaatatatatgacaaggaacgatatgagtaaagatgtctttatcaaacttaccgtttactataaagacctaatttatatcataatgat

SEQ ID NO: 328278 - DNA, 834 bp, Cannabis indica
atacaggagatgactaaaaacacaaaaaattcttccattgatattgacttttatttagttaaagattggggatttcatcgtggctggggacatatcatgacatatggtggccctggccctagatgatttttttatattgtattttcaccaaactttctttgtcatgagaaaaaataaatgtgtcgttatttgtacttttgatagacttgattatgaaaatagttgaacaaaaaatgggtatattttaaatattatactcacaagtgcatgattgagtaacaataaaaaaaaaaaaactacttttaactaaagtaataaaattttacgtttgtgatatatgtcttaactatcttaaggagaaccatcattaaaaaaattgttaatacgacacatgaagacaataaagtaaataataagtatcatttaattttcattgaaacgaaaaaaaaaataaataaataaagaaagaaagttgcacagtcattagtatagaaaaacagtcacatatataattaaatatttgaatctaattttactactgtaaattattcgaaattttctaaaattttactagtgttcataaatatttacaacataaaaataataaaaaaaaatggactaaaattttttgaaaatcaaaatagatagtaagtttaccaaaacattttttttttgggttattaagaggtgtattgtacaataaatttctgtaaagagttatttttgggaaatatcctaatagtaaccttaatttctaatatttcaaggttacttctcttatgtcattggaaaattataaaaatatataaagacaagtgtcatacatgcatatgt

SEQ ID NO: 328279 - DNA, 1358 bp, Cannabis indica
gccacgtcagaagaatgcaaaaattgggataacaattgtattgacttatgagaagagtgaacaagagtactctgatctcactcaaaatctcttacaatgatctgtgggtaatttactcttagatcgatgtttctatcttgagtgttctctttctgaataaaatcgtgtccctgaatagtgaaatgagtccactatttatagggattgattacatgaaattggtttccctaaatcaatgagaaataaaatggaaaactagttcagtttctataattacaataaggaaagtaggaaacttaggctgattgcctttcttctctaaagatatgaatctatcccaagaatttagggattatgtcatgacttgcaagcttgcatcccctggtcggtgcatacgaacaacctgtgtgatggaagttggtcaaacgtatattcttactttgctcaaatgtcacaacttctgtctgtgaccttgagatcaatccttcctgtaaggcttattaagagtaaaatcatatgcccaggttatgaaatgtactccacatgtcacctagatggatgccatgtcattgtgcagaaatttggataatatttgccccccaagtccacacaggatcttcttaattgcatgtggacttcctcgatcacgaagttgtctggatgggtgacccgtgtctgattattgtctttgatccaacatgacttgattgaatgtctttttgatgtctgggacattttaatgctatcttgaaagttgtacctcaaattacacactgatggttgcatgacaccacatacatgatgtctgtaatgtcttgtaatgagtgctaatgtttaccagtaggggttttttttacgggggggggggggggggggggttcgggggtgtatttttaggttagggaaaagttcattatatattaggattttagttagtttaatgagccttatttttggattatttttcatttattatttaattgtgttggtttaaaataaacgatgcattaggtttgttataaacctcaacacaaattttaaaaatgttagttataaattgatgtaaagtatatcatcgatcagtgtggtttttgcatcaattttgagttgatcaatgtaaaaaagtagtatatattgtcactggtagctgttgtactcaaacttaaatttggcttaaacaaaatgctcactgattatggatacccacaacaaacattgaccatcttttgtgacagtataagtgtcataaacatctctaaaaaacacagttcaacactctcgaaataaaacatatcaacatcaggtattatttcattcgtgatctagttgagtcaaaatatgttgtcaatatctcatgt

SEQ ID NO: 328280 - DNA, 2212 bp, Cannabis indica
gtatcactttcaaataacatagaaaaaactagcataaaatttagtatacgtgcctcgcacgtagctttttgctagtgtatatatatatataaataattagaaaaagtgaaaaggggggatcagaataagagtcattatcattaagatgtagttttactcacagaacagtctctattttgatgagaggctgttggctcagaggaacttagagacaaatagtgagatattaatgtattttgatgagaacgaactatttcaactcaacaatttttgtttatttttttatatatatataaataaagaacgatgatacttatgatgatgataacagtactaactattaggcaattaataattgatatgatatttggatttttttattttagttgaaattgaaaaaaaaacccttaattcggtttggcgggttaacccgaccaaaccgtcagtcgggttcagatttttttttaattgggcaggttgcatgcagaattttacaaccccgatctttacgtggggttggaaaatatgtagtataaaccaacctatgtacagccctagttcataatatggtttggtgaaagtaaatggaagctcaccaatgggtctcttatagtggcgagaggaaagaaagtgaatactctctatgtcatggaagctaagttacacaaaggagagattaatgcaattgcgatgtgtggaagaaaccctcaatgtgatgacctcgcgattgaagatctatatggtaacttgtatcgaaattctatctgatattgaggtagtcaggtggcgtgtgccgtttatgattacggcagtacaagatggaaatcggtgttaggacctgtgtcgaaagtcttcctcacaaaggtgatggtcaggcggcgagttcctttgttgatagcggcggcataaggcagtttcgatggacgggagaccacgagtatgtggtcctatgtttgagggtaggattgttgggaatacaaccaaagtcccacattggttaggaatgggaagaattatggctatataaggatggacactgctatattagtatgaggccttttgggaaggtgcccaaaaataaaccgtcagggcttaggcccaaagcggacaatatcatactaatatgagagtcaaggtgagatagcggccagacaaggtggaagaaaggggcccaacagtttgtattgattttatatatatatgtgtgtgtagggtgctaatatggagattagggagatcttatatgtgatacttgtaggattagattattattgtcttacgctgcaatatacagatggaaagtactacaaagttacaatctaaaaaatgggtccaaaaattgatttggaaatgtttaggcttactaaacattatccaaggccaacaacaactactgcatcaaaagaaaaataggaagaagaagcagcagcctccgaccagaacaaaggctgtgttggaagcgtttgttagttattctgattgatattttcttcttcttttgttgctcttgctttagttttggagtgtaggaagaacttatcacttgactaaaactaaaagatctaattattaggtgtgtgttgattggatttttagccaaccgatgcggagtcgtaataaatgagatataaaccaaaatcgcattaataacaccggaacttgccataaatataaataaaagacaccagagtttaaagaggttcggcctcggacgtcagaaatagcctactccccttgtattttattgatttgagttgcaaaagtcaagatcaggttcttgattgcaaaaagaatgataaagtgtttatttttaagtgttcagaattgcccatcccaagtcatgaatgaccccttatataggagagaggatcggtgcttcttgctttaggagacgcgaccaacgcggagctaccccaaccgtctccttgatttttagaggtagttgtagtttgatttttattataatattccgctattttcatgagttgacaactgtcttagagcctttcatgagatttgaatatttgaaggagctactgacgacgatggtccttatgggtgtgacatggttgtcaaccacctttggggatgaagcccatacttgggtaaaacacccccgggaccctcgttgaggggggtgacaaccatcattcttgggtgaccccctcgggactcaacttgaggggggtgacagccgtcctcgattgggtcg

SEQ ID NO: 328281 - DNA, 955 bp, Cannabis indica
aaaacaataagaataatatagcgcaagtgaacctaactaataagattacgatacaaataaatgcagggattcacactgctaacaatccaagccagtatgccgaagctgaagccaccaccatgcaacctcttagacccaaccgcaacatgcgaggagatctcgggaggtaataaggcgcttcttttcgttggcctttacatgctagcatgtgggagtggcgggttaaaggcgggtcttccaacacacggggcagatcaattcgaggaaaatgacccaaaagaggcgaagcagatgtcgagtttcttcaacttgttgttgttggcgttgtgcctaggtggcgctattagcttgacacttcttgtttggattcaagacaacaaagggtgggattggggttttggtgtctccacaattgctattttcttgtctatcattctttttgtatttggaatgcccatttaccggtttcaaactattcaaggagataatcccatgtttcaaatcatacaggtacgtaattaattaattgttatttagttcaattaattaaatccttgatctttttttttcttttaattagggttttgttaacaaaatgtgtcatttatgattacttgtattttaataaataaatacatgtaagatatatagagttccaatctagacatgtttaatattgctaaaatagcttatggtgagtattgacctaactgaggcatacaattttcttttctaaaaaataattaaaaaaaatctaaataatttattgtacttaattagaattcaaatagtttgttgcatatatgcatgcatattctttcgaaattaagatcatcttattaaaaattggtgtcttatactgtgttaaatctatcaaaatttgacacatcaattaatctaatttatattaaatatgttaactacttttgttgactttattagaagtttaattttt

SEQ ID NO: 328282 - DNA, 651 bp, Cannabis indica
taaataaaattttcttttatgtatatatgcatattttgcatgtgtatctaatgaatataaggggcatatggaacatgttttgtaccgttcttaattaggaactaatcgcggtcttctaccataattaattttgttaggttgctaaatatacatagataatataaaatatgacatttgtattgtaaaattaataaaaaatatggatcttctaaaagaagttctgtaataataaatattagatatatggaataagcaaaatacatattgttaatcataaattacaacaattgtaatgtgtctatcatctcaattttttttttttttcaatacttattttctttcatgctataagaaaaattattgaacaattaccaattgtaatttcaaaccaaaattactaaatacatatgaactaattgtgcaccatcaacaatttttatcgttaacaatttaatttagcggaagacttatttttggtaaaattatttttttgtttttttgaaaattaaaaggtatcatttgaattaaatatttaactttaaaacactgtttttttttaaaaaaaatcctttttgcatttgttaagataaatattgaactattcgcataattatacatattgtattatattttttatttgaaaattaaaag

SEQ ID NO: 328283 - DNA, 679 bp, Cannabis indica
tgcttagttctttaaggaactgagcgggtacaaagttttccttagttgtcaaggcacaactaggtagtcgagcgagtgcgtcggctgttgtgtcgtctttgggggcttgccttttaatacgacctttgagctgacttagtagctcaggtaggccatcatctccttgtattgaactatatattcacctaggacataaactacgactatttgagagtcgtggtgtatgtctagatggttaacccacgcttcatatgctagcttgaggctagcattcaaagcttcatgttcagcctcattgttagaatctttgaaactgactttgttgcccccaagttccctgggggccatgcttggatcgggtacgtggtcaatgcacctcttgggttgagttgttttgctcttgctctcgcttcttctctggcttcttgaactttgagagatttggggagatatatctatgattagccatgaagctggtgagagcttggtctttgttagccatgcttggttgacaggtggccttatattggccgagtctcagtggttcacttgagtggtaaccgtgatgcttcaggtttctagagaaccagccgcaactgttgatcagtgtacacctttatagggtgtacctgttaggttttatgccctaaaaaaactccatttcaatataatcaatttt

SEQ ID NO: 328284 - DNA, 987 bp, Cannabis indica
tcttatttgtaatttgcacttctacgaccaggggatcgttgtgtgggaaatggacgtgactggcatctatttcactgaatgttatcgttggctcccctacccgtggtatttttcagttttctctcttccacaaccaagactttttcattttgttcatactgtaaggctagggcatacttttctcgagctttgctcaagtctctagcaagatgcgaaccccaataatgacctgtaaaatgcttgtccactggtggaggcatcaattggttctaattattgtctgctttggcggccgtttggttctggtcggccttgacatacttctataaatgttgattattctttctaatcaaaaacttaatttcccgcttcagattattacatttgtttgtgtcgtggccgtagtctgcatgaaaacgacagaacttaaatgtatctctcttacttacatcctttttcatgggagatggtctcctatagggcaccatagactgagttgtcgcatagattgtctctaggtcatctgtcagaactgagaaggcaatatattttgaggcattttccctaggatgatgttcggcattaccagtgaatttatccttctttccattaccttgcttgttaccgttgttatacctcttcccatttgaatttgagttgctagggtattgtggatctgaatagatgttcctctcgaggtgatatgttgctggtttttcttttgtcagacagtatccacacgccgaacagcctcctcaagtttaatgaacccatttgctcgatcaaaaaatttagccatttaccccacagtcagccttgtgatgtccttcaatagctctcctagtggctcaatgccccccagtattggggccaaccttccttcttcagtcaaccccttaacttttgtagcttcggtcataaacctgctgatataagcccgaggggggtcccttggcatttgctttacttcgaccaggtcttcaaggt

SEQ ID NO: 328285 - DNA, 1321 bp, Cannabis indica
tttttagttaacgtttaacgtttttaaaaggtaaaaaaaaagtttaaaaagttaaagtaaaaaagtaaaagtaaaaaagtagttaaaagttaaaaaagttttaaaaactaaaaacctaaaaaattataaaataaaaagttagaaaactaaaagtgggtaacggaaaagggcatacgtaggtaaagtaaaaacctaaccctaaaaagtttaaaaaaacgtaaaaaaacttatctcgactaaactaaataattacgaagtagtggtaggtaataaagtactctccatactatacattgaccaaccaaaacaaacttatgccgcaacatcacataatgtaaacaaaataaatataataacataccatcaccatattcataaatagaaatattctaattaaaaaaatagagataaaagtatttaaaacacaattaaactctttaatagaataaaaacaattaattaaaaataagatacactattgaaataaaaaataaaattaaaatctcaaatataactattactgtatataaatacaattacatatcgtatataactattagctagtgtatttaaatataactattggtatttattcacaactctagcttaatatcgcatcttgtagttggttaagggggtaagcaggtaaagatagcgaagtttaaagaacttttggttgagtggtattagctttcttgaggcagttgtgatgtgtctttggttaaagaaatgaaagtaccaatttgatagatgagttgtgcaattgtttatagctttggtgtcttttaaggctttcgcgcttaatatatgactgacccctaattatttaggttaatttagttaaaatttcaagatatcatgaattgtaaaaatgttataaaatttaaagttaataagtgtttgcagttcaaattttactattgtgttataataaaatggttgacttggcatgatttaaggaaatatttaaagaaatttgtgtattatttaagaagattaaagatttaaatggtaatagatttgtttgactaatctttaattaagatggattgagatctatcaatttgtaagtagggggaagttttaaaaaattaatagtaatcaatctctaaggatataatatgaaaattaattaagtaaattgagtaacaataataattaggagggctctaatattagttatataatcaataaataaggaaacaattaaaccataatattcaaatcggaaggtgattattagttaattctccttattccaatttttagaaattacaaataaaaaatatgagttttattatagataacataatattaattt

SEQ ID NO: 328286 - DNA, 703 bp, Cannabis indica
agcaacgaggaagttaaggccttatttccagactcatcctgttcgggtatacaccgaccaaccattgcgccaaatattgcaaaaaagctgatgcctctggacggttacttaaatgggaaatagagttgggttagtgcaaaataatcgtccaaccctgaaaaatagttaaagtataggccttagaacactttatggttgagtgcacaggcaaagaagaaagcagcataagggacaacccaaagccggtacaagaacccctgctcgacaataatgaagacagacttacttggaaattgcacgtagacgggttggctacagaccaactttatggtgcaataattgcccttgtcacttctggggggaaacatatgcacggagcagtcaaatttgggtttaaagcctccaataatgaagcagagtacgaagccctcattgctggcttaaaacttgctcgggagctgcatgctaattatatcgaggtctgtagtgattcacaattggtagtgaatcatttttcaggagagacgaggcccagggagagaagatgatggcttatctaaacagattcaagacatgctcgcacaattcaaggcttacaccctcatgcaaattctaagagaagaaaacacaactgctgacgttttaccccaacttgggagcagcacagtaacagaaaggccaatctagtccctattcaattctt

SEQ ID NO: 328287 - DNA, 657 bp, Cannabis indica
cattccttgttattcccttcataatttttgcactttaattccatatatataatgggtggtgaatatgctcattaactacaatcacaggtctctatatattattaataacttatttttttaaaatatatatattaaaaagaaatattcccttcctatatatataaatatagcaaattccgggtttttaaacttttaaacaaactattaatttaaacactagtacgttcgtagtactaagatcttatgccgtgtagagtatatatatatatcagttattaatttgtataattagagagcagttatataatattacatgtatctgtaaaaggtaatataaatttgtggaatcgttttcattgtacatattttatattgatggatgagttaatttagaaagccatattgagtacttacttatctgatgatgatattcaaatagtatagtactgttactttcaataaattagtctgcatgacagctatgctagaaaagtacatgtaacgtccccgcttcaagcctccattgggcccttacacccacggactaatggctcttatacacgagttcgtcactctggctgctttctggattgatgactgaccctacagatcaacacaagtgttttcagcgtgctttgtcctcactcacacgcatcc

SEQ ID NO: 328288 - DNA, 1091 bp, Cannabis indica
actctttaattcttcacttctcacccggtttcatcatcattttcttttgtctctttttcatttattacaaattttccatatcttctttcagaaaacccctcttggttactgtaaattggaggcggacgactagtttcccgaaacccttcaaaagtttttcatcattaaggcctccatggatgagactagggatgtgactagggcggttccaaggagcgttcttcgtggcttatggtttttcatatatatatatatatgtatatccaagcccaagtatggcttttcttattcccttcctttgttaatttcctcttttgttgacctctttgaaaccttgttctttctcaaaatggatgaatttctcaactcagtctctaatgctttatctattctatctgatgaatcaactgtttttacctatgatgttgggtcttctagttctactcctgtgtctattagtttacttctgaagattcatactattcgtccctataatagaccttccctcatgaaaactctttcgggtatctggtcatcgcaatgttgtttcccggtcgtcgtgtctgagcatgcggatggtctgtttctggtcacatttggttgtgaaggggataagggtagagttttagagggtcaaccttggcactttgctcagagtataaccatttttgctgctcctgatagctctttccctctaactcctgaaaatctacactatgttcctttttggatccaagtgtatggcattccatttatgtgcaaatcttatgaccttgctaggttcatagccatggaaataggtgaccttattgaggtggataaggatactattagggagggtactggaccttatttgcggattagagttcttctggatgttaaccttgctttgcaccggggtatgaatattaggttcatcaggatgggacgggaattcctgaaatggcttgatttcaagtatgagagaccatcactacctatttataggtaaccacctaggtttaggttagaattatttggcattaaaataatagaaaaataaatagtaaaaaaagtgtggccgcccataggatagttattgggcccacttt

SEQ ID NO: 328289 - DNA, 843 bp, Cannabis indica
ccacgagtcagtattattcagtatttctttaccttgaaaaaatctttacgaatatgaagaatatatgttctcaagtttacctgagcaaagtttgctagagaattcaatccttgatccataggattcgatgggtatttatagtaggagcagaattacattttattttcctttttcctctattggggtgtttacagtaaataatacacttaggcagtctcatgaagtctaacccatgaaggagacgatctgctaaccaggcagattaaatttggctggtgctttgattatgggcaatcaatttatgaattaattgcttaatattattcactataggaagtttctccatttaacctaatacgatgttctgttgtaatctagcaattatagttttttatttgtgtgtaagcataaaaagggaaactgggacggtcttccgggaaaacactgtctcatccctccgatctcatggtaccgtacatttttcatggcacagctcaccgaaggcagacaattttatgattgtggagctgagatactttcttggaagaacttatccaaatgtgattggcccacattatctttgctgagggtcccactaatgggctttggatgctaatctggactccacatgtccaataccagaaacgcggataacacatatatatatataatacatatagatacatgtacaaaaataaatatatacacaaaaatatattatgtgtattgtataaatatatatgcacatacaaatatatattcatatatatatatattcgaaacacttcttaatgcgtaatacccattgatgggcactaaaaaattaataaggtaacaatctaa

SEQ ID NO: 328290 - DNA, 631 bp, Cannabis indica
caagtagttgctagatcaagcacggaaagcgaattccgtgccttaacaaatgttgctaaagtgaactggatttgtcacttactcaaggaaatccaggttcctttaccagcttgtccaatcaattgggttgacaaccaaggtattgcctctcttgcacctaatccagtcttttatgcacgatctaagcatatcaaaatcgatcaacatttcatccgagaccaacttctggccaagacactcgaggttcgttatgtaccctctgtcgatcaaagtactgatatcctcaccaagtgtctctctaccgatcggtttcactacctcaaagacaagctcaaagtgtgtccatcaccatttagcttgaggggggatgataaacaagtgtcagagttagttattgacagttagaacttgtttgttgtaacaatcaaatggttgttatttttactgttattgttttctgtcaattgctctgtttttacttcttgtaacaactctgtaagcatctccctataaataccatttctcatttcaagacttgcaacttttgcaaagtcttgtgattcaatttctccaattgtgtctgttgggttttatgccctaaataaaactctttacaatctgattagttatc

SEQ ID NO: 328291 - DNA, 890 bp, Cannabis indica
aattaacctaaattcaatactaaaaataacctaacaatgacgttagttattataaaataaatgatgacatatatacactatggtgtcagttatgtactaataactaacgctgtatgccctaaaaactaacgacaaaggtttaaataccgacgctaaatccttattaactgaaaattttaatttatttaaattatatatttatttgtttacaataaatattatttaatttaaattaaatatttatttgttgaagctaaattaaatattattcaaattaattttatgattagccaatatacttaaattcatttcatagaagcaattaagaaaattataattatattacaaaaatattttaaaattagtccaagtgttaacaagtgataatttttttttatacattgtagcatcaatcgtctaagccttcatgaatcacagtcaacaatcattctatccactatcgatataatagtaacaattcagttttgggatcgtatgtcttctttttcccaaattgtaaaaagaagtaaataatatatatatttatatatatatatattattgtttgttaatataataaatatgacaattaataattaaaacttacagctttttgatcgtttatataatggttagagtttgcacgtgtgacaatgttagtcatgtatttcaaaatataaaaattacattcctagtttttaggttttcttaaacaatttgctagtgaaatttcaggccatgccaaataaaatgcattttattctcctataattatgagtgtcaatgggtcgggtcggatctaatccggctatgatccgacctgatacacaccatgtaaggatctatctcgccccgccccgctagattagatactcggatcgaatcagatc

SEQ ID NO: 328292 - DNA, 1516 bp, Cannabis indica
ttatgatacatcttcattgtcccagagtgtagtgaatatggggtagagtgaaattcatcaagaatttttctcctaatcttatcatctattggaacataaactctatctttatatctgaataatccacttggtgtcactgagaaattctttgtagtacctacctcaaatttctttctgtgctcatttaattctggatcactttgttggccaatcttcatcctttccaacaaatcatattgtaacgtaatattggccaaatttcctaccatgaactcaattcccactttggtcatgtcttctgctaacttcaaagagaactgcttgaagtcatacacttgccttagacctctccaactaagcgcatctgccactacatttgctttgtcaagatggtagagaatttcacagtcataatctttgactaactctaaccaccgactgtctcatgttcaagtccttctgagggaagaagtattttaaactcttatgattattataaatctcgcacttctcacaatacaggtagtgacaccaaacttttaaagcaaaaaccattgttgccaattctatttcatgagtatgtaggatagcgctagtcataatccttcaactatctagaggcatatgcaataaccttcccagattgcattaacacacaacccaaacccaatcttgaggcatcacagtatatcataaatttctcaccattggttggcaaactcaacactggtgcaataattaatcttgcttttaactcctaaaagttgtcttcacacttgtcatcccacacaaacttacaattcttttaggtcaactcggtcaaaggagtagagatcttgacaaaacattctacaattcttctgtagtacccagccaaccctaagaaacttttgatctcaattgctattttaggtagtggccaatctcgaacaacttcaatttttgctggatcaaccagaattccatctttacttaccacgtgtcctaagaaacatactttgacaatcaaaatcaatttcttaaacttagcataaagctcctattcttagagacgttgtaacacagtacagaggtgttgttcatgtgcttcctccaactcaaaataaatctagatatcatcaatgaatacaatcacaaagttttcaagaaagtccttgaacactgagttcatcaaatccataaatgttactagtgcattagtcaaactaaaggacatcactagaaactcatagtgcccatatcgagtatgatcgcagtcttaggaatattctcttcctgaatcctcagctagtgataaccagattgaagatcaatcttagaaaagatggtctttccctgaagttgatcaaacagataatctatccttgataaataatacttattatttatcgtcaatttgtttaactctcggtaatcgatgcacatttgcagtgatccttccttcttcttgaaaaactaaactggtgcaccctaaggagaagtactgttgggttttatgccctaaataaaactcttt

SEQ ID NO: 328293 - DNA, 583 bp, Cannabis indica
aggttctcctattacgatgttcaaagaaaagattgaagttgttgatgaggaaaagaagatatttgggtttagtattattggtggggatttgttaaaggactacaaaagtttcaagatgagtatccaagtggttcctaaggatgatgatgatgatggtaatgatcaaggaagtttgcttaaaatgagttgtgagtatgagaagattgctcttcataatcctgatccaattcatgttaaggattttgctttcaagctccttaaacaacttgatgactacactgcgccacaattatatgataagattgtataacttataatatatatatacctatatatttagggacacgattttgtccagtgatatacttttacggactgtatttcgtgatgtacggaatacattagatgagtctcagagtacgtaataatgggtctcggggtacgttactattttttaaccctaattacccctagatcaatttcagcattcagatcaaataactcgctcatctaacgactgccgtacatcacagaatatataatatccttatatatttatatatatatgattgtgattttatga

SEQ ID NO: 328294 - DNA, 1118 bp, Cannabis indica
aaaaatgtaaaaaaaaacattctttgaacgtaaaaaatgtaaatattttacaaaaaaattgtgccttatgtaattattcctaaaaaaaaatgattgtaatgtttctagcgtgctttgtcctcactcgctcttataacattctatcttctaaatgctcatatgctgcctataacaaaaagcagtaaacatttaatcacagaagcaattaaacatttactctcaatacttactgcatcacaagtcgagcttatctttgacaatgattgtacatgttcagccggtctacaggaagttaaaaaaacttggcgctctaatacaaaattataacgccctaaaaataaagaacgccatcgagactaaacatatactaataaaataataacttgtaattattacactataaaatacatcccaaaagagtacattttatttcaagatcccgtatacatttttaaaatactacaagtcattagtactcgccgacctatgcagcaaaaatagagtttggggttttattgttttgagctatttgtagagctcaaattcttaccattgttagattagtttagtgatgagtaaatcttaatttgtgcatgattattggaagtattttggtgtattaaatacttcgaaaatcattaataaaaatcacttgctttcaagttgatctaaaattaattaacaaattaattttaaactttaatctaatttttaaaattgaaaaatttcaaaatatgtacactaaaatcaatgtaatttgaaatttatgtgcgaaataattattaaaataaaataaaatatattctaaaaattattttaatttaagttgatatgaaattgataaatttccaatttaaatataattttctatttaattaaatttattaaaatagaaataaataattaagtatcttgaatcaaatcttttttcttttggtttgaaaatccaattgtccattcatctgccaaaaaactacgataaatttcatttttatacccatttttatctcaagacttaaagataaacttagtatcatgtgttggatatattttatcaggatctagatttactaacaagtatgttttattaacatgattccttttctgtagcagagcat

SEQ ID NO: 328295 - DNA, 1485 bp, Cannabis indica
aaaaagagattgtaattagtaaagggtgctaatattaaggaagaaaaacaaaacatttaatagtgtattaggtaataacaacattatttgaagttaatgtatgatgaaataattaaaagagttagagaaaatgtttcaagtgagtgcttaacaacccaaaataaaaaaaaattaaatatataaattataaatatttatttatttatttattttataaaccatgctgtgtttgctgtgcctcttctgcgtattttatgaggctatgttccccataaatacaaaaagagaaaaaaaaaattaaaagaaaaacaaaaaaatttaaaaataaaataaaattattaacttattattagttgtatctcagttgtaataatttgttattgtaattattaattttttttttatatgggacactgtgatttctgtcattttatgtctaacactgttgcatttggagtttttaatcaaaaaagaagactgacccaattttttaattttgattttctttttctcatcttttctaactaagccaattttaaaatttgcacgtgaaaacttttttttttttttaaaatacagttaaaactaaaggttctcttattgtacaattttaaaataaatataccctttatatatatatatatatatatatatatatattttgagcatctaaataattttatttttttaacatagtaattaaaattatacatgattaataatacaacgttttacaattgatgacgacactttctcaaattaagatagcttatcatctaaccgaaaagtatattttgccaaaccctaagctgcagaattcatatcgtaagccacatatgataaaattactcctaaacatttaaataataaaactataacattcttaaacaacaacttcagctcattagaaaacactattcctttatttgtatagacaacaaggttataataatttactttatacttatataaaataaaacaagcatacctacaataaattactgtaaattattctaattttattaaaaaaaattgttaaaagtttaagatgtaaaatatcatatatgtgtatgtatatagatataaaaaaaatgaagtatagctatctaaattgttattcactaatttttaagagttatgactaaaataaatatacttatttttagagttagattttacattttttctaaaaaaaaatgtgtttgtcccacatatgtgtgagtaatttgtgatgtttattacatttaatggtgtggtttttatcaaaacaattattaataatctagtaattaattttttttttatgtcttttgttttcggtttacttattcatgattgtaagactttattttcaagattatgtggtgtttatttgaattttgtaaaagtaacgtttatttgcactcggtaaaataatataagtgcactacaatatttttttaaaaaataaactcaaaataattttaaaaaattactcttaatatt

SEQ ID NO: 328296 - DNA, 1719 bp, Cannabis indica
gacctgaagagaaacaagaatttctagctaagacatgacccagcttgtttgcagatcgtttgacaaaacacaactcaacattatttaaagataagagaagattacgaacattatgaacacaaattaaactatcagtttccaaaatcacttgtccctacgaatgacggtcaatccagcttaaagcttcttttatgccaacaaattcaactatttcaggttgcacctgccattttggcataaaaattcctgccattttctccgctgcctccattcgttgataactactcgacgccatggacagccgaacaaactcaggaccaagaatcagtaactaacgccaaaaccaataaaacaaaactaattaaagaaaactatagaaccatgtcaaaagacaagacatttatactagtataatactaatactagttaaaaatactaattctagtataaaacttaaattaaaaattaatcattataatattaatactagtataatcctaatactaatactaatcaggaccgaaacgatcgcaggggagaaccaacactttccaaatcaaaaactctaatactccaagtttccaatattacaaaggcaagaaccaaacacttttgaaaacaatttgtcagcacattcaaggattttctttttcctgaaaccaagcagattgcaaaagttcatagaccaagagtatccgccagtcgtcgacagctcgcagaggaaaaaccaacgaccatgaaccctacagagacgattgagtcataatccctgtaatcgccaacctgcaaaagagagaacaccgtactccttcgtatatgcgagagagaaacccagcctttgaatctgttgaaatcgccaccgtcgcaccctcatcgtcgtcgcaccactgtcgtccccctcaccgtcgttgcgagagaagaagacaatagccccttcgggaatcgtcaagatacgctgtaccgtagctttttaaattatataagttttgataaattggtaattaaattttattttttagtaattggcccttaaattatataaatttaagcaagttgattcctaaatttttattttttttgataaattagtctctaaacttttatttttattttataagtggatgtaaaaatttttaaactaaaatctctctcaaacctttttggagaagtatggtctttgtgtaggggagttgtggtacgttccaagttgatgcgtctgtcgtggatggttttgcaggtttcgttgcaattcttaagggtcccccctcccatagatgatgcacactcaacagttgacttttccttcgcttgtaatgttctgaaactgaactttgtgccatccttcttgctttgcagttggctaagctcttgagttacaacaagtggtcatcgaatcagactcagaagtggcatttaaatgccttcatctgagttccttgccgtatggtttgtgtaaggattttatgttgtttacatttctcgttccgtgaatgtcgcagctgatttactcgcctattgggctagagatactaagggtttctccaataggactgtaaaatcccaaatataatggagttttaaaacaaaattacttcaaccaaacactaaaaatgaccctatatttgtaggagtctacagtgtcccactaataataatgtcagtggcacactaataatttaataactactttatgtacaataaaataaataattaaataat

SEQ ID NO: 328297 - DNA, 508 bp, Cannabis indica
atatttaatactataaaaaaaaaacaagttttatttttcattaattttgatgaaacttttagcacattattttatttttaataaaagaaaaatatgccaccccacctcaaattgaatacgcacatacttacagtattagaaccttacattaatataatatattgtgtgtgattactattgaagcctcactcacattaatacgataaatttattaaaaagtattaaattaattttataattttacatgtatataacttataaacaaataaattatgattataaaaataattaatgatttttatttaataaatataataaaaataaaaataataatcatgttgttaacgttgattcaattaaaataaaaaatatataagtttaattataaataatttaatataacatgataaatttgttatattatttgatcttatataatatataatttacttatatattaaattatcagattttataatttttctaataatactaaaaaaaaaaaaaa

SEQ ID NO: 328298 - DNA, 752 bp, Cannabis indica
tattaaaataggaagaagaaattgtagaacggaattagtaaaataaatagattgcaaaattgataaaattaataccttagattctatttattgatatttataatcattgtttgcttattttaattttattgtttttgtagttttaataatattcttttaattttttgtttgtcaaagtaaaaaaataattattaattcttggtaataatcttcatgagacaatactctcgtgattacttaaaaacattctattaattacttaaacgatacctacacttgcattataaattttccatatatatcaactatttgtgaatgttatctctaacttataaaatttaatgatctaattgtttgatgagatggttataatttgtctgattcaaaacaagattcaatatatattcatatttaattttattaaaactagtaaactagacgtattgttgaactggatgagatttatattaagaagtggtatgaatatatgttaaaagtaattgccattttggtcataattaagtactgtactaatctatactatattataaatcccaaaaggatattatgatacctcatggttcaattgtggcttgcaccttaaattattttgtgagaaacttatcattacagcctattcagatgttaattgtacatgttgccctgatgatcatagaaaaatcaatagtgagatattgtgtgtctgtcttttcctttgacacattggttttgcgcaatcatccaaatatagt

SEQ ID NO: 328299 - DNA, 1414 bp, Cannabis indica
atgtatgtatgtatgtatgaacaagtattaatattcattggtcaatttgttttgacaggtcttattagaagattcccctgttttatgctctatccattgctctaaattatcaccagtgtttacagtttttgctgtttttcatttaaatattagaatttacaccattttttttcttttcaattaaagcttttttacttttctagcttttacaggttagagaaatgaagaataatgataacaattttcttatcatataaattagaataataatatgtgtgtttgagtgagaagtgagaaggtgttgttggtcagtaaatttaagtcttttctgactaattactttctgccaaatcttgcttttcagcttcaatttaagtctaaggcagcaaagagataacttcttccacaacatgaaacaagcagtgttcgtgttagattgtaatttggtttgttataataatattcatggttggcttacacttgttttgtgttttagtattgtctggttttttctcttattatttatgatgtttcaggtgttttctttatatagttgctgtgtaatttgctagtatgtaaccacggttttcctccgcttaagtgagggcgattaataaacttgggaggaggtcactcatggacatgtgaccttcatctcttctcttcctatggtcaactctacaatgaaaaaaagagtataagtaatgtacttactggtttaatcagcttattggttgttaaaaattgggagttagaaagtgattttggttgtcatataaaaatcagtagattgtatagatcaatttttaactttttaactcattgattaaaactgctttaaaaatcaaaggattatattggaactaatattaaacatgaaagtcattcgttgttgataaaaatgatggattaatggctcaacaagtttcttttataatacattcataaaaatgttaattacaactgcacaacaagatcaaatcattcccataaaactggattgatcaatcatcctacatatatattactgttatagttaacatcctcagtttgcatagaattaaaatcaacacatcatacaaaccagaaacttaaaacacagcagagaagaaaaagttgtaatgcagaagaaaaataaggacagaaagcaataaaagacacaattttagaggggtttgaactttcctctacaatatgtagagagcctattccccttgaactccttccaaggaatcctttgcactatgattaatggaagattacaagactttgttcaagataacttgaacggttagatgggaaatctatttaggaactaacagtcttttctatccaaaagtgtggtagtcttgtatctttcccaaatggtggacttattgctcccaagttatgtgagttgaatattacttattgt

SEQ ID NO: 328300 - DNA, 1017 bp, Cannabis indica
tatttttatttttattctcattcctattattttatttctcccagccaaacgtcacctaaacataattaatcccccgtgtaccttgctagaactactacgattttctaagactgcccttaattcaaaattaaatgagaacaaaaattgagagaaagaaagacaaacgaggcggtcaaagcatgatctttgtttgatatgcgctttgagtaaagtatcttcttcttcttctcttggaaggaatttcattttctttattattagaagaaaaaaaaaatcttttgctttttcagcttttataacaaataagcaaaactctaacaatactcacttgccccaaatatttttttatttttattttttattaaagcatcttatgtagaggtttacccacttcctatccaatcaatttttttctttgctaaatgtataattctaatttggtaaatattattttgaattttgtattttgtaaaaattattaaatagtccatctattttgtaaaatgacaaattgaatcctgtattttttaaaatagtattttgaattgatttttagttaaaataaaatttaataatactcgatatagaggtgttatgacaaaattaattacgttttttatatttatactaaaaattatcttgaagttgattatattaaaaataaaattgtcgaaaattgagttcaaaatacttatttgtactattttagaaagtacattattagttttatcatttaacaagatagagagtctaattataaatttttacaaaatataaaatctagtattaacaatttgaagggtatgataaggttgccgcattttataatttatagggtcttctttttggcactgttgtatttgtatacaatgtatacatagcatatacaatagtgtttggattttgattgttgagagatgaaggaaggagctaggagaggcttttcttttcttttctactaaatatttggggtaagttgaaaaatacctcttctattcatcaattaatcaaatttac

SEQ ID NO: 328301 - DNA, 835 bp, Cannabis indica
ttcatatttaggatgttaattcaacatacttgttagtaaatctagatcctggtaaaatattcccaaaagactcaatcattcctcccaaaattaaacacttcctttggcaagcttaccatgatattcttccaactagtctcaatctgcataagcgaaagaccttgccttcaccaagttgttatcgctgcaactaccacgatgtgaccctagtacacgctctttttaggtgctcaattgtccagcaggtatggaatataaccattttttctgcatttaatactaatcatacatctcttaattgtatggaattactgcacttagctgttagcaccttcacaactagcaactttcaggtttttgtttgtttgctttggaaattatggaactgtaggaatgaacatttacatcaccgattagctatagtgcccataaacgtactatagtggactaaagattacttggaccaataccaacaccacaacaacccccatacaactgttattcttccatcagcattgcaaccagcacagagtgagccacgagcaccatcatacagattaaaacttactgtggacgctgcctaagatgcaaagaacaacaaaatagattttggtatggctattcacaacaacaacattgaagtgctcttgactttggctatgccatgggcaggcatccattcgcctttgataatggaagctcacgccttgcaaaatgctcttacttgttgtcagaatcattccattcaaccagattatattgaatcagattgtaaaatacttgttgactatatttataacaatgtttctcataatctatgttggaaattatttta

SEQ ID NO: 328302 - DNA, 583 bp, Cannabis indica
tagagtggtcattgtagagctcactcgcctaattcacgttaatattgaaattattaaaaaatatatgccaataacattaacataacaattggtgaaacgaaagaaagatgaggataacaagagattgccttgctaataatctcacccacaaatttctccacgtcacctcaccatcatctttcacttatctactgtattttttttttttttataaaactaaaaaatcaaaacaatacaatggataacatttattattgatttctcgaacaatctcacattataataaagattaggtattttgtattttaataaagtaatttatcaggtacaattatatatcataatttgattttttttttgtttttaaattaattttgtatatattttgatacttttgagtcaaatttggataaacagtctttaatcatgtgaatattaaattgagatatttacataaaatattatttttttaaatttcatattaattatactttaataaagtaatttttacatttatatttggggtttttctatttttatacttcaaaatagttttttttttttttgtcatttttacgaaatt

SEQ ID NO: 328303 - DNA, 1273 bp, Cannabis indica
atgttaaagtttaggggaaaaaaatcataattagcctattttgaatgacatcttccacaactaaaatttctctgataacaggaccctcatcaacaacagatgcttgttcaataataagcccctcgtcaataataggtccttcatcggtaatagacagcaatgggagcattatcaactagagtagaaataagtctgttattattattatctcttgaaaaagatataggaataaaaatttccttagatgactactttgtttcaaaagatgttaaaggaatattttcagcaacattaacttttagaagtttagtaatctgagattcaacaatttgcgtatcacaagtaggacaataaaagcgatagttttttattaagtgcattggataaccaatgatataacaacgaattgttcttgaatctaactttttcaaactagaatcataaattcttagttcaacagaacaacccgatacacttacttcagcagaacaacccatacacgaaggtgatttaaactaggctttctcccagcccacaactcaaaaggggctttgggaacaaatttacttggaacacaatttaagatatacgtagcagtcatgagtgcttctccccataagagctctggcagatttgatctgcttatcatgttgttaatcgtgtccattagagtgtgatctctctttcagcaacgccattttgctcatgtgaaccatgcatagtttattaagcaactataccattttcttgtaaatattcagcaaaaggcctcatgtgttgtacaaattttatataatgaccataatattctcgtccacgatccgaatgaacaactttgatgatttctcaacctcattaatttaaaagattttgagattattaagagcatcatatttttcttttatcaaggaggtgaagccataacaaaaaaattatcgatgaaagttataaaatatttatttctgcacaacgtagtggaataaggtctactgattttagtgtggatattttttaataaaaattgactacgattgacaacatctttcttgttttagtcaattttccacgagtacaatcaacacaagtatcccaatcagaagcatcaagaggaggaagtatttcagatttaattaaacgatcaaccctttctctggaaatatgacccaatcttttgtgccataacaataaggatgtttccttaatatgaggtcttttacccacagtattcacaacattaaaagaggaatctaaaggagccaatgacaacttgtaa

SEQ ID NO: 328304 - DNA, 2192 bp, Cannabis indica
tggctccagtaagcctgaatcgctattaagactgaattgattaaagtaatccgtcctgcaaatgttgtagttggggagaatattataattggatattgtattttgaaaagttacaagcgtaaaaagagtgaaagagaatattttaattagatgcaattattttctttaatttctcttaattcttgaaaaaaatagaaaaaaaaaagtgaatagtaaataaatattcttggtgtggattggaaaacaaaaatatatatatatctctctcttgtgtatagcattaagtggggaatggaatagttttgggataaaattgagattcttggaatataaaaagcttatggtatagttgagcctaaataatattttcatctacccttacctaagcctaacgtcataaccttttaaagtctttttgatttcaaaccatttatcgttgacatgagttgagaatgttaaataattgaagcatattaaaacattgatttgtggatttatttggattaagttgaacatatatggtaatgtctaaatattggggtcatttgtaagtcatattatttatttccctataaattttaaggttgaactttgatgcaactaatctaaaaatctggttaaaaattataattaagattttatgagaaagacaatgtagtttagataacaatggtggcttacttttgtgtgttcattattgttttcttttttgttggttaaacttggtctttactcgagggtgggtaaaggctaagtttaggggaatttgttaggtttatttttatgcatttttagagtccaattttagtgtgtgtttttagttttttttttttttttttttatttgtgcagatttatgttttgttttatttatttttttttaggagaaatattgagtgatctctgttttttgtaattttggtgtccttcaagcttttttgagacaaaagtgggaaattataagtgaaaaagataacttccataatgcttagttagattttttattgcctcaattttgtcaaaattttcattttagccctaaaatttatggtctagagtctagagtgatcacttttcatttttagatgctcagcacgctctgtttgtgactgaaaataaattatgaagcttcaagccaatattttactatgatacattcatttccagggaaaaattttcgaatgaaagttctatatctctctttagctttctaaaacatcttaaatcgtctaattctgaactatatcgagagagttatgacaaaaatactattagtcatcgcaattggaaattagaaaacgagagagccatgactcatgcaaaagaaacgtgaagcttcccatattttgtctataaaatgagttggagctaggttccttcatcattcgaacttggagaccaattttgggcattggaggattttgggaaaccttcctaattgtgtatttaaaggggctgagagcttagatctaatatcattcaaaaattgagagaaattctgagtgtagaaggagagcaaggagcggaaggcatcactggaggactccaacattattctatctcttcatctttatcttttatgtaaatttttattatttttcaatgtcttctagtagctaatttcttttaagaattattatgcgaatcacttgaatcaattttatggataaatgtgattgttcaatttcttattcttctctttattcaatttcatacaatctgcttttattttgcaattatttactagccatcaataacttttatttatgaatgcaaatcaaaattcttgaaggtgagatttgaaaatcctcttactgttatggatgcaaattgatttaggatgaaagtagctaagttatttgtataattttattggttcttatggtaaatgttatttttgtgattaaacttcctataggaatataggaagttttcatatagattgagtttataagtcttaaccagattataaacttcttaactctatttatcaattgaatagaaagaagagaaattgggtaattacattcagaagtaaaataaaggatagttgagaatcataataattgttgtctttattattgttatttttctaaattttaattattgccttgatttatttactttttctccaacaatttttattaataaaataaaactaaagagttaattgattggtaattgataatcaat

SEQ ID NO: 328305 - DNA, 557 bp, Cannabis indica
atgaattaaaccttagcaagaagtggagtttattgagaaaactatttttaatcttaatcaatgtaggcacatttatgactatgatttttatatgtgagatgagatgaccaaaaagtggtacatgtgaaaatttatcgtacaaaaatgttaattaatcttttccatattttaattatcttctgcaggtggatgttggaaaataagaagaattatggagataatacttgaatggaagaaactatattttatatctcaatttgtatgatttgtgacttggtacaaaatgatgagattacatttttatttatagaactctatgggctaatatagaaatattattaaatggctagtttctacatagttctctttaggatgctgatcatctgtcaaaaattttcaatccattcatctatctaactaattaaaacaacccatgtcattaatgacttaagagcatctctaaggagacaccaaatttggtgttacactatcaccaaatttggtgtcaaaaattatttcctactccaaccacaacactagaaattacactaaaaaaa

SEQ ID NO: 328306 - DNA, 693 bp, Cannabis indica
catcaacaaatagtataaacaacctaaaagaaacaaacaaacaacacacaaattatctcaataaaacaagtacaaatcacctatgtaacatgaacaactaaacatacacacattgacatgattgtgacacactcaaattgcatacactatatacatacaatgatgtttaagtagtctaaactatacaattaaaagtgatacggttctcatataatttctatgataaaaattaaatacatatcatcgtgtatgtgaaaatgttgctactacttttgtgtgtttctagcactactcatacttatttagaaaatgatttaatttgatatttcatcttgaaaatttatttgtttcacttgaattggtagggattagaaataatttagttgctatttgtattatacttgataaaaaaaatgcttgaataataacttaatgattttttttttcttaaaaaataagaacaaatataaattagggttgatgttttgttgttttgttgtgtttatgctgctatattttatattgttaatacaatgagttgatatataagtaatttttagttgttgttttgaggttatttttaagtttttttttgagttgacacaaaatgttgatacttagtttatttgcctattaaaataaggttgttgctctgttcatatttaattgttcaaacaaaaaaaaaataaaata

SEQ ID NO: 328307 - DNA, 1179 bp, Cannabis indica
ttatttcccaatatttattttttaggggaaatcaaaacgtctaagggatttttgaaatgattacccgttttcaccagattgcctataaataaggcaggaacttctttagaaatcatttttaccatattctccacgaagcaaatccagaacaaaaaaggaattttcttcgagtctgtcataagatttctcggaggcatccgagcagcttcatctagactacatttaggtttcaaacagtgagtaagttttcaatcttctcctctttttaactttgcatttttaatttctggttttccattgtagaaaatacatttgtccttgacttgttgtagaagatacatagaaaatctaggatcaaaactttgtacttgtctctgcaatagttcgtacaacttcatggtttacgacattttgactttaacctcgaaatgctcgattctcaccttgctcatttgaagcttcgtgaaatttaacccttaacccaaaaatttataactcctgagttatgacttaattttttgtgcattttccatcttcttaaactgttgggtggtcctggttggtgttttttcctgtttattattcgatatcccggccaaacactcatctcgtgtgttgtcttttgtaaatgaaccctggtgagttttggggaggcgaacaccgtattgactaggatttgcttcaacttctgtacgaggatcaacctcgtcttcatgccagtccgtcctcttcgagtgacagactttctaactcgagctttgaagatcaggaagtgagtagtgatagttctcctactccagaacccaaagtgcaacaccactcttactccgagtagatcgtaggagaagggtacgattgcttcatttgggaattgaagaagggttagaggcgttatcttccgtccaactggatgtatattgtccggccaggtgttgctggtacccttcttgttggccgtccaagttctggtaactttggcatcccaatagctgtccctatcgttactgttgcacgacacacacatcagtatccgtctaagagaaggatgatggctcccacaaagcagaatatgcagaaagtcaatgcgtctgaccctcacgtggccaagcttgccacgttgccaagtgtcgagtaggatctgcccgccgtggaggaggaggatcacgagggggacattaa

SEQ ID NO: 328308 - DNA, 1024 bp, Cannabis indica
atattaatattatttattttagattgatttaaatatatatataaaaaaatattaatattatttgttttaagttaattgaacttatattaaatttaaataaatttaaatatatataaatattgatatattatttataatattattatttttattattttaatatttttaaatttttatatttatttttctcaaaattttaaatatttttgaaaaataaaatgaaaagattaattaatttctcttttaatttataaaattttaaaaatacacgtaacaaaaataaaaactaaaaatatatgtaagtataagtgccataagaataagttagtttcttataaaagtgtaggagaacgtaactaatttattaaacaaatgaatacaattaatttttgttccctttaggtaaacacatgtcatatggacgcaacacaacccacaatacatatttattttttattatatattgctatgactaatggccatggaaattccaccaaactaaaatgtctttatttttatttatttattcacaaactaaagattgcatatttaccaatattatattgaaacatacacacttcacttttgatgtgtttataaacctagtggagaattaaatactcactacaaaaaaacaattatttttagtgagaactatgtaatcacaacataatttttttataattaaatgtaacttttagtcataacaaaatgttacttgtgactaaagcatattatttagatataaattgttactaatttagtttgtcacaacaagtattgtcactaaaattacgtacatttagtcccaacaaattgtaatttttgtgctaatacttttagtcacgaaccttttagtcaaaaccatataaatgataatttataggtgccgtttggtaacacttttgttttcttattttttaattacaaaatgaaagtaaaaattttgcttttgaaaaacaaaaatatattctgtaaccacttttgtttttcaattttaaaaacagaaaacaaaagtgtgttt

SEQ ID NO: 328309 - DNA, 1422 bp, Cannabis indica
taacagattcaaattaatataataaaaccttaaataatcattacacaaactgtcgccgacgccacaaacttagaagcaccgtggttaacgaaccactacaaacctcgaacctccattcacataagaaaagaaagaatgagagagatccagaatatacgaagaacaaaattggtgtttccaaaaaaaaataaaaataaagaaagtgatggaacgatacttggaggtttcagagggtgtggagctcagatcttaactccattagtcatctgtcgtgggaaaaaggtcactaggctactttgtcgaagaaagaagtggagatgaaggagaggtagcggcgaaagagagagaacatgtgtgagaaaattatatcagatctaaaataaaaccctaaacgggatgaaaagattagggaaacccttatatcctgattttttgtaaaaaacaagcataaaagggtttttcctttaccctgtttggctctagcaaaacaataaagggtaaaaatttaattttttggtgaccagtcaaacaaggtccttgctccaaaatgtgatagaagacccatcatgggcatgtttgactagtcaataaaaaaaaatctttcaattctattttattgtaactttcatttttttagtgctcaacaaaacatggcccttgtgccttatatagaagtgggaaaaaactatcaacatactttttatcaaattttttatatttttcaagtataaaatgtgggataaaatgtccctttttgtagcagtgagtagggtgttacacattcatttgccgctatggcttatcaaacggtgcgtagttgatcactttttagcgtcaagatcaatcttgaaagctattgatactcacaaaaagattactattatattttacagtgaatgtttcttttcccgaaaaaaaatatagattcacttatgtataatagtgacgacaacatcattgaattgaatgaggactaaaattgagatacattgctgatgatgattatgaaatcataagatgcgttttctatatatttatcaattgtatttttattaaatttttactttttacaagagtttttcaatttctaatattttcttcattatattgtttgtatagaagtgactatttaattcattattatttgtgttatagtgagatttctctcacctagaaactcgagaccagactcctgtttggaggacacgtgtattcagttttccaagaaaagctgggatatccatgagagactcctcgagtttaaacctcgcctgagctagagtcagcgagatgatgcgaatatgattaaagtctaaacgcattcgtgtgactcgcattatgtgggaccaaagaacggatctaacttgcatgtaccaggatatgtgcgggtatcctttctatactcctgcgaagacatagaga

SEQ ID NO: 328310 - DNA, 691 bp, Cannabis indica
aaaataattttaaaaatatttaatttttctaaataaaaaataaaagacgaattaaaaattatcactaaacgcacccatatattaaaacaacataagacacaaaattaccaaatgattataatatttaaaagaataatttgcgacataaatacttaagtttaactattagttgcaaataaataagttatatttctagaatctcgtaggtacgtgaccattaaatgtcaagtcattatccacgtgtcatttttttattggtatatttaaactatttttttttaaaaaaaataaaaatttaatgacctggaccaatcaaggcttgccacgtgataatttacttaacagttaatcaagtacctaccgagttccaaaattataacttaggtattattaccgctaaaagttaaacttagtatttatttaaaattagaagttaaatttaaatatttatacttcaaattactctatttaaaaatatagggttttatgtatgaataaatctatatatttatataaagctaaatttaagagtagtgatgtggcattctatatttttttaatctatttttcatattttgtgagtgattcttaacataatgtacatcactctcaatttctttaatatacaaaaatatcacattattaaagggaaatttacaaaaatactggaatttgagttaacttttacaaa

SEQ ID NO: 328311 - DNA, 1395 bp, Cannabis indica
ttaaaaaaaaaaacaaaaaatacaagtgtagcattcaaaatttttatttttatttgttaattttatttaagtgggtctgggtccgagtatggggtcggggttggggaaagggtctagggtcgagcctggggttcggttctaagcctgggttcaaattaaaccccaggtttgagtccaaatctagggccaggatcccggattagggttcgggttcaggtcgggatccgagtttgggtcttaaggtccaagtaaatatttaagaaaattttgaaagtctcttttttttttttcaaattttttaaagttttaattccgatcaattataacattgaaagtgaaaacagagttatagaatatattttttgaaaaatattttcactttctaattaattaaaaataaaaaaataattaaaaaaatattagcaaacgcatcttaaattatttcacgccttatatataaaatatacgcacatgttcgactgagtgtttaatgaatcttattttcagtactataaactaaaattttaaaaacaagaatgatgcttgctataattataatatacagggtaaatattattttaaactacgtgttttataaaagttactgattagacaatttattttgttaaatgataattttgtactctgtgtttttttaaaatagcataaaataattcacagaactcattttttttttgtcaaattaaaacttaataataacctcatataaaaatgttaaggctaatcagattattttatttatttattgcatatgtactcatcatgttagaaattgacttcctaaaaaattgagttattataattactcaaaaatataaaatgttagtacggaaggaaaaaaaataataatatccctacttattttatttttttatatatacttatatttaatattcattggaaaaacaaaaaaaaaaaatactatacaaatatacaatattatagtcatataggaaacatacaacacgtatatccatgcaaatgttggataataaggactataatcaatctctaatctctaataatacttaacaaatatatatatgtgcttaaaacaagatgaaaatgcattaattaataatctgagtttcagtatatataatatatataactagtcaaagtaaaagctatatacataaattcccacataaatgctaggtattagtggtatctacaccattttatgtattaatatcgttattagtttaactaagtatcagatcacatataatttataatataataatttttagaaagtatcgttaaccaatcgcaaaacgacatattttgagaatgctagacaccactaatacctaatgctcaaaagccaggcagctgtcattatctttgattgctttgtatgtatatatatat

SEQ ID NO: 328312 - DNA, 505 bp, Cannabis indica
tggaagtcccattctaagtttgagatttgttttttagatatttggtcaaagcaattaaatggatcaaaaatgtttcaggcggtgatgaaattgaaaagcttgaaaactgctctgaaaaacatcaacagagatggtttctcagatttgcaaggggctgttcatgaggctaagattagattggatgagattcaaactaagttacaaagttgtccgcttaatgaagatatacagaggcatgaaaaggaggctcgggagacatatgttaaggtacaaaaagactacaattcttttttacaacaaaaggcaaagatggcatgggtctgagatggtgatagaaatacatcactatttcatgcaagtataaggcaaagactaagacagaataggatcctatctattgaacaacatgatggggagagaatccatgatccccagctggtgcaagatacttttattgcctactacaagcagctacttggtactaaaatggagaatagaagaggtg

SEQ ID NO: 328313 - DNA, 874 bp, Cannabis indica
cgaagttcaattggtggtatcctcagtatatgtgaaaattgttgacacttgtcgtattttttgacaaactcatgagtgtctttattgatggcaggccaaaaataaccttgtcagattatcttcttatataggctttacaatccaacatgatctccacataagccctcatgattatcttttatgatactattggcttctgctaggagtacacatcgtaataggggcatcgaatttcctcttttataaagttttccatcaacaattgtatatctcgagattgcatacattagtttccatgcatcgcttttatctattgaaagttcaccatttagcaagtattttatgataggaatcatccatgtgggacttgaatcaatcctttctatttcttgctcttcagcttcatagatactcagctcgcataatagatcttttggaactaaattgaggttatccgattccaactacgatgccaacttttctaaagcatcaacgttagagttttgttctcttagaacttgctcaattttataataatcgaatgcctccaaattctttcgaactttatctaagtatttttctatccttgtaccttttgcttggtattcatccatcactttatttacaaccagttgtgaatcatggaagcattgaaatttaagggtttcaacgatccatagtcctgttagtaatgttgcatactccacctcattatttgatgctttaaactggagccttagtccataatgaaatctgaaatttttaggaaatatcattatgattcatgtccccgagccattgtcgtttgaggcaccatctacaaataacttctagactctccaatctgttggaattattttactaggatcttaga

SEQ ID NO: 328314 - DNA, 954 bp, Cannabis indica
tccatgttgcctcaacctcttaacctcctcctctaatcgttgaatcctaacttccatcttcacaaacctttgctccaaatctagcagaccctgtggtggattttcataatcacatccataagtcctttctcggcatgtaactcatccttgggaactagggggatcccattctttccaactgccaccagtttcaaccacatcatctcaactttttatgtttttccaggcatccatctaaaggacaagcctgcaaattcataagtcggcttggtcatgcaacgatcaaaattgtaatctacttaccacttacatgggaactcaatatgctcctattcaactatcaatgtactaacatgcttttctaatcatacataacaattaaaactactaaacacatagaagattatcgaactgtgagtcaagcttatctttgatgataattgtacatatcttgacgatctttggagaacaacctggcgactttgatactaaattgtaatatcctactagctaggcacgctatagtattttcttaattgttgtgcacttcctttcctaatcaaagagtttattaaaaaacgcaaataattaaaaaaattcacaattaaattttagtcctaaatatataataatttatataatttggaatcccattataaaaatcataagtttacaaaatacttgtattacaaaagtcatcgtatagcgactatcaaaagtgagcctaaactgtcgcgaagaccttgaacactccgggtgaaattgtcttgatatgtacaatctttacccttagctttagacttgtcccgatttagctctagctcttacctgcacatacacgtaataactgtgagtcgatagactcagtaagaaaagtataatcataaacataaacatatatacagaccgtaaccaggtgcctattaaacctaatcacgatttgataactgggtc

SEQ ID NO: 328315 - DNA, 824 bp, Cannabis indica
atatttttgattgaaacactaaagttattttttatattagtacaaaacatgtacaatgattagtgatacactttttgagacacatattttgacccttctttaaaagatatatacacagtcaatttttcttcacaaaacatacatacatacgtggaatggacaatatatgtgattagtgaaaaatgtagaccatatcaattcaagctccaacggctgtgattgcaagacttgactcgatctcactgttggtgcggctgatccttggttcgcccttttcaactccattgacccatatttctggtatcacttgtgccagattattcactttctctaatgcataatcggcttctttggttttcatggtctttccaacctttaatcaaaaagatattttaaattttaaaaaaaaatagaaaatatttaatcttataattgtgaaagattttaaagttttgacatttagacgagttaatgaaaatcaaacattcctatttcttaactttcgcaaattaatatacattcctaattgttcgtttatgtttatgtaaatctaattttataaccttggtacaaacaaaattgaactagttttcctaatgccccttgagaaaataataaaaaataaataaaagccatttctttcaatgtgtactgaaaaatacatttttctcacactcttttattgagatagtgaataattattataatataatatgaattaaattacatcaataataatagaataataccatgattatgagtgcttttaacatttctctattgaataatttgactatacatacatacaaaatttgagaaaataa

SEQ ID NO: 328316 - DNA, 809 bp, Cannabis indica
aaaaaataaaaaaaaaattgttaaaaactaaaaaaacttccctctctcttcctctctctcttccctctcgtacacctctctctctctaagaaaaaactagaaaaagcttccctctcttgcttccctgtcgaatgtttatttctcgggtgggcgataatggaaaaccggagcaccaccccaatcactcaaaaattttacaccattataatggataagttgtgttttaagcattttgttagactttatgtagtttgtgtttgttatacgtgtcgtatttgttgaaattggtattttttgtttgaaatggtagagatattgcagatctagttttctgtcgaaatctgggttttccagatattatcgacagtttatcgatagaatatcgatgctatgtcgatatccttctaagaaaggtcagggatgaccattatcgacatgttgtcgacagtttatcgatatcatgttgattaaaaagtaaattactgtttgtatatataatctagaattagaataaaactgccaattactgtttcacaaagcttcttaaaatatataaccttattttgtatatatttttatttttattattaaaatataaattggcatcagcatattagcaatttagcattatgttcagttcaaattaaacccaaaataatagtaaataaacaaaacaaattcttacgttcttttttttttgtatgaaagagatgctttattaatgaagaaagtcattcattacaatttccaccaactcgaatggtaaattactagcatcaagagtgcgatctgacatgtaataagagcta

SEQ ID NO: 328317 - DNA, 1112 bp, Cannabis indica
aaaaatgtgacaagtgccaaagattctaaaaaattccaagagctccacccaacgagctcacgatgatgcagtctccttagcgcttggtattgtgggggatcgacctgataggccaacttcaaaagggaaaaggaagggtacagtttgctatcgtcacagtagacttcttcaccaagtgaacagatgttgaaaccctagcaacaattactaccaaaaagtcctcgacttttttttcaagaatatcttatgtcgattcaaacttccccagaagattgtgacatgttcactaatttctcaaataggcacgacatcatcaaaagcttctctgttgtggctgatcctcaagaaaataggtaggtaaaagctatcgacaaaaccctgaaggacaccctgaagaaacgccttgaggaagcaaaaggcaagttaccaaaactactcccacagaagatggccattgggcaaactccattcgctctagcttatggctacaaagtgatgtctcacaggagaaaacctatgaccaataaacaaacaacaccttgttggcagtgtcccttgatgaagtaaaagaaagaagagatcaagctaacctaaagctgcaggcctaccagtagaaggtagcaaggcacttcaacaagcaattcatgaacatgaagttttccataggagacataacactctcaagagtattcctaaacactaaagactcgacagcaggagtgttcgaaactaactgggaaggcccctatcaagttagagataactagtaagggagcctacaagaggggaaggtacaatgagaacttgagctcgttctcctagaaagatataataatggagagcaaaccaacttatagaacactactccaaagtagtagttctacgtactcaatattagcgtacaaaagagctagtacccacgacctttgttgcgtggtctcccacccttcttcaatggcctctgctatgcaatgcaagcaggggtattcatttgacatctataagctaaatctgtgtaatgtaagcgtataaattcaatttatgtaagttgcacaacaacaaagaccatttaatgaaataaaaataattttcttgttctatttattcacaag

SEQ ID NO: 328318 - DNA, 901 bp, Cannabis indica
ccgaccgattttcacccctatcagtgactacatagtacctccaacaataagggccaacacctatcgtcactaaaattaatacacacattattttaaaattggataatgtaatgtttcgtgcaaggcatgaatatttaattttatattaagttatatatttttttttcaaatgttaaaataattaaataatattataaatacataagttaaaataaaaggtcgtaacacaatctaatatattaaggttactatatatgataaaatactaacatcattttgtacttattattattggggttacaaattaatctactttttaatagtaaaaaatcttttacttttgactaaatttattatattacttttgttcattgactatatcatagtacttccaatgggggccaacacccatcattgctaaaatacacacattattttaaaatatttttttttctctcatttatttaagatttgacacattttttttacaaaaattactctaatggtcgacaactccaaatgttgcccacatactactttttaattaaattttaaaattatatgtattcccttaaaaaaatggtgataaagttacatttttttaaaaaataaaggctaataaagatttttaccctctaaactttaacatgtatcaaatcatgccccttaaactttttttaccgttaaaaatttctcctgaactattaagattgttagatttaatgacttttgtctaatttcattaaattttactatttcagtgattgtttatgtactaaaccatgctcctcagactttgatatctaccaaatcatgcccctcgaattttgacatgtactaaatcatgccccctgaactttcatcaatgctagacttttttttattaaaattggacaaaagt

SEQ ID NO: 328319 - DNA, 1045 bp, Cannabis indica
tagggcacaaaacccaacatgtcctatcaaggacaagatttcgggccaagtacttctgcggggccatcttaagcatggcctttatcaccttgatctttatcagtcgagtgccaaatctacacagttcagcaaaggacttcttcctctccctgctgcatacagttgcattcaagaaaatcctactgcaacttttactgaagctcaagtcgggcatcatcgattgggccatgcctcctcaagaatagttaaaaatgtcctcaacagtctacattcttccactaaatgtaactctcttccattttgtcaagcatgtcaatatgacaaattacatagtatgcatttcagtagttcaattcctaaaactacagcttgttttcaacttgtgcataccgatgtatggggaccatcattttacagttcaatggaaggattccgatattatgttagctttattgatgacttttccaaatttactttgatttaccccatgaaaaacaaatatgaagtgcctctgatttttagacaatttaagtattatgttgagttgcaatttaccacaaaaattaaagctatacagtcggattggggcggtgaatacaggcccttgcaatctattcttgagcccttgggcatcacattcagacactcgtgtcctcatacgcaccagcagtaaggacgggctgaaagaaaacatcgatatgttgtcgatatgggcctttccttcttggctcaagcacaaatgcccttaacacattggtgggatgctttcactacagctgcttacataataaatcgacttcccaccccagttttacaattttgaaatccatttgaggtgttgtttaaacagaagcccgactatgcctttctcaaaacatttggacgctcttgttatcctctactccagccataccagcaacataagcttgcttttcgaactgctcattgcttgtttcttggatatagtccaagccacaaaggatacaagtgtatgcatctgttgcaaaaattattaaatactacgcaagtgcacgcaatcaagtag

SEQ ID NO: 328320 - DNA, 793 bp, Cannabis indica
atgttttttcaagtcaaggagattgaggctcatgctatctctttatgtttacaatggcttcatcactctggtatgttatccatttcattgaaactgatgcacaacttgtttcccaaagtgtcaataattaccaagtgcatcatagtcgcttccatgatttaatttatgatgttatttatcagatgtccttttttcctagagtgtcactgagtcatgtttgtcgctcggcgaataatgcagcacatggtttggctagatttgctttaaggttggattctgatatggtttggcgagcagatgtccctgctcctattcaagctgttgttgtaaatgaacttcctcattaatttataataacagtttttctctcaaaaaaaaaaaacaaactaatttactgtatagtgacacgattaattattattctctctccaagtatattaatagtcattttatttatatataaaatatctcaaacgactattcattatctttcttattcaaactaatcaatatcttatatatttgataatttttcattcaaactcctattttattgctgaagaatacgaaaaaatattgttttaataaattatgtaatagaaatttatttatatatatcatattttttttaatgggaaaaagatgtcaaactaacaaccagaacaagatatatcatacctatatcatttttttttattatgttttatatctttcatttttttttacttgatatgactcattctcaattttttttcttacttgatatggacatactctctctcacttttaattg

SEQ ID NO: 328321 - DNA, 1005 bp, Cannabis indica
ttgtcatctctttagcttttgtgggagagggctttctcgtcccactagtgccatagcaacagaggaggtcttgttttttgtcccttctgatgccataccaatagaggaggtcttcttggcgagtgataaggaagcattatagcacttgtggggcttttcttgattgccaaggaaataactgataccagccatcgttgggaatttgatggacaaatggtacactgatgagatggctcgaaggtcatagaaggctagccttccaagcatcatgttgtacggagacttcacatccaccactatgaacgtggccataatggtggtctgctttggggtagttccaatagtgagtggcaatttgaccttgccgcatggagcaatgccagctctactgaaactatacacaagctgcttgcatggctctaggtcttctaaagtcaagcccattctaattagggcctacttgaacaggatgtttgaggatgctttgtcatcgatcatcaccctggccaccagcatattagctatttccacctcaacaactaaaggatcattatgatggtagatgacatgataggactttgaatctctgaatgtgataggctcacatccatagcgttgagactttggaggatgttttgcaacctctaggagtttggctcttagctcaagtcgaagtgatcttacatacctttttaaggccttcctcaaattttcaactaggtgagggcctccaatcatcatctctagcctgcctgcgactggcgcaggccggagagattaattgcccccagctagagctttaggtcgtacatactactgaagagcaacatgtttttgtttgatgagaaattctatctcatcccgcaattgattacactcattagtgtcatgactgtaattattgtcgtagtgataaaatttattcatgtccctcttccctgactctttgaaaggaagagagctgcgatacaacactgtggactgtgttactgttgggttttatgc

SEQ ID NO: 328322 - DNA, 1328 bp, Cannabis indica
tactccccttttagttgtatttataccaagggaaatactatccagatcactataggtgggatctactatagaaccattacaaggtatgaatcaatactggcaaaactcaagtgttaagatgtgctagggtaggcgtgtgagagaggggaagtgaggaagagagagagtttatcagacacttagagtttagaagcaagtttttggcgtaaaggtcacttaagtttctaggtagggttaaggcctttatataggaggtctcaaactctaggtttacatttccaatcccttaatatatatagtttgttatatttttacaaaagaccaaagtgccattgattctagatattattcagccattctgttaggcttttaggacccaattcccaacccatagattgttgtccacgtgtagaagtgttcaggaaagcctgcagtgcatccttggccagccaagcccctgtggtggctaggctggccgaccatggttcagtcacaaggttggtcggccatagggccgaccaccccgagagggagctggtttgtcacttgatgcccatttgagagggtgctgacttggtcttcctttcggtgagctgtactgccacattgcactaattttgtccacgtaagcatgccacatcactaggacaaaaattgggataacatttgtcccccaagtccctgtgtagatgtctgtacggatagggactttaccaaccatattgatgttgttggtgttgggctttgtgccctaattaaaactctatttcaatgtaatattttctattcaattatcaataaagaaacagattttttttcattacttgtttagtgtgttatttggttcatgtgataatttatttatttatttgatacataaattcatctgaatccttatcacattgatattcttatttatggtgtcgtttgcacagtgaaaagtaatcaagattgtgtgtgattaaatgtattcctatgatttattagtacacagggtttaactgataggataatctacaatgtagtttacttgcaccttggataagttctatgtcatttctaggacattggttaaagtaagcttgggttggatgcatggagtattcatcggaagagaccaatattgaacttgaactagatatgatgaacttaccgtaatatctattcaaattcagtatcacctagttgatcttagatcaagtgatcttaatcctaagatggttaggttctagttcagttgcattatttgtgttcttaaatctgtttgttaaagtcaaccaaatggttcttctcgtaacatataggtaaaggatatggtagttcaattg

SEQ ID NO: 328323 - DNA, 885 bp, Cannabis indica
gtattacgaggtgattcaccactgctgtgtattacgagcagctataagatctttgtgttacgagtagctacaatatctctattacgagatgttgaatgtttatcaaaataatatcccgacaatgctgaaatacctctcttcatgaaccttgtgatctttatttagataagatcacctgacaggttgagtcctcagtttttttttacttgtcccataatgtatttattgtgcgaatttattatttatgccacatggcattcaatttgacttatctattaaatagtccaaaaaatgagtacaacacacacaactacaacacttacatttttaggaagatttccaagttcaacaaatgctatgtaattttcatctcaaggaacattgaagtattctgaatgttctacaacgtcctcctcttcatggtcccaataatcatggtaatgatcatagccttcatattgatttggtataggctgttgaggtggctcaataaaaaatgtagatgtctttgactcagaagatgatgctgataaaatctcaatgggttcttgaatttcaccaggcaaaacctcgtcactgtacctttatgccagtaagtcctcaaatgtcacaaacatgttgtaaaagtagtcttctttgttcttctgatctgtggggttcacaactacataaggcagcctccgactcccttttggcagcttctcaattgtacaccttttcaatgtttgaggaggatttaaaacatgtttgacatcatcaatatcttctttccactcttgttgttgcgaaaattattaattactacgcaagtgcacgcaatcaagtagtatactcacgcaagtgaggtcgaaccacagggaattggattaattactactaaactat

SEQ ID NO: 328324 - DNA, 1314 bp, Cannabis indica
catcacatgttcttcaggtaatatttccatagattttttttttctttctataaagtttattgatatgatatatttcaaaacaaatacaattttgacatcttttttttggggggcgctggaggtaatatgatggggcctagaactggggttcttgtatattctttcaagtctattcttaatggagtgaggattgattcctcccacacatatattatttatttatttaaaagtgcttatatataattgatatgctctctggagtagtttcacatcttttgccctggaatttttctgcagggtagaaattcatccagctcaactcaaccagttgactttattccgaatggaaaaattctctctcatcaaaatcatgtgaaagtaactgtcccgggtaataatagtttatctgactttggaacagtcactcacgggagagctacggtagctaagcttcgaccaaaagtaaatgttggaagatctatgaacgatattaataatggtttagattccttgggtgagcagaatcgaggcccccgaatcagcagatcaaagaatgagctggctgttaaagcctacacaaccagggcaggaggtgctaatgcccaaggaaacataattatctatactgaccagtacaacactgatgatttcccagttgactacacagatgcaaagttttttgtgataaagtcttacagtgaggatgatgtgcataagagtattaaatataatgtttggtcatccacacctcacggcaacaagaaactaagtattgcttatgaagaggctcagcgaatagctgcaggaaaacctaaaggctgtccaatctttctattcttttcggtgagttttgtgtacctggcttttattagtctatggacttaatgcatgataatttagctataaataagtaaggaattttctgtaaactcgttactgattgaattccttgtttttgcaggtgaatgtgagtggtcaattctgtggtgttgcagagatgattggacctgtcgactttaacagggatatggatttctggcagcaagataaatggagtgggagcttccctgtgaagtggcacattattaaagatgtcccaaacaccagtttaagacatatcatactggaaaacaacgagaacaaaccagtgacaaacagcagggatacacaggaggtattctatctaaatttgttgttgtttaacactacttgagccatttatatgtatttttagttggggttgatcctgtagtttttgggatcttattttctttatcgtcgactgttcggaaattagctaagtacattttagat

SEQ ID NO: 328325 - DNA, 848 bp, Cannabis indica
attaatcacattttttgttaatactattattattattattttaatgtatattatatttatttacatagtacttactttcttattaataaatataatcaaatatagttttatatataataatatatgaattataacaaaattgcccaaaaaagttaatattaggataatttcataaatattcaaaaattaatcataaattatataaaaaaaagagtacaaatttatattttcaataaagttataatttgcatatataattttattttataatgtataaagaatttgatattaggatctcctttttgtgagaaaaaaaaagtggaacagctatactatctatgactatgaccatcaattatataacacaatataataccaaaaaaatattaatcactaataatactttttagcaatataataaacatgaccagtaaacataactatctaataccagttcaaagtttcgtgtcagacaatacaagtattattgcaactaggcattggtggaaaatcaaaatacgtggtggattttgagtctatatgttttcaattaaataataataataataataataataataataataataataaaacatgcctatgttatgtttgattttgagagaattaagtattaattaagagagaaaaattcaatttgtattgactaagaccaatagagtattaaatttgttgagattttacattaaatttatttcaagcaccctaattctatatataatattgtttatagcattaatattactgtgacacactgacactactatttcaaatatttttgtattttttataatttaaaaaaaataatataataataaaatataata

SEQ ID NO: 328326 - DNA, 1270 bp, Cannabis indica
atgaaaagggcacctacgaatcctttgctacagtggactaagcagatcacaatctgactgaaccactataattctttgtcttatttacattttccagccttgttatttgttcttgcatacctagtcgagtactcggcattctaggtcgaatactcgcacttgtcacttccctgaaaattctttttcctattaattaaataatacattttggtgttgcgaaattcactcgacaacattcatttataaaatatattacaataatttgataaaaatatcaactaaaacttaacttgttttatcatttaaaataaataaaaaatgtatttttaaccactaatcacccacatctctcaaggtgtgtgggagatcaaaatcctaatctcattacaatgtcttatgagaatatctaaatctattcattttattatatttaatagcctactctatttatgagtgttgaggcaagatcaaggtgtggattcttcagtcaagttcttagattggatgttcgattgttatacgaaaagaaacaaggataccttgataggcatcaagaggtaattgaatttctttcagtagtttgatttaatatttttacattatgttgagatccttaagcttatggttcatactatataaaaattcttttatcaaaattctgcttctgtttttataactcttatatggactataaaaactaacactttcaacaccttttcaatgccttttagaaacttaacacctctatgggtgtgctgaaagccatatagtagcctgactgctaatgagtatggttaggcctcaaatcaaaaagataatgtacttcgtgacctataggtcatttcgatctcatcaatttatacaggacgaaaatctctgtaaggactcgcatggccaatggtaggagtgttcatcaaaccgcccaagctgcacaaaccgctcgcaccacactccataaaagatgcagtttgaaattttttgtagtgcggttacggtttgcatttttttcaaattgcgcagtgcggtgcggtttgcagttttgaatctaataattgcggttcaaactgcactgcattatatattataaagttactaatttttataatataatttttatttttttcatatatgaataaatatatataatatatgtgtctattactttattttgtagagataatataatatagtgacttgatgattattatacctgttatgatgttaaaactttaataagattttttttgttttgtattgttaaagttttatt

SEQ ID NO: 328327 - DNA, 526 bp, Cannabis indica
tttgtcatttaacaaaacaaaattgataacttttgcaaaacaccggatctaaaaatagtatttacctttttttggcgatagataattatgtaacgttgaacattgtaacaattaaaaaaatatattttttatttgcaaaaatatattttttttcataatggatcgtgcaatttgaattggatcggctatctgacgaagaacattaagctaccgatgatgaataatctaacttaaggtttttttgataccaatgatttatgcaattttaagctgaactcgaccaactcgaccaacatgactaacagtgaaaacgtccaacacatatcctaataatctctcccgcaatacacactatcctgaacttaaaaatgaaaataataattaatagataaatggaacaaaattaattgcataaagacataactcataaaatagtcaaactaaacttaacaaccgtttaaacaatagagaaagaaaatattaacaacaatctcaacaaaaaaaaaaaaacgtttaataaaccacc

SEQ ID NO: 328328 - DNA, 549 bp, Cannabis indica
ttggtactaatgttgtttcttctaactggaggttactatgttcaggtaatttttttatcatatttataagaattatgatatttatttataagaacatactaacatagagtactctatctctattcattataaatcttaacaagacatcgaaaccaataggttatgcttttatcactaattagttttgagttgagaatttgcgaaacttaacaaggcataaaaaatattcgagtcacaaaaacaataattttttttagagtgtgacaattcattacataaaatatcatatttttgttatgtatagtattgttatgaggcattagttgtgtttacataattgtccaacactattattatgagatgatactttatgagtgcttagcaattttctataatagttattaaaataaaaatatatgagattcgatattaatttataccagccataatatgagcgggttataggcctatgtttagggctcatctagctcaagaactacaaaaaaaaaaatttattttttaaaaatatacataatttttttactaatt

SEQ ID NO: 328329 - DNA, 886 bp, Cannabis indica
aaaaataaaaaaacccaattttttttataagtaaataccaaatagttaagaaagttcccataaatcataaatatatttataacaactaagcccctacaaaattaaataaatttattggaagtgaatataatttttctaatacaaattttttttaagaattaaactcccatatatgtttcatactctaacttatctatataaatataccacagttccttaccaaaaaaaaaaaaaaaaaaaaaaacaaaacaaaaaaaaaaataaacacaattagtaaccaataaacttacaaaaaaataaaaaaaaaaatgtaaactacataatatcaaaaaaataaataaaaatgtaccttaggagatgaaaaaactttcctctcaacagcactattattaggaagacccacattcaaccatctacaaatcctatattctggatcactatcatattcacaaaaaccagccttctgacaaagaggaatagtttcgtaaatccaaacaagaaatgcataaggaaaacaaggcaacttgtaagtcctcgaagattctttatcagcagcctttgctttccctttacgcttatcaatatgcttggaaccaatatctttccctgtttttttctttggtacacccctcaaaccaatcctcaagttgtgtaaagttttcttaaaaactaattttccccaaggaaaactctcataatcaccaatcccaacaatattgagtatttcattaggaaccttcttggaattagggcttgtgaacaagcaattagaaacgaaatacaacaccgccatcttaacagcgtattcgtccaacttaaaatcactatacctaaacctctcctccacagcactgactgttacttgttgatcactaaaatacttatc

SEQ ID NO: 328330 - DNA, 981 bp, Cannabis indica
ttattgtcatattgtttctcttagaatcaatttatgtaactattgtttaattaataatataaattttgaaaactaatgtacaataattcaaaattatacattttcactaattttaataaataagtttttgataaaacatttataaataaatgtgtgataattcttttatttaaattcttattaaatttaaaatatattaataaaatcaaaattaaaaaaacgataaaaaaatatcacctgcatgggattatttatcccaccatatcacctgcatgggattatttatctcaccctgctggatgggataaataatcccagatagatgagattagctggattaattatccagacttctaacatgcccaaacactgaattggacaaattagtctatctaatctaatcgagtcatgcatactaaacgggctctgtagggaaaaaaaaaagatgttccctcacttacaaaaaaagtgtcgcttcccctcaacttaaatcttaggaccaccacttattcatagcatgtgagctcagtttctaatcataaaacccgaccatacacatcaaaaatatcacaaacatgtgagctcgagttcatggaggaaggtcgtccatgcaaggctttggatactgtccccctctacccagtcgacgtaggccgatcgcactaagggactaaaatccatgcgatcaacatcgatcatgactgcatggtggtccgaccaccaaataaaaaaactaaaattttcacttttcttatacttaaaaacttttcttcttattgctgtataagtaccaaaatattaatatagatttttctttcatatttacatcaaagatttaagtttgaattttgatcaatttggtactttaactcagaaaaataaatttcggtatttagttgaaagcaattccaaagtataggttaatgtgtttcaaaaaatattagtaataatatgataattcaataatatatattataaaaa

SEQ ID NO: 328331 - DNA, 593 bp, Cannabis indica
aatataaaataatattaaaaataaaatctaaatttattattaaatattattattaactatgttgttagaaaataaaatttatttccaatgccaagctaggcatggctcttggagagatgaagacaaaagaacttccatgtggcaggttgtgattagaagaagaataaggaaaagatgatatacatttacttgcttcttcctttttttgtgcataggacaaaataaaagttttcaagtgatatgtattgcaattaatgtaccaatcatccatgacttcatcatgatagagaactatggggaagtggagcacttaatgctttgctttaattattttatatgcaagttgcatgcttggtgccttgggagcccaagaagttaaaaagttgctggtgaatggaaaagttccatgtggcgcacgcatagagagaggagagaaggaatggtggttgatttgcacaagaacaaaggcgcatggtatcaatctctactcttattcaccacttttatttattttctttttctttttccaaagtgccacaataatttttaatccctacaaaaaacaataagttaaatctaaataaaatattttc

SEQ ID NO: 328332 - DNA, 600 bp, Cannabis indica
aatctttaaaaataaaatatatttaaaatcttaaaaagactaaaatcttaaatgaaactagcaatacgtggctcggcacgtacattcacctagtatatatatatatatatatatatatatatatatatatacccttaggcagtccgattttaacagatagaaagcatatttttttttgtaagagagaggggacacactatgttctgtacttgatataatatgttaaaaattaaaataaatttatatttttatagtattaaatataattaaaagtaaaaaaataaaataaaatataccaatgaaatgttaaggtattaacaagttttatttcaaaaagtaaattttaaatattaataaataaaatgctctttttagaatttgaatcattcatccctattataagtatataatagcttaatcattaccaaaggtaacactatgttaataaatatcacatttaattacaaatatatattataattaactaaaatatatatacaattttttcccaaaggcaagtgtggatctatcaactcttaggtgatgcattactatagttaacagtttcttactataattattaaattaaaatgtgtgtga

SEQ ID NO: 328333 - DNA, 620 bp, Cannabis indica
ttattaaattaaaatgtgtgtgagattttacattaaattgtaaaaaaaacagtattatagtattatgacatcagaccatctccaatagttttaccattttggtgtatatttaattttttaccaatttcgtacagaactgattacttttggtgtaacaactccaataattcaacacaaaatatcacgccaaacattacttggatggtatgatcaaaatgcttgcctctttggtggtgcacaggcttgatttggaggtgttggtgtccttggctgataacgcgctacaataatttcttgggtgtcaaagttgagggttgaatgggggtctcttagctcaccagggggtgaatcgtggcttggggagggtggagctgcagggggcaccgctgtgggggagcttctcacgttgcactaatgaggttgttacgcctgatattagggatgtaaacggggcgggacggggcaaggattgccccccaaccccatacccgcttcctaaattcacccccatatccgcctcaatacccgtataaattaaagcgggggcaggacggggattacccgacgggagaaggattccaattgggtacccattacatatatatttttgaaaaaaataa

SEQ ID NO: 328334 - DNA, 816 bp, Cannabis indica
aaaaaatcgtgcacttccatcatacgatccgttagtaaatgatgcacagattagccaataagcgagtttccacgagtccttgtggacaacaaaagctcaattaacatcctattcaagtttgcattccaggtgatatggcttacaaaagcaggtttaactccttgtccttttttgttgtaaggtttcaatggatacaccctaatgccaatggggaaaatctagttacctatcaccctcaaagcaaaaaataacgcaagcgtttttaagcacttgacttttgtggtgggagactgcccaacaacgtacaatgcgatactagggtagccaaccctaatggatttaaaggcagtaacttctattaggcatttatgcattaaattcccctacgacaatggatgtattggcatgattaaaggcgatcataaaagtacaagaaactattacaatgtttcaacacaggttgcgttcatggtccaggaagagatattcattgctcttggaatggagaatcaaatggatattgaggccatccaggaaaattttcaagatgagttggatcccagagttgggacagaaagaaatttagaatcaatggaagaggtagaggaagtaagcatcagtgatgaagtgttaggccaaaattagtctaagtttcgggttatattttcggttagttttcactctttgtttctagttttagggctattttacgcttgattcttttgtttcaggtccttgtgtgtttaaagaaagtatgtacaagaattgaggatgcgtggtgaaagaatcgagaagaaaaaccaaagtttgtgtcgc

SEQ ID NO: 328335 - DNA, 634 bp, Cannabis indica
agaacatagactatatatatatatatatatatgaataactataaaccttggagaaaagtagttatagagaaactaatgacagataagatttgatctccacctttcttcattagttaatgataaatcaaccagagaaaccaaaattcctgcaaaggaaaatccggtgcaacgtcgtaatgggaagattgtgagacaacttggtcgctgcgaactagaggcacatgttcttgtattagatactgaaaaagacaatttattgacttttaaagaagcaatataaaaccctaaagttggtaaatgcaataattccatggatcaataactggaatcaatgcattataataaatcctggtatattatagatctacctgaagatgtaaagcccattggatgtaaatggatatacaagaagaaaaggaatgcatatggaaaagtaatgacttataaagaaaggcttgttgtcaaagactacacttattgattatgaagatacattctcccctatagttatgcttaagtccatccgcacactcttgtccatatcagccatctataattatgagacctggcaaatggacatcaagacgaattttgatctgaattgtaaaattgactataacgtccccgcttcaag

SEQ ID NO: 328336 - DNA, 912 bp, Cannabis indica
aaaagaaaaaaaaaattaaaacggaaaacaattaattaaagcaaaacgaaatactacaaaatacaactacaaaatacgtacatgcaatagaaaagaagatagtataaaaattatgatattggtttagccgaaatcattggcctataagtttcacttatcttatcttcaagaatttaaatatgttataagaacacaattgatttttttatatgcacttgagcctttgtcttcaaatgaaatagtaagtcaatagatcaatttgggtggtgttataagaattacaagtccacataattaaatttgaataattagatttgatccaataatgaatgatatttttaaaattcaattaaaattctatccaatcatcttatatataatctacattaaaaataaataaatttacatttctttatacataaaagaaaaaataattaattaaattatatatatttctataggatgcttattagtttctcctacatcattctacacttaaaagaaaactctaaaaataactaatcttattcttaggttttgtgtcgttgaatattttaagatattttatttgttacttttattgtattaatgattggttaaatttagtttttatgaattttttaatatatttaagttaattaactaatattaaaaaaatgtgttctaacattaaattcaattattaaagaaaaattgaaccaatttaattattaattagatttaattttaacgcttatatattggatataataatatttcaattattaatttgattggatcgataattagttgcaagttattggtaaaaaaaagtgatttatttcaaaattttgagtttgtaagtggtataaaactaataaatttttttagtggtgttgctcctaaaatcgcccaatgtacgtggaccaatca

SEQ ID NO: 328337 - DNA, 1144 bp, Cannabis indica
tctgtttatgcgcattgtaacgagagaggaaactcttccttctcaagtttcccagccctataaatagtgatgcatattcactgggcagaggatcattcgaaaagcagctaagctaagactatattattatctaagaattatatatttagagatactgttgtaagagctataagaaaacaaatcttcttccttgatcttaagtcaatacaaataacgaggattaggctattaccgaactggtcggggctgaacctctataaaactcctttgtcttattattgctttataatatatttgttactacatatcgtttatagcttataaaatagacttattgtcgttggctaaaagtgaagtcaacactgataaatctcctgaagcaaggaatgaagtctctgttgcggggattgaggtctctactgcagggattcaggtttctgctgcagggattgtcgagaagcaacgtaccatgtcgtcacactagttcaagttctctagttctcctccggagatggttctcctcgagccctcctgtctcctacccctagaagtcgggactaaaaggtcataactgagctcgcaacatgccaccaacagttggcgcaacctcttgacgcttgggtctcgcaattgggatctcgctagtcgcgacaacactgaggatttgagtcaagagcttctgtatcagatcaatctttgtacttctttgttcttactcttccctactttgcctttcttactaatttcagtttgtcttatctcctcaagcttcttttcccgtccatgctacacatcaccggtcgtctcaaagggttgagatgctagagattgagctttgccaaattaaggaacatagggatgttgtagcgaagaaatggagtgatgctaaagctaaggtttatcgcactaaggatgaggcagaaaagcaacaccaagccgaccaacaaaaaattaaagaactcgtgaattctctaaaatttcatcaagctgatcttgttaaaaacaagttgatcatgatcaaaagctcaaagagttggaggctggaaccaaagagagggtcaacaatatcggtaggaggaccatctatcagatttggtcagccaaccctgagttggactttagttttttgggtgataaggccgaa

SEQ ID NO: 328338 - DNA, 547 bp, Cannabis indica
ttttttttttgttttttcttataactaccaaagttgtgttttcaaaataaaaaaagttgtgttgctaaaaaaacaaaaagttgtgttaaatggatttttatttttattagattagatacagaaaaaaaaaagtgcttaatgtttgaattttccttctctaatgtcaaaaaagtataagaaaattttggaaacaattggttttggaaattggtttgtgattcaaaaattggtgattggtttgtgattcaaaaattgtgttttttaaaaatgtgttttggaaacaaaaattaaaattttgtaagtgaaaaattgtttataaatatgtgattggttgtagtgtgatttaatatttttgagttttaaaaaattgaatatgtgattggttgggaatcccaaaataaaaaagtaagagaataattggagagtttttggattctatgatttgaaaacattaaaatggtattcaaatttttgttttttttttttatttttttgaaattaaaactcttattaacaacaatcagagcttaatacatcaataagaaaa

SEQ ID NO: 328339 - DNA, 1421 bp, Cannabis indica
tagttacgggagaaatttataaaggcctgaaaagtattaattggtacatatcaaactgagggagcgaaaaatcttaaattagcctttacctaaattggtgagttcctgagcagaacccatgttagccctaaatccttggtctctaactagaaaagtatttaaccttactctccaaacataagcaatctatatgaaaagcaaatgctatatgtatggtaaattcttctgacttatgtacaatttgcgtgagaaagcatagtaaagctctgaagatcttgagattgagactgtgtttacactcaacaattgtaccgttcacgcaaattgtatccatcctactcttattttcccagcctcttttgtcaccaaaattcttaataatacttccaatctcacagccatgattactttacataactaatcatgttaaataattacacaacacatatcgatctcatagtactgagttttgtttaaagaagaaaataaaacagaaaagaatgagttacagtgatttagtatgcctcctaatattccttccaacaaggtattactaaaaacttgttgttatagctgagcaaactagtctaatcaatttaataaaagttttttttttttttagttttagtaaaaatttaaaaaataaaaagtaaaaaggaaaaaaaaaaggagaacacactagtttaatatatcgagtgagaaaaaaaattagagcaacagtaatatttagaggtgttcataaaatagccgatccaatccaatccgcacgatccaatataatccaatctacgtacaaagtgcggatatccgcacttttacggattggattggattggattaaaaaattcaaaatctgcacttgtgcagattgaatgttgattgacatgtaaaagtaaccgatccaatccaatccacacttatttataaaaaattaaaaaattatatttgtacataaataatattttaatgtaaagaaaatagtaatttaaaagtctaatacatgtaataaaattatattgtaaaacttaatagatcaaatgtatattctattcttatatttatttttctacatacaatttaaaataaaattaaatatttttttatatatacaagtttttattcttcctttgaatttgttatttgttattttatttattttaatgtgttgttggagacataaaataactataattttttttttttattttgttgctagttatgtggaaaaaaatatttttttttcataaatattatatagtttaatattaaaaagtaaccaatccaatccgcacttttgcggattggattagattggatttgagctattatgcggattggatttgatccaaaaaatgaaatccacacttatgtttagtaggaaggagggagagttggatggatggagagttgatgaaggatga

SEQ ID NO: 328340 - DNA, 1192 bp, Cannabis indica
caaataaatggcgaataccaagtcctgttccgttctggacaatattgaagatatttacgaaaatcccactgcatacaaactaagcatcaacatgtactacaacatgcgccaccacttgaccaccacttggccaacttgtgggaatcacttagcttgtaacgtgccatcttagcacgcacattacatcaggcaaggtaacggaaagaaaggaaagttcactggtaatgccgagtaccacccttgggaaagtgcctcaaagtttactgctttttctgtcctaacagatgacctagagacaatacacgcaacaacttaatctatggtcccattcaagaaaccctctccaataaagaaggaagtgagtaaaagagatacgtccaagttctgcggctttcatgcaggctacgtccatgacacaaacgaatgcaataacctgaagcaggaaattgaatttttgataagacagaataacccgcacttgcaaaagtatgtcaaggccgattagaatcaaagggctgcccaaacacacaataaccaaaatcaattgatgccttcaccagttgacgtgcatttacaagttattattaggggtccgcatcctgctagagactcgggctaagcttgagaaaagtatgcccgagccttgcaatacgaacaaaagaaaatagttttggccatagaggagagaaagccaaaaataccatggggtaggggaacctacaataactttaactgaagcagatgctaatcacatccacttcccacacaacgaccccctagtcatggaagtacagatagaaaacaagacagtggcccaaactatgatagacaattgagcctcctcaaatatcctattaagtaaaacctataagaagatggggctccaacttaaagatctaatcccctgtacccagctcgtatatggttcatccggctagagcgtttcacctctagggcaaattcgtctacccccaagtgttggacaagctcagaggagcataactgtgaaggtataattattgatacactacaacattcaacaccattagcggcgaacccctccgccgctattggtgtcctttctggccgctaaagggcattagcggcggacctcggccgctattggtccgccgctaatgcttggccgcttatgaatagtattagcggccaaaaaggggtccgccgctaatac

SEQ ID NO: 328341 - DNA, 543 bp, Cannabis indica
agttgttgggctgcattggatcagccaacttggtgtttgattattctgtaccaaccccatctcacatgcttcttaccgactcaaactccgacaaccacatatccctcaaaaaggaatttaaaagttgttccttgtcacacctacgtgaggaatcatcttgaatctatatagtgattttttgggttggtttgctgtctccgactctacctttttgatgcgtatatttgtttgtattttatgtaatttgtttttgaaattttcatgaacttatgtttcttagattgtatgatttgggttctgttgctatagtcattatttcactaatttgggattcgaaatttagaagaaagtactgttaaattcctttacctcatttctttagtatacgtgcctcgcacgtaggtttcttctagtctatatatatatatatagatatatatgtataaacaaacaaatatatcataataaactaattagaaagaatgacaaaacatgaaaaataacaagtgattgagtatgtaaagcaatataaataaaattaaa

SEQ ID NO: 328342 - DNA, 504 bp, Cannabis indica
  modified_base (473)..(473): a, c, t, g, unknown or other
ctttgattacaaaaaaaaaaaaagaaagaaagagaaaaatctagactcgtattagttattagctacattttaatgttgttgttaaaacttatgcaaagagtattactaatactattggatattatggtatccaatgctactactcctcctaaattacatcaataataatataacaccactatactaatctcctttaacttttctttatgtattcctaaatttagacactagtgactcccttcttaatattcaagaaactctttttgaaatttattattatagagacctaaacaaatcattgctatattatatatctatgttatattacataaaattatataagagaaagtgttattcctttttaaaatattacaattcaaatataaatttattacacatatatcgcttatcttttacactgtatttcaaatttaaactcatcgcacatatttaaaaatatatctttataatanaaaattttttttacccaatctacatatatat

SEQ ID NO: 328343 - DNA, 1441 bp, Cannabis indica
aattaaaatacataacacccgatactaaaatacactaataacatactctaccagtaacatttttcttataactgatcttatttgattgctctatactggtctatgttacaggtgacttggttcaaatgcggaggagtatccgtgggccttagctgggcccatatacttggtgatatagcatcggcttcaacgttcatgaacacatgggcccacataatgtctggtcacgtgcctaaggagtccatccacatcacaagcccaatacgaccatataatttctcaaatgttattgcaactaagccattttcagtgaaggagttgaatccaccagtggaaaataattggtcattacctaccaataataatggtcaaaatatgagaactcgttgctttaaggtgagtgccaaacaactcaaccttctaatgtcaaacacttgtggtaagaaagcaaccaattttactaggtttgagataatctctagtgtgatatggaaatctttatcccaattaaggaaaaactcattatcttcaaaagtggtcacaatttgttggtaccaaaatccaagtggggatagtaatgaccaagttattccaaataataagagtatggttttaagcacagttgaaagagactctgaagttaataatgtgtcagaattagcatttttgatctcagagagaaagattgtggaaaatgaagcaattaataatgaagaaatgattgggaaaatggattttttggtgtatggggcaaatctcacgtttgtgaatttggaagatgtggaaatttatgagtttgaaatgaaagggaaaaggcctgtttttgcaaattttagtattgaaggggttggtaaagaagggcttgttttggtccaaactaaaggcccaaaaaatgggaataaagaagatgatataaatggaagaattgtgactgtggtattgcctgaagatgagcttgcacattttgaaaatgagctcaaaacaaattggaatattgcttagcctttattgatttatttacaagaaaaacacaaaattgatttgtatgtgagcctagctagctagctaagtcattatgtatggatatggagtgttttgtttgtgagactactcaatctatgctcaaacaagtagtggagtgttttgtttgtgagactactcaatctatgctcaaacaagtagtattaataaatttcaatttgatggtattcttattttatgtaaatataagtttatttgtttgtactgcaggtctttaaattatataagttttagtaaattggtctctaaattttatttttttgataaattagtccccaattattttttagtaaattagtctacaaacttttattttttagcaatattaagtccccactcttagatattaatatttttattgtattttttttttatttttacttactttaatttatttttt

SEQ ID NO: 328344 - DNA, 1042 bp, Cannabis indica
agtttttatgtaaaatttcataaaaatgaaaaaaaaaattattttagaagtgtaaaaataaaaaaactccaaaatttaattacttgtatgtttcaaaaaagaaaaatgaattaattaaaaaaaaaaaaaaaaaaaaaaaaaaaaagggggtactaagcaagtaccttcctttcagagaaggggtaaaagaaaatagaatttcagccaaaaaaaaatgtatatatttgtataaatattaaatatgtgtgtatgtattaaaagaaaatagtccttttgcaaaataagcaatgtgggtaaactgcagtaatgtaggggaccatagaccgattctcattaaaataaagtagggtttactctggttccatgcaaagcccagctgtgctttcatttaatatctgttttaatttctcaatgctaaatcataagcactgtactgtagctgttattaagagagagtaatcttttgactatatgatagagttttttttagataataataataataatcatgggaagttgtattatttgtcagaccaaagaggaagaattagtgtgtcctaataggctactctttcctctgaattgaatagcctggttggattcagttatgtgaaataataataataataaagtaacccagactctctgctacttctgaaagtaactcatcagtgtagtacctaacaaatatattatcattatgcattaagtagttgaaaaaaagaaaagaaaaacaaagtggtattattaaaaagcattgacaaaaatagaatagccaaacaagcaatcctcaacctcaaacctcacccttattagcttcagtttatttaattatggctaactaaggtcatgaaaaatgcaccataaattattaagattgttagatttaagaacgtttgtctaattttagtaaaaaaagatctaatatggataaaaattcagaagacataatttagtatatgtcaaagttcgagggacataatttagtagatatcaaagtctaggagcatgatttagtacataaacaatcactgaaatagta

SEQ ID NO: 328345 - DNA, 534 bp, Cannabis indica
ttaaaaattttacaaaaaaaaaaaatagtaactttatataattatcttttttaacattttgtaattttatatttttattgcctaattgacaatataacgagtaaaatctcattttgcttcaagatggacttcaaattaaagtaacaacaaaaatgtgttaaaaaaaataagacctccaattttgaaaaataccattttatacataattactttacaaaaatactattttacgttaggcccaaccccctaaagtttaagatctccaaatcctgaaagttctttcattttggtgtaactaaaaacttctcatgcattatattcttcgagaatttttattattatagtttttaaggtacacaaatttataaaaatatgttttttttttacttttcaaaagaattatttcataaaaaaaaaaatttaagaaatatttgaaaaataatataaaataactagttaccttgctccaaggtagctggttactggttactgtaacaggtaaatgattacccttcattatttttttccatactc

SEQ ID NO: 328346 - DNA, 632 bp, Cannabis indica
aaaccgactaacgtacacccttgcatggggttctagagtcgcacaaaaatgaaagcacatcaaagcttaaaactattctttttgagtttctcacaagtaatgtttgcaaaaagtactcaaagttttaaatttgtaactaatataaatttattaaaaaattttagtaatataagtaactaatattagtaaaattataatttcttttaaatttgttagtacaaactctgttaatattttaaactagacacatataagattcaaattctaaattattagatttggattgttaggtgtagtatcagctactttcatttttttagcaaattaaaaaattaagtcttgtcgtaaatttaaagcactatcggtctgcattgacgtagttggataaaaaatataatttttttaatattagttacttatattgctatacaccttcttacaccaaggccaacctttaaagttatggttttctatttgaagcctagcatacatattgactttaatctttggtacaatttaagtttgtatgctatatatcaaatattttttttttctatatttttgtcaatgttattggaaatcagaatatctagcacattctaagttatatgaaactcgatacttaattatac

SEQ ID NO: 328347 - DNA, 950 bp, Cannabis indica
ttttagtattttagtttattttttatcatttgttttttgataatcaacatatatcattgtgcatattctttgttttttcgattctcatctcatgtccttatcatatacatatttagacattgagaaaactgtctcattttagttgggggtactgagtatattcttgcgttaagttcgataaatttcttttctttttgaaaactttgagttgaattccgctgctaattatgtgaataaataaatattgtgttagactagtttatactatatttagttacttagatagtaatttcattaaaaattatacaaaccaaacatataatttgattgtttttaacatatttaattgagaaaaatcttaagttaaaagctttcattttttttatgagaagtgagaattgagaaaacgactttttaaacatatatcgatcttctgaattggtaaaatcaaaatttttgaaatttgaaaataggaaaaattgcagcgaaacccccttatcattttgatttgttacacatatgacctcaataaaaaaatggcggcaaaagtcccttaacttttatttttgttgcagctgttagttgtaggcgttaaatgacaagtcatatataacagactcacgcgattggtccacgtgtcatacacgtatattattattgatgacatgtattattttaatgatgtgtattatttttaagcaatttaatttattacaaaataaaactaaaactaaatataattaaaattaaaataaataagtaaataattaaaaaccaaaactaaatataatcatctgaataaaagaaaagaagaaagacttaatattccatcttctcttatcctaaaagttacatcctttgaagaccattgctaacttagaattagaagcatttcaaatttcatctccaatccaattcttgcaacccttccaactgttgggttttatgcc

SEQ ID NO: 328348 - DNA, 638 bp, Cannabis indica
cttgaagaagcttaagcgtagttcagataacagcatcacatatgaaagattttatatatgaagaccaaatttcattattaaaatttaaaaattcagctagcataaaaaagattattatttccatatgcaatctgaaaagggaaaaaaaaaaagaacaagaagaacaagaaaagcagtgagttccataaagagcgcttttaaagcaagtaacaaaacatggagcggaaacgaaaatgaatgaaaatcaaacaaaagaaaacagagatacctatacgtttatacatgtataatttatatgtacatacattaacgtatatgcgtggataaagattaaagagagtaaaagaacgaacctggcatctgagaagaggatgaatggatgagaaaaaggagggaaaaaacaagaagaggcaatctgaagtagtagtagtagtactccatttgatttgccttctcaaaagagagtcacagacgacgtgacgatcatccaaagaagaaacaaaatagtttctttttcatgtatatttacattaaagaaaagcgaagcaacgcaaagattatatttcttttttttttctctttttctgtttggttactgagaaagaaagagagtaaagtagtgagagagagagagagag

SEQ ID NO: 328349 - DNA, 1301 bp, Cannabis indica
ttttctaatttttaattaggggggttacaattgaatatttgcaactccatatttatattgtgttgataaaaatatattataatccgactaaaccgagcaacgtacacccttaatttacagtagtaggatagaagagttactttgtaattcttgttattgctgatatgaacatgggaatttattttaacacattccaacgtgtcccatcaaaaatcaggaacaacaaatatcaatctaacatataacatatatttcttatatttctctagagctaaattagatagtttaaatgttaaatctgtttataattttgatatctatcatttgaaacacgtagaaaagaaatgattccatgtcacgcgtggaattatagatttgggtcattttattaactttatatagaattagttgatgagatactaataaggcaactcatgttgacaagaacatcctcaaaattctttcttgtacgtgtacactatgaaaagaaacttggtaagaaacttcttacccacctgaaaatagaaaattaaaatatatttaatttcttgttttccactaccaacctttactacttatattcaatccatgtaattctttttcagtatatatatacatatataatgatgattattcaactaaagttcttgaattcgttgagcagtcaaccttgactcaactcactcataattagtatttgaaaggctctagatttaagaatattgattcacccacctgctaaattaacaaagcgtgtagaatatttgtatataaatatgtatatttatttccatgttttttttatatatatattatataaaaaagatggaatcttgacccttatatatttacccattaattgagaaacttttatgaaggaagtagaaatattttgttggaggtaaaatggaaataaaacaagacattgttaaggcttctaagtactatatatctcaatttgatgatgaatttttctttgttgtggattgatatatatttggggagagagtcaatgttcgagacctaaggaaacatagtgtgtcttcgaaatgatagattattccgcctttaggagcttataaataaatgtcataatgttgatgctactaaaaatatgcttgggtcatgttatgcaaaacacaaatactactggtatggttttataacagtaatgtttctttctcatgtgtagtccttatgtatgccttggatcatttttggtaacttattatgatgtgatgaggtatgaatgtcttttgatttatggtgtatatttttactatttttggggagtttgttgc

SEQ ID NO: 328350 - DNA, 809 bp, Cannabis indica
ttataataataataataaagtacgcgacaactaccgctattaaaaagacatacatatatatataaaaattaattttatttttttttgtctttcaaacattttaagcctttaattttttttttctgaactataaaaattattggacttgatttttgttaaattctcttcaattttactaactttttatttacgaaattgtactctttaaatttttactctttaacttgacaattttactctttaaatttttatgtactaaatcacaccttcaaattttaattttaatatgtataaaattgtatcccctaaattttcatccacatcaattttactcgattagtaaaatgggacagaaatatcttccaatactgtaaaactattttaaattttttaaaaatatactgataatcttaaataaatacaaattaaatacaagtgaaaaaaaaaacactattctaaaaagtgtactataaaattactctataattttttagaaattaatatagcttaaattccttatttatacggataaggtcaattaccactttttttaagaattaaagaaaatggttggaaagggggatgcaattgcttctaattctaccatagttgaatatgaaatatcattggcttaattaaatccttttaatcattatttttttttttaaaaaaagacaactatttgtgtttaaataatcccaatcacataaccacttggggctagctcaagtggccataggtgggtgtgtgagtgttggaggtcctgggttcgagtcccaggtaaaacatgatgtaatatataaacgctt

SEQ ID NO: 328351 - DNA, 1061 bp, Cannabis indica
ttcgggattgttgcccgaaatagctccggagggctcatcgaggctaaaaccaagtactcgcggggtctatgatgcagaagtcgttgaagcaatgggagtcaagaagctctgagttggataaagagcaacaattggtctgatgttgtgattgagacagacagtatgctcactgtgcaaggcattcgtagtaatcactctgtgaattctatctttggtttgattattcatgactgtcaaattttattgtcttctctcaataatgttaggatttgttttattagacgatcagcaaaccgagttgcccatgttgttgcaaggcattctcgttttctctctggtcgtagcatttttgagtataatgcctgggaggaattgatctccctcttgtattctgaatgctaatcatttcaatgaagttgatatttcattttcaaaaaaaaaaaaaaaagtttcaatttcagtaattgtttcggaatgagaaatcggcttttaagctctctccacttttttttagataaaatttgctatttgcacaaaataaataaaaagctcatgactgaatcctatttttataggtgagatacctaattaattaaaaattaaatcagataataaatatcaaaatctaactatataaaatattatacataattaaaagatattctgtaatatatacatacattatacaactactattaacccacctatgaaggagcaaggagcaatttactctcatatatttatttattttaattctgaatatattttatgataggatttactataatttatcccactttggaatttaaattttaaaatagcttcttaaaaaagtgtgcaccaaagtaacatcttgactaaattttattttcagtattataaaatattttaaaaaaaaattaaaacgatacaaatatattattataactacaaaggacattatcataaaaaaaaaaatctggattaaattcttaaatgtgtttgacttaagagtatatatatttgtaatagacataaattatatcatactgtaaacacttcctattttatatattatatat

SEQ ID NO: 328352 - DNA, 850 bp, Cannabis indica
aaatatttacattaaatatattttttatatagtgtaaaaagaggtatttttgattttgtttttaattaagtagctaaattaagcatagaaattcaaatttctcttttattattcgctatccaactaaaatctaatggtttaatatttttaaaattaatattaatagttaaatttgtttattaccctttaataagtaatacccattaagaagtatttcatatatatatggtagagatatattagattaagaaagagtaactataaagatggtaagtagtattaattagttagtagaaagaaaggggtcaagaagagaggaagaaagattggcaacttattaaaaaaattaaacaaagggactattaaaatgaaaagaggttataccctaaatatgaagtttaatatagttatacaaagcacttcttaaaaaaatattatacttaacattaaatttgaaagtatgaatgttggtaattcatccaatattcttgttttcttccttgaatatttataaatgggtgtttattggaccacatccaatattttaaggcttatccagattcgatctatttatatattagatgttagatttaccatccgatctgatccaattagtttcagtcatccaatcgatcaaacgtgcattggatgttggattggatcggttttatccattggatgtatttcatatatatttactgatttaatttgagtttactcaatattttagacctagtatttttttagatcggatcgaatctatttaatatttaagtctagtatgtactgaattagactagatccatccaatctaagaaaaaagagtaaaattttaatgttaattttcata

SEQ ID NO: 328353 - DNA, 1890 bp, Cannabis indica
ttgatccttgattgtcagatttctggttggcatttttatctgattgaaaagcaaatgccatgttagtattagaatcaattccagaggaagaattacccttttgattttcttcttgagtgacaagatggaaaacccgattggcttctggtaatggatccattaaaagtatattgctgcgtatttgggaaaaatggtctgaaagccccatcaaaaaccatgatgtactccatgtggtggtgttcttggagtttcttcacaccaccgcacgtgcatccattgcaggtacaattgggcctgtagtttgataactcttcccatattgtttttagccgagtgtagtatatgctgatggactgattttcttaatgaaggttcatcaaattctttctcagattgaatatatgcggtccgttttgttgatggaatctgatctttaaatctgtccatatagcagctgcagattcatcgtaaagcaaactagaagaaatttctttagaaaccgaattgagaatccaagatataactatgttattatttctaatccaggcattgtaaagattatagtcagaaatatgaggtttaggtatagaaccatccaagaagcctaatttgtttttgacagaaattgcgagctgcatcgcacggctccaagatgtgtaattgtcctgccctgttagaggttgagaaacaagaatattaccggggttgtcgccatggtgcagataatatggatcagcaagatcctcaagaggacttcttggattcgtgattggattgcttcgatttcgagagatggcagaagtaggaactccagtttcagctccatcttcttgattgtcacaagacattctcgatcagggaagaacactggaaagaaaaattccaggagagaaaggaaaatatttcacaggaaagaatctgtgaaagagacgatagatcagtacgctaccattgtcggagaagaagacacgagatggtaggaagaggcggaagcgaagaagatcagtggagaagcttgcttctccgctctgataccatattacgataggaataacagagagaaatgtaattgatataaagatgaattgaagaaacagaattcattaattgaattaagagagagttacagcagtatatatatagaggagaaagaccaaaacagaacaaactatctaaacaaactaactaaatattcggttgttaacagacataaccaataactgaatataactgaattaactaacacaacattaaggactacagtacgaataaaggtaggagagaaataagtgataatctgatatccccctctcaagatggactgtagatatcatgcacaaccatcttgcgaatatgggttgtaagtgtagtagaaggcaaaggctttgtaaaagcatctgccaattgaagtgttgtgtttattggtattagtcgaatagtagaggccttgatcttttctcggatgaaatgagagtcaaggtcgatgtgtttagtgcgttcgtgaaaggtaggattatttgctatatgtatggcagactggttatcacagtatatgaaagcaggggctgtttgagtgatgtggaaatcgttcaagaggtattgaatccaagtgatctcactgctggtgctagcaagggctctatattcaacctcggcaaaacttttagaaaccgtagtttgtttctttgtcttccatgaaatgagacaatcacctatgaaaatgcaaaaaccagtcacggatcgtctggttgtggggcaagcaggccagtcagggtccgagaaacctctgaggtgcaatgaagaatttgagctgtagagaagtgttgggttttatgccctaaataaaactctgtttcaatgtaatccagattattctatatcaataaagta

SEQ ID NO: 328354 - DNA, 498 bp, Cannabis indica
agtctcatgatcacatttatactgactgtatcttctctagaaaggtgataaaagagattagtcaatggttgggttttctacagtggctgaacaacattgctaagctgaaatcctagtgctcgaagcctttactgatctgagaaatagagttattaactctgtgattacagcgactgtttacttgatttggaaaaatagaattaggtgtgtttttgactttatatatatgtagctcggttatttctctttgtagagagatcaagagtcttgtgaagtagagagttttaagcttacaaaattgtattaagaaaaaagatgaaatatatataataagtgttattaagggttggtaggggtcgggagtggtgagctccttttgtttgtattatttcatgttttagaataaaaaagtttctttttgttcaaaatatatatatatatatatattgtacgcaattctacatggaaaccactattgcaactagcgctgcgacctaa

SEQ ID NO: 328355 - DNA, 501 bp, Cannabis indica
tccatgaaagtacaataacggggacaaaatcatatccctacatattctactcatcatctttgattttctatttccatgtatatatatatatatttatatattccactataaattctctataaatttttcaactgacccggtccaattttttatacgtaagaccattttccaaatctattataaacagtaaaagaccttatcgtacccctagctagttttcttatctgtttttgttttaaaagcaaattaaattaatttcaatgcaactcccttttacttaaaaatgaaaatttaatttggcacctcaaattaattataaataatacaaccatgtttcaatgtgaaaatataatttaaaaattaaaataaagagaggtatatgataagaagtatcaaattttattttaatttagttagagataagtaaacaatgttagacatttatatgtataaactgaaacatacatgaatatgaataaagtgcggaattaatcaaacata

SEQ ID NO: 328356 - DNA, 1470 bp, Cannabis indica
tgattatattaaaatgagtttttatttagggcataaaacccaacagtatgcacatctagtctcctctgaatatcccacaaatatacacacttccaacctaggagcaagtttccctgtctttcgtcttagaacacgagctggacaaccccaaatataaaaatatttcaaattggatttgtttcattctataattctgttggagtttttcttatgctcttcgagtgtactacattaagaatttaagtaccctcttgaagcgcgtatccctagaagttgaatggcagtgaagaataagtcaacatagacttgaccatgtttgacaaggtccagtttcttctctctgaaacatcgttttgctgtggtgttctaggtgttgtgatttagaataagatcttgataagtcgttatttgtcttataaatattgccaattttatgtattaatattcttaaattgattccttaaattattaattagtgtgattttaattttttaagctactttaaagactaataatgtgttattctcaaaatcacccttatgatgtggcagagagcaagatgacacgtgacaattgataataagtttggacggtatacaattaatcaggaagaccgcccaaaaggctttgggccaacaactaagaagcaaaacaatcgaccaaaggagtaagctgatcgaagagtacaacttttgatcacctcgaacaacttaaagatgcatcctggatgaaatgtccgaccaacaatatcgtcacagttgaagactttggaagaaatcatcttcccaactaaagtttttgcaacgctgtcagagccactttctgcaacctcagttgcaagatctgcctctataacctcattttcttcaccatcacaattaaaaaaacatacaaagctgcccattcgtcatgattcatgtcgaacaattatgaaagcttcaataatcaagcttcgtaatccaactcttagcaaccctaaaaaaaagaaccacatagaaagggaccgaatttttttaaataaatatattcagatgaagaataacttaaaaacaaataatatttgttatatatacataatgttagggtgcttttacaatgcacccctttaaaagggatgcactgatgcatcctttatttgttttgacattcaaaagagtttttttgtccaatttttttttttcatatttgttgaccgagattttcggcaactattagaatatgattatattaaggagctgtaagaaagtgagatgaagatttttacgtggttggggcgttaatgagccttagtccacgagtctttgttattaatggatgtatttaatacagattccacacttgagagaatgtttttctcataaatacagagaatgttcttggtgagtattttctcttcttgctcttatgcaacccaagattctcgaccccattaaatgagctttgagggggtatttatagtgttttggtggg

SEQ ID NO: 328357 - DNA, 930 bp, Cannabis indica
ctacaaaaataaattcacaaatatactcatcatcaaatttttactttattattaataacaaaatatcctttaatcctaacaaagtgtcaagctcacaccccaattcatatatctatgatcgcaatcaaaatgaaacttgattgtattaagtctcacctcaatactaaaaagcaacccaattacctaaatagtttcttccattcacatcccacaaaacatgaaatttcctttaagattcattcaaacagtattaagaagttgaacctaaaatattatgtttggtgtaattaaatatgtataaaagaatgttcaaccttcaatccaaatacaagaatagttaacacaaagtacacttgtagtaagtaaaaataattatttgaaattttttaaaaaaatttacaagtgctcctaattaattacaacgcataaaaccagtaaaaataattaaactataattttttttaaataccaaaacgggtaagaaacaaattatttgagcatattatagattttcccattaatgtttaggtcaaataatatttaagtgtttcaatatacgtatcgatatttaagatatatacattagttactttaaattatttataaaatttcataaaattccaattactttggtattttattacactgtatttttactcattgcatgaacttaaagctaagcactataagttattcataccttttttaaaaaaaaataaatacatatgattctaaatagagtaatttgcagaaatttaactttcaattgtaaataaatatctaaattaaatttttaacagtaataatacctaaatatatttttaaaactttgtaagtatctgactgttaaatgtcaagttgttatccacgtctcattttcatattagtatatttaaatcaatttttaaaaaaaataataaaaattcataa

SEQ ID NO: 328358 - DNA, 802 bp, Cannabis indica
ttttaaaaaaaaaatcacaaaatccattcatgattaactgaaaaggaaaaccctacaagttagacagaaacaaaatcgcaaaaatcttttactagttaggagtacaactcaactctcggccaactataccgagaatgaaaggagtaaaaactcaaagctcacgcacgagcagctaaaacgacggacaaactctaacaaaaaaaaaaaaaacaaaaaacaaatgccataaagtacaaaacactgataaaactacctaaaaattaccaaccaaacaaacaaaattaacacaagtgcctcaaaaagcctccctagagtagaaagaaggagccattgacacagcccagaacaaaccgaccaagatcaagggagtgttaggttttgtgccattcatattgagtaacaaaaagttttctattacaaggacaagaaatgaagttttaaaaattagtatattcaatgaatttaacaaaacttcttgttcctagttttatagattttagtttctctaaagctgtggcttgtggtatacttagtagtttacttactctagtgcaagcaacttactttagtaagatgctaaaacaattttttttcctaatggctagctctataggaagttttttgactcctagaaatagattttatttatctaaggaaaagtttcaactcttccagaaattataaaggccaaggaaagcattccttaggttcaacagtgagagatctcagatatgctttgcaatgcattagaccaggctcctgatgctaagtgggagtaatgagtaggtatcagattaatcca

SEQ ID NO: 328359 - DNA, 643 bp, Cannabis indica
acaaaaaattatatataatattatttgttttactataggaggaaatcatatattgtgtaataaaattaatctgtaattaaatttatcatgtatactatatgtgtatactaattgtagaaatgatacaaaagtatatctatacattagttttaggaaattgaggggagcaagaaccacctgtaccatagatgcacgtctgcttctgaatctaattccaaacaagatttaggatatctatttttgaggcttttagcttctcaacgttctcatgcctagtttcatattttttcttaccaatatagatggttatttggcgatgcttttatttaattaagttcagttttatttaatagagtttgttgaccttgttaagataaatgatttgaaaataaacaaatagatgttattaatattattttctcatcttataatttaataaaattaaaataataaaataaatcaattttaaaacagttatggctaagaaaattgttagaataaaataataaacaaataacaattattcgaattatatgtcaatatgtctcaaattaaacatttttttttaaatttctacaaaaatatctaggttatttaaatatttaaaatataatttataaatgtctaataagtaaaatgatat

SEQ ID NO: 328360 - DNA, 803 bp, Cannabis indica
accagggccaataaaataaagacccgacttggttcgggtaagggccatgattacttgaacttaatctgcaagtggtctcactgctttctttagctctcaatgaaagtaccaaaatatttactgagattttcgcaaatataatatatatgataagagctgaagaacaaataatcaaaagaaaaagagtaaaaagagaaacaattttttacgtggttggggcgttaatcaaccttagtccatgtgtcagtattatttagtagttctttagcttgtaatgcctttgagaatacaaagaatgtatgttctcaagttttcttgagtaaagtttgcaagagagttcaacctttaatccataggattcgaggggtatttatagtagtttgagaattacattaggttttccttttccctttatttgggagttaacagtaaataatatccttaggctatctcatgaagtccagtccataaagaatacgctctgctgactaggcaggtctaatttggattgatttggtcagcaccgtgtgtagtgattatggacaattaattttcaaattaattgcataatattcattatagaaagtttccccattaatcttgatacgatactttgttgtgatctgaagattggaattcctttatttgtgcgcaagactaaaaagggaaactggaagggtcttttgggtatgcacagtctcgtccctctagtcttgtggtaccaaatattcttccaagtacggctcgtcgagggcagaaggcttaacgattgtggagctaggatacgtgttgggttttatgcc

SEQ ID NO: 328361 - DNA, 510 bp, Cannabis indica
ttccaaatgaccctctctcgaaatcaatgtatcttgggagtttgtagtttggggaaactttactggccaactcctcaaggttggttttattccagtagaatggggggattccactgtcttacccaaaatggtgatttatcaaagatgacctccgaaagggcaagccatgatggccagggcatgattaccaggagggaaccacaaatgatccacggtcgtctctacagaacattccaagcatcttcttttgtcgcaaaagagaagtggagaatcccatcctcatcttctttccagctccaacctttgaaggaagcccatgctctcttcaaagtgttcgcaatggcagttctgccgagttttcctttacagacaagttttcccagtagaattttaccttgaggttcttgattatccacttcttctggatccagtctgaacgtgaggtctgaagtggatacttgcactgcttctttgaaaagatgactcaaggtgttattgttgggttttatg

SEQ ID NO: 328362 - DNA, 804 bp, Cannabis indica
tgtttgagtttatgggcacaaagctgaaaatgagctccgcatatcatccacaaactgatgggcaaactgaagtcaccaaccgatacttggaacaatatctgagggcgttcacagcagacaatccaaaacaatggagcaggttcctgtcctgggcagaatatcactataatacaagccaccatctgctcttggtatgacaccttttcaggcagtttatggtcgaaggagtacaggaggttatgttgtcttcttgggtggtaatctagtgtcttggtctgctaaaaagcaacaggtagttgcaagatcgagcactgaaagcaaatttagggccttagcaaatacgacagctgaaattaaacggatttgttctcttctaaatgaacttcaagtcagtgtatctcaatcaccaatcatttgggttgacaaccaaagtgccacagcccttgctgcaaaccccgtttttcatgcaagatcaaagcatatcgaactcgatttgcactttgtacgagatgagattatggccaagcaacttcatgttcgatatgttcctgcattagatcaagtggatgatgttcttaccaagtccctctccacggacagatttctttatctaaagtccaaactttaatggctcttaccctttcgtttaagaggggtatgttagatataacagttagtttagtttgttctgttgaactctgttagaagttagttaactttctgtaattttcttttccctatgtattgctgagctgttatgagaggatgcagttagttgcattgttactctcttgatttttcatt

SEQ ID NO: 328363 - DNA, 2039 bp, Cannabis indica
tctctgcatttatcacattttttaacataggccttggaatcttcaatcatcgttggctagaaatatccttgccttagaattttcttagatcaactctgcccgacagcatggtttccacaaaatccatcatgtacctcagacaaaagtcgtgcagcttcttcttgggtaacacatctgagcaacggcatggagaatccgcgtctgtacataattccctctactatgatgtaccgtgcagccttccttctcatctttcgagcctcattttgattatctgggagttccctaatgttgagataggttgctattggcgtcatccagtttggggatgtatcaatcatttaaatctcttttgtgccagtgatgttaggttcttcgagaaattgaatagggaccagatttgccctatcacttacattactactcgcaagccgagctaatgcgtcagcagtcgcgtgttcttctcttggaattttcctgagtgcataccttttgaactgtgcaagcacatcgtgtattttgtcagatacactatcatcttttctcctcgagcctcataatctccaaatacatgatttaccaccaactgtcaatcactacagatctcaatatgttcagccttcatttctcgggccagttttagatcggcgatcaaagcttcatgttcgacctcattattggatgcattaaatacgaatttaattgcagcgtgcaggtgttgcccataggtgtgagaagggtgattcgtgcactagatagttgatctgtagctacccatccacacgtagtttccaagtcagcttgtcttcattgttacttagctcaggtatttgttttgactcagggttgttctctgatacactttctttcttgcttgtgtatttactacaaagtctgctaaggcctcaacctttaatttctatttagggttggagtaatctcatattggcccaactccactgcccatttgagtaactgtctaaaggcatccggtctttgcaatatttgacataacgtttggttagtgtataccctaacagggtgaacttgaaagtagggccttagctttcttgttgttagaatcaggcaataagtgagtttctctaccaaaggacatcagccttcagcctcaatgagtcttttactgatgtaatagaccagatgttgaatgtttctttcccctctgatcagtaccacacttacaacatgctccgtgacagccaggtacatcccaagttcttctccatgcagaggttttgagagtacaagaggttttgcgagttgcatttttagctcttgataagctttttcacattcctccgtccactcaaattgtttatttcctcgtaggatgttgaagaacggaacacacttttctgttgatttttaaacaaatctgctgagtgcggtaatctgaccagtcaaactttaaactttcttggttcttattggcaatttcatatccaggagggcttgaatcttctctggattggcttcaattcctcgggcattgacgataaagcctagaaacttacccgagctgactccaaaggagcactttaaaggattgagtttcatgttatacttcctgaggactttgaagcattcgtccaggtcatctatgtgccccccagccttcttggatttgacgagcatgtcatccacgtacacttccatcttacgtccaatggtctaacatcttatttaccaatcttaggatgtcgctccaacgtttttgagaccaaatggcatgaccttataacaatacagacccatatctgttcaaaaacttgtatgttcttggtctggtggatgcattttaatttgattgtaccccgaataggcgtcaatgaagcttaatctttcgtgacctgttgctgcgtccacatgctgatcgattcttggaagtggaaaatagtctttggggtatgccttgttgaggtcggtgaaatcaatacaaactcgccatttcttgttcgacttgggtaccagtacgagattagcaacccaagccgggtagaaagctgttgggttttatg

SEQ ID NO: 328364 - DNA, 873 bp, Cannabis indica
ttagttttcctatcaaaaaaaaagttgtcttttccataaaagccatttatgtactcatactactttcttgtaaaattgtccatttcaccgaaagccattcctatttatttttatggcggagaaaagacagaatttgaaatatataatatattatataaatatttattgggtagtcctcatataaaaatatttgtataatatatatttatatatagctcgcacgatggaagaatttttcacacttgtgattaacactacttgtcgtttctgtattatatatatatatatatatataaatttatatattgaaaggcattaagtggttaaaaattcagttgataaataattagtaattaattgctttctgcaccaactgatcatagtcaatattcgtgattttatcctgtcgtaccataaagtggattactgacaaatgaggggtaagtcttacattgaacctagctaatctatattaaaaaaaattaaaaatcaatgaatgctcacgttattgtgcgagacaaaaaataaactacatatttgtaataggaaatctctcattaaaatcttatagttattattattcattttactttcatcaattatatttaaataattaaacaaacacatagtatagtataaattaacttattctaagtaaaataactatttgtcctgtctaattgtaatatgatttgatttactattatttactaactagtaaacatttcgcgattggcggtagatataaaaaatattttaaattatctataaataataaattgtgtattttaattaataataattgtttaataaaattatattaaaattttaactttactattaaaaattgtgtgatataaatacttaaaatat

SEQ ID NO: 328365 - DNA, 1170 bp, Cannabis indica
aacatggatgaaagttcaaggggcatgatttagtacatatcaaagtttaagaggcatgatttggtagatattaaaggctgggaagcatagcttaggacataaacaatcactaaaatagtaaaattaaatgaaattagacaaaaatccttaaatctaacaatctcaatagttcgggggaaaattttaatggccaaaaaagttcagggggcacgatttggcacatgtcaaagttcaagggaaaaattactaattagccttaataaaattgtttgaattggacattatactaattttttaaaacactttgttgatgaagcattaacggcagggctgaccctaagctaaggcaatgtttatgacctacctattttaggggaccaaacaaaaaaatatctttcaaaaatgtacatattttttaataaacttttaaaaatattatttattcttgtaataagggtctattttttttcctaaggtccaatttaactcaaggcaggccctaattaaacgtgatattaatatgacttagttcaagagtttaaataaaaaataaatgcataaataataatataataataaattatgagaatatatatgaattactagagttggtatttgtatatttaatgttaataaattaaatttcaagttgttaaatagacttttgtactgtaattatagttgtaactcatgcccacatatgcaaattattttaaaaaatgagcgtaatataactgaagtgagatatatgcaacgatttttataattgaggaagaatttttacaaaaagtaaaataaaggacaaaactctacacaaatcataattgaggaggaaaaatcatatttattcttatttatatataggatagatactattttgaaccccgtattttataaaagttatcaattggaccttctgttttgttaaatgacaaaatacaccttgtctttttttaaaatgatccaaacaggaccctgaattaatttttttttgtcaaaataaaacttaataataatctgatttagagttgttatggcaaaacttgttacattttttatacgtgttcatgttagaaattgttttcaagttgattttattaaaaaataaaattgtcgaaaattgagctcaatgtcttatttttacaattttagaaaatataggatttattt

SEQ ID NO: 328366 - DNA, 501 bp, Cannabis indica
ttttctctaagatgtgattaatctccccatttgatattttaactttggccactagtttgtgggtgataatgtgtagtgactttatgtgtaatgtcatattgttttattaaatgctaaaaggcctgttataaaggtgtataccattatcactaatgatagcatgtggtgagccgaatcatgagaaaatatttttttaaaaaaaaaaactttaagcacaactttgtggtcatttgcatggcatgcaatagctccaactcacagagacacataatcaacaacaacaagaatatataagttaccaaaagagttaggaaatggaaccatgaaatcaatgtcccaacatcaaatattttaacaataagaataggattcaaagacatcatgtttctcatagtttaacttccttattttgacaatgttgataagatttttaatacatataggtgtcatgaaagatatgttgggattttatgccctaaataaaatctatttcaatctaat

SEQ ID NO: 328367 - DNA, 1106 bp, Cannabis indica
taaaataaaaattaaaaaaactgaaaaacgttcatatatggcgtaagttccttcgccatatatggtgtcagttattagctaggaaccgacgccatatatacccctatggcatcggttcttagctaataaccgatgccatagaggtatatatggtgttggttgtttataaccctttagcgtcgccctgatcaacattagtagtgaattttgccaaaaccaacgctaaaagggctaaaaaactgcctctaaagggagtttttatagtagtgacatcatgaattctatgactataatctatataccaattaaacctgcttgagtcattatcattatatatataaactttttgtttttacatcttagaaaaaataataaacttcaatcgcaacaaaataatgaagaaacgaaacaaatcaatttattcggtttgatagaattactaaacctataagagagacatattgtacttatcactttaaaattatatatactctctatctcaatctctccacccaaaccccaatatacatttttctttttcatcactctcaccacacaacaaacttacactcacttttcttttcacaattcatttttttttcctccaaacacacgtaagaacacatatttataggaaaataaatttggacactaagacgacttggtcaccaagacactttgaaacttccttaagaagattctttaaaacttagccatgaaaattttcctttaaaaatataaacatactaacgaaaccaattctttttgttgtcgttatgttagttattctcgcttgattattctcagcaggttttcgataggatttagtattgtattttttgtttcacatttatattttatttctgttattattgtattgtttaacttttgtgatatcattgataagttgagtttttttccctctgttgtgttatgattatttgttaaaaggtttttaattggttgtcgatatgttttcgataggattctaacatttattttattttttttcttcaacagagactgattgttatgagagggttattttctcgcccagataaaattaaaataaataaaataacaaataataaattcaaagtaagaaa

SEQ ID NO: 328368 - DNA, 637 bp, Cannabis indica
ataatcctatgatttggggccatagactataattccctaactaaacccatgtgactttaatggtcaaactgtcacatttccatctttactgagaaaaaaattgaaaagattataaatttccacatttatcatatataatacatttagacctcgtttggtacgccgtattgtattgcattgtattgtattgtgttggattgtgttgtattatattgtataagtttatttcaaatttattctatacaaattaaaccaataacatgtattgacaaagattaaaatatatgtcatttattctcttctattctttaataaccttgtttcaaattgtagagtcaaaatatttatatatatatttatttattttgtgtttaataaatttaatacaatgtgaaacttttaaatatacagtttttttcctttttgatgaaaataaagaataaatttaatacagtgtgaaacttttaagtacatacttttttaaagaaaaaatagtgaataaaaatcagtatgaacttttaattttagtgttttcaaaaaaaatcatcctctgtatcatgtgtgtatagattattaccaggcccggccctgggcataggcgggctaggcctgtgcttagggcccacctatcccaggg

SEQ ID NO: 328369 - DNA, 1126 bp, Cannabis indica
gctaaatatagaatcacatggtcagagtcaggaccataggattctattatgccattgcacattgaaacttaggttttttaaactcttcccctctattatttgagagtttacttattattgctatatctttttggctccttgatgagtctagtctcatagttggctcgtgatttatgcctctctcttgctctcttctgtgtttctactttttggttacctctgctgtgggggtcacctgttctgtctggggttttcgttggtgctttctttttagtggtggtgggtgttctttggtaccggcggtggtgtttacagtcatgagcactgtaagcggatgcgaggaggttacagtgagagttgacacggtcaatcctgctgctactaagttattggagcgtgacattgagcttgaaatcgaaatgatggaactttttgaagatttaactctggaggatattgtaatagacaaagcctgtgtgggaaaggtcatgggatcgtaagaatatggccgtttcggttgtcaagaaaattctcctgagtgtttggaaccttgaacaggggtggtgcatgaataaacttgaggatggggtccttggttttttcttttactctgaggatgactgcactttcttcatgaacaaatggccatggcttgtcaatggtatgcttttgaacctgaaggcttggccagtggaaggggaggtctgaatgtcggactttgacgttgctcgcttctaggtggagttccatggcttacccattcgttgtctgttggaagctaatgttcctattttggccaagaaggttgggcagttgataaaatcggatggcaagagcagggaggttattgttcgaagaggatttctcaggtgctggattaaagtgtggataagccatctgcaggattttccctcaaagcagaagcaaagccggagtcgtgggtccaattttttgctacaagcaaattgctccacaaatatgtcagttaattgagcaaatgaagaaatagaattattgggtaagtttgtgtaccactggagggttggccttaccagactaaaaccaaaccctcactacaagaaaggggaccttttatcccacttttttagttaacaaaaataaaaaa

SEQ ID NO: 328370 - DNA, 1028 bp, Cannabis indica
ataatatagtagttatacatagaaaagagtgaaatgaatgaattataattaccaacaaaaaagtaaccatgtgagaatctttgtggtgatggggcctcaagaacttcattgccttttttctgtcattgttggcaaagtgctttatgaatatggactccacttcgtccattagtcgtacaaccttatatattcaacaaacgcaataacacatattaattataataataataataataataataatataattaatctcgtttttttttttttaaatgaaaccattctctactgtacgtgcatgtttaataatatacataaataaacttgttaattaattaaggaggtgggaaacacttgtattatttaattcttaggcagaaccaatggagatgaagtcaaagaaataaagtaattaaatcatgacgtacatatataatggatgaaagatgaatcaaattcaaatagtttaacactatttaaatatacttaattaagacacaacagcaacaacacaatcttatggattgacgattgtggaggagatcatgcatgaggacccacctacaccccccaattattaattatttgatattatcatttcatcaattcatgtacacattaatttctctcaattaaaaataaaagtattaatatgtgtataaaagtagtagttgtacgtagaaatgtttgtaccttatcagaactaatgaagtgtgatctcttcactgctttaagataacttgctgatgcttgctgattcgatacctgttaaattaatattgttttcatattcattttatgatcaattaattattaattcatatctatatatatatctatctcattgaaaaaaaagccgtaccaattaatgatatatattatcttcaaaatagaaattgtaaaatccaactcaattaattaataatttataaaaggggctacctatattcatgagatttgtttatttatttttggattaacagaaagtatcgtaatatttatttatctttattattttttttttaaaa

SEQ ID NO: 328371 - DNA, 1181 bp, Cannabis indica
aaacagtttttagttatgatgccaaacatgcacttagaatttcagcaaatccgacctcgacatagcaactgaaaattacaatcaatccaatttcctgggtgaaggtggttttgcttctgtttataaaggagtagtggtaataccaaatgctactactactactactactcaacaaattgcagtaaaaaagccaaaactacaaagaactgaacacaacaacaagaacgccaatatcaaccaccagcagttttatgaagagatatcgattgtttcccaagtaaatcacaagaatgtggttaaactcttgggcttgtgtctggagactgaaatcccacttcttgtttacgaactggtaccaaatggaacgctatctcagcacatccatggtataaccagatcatcatcatcatcatcatcagctatgctaaggccatggaagactcgtctacgaattacaactgaaatcgctcactctatcgactatttgcactccttcatcgagacattattaagtcaacaaacattctcttagacgaaaactacactgcaaaagtgtctgatttcggtgcctcagtcttgatacctccgggacaaagtggtatagccaccactgttcaagggactctcggttacttagatccggagtacttaagcactggcacattgacttcaaagagcgatgtttacagtttcggtgcagttttagtcgagctaatcacgggagagaaacctatctctaatggaattagaagtaatgcactcagaaaaactaagcgtaacaaaatatttctcatagagaaaatactagatcctgagattattatttctgatcatgatcaacatcaagagaggcgggaaagagaggtagtcgctagattagctaaaaggtgtttgtctgggcatggtgtaagaagacccaccatgaaacaagtggcggaggagcttgtgggacttaacacaaagcctcaacaccaacaccaataccaagaagaaacaggtcagatactcgtcgaccatggccaaacaccatcctcgtcattttctattacccataatatggaaataatcgaatcatcatcatttctctagctacgtaactatgtatataatatttgtctatctacgtacagtagaacctctatttaagaatataacctctaatttgttataaaaaaatcaag

SEQ ID NO: 328372 - DNA, 1188 bp, Cannabis indica
ttcaatgtttgtaaaactgtaatttttctctattttcgtcagtacaggctccgttttaaatttattaaaaaagatttagaagtaattgatactacatatttttcgtccacaccaaataatctaaaatttgggtcttatatgtgtcctggttaagacaataacatagtctgtactgatgaaactggaagaaaattacagttttataaacattgggtacttatgtcactaaaaaaaatcattgggtttatgccgcttacaaacctaaaactttgagtacttatgccactatttaccctaaataaaattaatatttgaaaaaaaatatcacaaagatttaatagaatcttaaaacataaatttatatggagaaaaaaaaacttacttttactagtttttttataattagaattagagaccacttgcccacacccaagctaaaattataaatttcttccaaatataataaaaagctaaaattataattagattaaaattaatgactgttgactttgaattgtttgtgatggtctcatagcagctctggcatggtcgaaacttaatgttgcacaacttctctccaaagagtttggatattattgaagttgtaacaacattgcagcaagggaacaagatgattaaagatcatactggtccaattcggtggaaaccacccgaagtgggtaatctagtggtggatgctgcattagatgatcaaatgaaaaccaacagctcaggaggtataatccgagatcacttgggtagtgttatacactcattctacacctttctgtctcatacagtaaaccctcttttagctgaacttcgggcgatcgaagaaggccttctttgggcaaacaggttgcacctttacaagttctctatttattcagattgtttttagctatcaataaagttaacatgtcattgatgaacggaagagatctagaattttttattttaaaaattcgaaatgagttgcttaatcctaactgtaagtgtttatattttattcctagtattgtaacagagtggctcattgtctagcaaagaaagccttaaatgttaaggcttcttatttctaagaaggaggttatcctccagttgccttctcagcatttcttgttgatacggcattcttgtgttcttatgtatcattcttaaaaataagtaagtgcatgtttggcatca

SEQ ID NO: 328373 - DNA, 1191 bp, Cannabis indica
aggtcatctacctaaaatcattgccaatagaagttaagccccttcttccttcccttatctgtcctacccaagcagcttttgtcccaggaaggaacattcagggcaataatgtgattatccaagaaatcatccactccttcaacaggaaaaaaggaaaagaaggtttctttgccataaaaattgaccttatgaaagcgtatgacaagttgagttggaactttattgacctgatgcttgctggttttggagcgccccaaaaatttagaggtcggatctcccaatgtatcactaccaactcgctcaacattttcattaatggagggcagtttggtaaaattataccctcatgtggccttcgccaaggtgaccctttatccccttacctctttatttgtgcagcaaaaattctgtccagacttttgattgatgccttagataatggctctattaagggcattaagctcagtagagggggcctggttatttctcatattttctttgcagatgatttaatcttaatgggaagagcgaacatggaggaagtaaaaggttactggcattgtcttgagaggttttgcgcttggtctggtcagcaagtcaataagctcaaaacctctatatgctttagcaaaaatacctctaatggcatgaaaagaggtattaaggaggctctgggattaagctctctggaaggtaacatcaaatatctggggctacctctatttagatccaggcaaaacgatgcagatttcaactttatcttggataatctcacttctaaacttcagggctggaaagctaagattctgtctaaagcatgtcgtgcgacccttataaagtctgtgggcttgtcgttgcctatgtatgctatgcaaacaactaagctttcgaaccgtcttgtagctcagattgatgggctggttagggacttctggtgggggtttgaaaaggggaatcatgggctccaccttaaagcttgggagaagctttgcctccctaagtctcttaggggtttgggttttaggaaagccaaagaaatgaccaagcgttcctagccaaatagggatggaacctcccgtctggcaatcaatcccttcgttgcaaaatcctggaagctaaataccttagaggaaagccctttctcaagtgtacttccaaagattgtgattcttggttttggaaaagtgtggt

SEQ ID NO: 328374 - DNA, 969 bp, Cannabis indica
ttaaggacttttttctaattttagtaaaaaagtgtaacatgaatgaaagtccaggggccatgatttagtacatgtcaaagttcgagggacataatttggtagatatcaaagtccggggagcatggtttaatatttaaacaatcactgaaatagtaaaattgaatgaaattagacaaaagtctctaaatctaacaatctcaatagttaacgaccttaaaagttcagaggacatcatttggtacatgtcaaagttcagaggacaaaaatcttaattagtcatatagtaatattacaatataacaattttctttcctttctacataccaagcaactagaaaagaaaagtattttcattcctttccttctaattttcttttcctctcatattttctttcacttgtatttttctcccttggtaccaaccaaacatagggttagtgtagaagtggtaattaattgtaagtggaaaaggtctaaactaccctttccttattaataaataagaacatgttctgccaatgatggaagtttcctaacaagatctatgatgatttggatctgtttttgaatttaaattttgaagtaatcataaatcacattacaattttgtcatttcataaacgcatcatgatgactctctttcctaaacaaagtaactacattttgtataatttaatgacagtacttcacaaactaatttttttgtgttcaaatagcaaattaatgaataattatttttctccatattataagagtaaataatattttatattttgtttttataaaaattattaattaaactatttattttattaaataataaaatagactatgtattttttaaaattataaaaataagactttgagttcaaattttaataactttttcaataactaattagaaaataatttctaacatgaaaccagatttatcataacacttttagatcgggttattattaagtttta

SEQ ID NO: 328375 - DNA, 651 bp, Cannabis indica
tctctctctctctctttctatccatctctgatctcttcttcatttgatcttagctttctttaggggttgtagtggtgcgatggccatgggtggtagtgcgctggtggcgttgtggtgttgggggttcagtaatttaaatctgtgtgttttgggtcaccactgttggttcaaatctatgtatatgtggtggtgtgagatgtatagtagtgtggtggtggtgcgatggttcagatttttttttattttacttaatattatttttcaaccaattagtatcggtgcactactatttgctttagttatgaaccaaagaaaaaattatattttttttgcttcgattcatgtccgaagtataaaacattttatgtcagttctaaacaaaaataaaaaaatatgactttttacatataaggttattgcatcagttactccaatcgatacaaattgttcatatgtactgtaaaattgaaataaaaagtcatttttgtagtagtgatgatcaagtttgaagatttctcaacaagaaagatggtttaagtcttcttcccactacaaaaaactactgcttttagtgccaactttttagtcacaacataatttttttgggactaaatgtgacttttagtcacaacaaaatgttacttgtgacta

SEQ ID NO: 328376 - DNA, 508 bp, Cannabis indica
gtagttatttaagattacttatacatttttcaaaaaatatttgaatagtttataatgacgaaaataatgtttaaatagttacttgcatataaaaagcagtcgcacgtaaaataaaatatataaattttgtatttggtattataaattactcgaaattttctaaaaaattttataagtagtcataaataactataacatatatacgataatgaaaaaaataaataaaaaggttttctaaaatgtcgaaataaatagagaatctaccaaaatactcctaaaaatgatttattggaaacttacccaatattatatataataaatactggggacttatgtgaaaccttgtaatatccagattaaaatagtatttaattttttttagaatattaatggtgcgaagataattatctcatttatttgtgttgttagtgagtagagactattgcttagagtagttgtaccgattttctaaagagagttaaagttgtattaactacgaaagtaaaat

SEQ ID NO: 328377 - DNA, 1782 bp, Cannabis indica
aaaagtaaattctcttgtgaaatttgcaaataagtgaatttcaaatataaagatttcatctgttagtctactactactacattcatatggtgatatattaatatgtggaccatgtataacttgaggaatagccatatgagataagttagtgacaaaaaagagtgactaacagaagaaaaaatatagagaaatgaataatttggatttccatcgagtatttgcatatatatatatatactaattagtactaattcaattactattaggaaatgaataaacttcattaaatacaattaaattgaattaaatttaaatttatataaaaaaagatatttgaagaagcttttgccgcgtttagattttaatggtctgaattaatgggccgttattgtgattaatgggcttgggaatgggtcaaaacttcggtccaagcttttagcgtgatgtagttgaaacggtgccgtttcttgcgctataagaaatttcattagctaattttatattgatatataaataaaaatttgataaattattcaaacttggtttcgtggtgtagttggttatcacgtcagtctaacacactgaaggtctccggttcgaacccgggcgaagccattctatgtcttttttcattattattatttttggcatagaacttaatatactattatgaaaaataattataaaaatatgtatttttttttggaaaaaaaattaatgttcattagtaataataataataaaaacttagacgtcattactaataatatttgtttgaatagttgaaatttcaaccatactaattaagtttagaatatatgtccaattatctatattatgagccctaaaattataaaagtttaaaaataaatgaaaaaattataagtcaaaaagaaattagagagtctattacattgatgcacatagttatcaatattccaattggaacaagtctatttcagaattttgacgacgatttcagaatcactttcaattaacacaaaatgatgcttttaaaaaaccgtcgtctctagaattagaagacaagtcgtgacttcaccaatcagggaatcagagaaagtgaacctatcgataactactcacaaaactattcttaagtgatttcgagccaacaccaccacacacgaacaccaccacacacgagtgatctcattataaaatatgtgttaatgacatctatcatatattttttccatatttaaataacttcaattaattaataattttaggatttttcttcatgtttttttaaaaatattttcttcatgttttaagaatatacgttttagatttccataaatgtaaacttaatgttaaatttgaaactaaataatttagaataccagatattatatgactttttaaaaatttaatttgagaagattaattatataagtttaatttgagaaagttaataatatacttgtagacttattggataagtcatctatatgtacttgtacatttacatattattcttaatttaattcaccaaaaaaagggcaaaaaaaatatatatattgatcaattaattattctttgtatctagaagaaaaatcagattatgttaaatatgcaacaaaattaacaaatgatgtcttattgttatctctcaattattcaactttatttatttatttatagtaaatatttaaatatatatattacaacatgaaataatattatatatccattgttgagtaacacaaattctcacaagatgtaagcgaaacataaaaacaaataagataaaaaaataaa

SEQ ID NO: 328378 - DNA, 665 bp, Cannabis indica
gtaatgaccgtgaggtctaacaactcttgttttattgaatgaaaacgcttatttaaaaaaaataagcttttaattggttaaataaattttgtgcttggtattactaatgaaagtttatttaatatacttaaaaaaaatcgcaatttcaaaaaaatactcttttaaatatattatacaataccatcctattaatttctcactttatccaaataaacccttactatttatttttttctaaaacctaaaacaacctaaaaaatctaatctatctctctctctacatcaccatcagtcgcccccataccttctagcccacttcgcccacctgagcgaagaacgaccaccctccgaccccactccacccacccgcgcgaagaacgaaggacccatttgcgcgaaggtcctgtccgtcgaagattctctctccttctcattcgaagatccttctccgtccttcgctgatccttctccgtccttcactcgaccttctccttgtacgaaggactcatccacccgcgcgaaggacccatctgtgcccgttcctcaaccatcagagtctgtcttctgtccgattcacctcccatcttgttggatctgcctcattctttaaaagaaaggtattgttcaaaaaaagaaagttttttgttggttaattttttgtagtt

SEQ ID NO: 328379 - DNA, 2067 bp, Cannabis indica
ctcaatcatagtgagtaagacggtggtaaccaaacccaaaggagagaaagagatccacactcagatcttgataatagcctagaatagaaaggaacaagggttagagatctgagcagaatgagtcattatattctgttgtaaccaatgtaaagttttgtaaactcttatgtgtttaatttcattattttagagatattcatatttaggatgttattcgacatacttgttaataaatttaaatcctggtaaaatattcccaacagttacctaccgaaatagggctttaaatggtgtttttagatcattggcttagacattagaaacatcccatattaaattcccaacattttcaactttttctcataaatcttttttttttttgattatgaaatgtgcgtacaacacaaacacgaacaacaacaaaacaaacactcaaaacacccaacgaaggaacagggaaccaacaaacaaacaacagagaaaaaacatctaaaggaaaacaaccaaaacaaacgggtgaactaacaaaacagaccaacactaccctgaccaaagatcaccaactcctcacatatcaccaggatcccactccgtgaggtcatcaagaacagattcgtccagcacctcaggattaatacagcccattattctcgaattagaagcccactttgcaatgttatgagccatatagttgcatttgcgcgagatgtggacaataccccagtcattcatcttgtcacacgcgtgaagaaaccttgatttggcttcctgcagactgaagtccacacaattggacaaaggagcatcgaatgctttcacgacacaacgattgtcacattggaagatgatgtttttcagacccaaatcaatcgccttttctgctgccaggcacactgcatgagcttcagcaagcttaggtgaagttgccatacctgtcttaactgtgatggaaagaattgtacccgagtcatctcgaatgactgcagataacacgcagcctgtagcagaaattgctacatcggagttacagcaggcccatgagggtggaggcggagtccattctagaacctcttcaactctattcgaggcaaccatgacatggtcaaggatcttctggcggaccgagtctatgatcaacactaactcagtgtccttttttgcatgtactctttggtttctttctcgccaaatagcttccacaatacataatgatgtagccatgaaatcgtagaattcaacgttcggagggagattcggacctttgtagaaccaatcaagccaatccttccaactagtggcggtaactagttcagttcggatgccccatccaaggctaaaccaaatggccttagcaaagttgcacttccagaagaggtgaaaagaagtttcacactcctccttacacataggacaaggtcctagaactccatccaaaaatggggctagtttatctttggtgggaagaatcccacgaaacaattgccaccataagaatttgagcctcatatgtaatggggagttccaaatgagtttccacatatcactctcagtattggcggactgatcaccattgatgagtctacaagctgaccttatggagaagttgccattttgctccccaatccaaaaccatgagtcctccacacgctcatcaggtaaatcaatgttaaggattgcagcagcgtctgtcggattaaaccattctctaaccatttgtgaattccaccgattatttcttagaataaactgttcaacccaagctactccatgagacacatcctttaaaggtgtgggggtacggctggggttaggaacccaaggatcgaaccaaatggaagtcttctccccatttccaattttcctgcagatgcctttttctagcaccatccgagcatctagaatggctttccacatggccgagtcatctctctttcggtcaagcagtagaaagttttggtcttttatgtattttgcatttatcaccgcactccaaacgcttgatcgatcagtgagcgctttccaagcccactttgtcataaaggctctgtttatcactcctccgcttct

SEQ ID NO: 328380 - DNA, 846 bp, Cannabis indica
tttttattttatttttactaaaaatacggaccaatagagtcacgccaagagagagtgagaatacttattccaacatgcctggcgtgtcactatatgtaattaagcctaatttttttaaaaagaaaaagaaaaaataatggcatgcatatcttttaatttttttttcagcaagacattaattaaacgctgaaaggacattttaaaaaaataataacaaaaaataaaaaatcgttagctaaaaaggaatacaattagggtttacatcaaagaaatgatttagcctcctctctccttctttcttctctctatttttcactgcacctcttcccctcttttttcttctgcccagagccaattaaccctaactctggtgacctgttatcgaaacgaacaatagaactgaaatccttgcccccaaaacctctagatccaccactcctttttttcgttttgtttgatgaatctcatatccacctccatctctctcttttttgtgttctttgtccctatgtggatctctagaggtttttccttcgtctctctccgctctctttctctatttcctgaggttgatgaaggttcgtcttgacggagcttcgagaatcaaggaagttcgtggatgacggagcttcggagcttcgagtatcaaggctattcatcgatgacgaggcttcagagcttcaaggttcgtggctgttcgaattcgactgggttgtggggttcatggtggttcattgtcgacaaaggattagggttcgacgctgttcgtggtggtcgacggaaaatgattgtgaaaatattttgtttgttctgtaaatttgtatgttcatatgttcataatctgtt

SEQ ID NO: 328381 - DNA, 607 bp, Cannabis indica
aatgtaagccctgcagtagacatgaaatggtctttcaagctcttgacaaaatatgggttgtgtgtttcctttagtcccatatcatttatgtatgtggattttcgtggtgtttagaaaataaaaacaactctcatcaaataaataaaactaatgtagtgaatattaaatattttatacataaaagtaaatttaattttgataattatcagaactataatttttataaaaataaattacaattcagttctacttcacatagtatcctataaaagacattttttctactttattattcaaaatacattgttaaatttattttttattatttttctcaaatgtttacattgcacctaattcatgtttttaaatattcagtataagagcaagtataagtcaatcttacgaaaattatgtttactttattattcaatgttaaacaataattgaaataggggattattttcaaagaacaaaattaaataactcaactgaagaaagtgaataaagtatgatactacgattttaaatgatagttaaaagataatctccaccctcaacaatcatcctcaatgtaaagtccttttttggcaagttaggtgacaaaata

SEQ ID NO: 328382 - DNA, 1177 bp, Cannabis indica
ctccaacaaaatataaatccaatttctttgattatttggtaataaccaaagacatatatgtatataggtcttcccattattttttttaaaaaaaaaaattgatgaattttaattttattttcttatacaaccgaaaatataggttatgagccaataaattctaagtgataaaaataatttatcttcacttgttatttttttttatttgaaaaaaagttgaagataaatattaaattctagtagcgtgtatattaaccatgaattctaatatttgttgcttattttaccttatatatatatatgatcatagctttcatgagcatgtttgtttccgggcatctacagacgacatcgttagaggtcttaggtagtggaataggtgattatgtcgttggttgtggtgacaatgcatgagagcaacattcatgtattttgtttttggtacttagaatatcataatggtgctaattaaagatcaggaaataaagaattatattaagacgaacaggcgtacgttgcttaattatttgtaatatcttataattaaaagttctaagctgaatataaggggactgacatgactaagtaccaccaaatcttagtttagtacaaatcaaacatgatgcaaatttgaacacatttatctcttaatataaattttgtcattattatatatggagttcaattaagacagctattattattagtgccataagatgtatgtatggtttgattttatttaaagtgttttgggctaccgtgttatcaaaattgcatgattaatatcattagttaggtatgttggttgttgaaatgtaattgtaccaattcattttattacaatatataaaagtctatattagtggatttcaatttagatttgtacctcttcgatctttctttttgttcccttttaagctacactaaagctttttcgcacatgggttacacgtctaatgctctctcgttattttattttctccctattatcccatataatttatgacaaattatcatacatttaattctcaatttatcataataagtgtcggttttaggaataagcaggagataaaatacagataaagtatatttcactcagtaaaaattaatttttggtggtgatgattaattttttatgtttggcgggtcccactaggtagtttttttttttttt

SEQ ID NO: 328383 - DNA, 583 bp, Cannabis indica
cattttggttggctagtttaggactttagtctttagaggagatgtgctttttcaaaaaatattattgataaacattaaaaagaacttttattgataaacattaaaaaaaacaaaaagttgtgtcaaccataagtatatatggaggaagcaccctcttgagtatcttcctaagccatatggtatcattaaattgatcggccaatactatctattcaaagaaagtagtactacaaactactgctccagaccaatccgcttgaaagagtactgctatcaaaattcactacattttaataattaaatttattttcatatttagatacacttgataaacttatttacacttgatagcagttgcttaatttaaagattctgaggtagttggatatttgttataataataaacatggaaaagatctagagcttataaaaaatgtgtcaaccataggcttaagtatatatagggaggaagcaccctcccgacaatcttctaagtaatgtggtataataaaagggaaatttgattttctatgcttagaaaatacaaaaaatttgatttataaaccaataattaaaaccctaa

SEQ ID NO: 328384 - DNA, 967 bp, Cannabis indica
ttggccagagaaaatgacaataataataataataataacgtctaggatagggagccttatagaaagccagaccagaatttctgttgtcttccttttaagatttctcaactcgaaaacacctcagccataacatgagaagtcatataagccttttctcttattttatccttttgtttttatttttatactaaattctgttatataaattgtttttagtttctcttgtactaatctttgagtgcctctataaaagcgaagccttgtgcctaataacgtatacaaccccaaatcccacgtttaagcaactaataataacaatagtaatgatgaaaaggagcaagaatctatgtctccctcttcttgttcttcttcatatcatctttacaagtcatggggttgttagtagtgtaaagggattaggggaaaaggttagtgatcatcatcatcatcatatagtatatatcttttatctttatattaattagtttctcattacatacaatcaataataatatatataattttatattatttttgcatgcagagcttttatatagtctacttggaagatcgtccggggattcaacaagaactccgcagtcgaaacacacttcaacatcctttcctctgtcaaagaaaggtttgtctgatctcttggatcgaataatatggccaaacggccaattatatatataaaaattttacaataaaaatacccctctaactataattttaataagttaagaagtaataatgttttttcttctaagagtagagagacctttttcattcttaaccaaaaagtcatctttaattcaataatttatgatttatattaaatgtatagataattttagatgtagtcccttttatttttatttttattttatttttgtatagtaagatgtagttcacactaaataagtaaatatggatgtgtaattataacactagtgactaataccct

SEQ ID NO: 328385 - DNA, 1519 bp, Cannabis indica
atagcttttaaatatttttggtatcccaactattttaaaagtttaaatatattacaagtttattttcattctgtttaatataaaagtttaaattctgtcctattttgattagtaatcccatttaggggattagggtttcataagtattttgggtagcgtgcctatttattcagggcgttacaacttcatacatccgatactgctaaaatttaccaataccttggaaaggacataacacttatccaaggtgtaagtgtaccttattgccgattatcatgtcagtctaaatccaatgaactgacaaatcatggaaattaaacttttgaacatataatcatgattatatttaactatgttgacgatattataatcatgacatgaacaaatatatatttgcatcggtaaccaagtttgaccagacgcgttgaccgacacaaaaatccctttttgtagtagtgactctattgatagtcaaaattcatagcatcaaataacaatcttcccaacaaaaacaatatacactaatcgaacaataatagaacacttatcgaatagtacgattaacgagaataataatcttatgaacaaatattggcttgccaaaaaagactactcggacaataatcgaacacttatgtgtctgactccaacataaatcttttattttctacgctattaaaaatcatatttctcccctcgcgctactaaaaatcattgtacatcaaatagccgaaaagagttgaccctatcaattcaaaacaaagtaaaataaataccacaaaaataaatctacaaaatgtgtaaataaaacacacatcatcgaatacatatcaagtactatcgaacatgcatcatgaatggttcgaaaaaactacacaacttaccctacatcaaatatgcattgtgtaacaatcgaataggtaatataagtaatctatattgagcaactatcaaacactatcaaaatatactccctaatttatgaaaatactaataatcgagtaagcatcgaacacgtaccgaatgcactgaattttatgcaaaaaaaggagaggaactccaaaaacacagatataattttttaaccaataaattgacaagatgcacaactaaatttatatacaaggaacaaaacaccaattatatacttgaataaaattaacattaacaacaaatttaacataaaattagatatccatttctaaaacctttaaaattttgaccttctcctcctatctttacaacaggcttatggtaaggctcttgcttcatagaaatttatttaatggctccaaaaattgttctaataacaaagttttttgatatggtgaattgagaaattagtaggatttgggaagatggaaagagagaagagggcaagattatgagaggggtattttggggtttagataaaaatgtgataattttttgaggaaaattttatttacaccccgaaaatttctaaacacacctaattttaataatttttattttatataaaatttatatctttaattat

SEQ ID NO: 328386 - DNA, 682 bp, Cannabis indica
atattatatttggtgtaataatggactaaataaaatatgaatattttttttctaataaacatataattttataatttctgttaataaaaataatgttaaataattttgaatacgagatatttaattaaaaaacacattattttatgtatataataattgtggaaattaaataatactaaaaaaatatgttatacatcatttattattttaaaattaaaaaggcttatatctttttataatttttttttaaaataatttgtcttttaaaaatttaaataaataatatatattatatttataaaattagtttatatataaaaagaaaagagaaacactatcataacacatgtttttgttggaatagtatgattaataagccattgaataaatttatagaatccattatacatgaacctaaatttgtgccaaacgtattattggacaaatgtatcccatctcatcctttgtcccatgctctaaactgactcttaaaatatataatttttttattttaatttttataacagtatttatcgaatagaaattcttttttttaaaaaaaaaaaaccaaaaacgtgactaaattattcgtgtaaataatttttttgcatgcacatttatattttttgacacattaattaacttaatttatatttaaatattaactacttttgttgacttt

SEQ ID NO: 328387 - DNA, 584 bp, Cannabis indica
acaaaacaaataatataataatattaacaaaataaacgtaaattaatgtaaggacatttcatcttttagctacaccacaatataagtctctaaagctcatattattataagtgtatatcctcttgtgacataaatgatttattacattatttagatgcaaagattcaaagttaataccaaaagaattctaaagtcaatataaaataaatgtgtcacctcccagaattaaaaaaaaaactattttttcaggggcgacattcaattgtcgcccctaatacccttactattagaggcgactttttgtcgcctcaaatgttgtcgcccctaaaaattatgtcactgtttattgcgataaatttggtgtgtatgataaattttgtaatgcctaataatgataatcaactattgcttattttgttgtgcgcttttcatcataaaataaatgcaaccatttaaagaacaatatttaaaaataaataaattattataaatattaataattatgtggatgcccaaatcttttatttattaccatgaattgtaatcaacattccttttttccttagttccctttttcttagttt

SEQ ID NO: 328388 - DNA, 602 bp, Cannabis indica
aaatattatgctcgaaaatattacaactagagaaaaatcaagaatgtctagccacaatatgtattactcaatttttcgatcatttaataaactggaaattgacatcatgtaaagaggaaagcaaaagttgagagtcatgaataatcaaactaaaagcaaaactcataatttgtttactatggataccttaaatagtgagcatattatttattttgatctctacattttttcattgtttgctctttatccaactgagaacctctttgattcccataatttttacaaccccagtagcgtaaacacctaattgatagtaacttttagcttcaataaatttgtctaaactgctcgtgccactatcctgaagtcatacaataactacacaagttacaagtttccatataatataatttattattttctttaatatttctattaatcaaataatttaactcttgtcttcttaccaaatcactcttacaatttcaatttcaaatcaaatataaaatatggctaattataatttttgcctctgaactttgatatgtaccaaattatgtcccataaacttttaaggtcgttaaaaatatcccttgaactat

SEQ ID NO: 328389 - DNA, 616 bp, Cannabis indica
taaattgtcacgtgacaatccttgattggtccaaagtaataattaaatttaggtatatatgccgtaaattactgttttgaaatactactttttatgttttatttataattttacgactttaattttttatttataaaaatacgcttccaaaattttaaaattataaaaatacatttctttccgtaaaaagtaagaaaacaactaaaaaataatgaaaaattaacctcacgacgtcaacaactatatatgaactataaaacaaccaaaaataatcttcacgacaactataaataaactacaaaataattaaaacatagtttattatttttatcgaaaatatatttttgtaaataaaaaaatttaaaatttaaaaataaaatatttcgtgttaatatatttttgtaatattaatattttttttccaataattatatagttaaaattaattacactaatatactataactttacacaatcattaactattcaaaatctaatattccatcatattatataattcatttttctcctttttcccatttagtatgaggttttggactaatttacatgcatgatatgatcaccaatatatattcattttaaaaaaaaaaaaaaa

SEQ ID NO: 328390 - DNA, 1770 bp, Cannabis indica
caccttttgatataggtagtgtcaatcaatccatttataccctcttcaactgtgaacctacacagtctcagaattatctcacttgacctttccaggcagtgtgggattgcacaacttacccagtatttccccttacagatcacgggactactgactatcacagggtatcaaatatatatgctttggatttaaactcttcacctttataatgtaaaataattcaatcatcatatatcaaagttaatattatatttatttattacttttaattacaaacatataatacacatatatttttttccaatttttaaggggcagtctttatgtggatctatcaatgaatacaattcaatattatatctcacgtattttaatttaatataaataatataaaaaaattaaaaattattattacttacaacacgtcacatcaatacaatattaaacacgaaacatatagctaacaataccaatattgtatatatacggaagaagttttaatggttacattaaatatgtaatcatgatagttgcatttacatttagtcgttggatcattattaaatgattatgattaatttaaaaatttactaaaaataattaataaattacctgtaacctaatactaacctgatttgatttattttttaaaataaaaaaatactaaattctaaaagattttattaaatattttaattaaaaaaataatttatttaagtataaaaatagaaagtttatttgtaagtgacctgtgttatagtaggttataaaaaagtataaccaccatagtaacattttttattgtgaccattcaatataaatatatatatatatataaaagaaaactaactatatttacgacaacatataaaatcactaactatatttacgacaacgtataaaatctacatattaattattcctaactcaaattcatttttatattattatcattattacagagagagtaagaaaaggaagaagagatggaaaccctagctcatgtgaaaatactcacgagggaaagcaaagcacctaatggctcatgagtagtatagccagagagttaggtaacgtacttatatacatatatatatatatatatatatttatatatagtttcagaaggttatatatataatgatgatggtgataagcttttatttactacacttgcttgtttgactatatatgcataaattattattgcttttgcagctcttctggaagacagtaaaaagaactcgagtagtatatatatatataggaaattattaattttatatatatatatataattaccatcaatgttctgcatgcatgtttgtccttgtatttcaaccccaaaatatttatttctatgacctatatataattatatccatccttatattttctttttgtttcctctctctagtctctatctctctatctataaatatatacatacatatatatatatatatacatgcatatgttgttttgttttatttattttgtagttatgtgtttatgcattttgaggttgttggtcttcacacgtatttcatgcatttaccaaacattcatcccatatataagcataattttctatatatattatctaagaaatatttgttattgagataaatttccctttttcgaaaaaagaattacactaaagagaactcgtagtatcgaaatagatcttgtaatattaaggaaaactcctatatattattgaagaaaatgtgcgaatacaccaatcaacagaaataacgatcaagtatt

SEQ ID NO: 328391 - DNA, 1441 bp, Cannabis indica
tatgttggacaccacaacacgtgaaaacgtattactttatattgtaaaagattacaccaagacttgaatactttttactagaccacaaatacaccaaacactcacactctttattttatcactagacacctttactacacacttgtgtataactcacacttttgggacactttgtctttaaacacttattaagaactcacacactttagactcttttactcacacttgaactctcttgctcaaacttgcatcttaagcacacacctcacttatatttataggctacaaaggatgtatctaaagatttctagatttttctaatttactagctaattaattacttcttactattttctaaacaactctagaattatctaatcttagttctagtgattctaagttttctctaaaactttctagagtgttcttggtttctcttacaaatttcttagaacattgtaaaacattctaacatattctagatttgataatgacttttaacactccccctcattatcaaatctttttcaagcttcttctcgtttgataagatttagttgatctctgaattttgaaaatttaatcgtacttaaacttttggtgaatatatcagcaacttgatcatccgtgccgatttgtcgcatctctattttttcttgaagtactttctctctgagaaaatggtaatgcacctccacatgctttgttcgagcatgaaatactggattctctgctagacgaatagcagactgattatcacaataaagtggcactgcagaatctgtgaattggtgtaaatccttcattagttgcatcaaccacgtactttcttgagccgccattgctgctgctctatactctacttctgtggttgacaaagacactgttggttgccttttgctataccaagacactctccagatccaagtttaaatacatacccagtatttgatcgtcgggtatcatgatctccagcataatcagtattgcagtagccatcgatcttaacgtcatcatctttcttatagaatagaccatagttaatggcatcattgacatactattcgtcatagtactttcaaatgtggcttctttggttgttgcatatatcgacttactacttcaactacataagaaatgtctggtcgagtcaatgtaaggtagattagcctccccaccagttgctgatacattgctccctcttgcaagtcctttttgacatgaacacatagcttagcattagcttccataggtgttgagataggcttgcactcgagcattccaaatctttacgacaaatctttagcatactttttctgacaaagaaataaaccttccttagttcggtcaacttgtaatttgaggaaatgtttcaattctccaagctccttcatttggaagtgtactgataggttctcctttgtttgataaatttctgcat

SEQ ID NO: 328392 - DNA, 1129 bp, Cannabis indica
tgatcggagggtggagggggccggtggcggccatggatgagtacgagatgttcgtcgtggatgagatgaagggagctctgaagaagtacgatgcggtgagagattcttgggctgatgttattgaatcggagagcctccgaggagccgagcagatcaccggccgggggtggtagagtactgcgtcgtttgactctggttccggtggaaaagggattgtagttgtcgatgtgacagctgtgccggcgaagttgtggccggtggaatcgccggagggactagaagccgtgacggttcacatcttgcctcgaatgactgcttcgtaatatccatgtaaataaagttttttttattattattttttatacaaaaatcatccgaaaaaaaaaatatttattattagttatcaaatcaaatataaattaataaatagaatgtagtgaatgtgtaaatatttaaatgtttgcgacctattattttgtttgttacattcaaaagtgaaagtttgtccatttactaagaaaaaaggaatggacttaaaaaacaaggtgatgtaaagatagaaaaaaaagccctctgccccacgaaacagagaactcatatcaatgtatttttttcttctttttttattaacaatcgtatcaataaagttatgagatgattctatcaaaagataataataataatgtcatgagatgaagcatgcgtgatctttctcaaaactataaaccgattcacctgtaactttgagctggcgctttaatattcttgttttcttttctcctcagctcagaattatagtcttttatgttttagataaaagaataaaataaagagtgatggttaattattattaatttttatatatataactaaaagagattaggggttgcatattctatcttcagttttttcggtttaatatcaatcttggacaagttagggcttataaactactcttaagattaggggtgttcattggatcacatccaatgtttttaggcctatccagatccgatccaatcatatattggatgttagattttaccatccgatccgatccaattaatttcatcatccaatcgatccaacatccattggatgttggattggatcggttctatccattgga

SEQ ID NO: 328393 - DNA, 1469 bp, Cannabis indica
agttgtttagataaatttcgaggacgaaatttctataaggaggggatagttgtaatatcccaaaaaatatattgatattttaattggacatgatttattaaatatgtgattaagtgggtattagagtagggtaataatccaacttaaactaagtatgagttgattagggaaataagaatacataaagtgtaatttattaattacggagattatattagaatatgtgggaatcgtagacaccataattcaaataaaatatttttgggcctggaattgtggaacttgacggggaggtcgtaaatgtcatgacagtaaaagatgaattgaattggaattgtaccagactagtttagaactgtaaattgtcagtttggcgagattagtttgaaaagaccaaattacccttaagttgtattttgagctataatgtttaaaaagggtagaatagtcatatatcactctctctttctcttttctctctcttgagccatggaaacctagcaagaaatcagggtttttcttgctaattcaaccagttattagtagatgtaatgaaggttaggggtctccaaggtttggaggtaagttcttcactctttccctttgatttcttaggttttaggttatgttttgattgggttttttatataaattcgaattgttggtgatgattgagttcagagtatatttataagtttaatttatggttgtttaagtatatttgtgttattctattttgttgttaggtttgagtttgaaagaatttagtttatgaactcaaggtccactcaagcatggtgattctgttattttgagaaattattgcattttgaaggtttgaatatattggttttatgttgttggtatattctggaaggtttcattaggtttggaggagttttggttcggttttagagcaaaaaccaagttttcccgtttctacagcagggaaaatcggttaaccggtttcacaggtcctatgaaaaccggtaaactggttttggtagcaggggaagaaaactttggttttagcctcgaaaccagtttcgttcggggtgtttttcagaacatagatttgtgtattttagtaacgtttaagctattttgaactagtggacagttagaatttttcaagttatggagttagggtttgtttggaatatggataagttctttatcagatttcattatcgtgacataggactcgggatcgtcaagctttattccattcaagtcagcccgcatgcctaatatctggtctaaggtaagaaaagctatacgcactataatacacgttaagtaagaaacaattactattgtttgtgacgcgattatgatcgagatagctattattattgtttgtgactcgattatgatcgagatagtgactactattgttgtgactcgattatgatcgacatagcgaaatattacagtttgtgactcgattatgatcgagatagtgatta

SEQ ID NO: 328394 - DNA, 865 bp, Cannabis indica
ttgacaaagagaaaaagagaaagagaatacagtgtcccatcaattttatcatatataatacatgtttataattaaaaaaccaaattaacatataaattataagtattatggacatatgtattattgagagaaaaaaatatagctacaaattagtgattgaagaatagttgaggaacaaactgtctacatctaagagaaaaagaatcaaattataatatcttaatattggtcactctttatcaatgtgatgaccttataattaaagaccaaaacataattacttactcgatcagaattttttttttttcttagggtttgaataagaattgcgtaatatggagaggtaataggcatatataaaatttttctcattggaaattgttgaaaagaatgtaatattgtatattgtacatgtagcatacttttaattaattgagaaacttagcatctaacaacagtgagagagagagaggagagaatacgatgtatgtttttaggttgagtgattgttatattatgtattatgtacagtatatataaatatttagacctatggtcatagatatttattttataatgattaaaattaaaataaattgtatagagctatagatattatagagttttctaatacaataattaattgatatttatgaatctaattaaaaattaaatgatagaatgaaggaagattttagaggaataaaaattttctatctcaaaatatctgtcacctctatgccccattcataaaaaaatgacactttgtctaattttttatagctcacgtgttctcaattttcttaaattgtatttgtttgtctgttattgtgagaacacggtttttttaaaagaaatttttttt

SEQ ID NO: 328395 - DNA, 756 bp, Cannabis indica
ataataataataattaataataacataactatatatgtgagtcataagtgaagttaaacaccacaaaaagttaggaacatcaaaacggtacccgcataagagttaacgagtttgggtttgtcttaatagatttgaattatgttcgggttaactcgtctaatctaatttaataagtagatcgtatttgagttaatacaactaacacaaaattaactcgttaatgacttatctaaagttattttaatactttaacagattataattaataagtcataaacgtgttaaatatatcataaacgtattatcagttggcatgttttaattaaaaaatatttataaacaggttatactgattgtgtcagtatcaacttgtttataaacgagtcatgtttgaattttattttctgagacgattattaaacgggtcgtattcgaatcgagcatatacttattagacatgaatctcgatatgacacgaatacaacccacaaacacgaattatcaccccttacaaaaaagtgataggaaaattaagtctttataaaagcttctagtttatttaatttttttcttatttgtatgatcatgtattttgtatcaaatagtttaaggtgcaaaaaaaaaaaaagtataacggacttagaatttaagttgaggggatgtttctttttgtcaaattaagatgagggcatattttttttattataatataacatgttaaaatgatgtatttttatagtattaaatatagtttaa

SEQ ID NO: 328396 - DNA, 710 bp, Cannabis indica
tgtactgagggagaaggagccggtgattgggcaaaggtggagactattagcattgctgccattgctgcaaccaaagcaaagcttacacgagccattttaaagagtgagaaattgaatgtttctctgagaatgaatattctgagtttagagagatacaagtaaagaagaagaagaattgggttgtttgagttatgagttacctaaatggtttttaaggctatttatagagaaaagtaaaggacttaagagtcaaaaaagcaaaagttgagatgaccgttggatttcgagacgtttattctgtgaatgatctggcaaaaatcaacggcctagattcaattgtctttatagtcaattacttggaactgagctatacgaaagcgagtaaaccgactcggtctgacacggttaagggatagtagccgtttcaagctttcaacactataacttacacgtggctaaatatgaatcgttggattaaaagttatgtggtaacggtaagatggtggacggtgggatgggcgagtgttgtgggaagtataaaagagttgttgggtgggtttgaagatggaaaatgtgtgggggaccattaaccataacagacatgggtccagctgtttcaatgattcacattaattttgattgtcaccccattttgggcaactcgtacatataacatgatttcatttttgttcattaaaaaaaaaaggaaa

SEQ ID NO: 328397 - DNA, 1395 bp, Cannabis indica
cattagggttccaaaccctctttcaatcaaatcacatggcctacccaagagatcgattacccgtgtagccacatatgagtgtgtagttcccgaatcaaataacaaagtataaaaggagttgttgacaagaagctacactgtcaccacagaaggactggctccagcatcagcttgagtgatggtaaacacacgagcaggtacgggttttgcctctggattctgctcttctttctttgcctaagggcaatctttcttgaaatgccccaccatgccgcactgaaagtatatcttctggttgcactcgccggaatgatgtttcttacaatatgggcattcagagtaagagtaaccctggcgtccacctctgacttggtccccatagaaccgctttctctaccctgagcaaccagatgctggagtaacttttctcttctagtcagtggtggaatcacaactattcctaccataagcaggagtagaaagagtgggggtcccaccaaccctcggtgtcacacagggctcctgaagaagtttaaccgcaccctcagcttgcaaagccttctcaaccatctccgcatatgatgttgcctcattggtagtaatcaatagatcatgtctaatttttaaattcaaatcgggaaaatatttttctttcttactgaagtctgtaggcacaacacccgaggctagcttggaaagacggtcaaactttgttgtgtattcagtaactgacatactctcagtttgaactaactcagtgaattgtttccgcttagcactacggactgctgcgttgtaatacatagcattaaataattcccgaaactcctctcaggtcatgacagtgacgtcctcggtgagggacactaacttccaccacacgagagcgtcttcctggaattagaaagtggtgcaggtcacccgatcattttcaactacccccatgaaattcaaaacttgctctatcactgtgagccattggtcacccttcatcacattaggacctcccataaacaatggaggtgcttgctcatgaaacctctcgtagaacggttccatacggttgccagcaaaaggttgttctacttgcaccgtaggaactacaacgacctgagcttgtggcggaggcattgcaggaggaccctgctgccttagtctcaaaatttcttcatgttgctggcggatacgatcttgcatctccacaaacctctactcccaatgtggaggagcttgtggtggattaacaggataactaccttgaattatgccacagccttggccgcgaccacggggattctggggaatttgatttccctgatcgcctctggtgttaaccctattaccctaacttcttgtattttgctgggcgtccatttaataggacttagcctgcga

SEQ ID NO: 328398 - DNA, 818 bp, Cannabis indica
caatatcagtcacatctgagattgagctttttctctcaatttcctcctggttcttctctgtttctttctctctttcttttcttcaactcttacaggcccacagtttgtgcacccgtaggtaacattatgaaattgaaaacaaaataatatggaaagtttgataggacttagtaattatatgttgtcaaaggtgttattccttcccattactacttccaccgtttgttgatgagccttgtgttcgcgaattaattttttaaatctttgcttaagaaaagtgaaataaatctttaccaatgaagtagaatccttgctaatcaagggaaattataataaacatgtcaagtaatatatctcaaatatacatgctgcgagaaaaatgcatggaagtgacttacgacaccatgactgaataaattggaaaataaatagttcttcatgtttctttcttgggtgggttttgtcagagcgggagatttttgagagagagagagagagaaagaaaggaagatgggtaaattttgatttttgatattaaattttctataaccagagctagataacaaaaattgaatatgaattgcttagaaaaagttagctagcggaatgttgatcatggcatgtgggatgggattctttagcttaagattagcttttattgttaaacatagaatagattatttttgaatagaaaacttttaaaaaaaaatcacccaataatttctcataaaccaaaaattctgttatatagccacattttatatagaatagatatagatttatagattgttaaaaagtatgattagtcccaataacaa

SEQ ID NO: 328399 - DNA, 1472 bp, Cannabis indica
tttgatttataaaatataattaaataaaaatattcaaactatgattactatttaattactaaatattttaattttatttcacttgtatatataaagtaccagtccctaagctcactattcatactatctaatatagtaattccatctacgagaggaagagagagcttaaaagtccgaatactcacactaactcaatgtttttttttataaatccaaagctcatgtgggattaaagctcaaataagatcaataacgttaactatatgttcaatataaaattttgtattcataatcgttcataaataattcatatacatataaattttcaaacattaccattccagagatagcaaccgcggggtcagtagctcctggtttttcttgtttcggaccgccaatcgataacataggtattttatctgctctatcaactgcttcaatgaatttttcaatatccagagtcttctggattatcagttctcctaggtcattaagttgtagataggcgtaatagaggtgagtgaagtgggttgcttccttagtttccacagtgtctcttcccgcttttacaacacaatacccgcttttgattaattgatccgaagttgccgaagccgccatttctaattattttttgtcccaaattcatcatcaattcaaagacaaaagaaattaattgatatgagtatgtataacatgagatttcatctcaaaactaattgataataaaaaaaataattcataaattttttgtatgttatattatgtgagactctctaataatatatacttaattctctattctaatattttattaagtaatattgcaaatgagacatatattataatcaaaatatatataaaagtgtttctattttttctttcaacaagtaataagagtttctcaattgattatttataaaaaaaaaattactataaaaataggactttttattactaataaaatttaaaattaatatcttttctaccatggccatctaaccttccgtcactgtatatatatatatatatattatttatatataaatatatgtatcacaacacatatatgtacacatccttaatgagatgatgatcatcatatacaaacataatcatgtatagataatatcatcaataaatttattatatagtatatgtgattaattaattgtattaaagttttatttaaatttaaattaaaatttataaaaataaaataactatttaattttattaataattttaaataattatttaatttatattttaacaaatttagatatatatttaaaactaatttttttaaagaaataattaatcaatttatttaacggtgttagttttaactgttaacttaaaaaaataaaaaaaaaaaaactttaaactaatcatttttcttaaaaaaccatatttaatatatatataaacaacacatattatatacacatactgagatgatgatcatatat

SEQ ID NO: 328400 - DNA, 612 bp, Cannabis indica
aattctgggtccgccactgtcttccttgcatcataacatagatatatattggcattaattgaaagtattgaaaataatgcataatttggacctaaaacttctatgtgtgtaatgttgaaaaattaaaataggttgaatgttttttgtttcatacattaattatttgtattaccacgacattatttatatgattgtgaagcactaaactaatggccatatttttttttatgattcaataaaatttatattattataagagtatatggtagtttggtaaaagattgttatattatgcatcgtatgcattgtattgtattaccaacattttttttatcactttgacagtaatcggagcgtcatggtctattattcttgaagggccaactcactggacaattggtcttgttgcaaccttaatctctattagtagcatcattgcagctgacacgtatgcatttttgggtggcaaggtatttagtcattcaaagttcctgtaagatatcattatttcatttcatggtctcatataacagccttgattaatggagtttgctttaagataagcaagaattatattataattataatttttatgattgacattgtaatttt

SEQ ID NO: 328401 - DNA, 531 bp, Cannabis indica
actaaagaaagataagtttgcttaattaagaaagcaaaaaaatataaaaaaatgaactcatgggctttcataaaggggttcggacataaagatgattttaagctattggatctttcaaatcaacccatttagctctaatcctaatctaatgaatccctataaatataaaggattttgattcacataatgaccttagactctctcttgtgtgacaaaattgaatcaaagaaaacttataattttctattcatttatttgaaattctctttttcttcactaaaatttgtggtcctttggtttgagaatatgcccacacatgctaaagtcatactccgcatagtgagaaagagtgtgtagttcatactatcaactgaatgaaaattcaagtttagatcttgatcatactttgtaacagaaaaaattaagagctaaaaatttgaatacaaggagtcatattattgatttgcctgttaaggaatattttgttttctctaaaaaaaaaaacaaaaaacaaaaaaaaaaaaacgaaac

SEQ ID NO: 328402 - DNA, 675 bp, Cannabis indica
tatttattttttttatctattaattaaaaatacctttacattatatttcattgaaatatattcacccttgtgaaaggattgtctaatatactctcactttctacttaagtctagcatatcatttacattaacctaagcgatataaagggcatcatctataaaattttaaggtaaaaataaaaatatataaagtaaaatgggtacataatgtaatttctcattttttactcttgttggacccaatacattgtttctagaaagagttttaactattaattaaagatacattcatattatattttataaaaatatactcactgttgtgagtcatttgcttaatatactctcactcttcacttaagtctagcacataatttatattactctaaggagtacaatgaggacatcatctataaaaattgatatataaaataaaggtaaaaattaaaacaaataaagtgggttaacaatataatttcctctaattactcttgattgactttcttgtgttgaagctggtggatatacaatataatttcctctaattattcttgaccaaatcatttattggtttttgttgctccaaaattcgcccaatatacgtggaccagtcaagaggggacacgtggaacagataacttggaaagatttgctaagtctttttatgccaccagg

SEQ ID NO: 328403 - DNA, 762 bp, Cannabis indica
tttgtcagtacagactctgttatgtcttaaacaacacacatataagacctaaattttaaattatttggtctgtacgaaaaatatgtagtatcaattacttacaaatctttttttaataaatttaaaacggagcttgtactgacaaaaatagagaaaaattacaattttacaaacattgggtacttatgccactaaaaaaaatcactgggtttatcccgcttacaaactcaaaactttgggtacttatgccgctatttaccctattatatattgatattgtgtctatattacatacaaattgatcttgggtttattattaatttttctaacgaaagagactctcggccaaaactcaaaactgaatccaagaacaacacacaaaaacaaatataaaaaaatcacaaagttagggtttagagaaaacaaacactgcaaagaaaaacacctagaattattctcggagttcacccaaaaaagatgggttacgtctctatatattcaagctctcctcaaagcttgatatacattcataattatcaggtacaaatattacaactttcactctatgatttctttacagtttttctttttgattttcactaattttctctctttttcttttttgcaaatacaaactgaatcacaacacaaagtgctctctctctctcaaaagaagcaccttcacacttggaagactctcgaaaatggcttgtttcaaactgttgtggaatgtatccttatatagtgtaaagtcttttttgg

SEQ ID NO: 328404 - DNA, 802 bp, Cannabis indica
aggaggttgaggtagagttcctttgaggaagacggtcttgtttcgcgcaccaacggaaagttcgatatcatgagaccatgattgaaaattcttatcgaatagtagaggagtgactaaggtgagtcctggattatcaccagaatttaagaaatagggactcgaatatcttcatgaacatgttgtgttgttgcattgggcagaggaggagcaatgtctccggtgacagcagagaccggaggaatgatcagatgatttggaggagcatctggtatggaggatgaattgtttggcaagggagtttggccggagttcttggaatcagtagctcgagttctagccatgacagcgatcgtgagagtattttaagcgactaataacatattagaaatgactgaattaatttattgagagactcaaaacaaggtatatatacatgatattgttacatgaatcaagaaagggaaaatagaacttaacagaaacctaacaaccttctaatacagttagaaacagaataagtaacttaacggtaagctaaccaagcctctaataaaacattgttattttttttttcaatgattcttaatttttttcaattgtttataaatttaattaatagtgtcatataagattgtgatagtattttagttataaaattgtaagactttttaatattcttatatttttttttgtatggatatgatacatacaatttctaaatagatatttttgtatgatttttcgtaaagaaaaatatatttgttatattataatagatattttagattttttttaaattttt

SEQ ID NO: 328405 - DNA, 948 bp, Cannabis indica
ttatatcgcaaattactctattataatttataatttaataaaattacaaaatataaaatatatttatttttaacataaaatacaaaaaaaatatatatttttggggtttcttttataaatacaattattaaaaatgttaatcaattatacactttatttactttatatatcttcgagttttttctttaattaattttataacttctaacaaagcaagtgaatatatatttcaaaaataattttaagagagactaaagtccatagctcaacaaaataagtttgcaaaagtggtgtgactgtttgtgaattgtggggtagattgtgattctaatttctcctcaaaccaaagaaattagagtgttgtgagttgcggagtggattgtaattctattttcttcgcaattagaacaatgctagttgcgattctagttttttcgcaatcatgagcaatatgatgcaaggtgggttgcaatttttggtttctctataaccaaagcggtgtgagttagtggttgggttgcaattttaatgtaagtgtttttcaaatgtttagatatcattaaaaaaagattttttgtaagtaaattaaaaattatataaattatgttaatttttaaaatagcttatcaaaagttcttttagagaagctttccaaaagaatttttaaattaaatttttttttttactcaaacagttgacttttttaatcctagaagctaaaaaaaaaatagttcataaaaactaagccaaacaggacttatgtaaatgatttgatactagactccttatttttaagtatttgttgcaagttgttaagcttgactaaaatgacacatgttactatcactcaggcccggccctgggcataggcgggctaggcctgtgcctagggcccacccagcccaggggcctaaaatttttttttcctcttttaaaattatacatttt

SEQ ID NO: 328406 - DNA, 412 bp, Cannabis indica
tttagtcacaatacttattataattaaaataaattaataacaatttgtatttcaatactatattttagttacaaataaatttaattaagattaaatattaattgtatcaataaacaatacacctaccatattagtgccttttatatttctcaatccaataatcaaaatttttataataaggttatgacttgatcattaacaatatttattattaaatgtggtaggtatattgtcacatagaggatgaattattcagtaattatatatttatatataatacacaaccattcaatatttttaatgtgttgggattcattaaacactacaaaaatctgaccaaactgaaaaaggataataattgatggacccacggatggtttttaaatgggataatttaaaaaaaaaatacaaa

SEQ ID NO: 328407 - DNA, 827 bp, Cannabis indica
ttaaaatagtatttaccttaaataagatgtgaaaaaaaatatcagttactaattcacaagaataaataaaagaaagtgatatttattattaggtaaacttagctcatatattatattgtgtcaaattttatttttaaaatgtgtcgatttaactcacattatacacaactattacaatttaatcttattttataagtaaaaagtactaactttatatcacttgaaggggctcttatgagactaatgggaataatgggatggaccaacttgtatagaggagatgcaattattttgattacatggagataatgattttgttttatgattattattaggggtttttataaaaatattagattttagataaaaatttataattttatataaatattatctttttataaaataattgtaaaataataaaataagaaacaactgtagtttaacaatgaaaatttaacataatacacacaatataaagaatacacattattttttaaaacaattttgtctcgtagtaaaaaaaaattaaaaatttacagtatgtggtataaaaactcttattattattattattgttgttgttgttatgtttgttggttggtttttccaaattagctgttaaaccggtgttcctcttcttaaaaattctttgaaaaatatattactgtatgtagacaagaagataagtcaatgatcaattgttttattatattagttttctcatatgtatctatatttttattattaataatttttagggaaacttacaaatatactggattttgacttaatttttacaaaaatactgtcacacggcaaaaata

SEQ ID NO: 328408 - DNA, 1350 bp, Cannabis indica
caaacaaaatgatgatatagttgcttaggcaattgtcacatcagctccatgtatataatttaacattaaaaaataaaaatgatgattttttttttaacaaatattaaactaaaaattaattaatgattaaaaaaattacttaaaattaaattaaaaaaacgtgacgttgacatgataccgacgtgacaactgactaaacaaccatgtcatcattttgtttgtcaggtgtgacaaaacttgacagaattaaggaccaaattacaacattgtgaatagttcatggaccttttttttataagtaaagtgtgagactagtgtgataaccgaatacatgcacccaaacatgtaatttggcttaaaaaatatcacgggactcgaacccatatcattgtgtaattgtaatagtgtcatacaccccaactaactttaagtctatgcataatagtgataagtcatagatattgggggataaaaatcctaaatagcccatattatataaatatatataaggtatatgtaatctcaatagaggttctgtttcattcggagtaatataaaacatacaacaacgcaatattactttacatctgtgattggtcgggccaatatattaataaagtgaaaacatccatctttttcaacaagaatactagtgatgggatgaagcgtggtattaagcaaactcttgggttcagcatgggagtgggtaacattaactacctggatctcccgttattccgaagtcgtaagaaagatgtagattttaatttcatcatagataacttggtctcaaagttgcatgggtggaagttgaaatctttatctaaagctggtcgtgctactcagataaaatcagtgggactttctttaccagtttataccatgcaaacgatgaagttgtagctaaaatagacgacatggttagagatttttggtgggggtgcaaacaaggcaatcgtggcatctatcttaaggcctgggatcagttgtgcctcccaaagtctaggggtgaacttggtttttggaggactttggaaataaatcaggcatttctagttaaatggggttgggctctccttaccaaggataattcattgtgttgcaaagtgttgagtgctaagtacctaaaatgtatgtaacgtccccgcttcaagcctccattgggtccttacacccacggaataatggctcttatacacgagtacgtcactctggctgcttcatggactgatgactgaccctacagaccaacacaagtgtttccagcgtgctttgtcctcactcacacgcttcctgggaaaacttcccaggagtcacccatcctaaaattactcccaagccaagcacgct

SEQ ID NO: 328409 - DNA, 1405 bp, Cannabis indica
tttccttgcaagtataaatatcctgcttggcaacataaacaatatccaaaaaaatgtcagccggtgaaccatcagagaataatataagtagaccaaacttgtggcataatgaataaataaacactgttccaattcaaaatcaaacatattagaaagcttaaatagcttctcaactctatttcacctaaaattgaaaattatactccttaccaacatcttattactttcctaaattcaaaatttaaattagacacctgacattaaattatcacacacaaattcaagtgacagggtaactcaaaggatcagctctgtaattgaaagacaggccagtttgaatcagcatttaaaagtctggactataatttgcatgattacaaaagaacaaactcaagtgcattcgaagtctacaagttttgaggttgccaaattggtactccattttgaagaactaagtcgagtagttcaactctactccttcacacttgagcacttttacttaataatatcctgagaggctgaacttaggtaccagtgcagtacagcatctaaagttaaccttaccttgtcctttctagtttgaatacacactattaatcatgctcactttaacatgttatatgtggttactatactattactagcaacatcaaacaagagagtgatataaaactctcatatgggagtaataaagacaaaaggcattgctttaacatcttttcctgcttaagttttaattttaatgaagttctgggtatgtgggatggggatcactgctgttttaatagtgtcagttttttctccttatgttgggtttggtgccaatggagtcggacttgttttgtttactgttgaaatatgcagagttctataataccatatgaaagccttagccgcttggtgttcgaactgcccaagcactatcagctaaggccccacaaaagggttgggctgggcccaccaaaccaaatgggccgggaattaaaaaaaacattaagtcaatctaaacagtttgaccaacctagattcaatacagtccatcagattaaagtccatcatagatcttcaaacaagaatagaacatttttagagccctaaccatggatcctattccaacttgggtcataatcaaaacaagacataaaatgctataccttcaaaggggctaaaaatagttccagaaaatattaataataataaatatagtgaacataaaaagatgaaaaaaaggattttgatcgagcttgggcttcccagaaaataactccagaatacaagcccgcccagatcaaagaataaacacggatcgtcccaaagctcaaatttaaaattcagtcataataaaatctgaacctttcttccccaactaaaaacccaccacaaaacaaaagaaatatatattttc

SEQ ID NO: 328410 - DNA, 1082 bp, Cannabis indica
aacttctaatttaccataataaatatgtaattaaagataattgtagaattttttaaaaaagaaggttttgagaagttttatttattttttctaattctcatggatgctactaaaactgagtgtcatttactaaaaacttttcttttaaatatattttttaatgtaattactaattaatttgtcaaataaaataatagaaattactacactattcaaaaatgaatttctcaaaagaaaattattaattaggttctggttaaatttatcttcaatttttttaattaaaaaatgtgtgataaatttaaatttattaaaaaccaaattataatataaaaagaatcattttttcataattatttataaaagaactgcaacaaatacaataaagaattggactaattttttttttttttttttttaggttttaaaaagtaaaaataacattaaaaaaagtaatgtgttctattttcaaagttgggagtgtgattagaaagcagccaatttagcaataatatatgaaatgcaaatattttttcctctttttttaatattgagatagaataaatattttgaaagataaggaaggaatcttcttgtaagtgtcacgtttttgtgaattattaaaatatatgaaatgctttgttctttttgccaataattaaacaacactaaaattagcaatcaaagcaactaattaaacaaaatggttgttgtggtgtttgctatctagtgtcataacatataaaatattttagaactctattttgataaatgataatttaaatcttgtgttttttaaaatagtacaaaatagaccatgaattcaatttttcatttaatataatcgatttaaaactagtttgtaacacgaacagataaaaaaatatatacatacagtctagtcataacacctctagattaagttattattaaatgttaatttgacaataattaagttcaaggtataattttttttctattttgaaaaatacaatatgaattgtcatttaacaaataaaaggtcaaattggtatttttgtaaaggctaattagtatttttgtccactgaactttgacatgta

SEQ ID NO: 328411 - DNA, 1360 bp, Cannabis indica
tttcaatttttattttgaaccacaatcaaaaatttgtttctcaccaaaaaaactttccatttctccatcatcctttttttttcattattctttctataaatttctatataaatagctatcatgcattcattgtcttttccatctcctgcggtgaaaacaccctttttgaagaagcctattactaaaagttctaaatctccaataataggtgaaatcagtggccaaaaaatgtaaagggaaacaaactattgtggaagataataattctgacgaaaatttttgttgaaccagtaacaaagcatgaatgtcgtcctataaagaagaaatcgaagaagaatgaagttgataaaagtattatatcaaaagttaagaaggggaagaagcgtgtcgatggactgcgtaaggtttcattatagtttctttttcgttttgccttaatttatgcattttgtctatgttttttagtatttttatatgtgattttgattttagggtttcatatattttacttgttttgttgttttattaagtatagtgtatgttagattatttgttttgggtgttaggcatgtgatgtttatgtatggttgcaatatagtttacctactagttatgaattaggtctattacgtgaatgattttttattaatttagtatagtttcaagatagttttaaaaccgtttatattatcattatcatgtttatttttatttctctctgcacaattaggaatacaaattccatacttttgaatatttcaagtccaagtgctactctacttgtacttacagtgatattgacaacattaagaaaaaaataaataaaggatgtgatgacaatatttcgtgctactcaattctgtcatttcttggatattcatgtctgagatcaagcattgttcttctctgaccccatatatttgtgttgttgcattttagttgttgatgtgtttcagtatagtgttaactattttgattattgttttgttatactgactgtggtacttttgttgctgcatttactgaattctttatcatgaaaaagatgttccactggattttaatattgaagcttatcgcacgaggcttgctgtgcttttgttcgcatatggtaaaagtaaaaattatgaaaacattgatagtgaagatgaaaagcctaagaagtccatgaagaatgttcaagggaagaataagggtatgtgattggggactgatttctatagcctgttgaatgttattgtttatttttattaggggtgttcgcggtgcgggtggtgcggtttttaaccattttttcaaaccaacccgcacatgcggtttttctaatttcccaaactgcatccgcaccgcgaaactaaaa

SEQ ID NO: 328412 - DNA, 583 bp, Cannabis indica
gacgtggacgaacaacaagatagaggaagcagtttgggagatagagtcgtaaatgcagtgttagtaccctgagctattcaggtaattttttagaacaaaatttctataaggagaggatagttgtaatatcctaaaaaatcaaataagaaatataagtggaggtatattttattaaatatggtatttacactgtattaggatataataatttaatatttatatcgaattaattatgtgtgatttatttattgaaaaaaaattatgtgtgatttataaattaaattagagattattttattaattatatgtgtgtttggatatcacataattatctaatatatttattaattaccaacactatagaattgttcgagtagcgtagcaaaaggtcagttggaattatttggtgaaattatagattacattaatgataaattaaattagtagatattatagaatttatttatttttatttgtggggttaaaattttaagactattatattagtgggaagtttaaattatgataatgttcggaatttttttttttttttttagaatgaaatagcaacttcattgaatta

SEQ ID NO: 328413 - DNA, 607 bp, Cannabis indica
aatatattatttttttattttaatattagatggtattagatgactattggattggattggtcggttagattcattggatttacatgtcatcccaaccaactgatctaatattggatttttaaaatcatccgattcaatttaatcatgattagatatctaatttttggcagtcagttgacattagatcagtcggtttctcattagattgaatcatttctgcacaaccctagttacaggaattactacatcaaaaccatattcaatgtacctagaacgccattcaatccccatgacgccaattctcttaagtttcagggatcagtttatctaaaaaaagttttatttcgctccaaggacccaagacacataaatgaaggtgtacaacaaattaagatcctccggcagcaagttgcttttagggagtcaaaaaaagctgaaagggtaacttcagttactcaagagagactacagcttgtaggagcaaaatttaagcttatggattcatcctccttttggtgatcatggtaggaagctctagcatgcgttaatgggagaagtgggaatgggaatctgaaagtttactatgtttggttagatttttaatatt

SEQ ID NO: 328414 - DNA, 607 bp, Cannabis indica
aaaaattgataaaaattattaattttttttttcaaatcttgcattggaatggtctttccttccatttcaaaatggaatagtcattctaccaaaatagtgaaaaggccattctattagaatgatactccaatactttaaaatgcaaccaaataaagaaatggattaaaaattgtttactttcgattctattccatttcattgcctccaaccaaacgccaccttagtttctaaagtggcagttttaaggtgagtcttcatataaggtggttgtgtgtgagtgggtgacgatgggagctccggcgaagggtggtctagtaaggatattgtgtgtgtaggtatggtgtgtctttcctaaatagagagaagagaaaagagaaaagggaacaaagagaagagagattgttggaacaaaactaaaggttagttttctattatagcagggtataattggacaaaaaatagtagtagcataatccccaatgtgtttaatagatggtatattagagcatcttcaatggtagcatcctttaagaatgctaaaaatttacacataatttaaaaatataatattttattttatctctcttctatattatttttggcactc

SEQ ID NO: 328415 - DNA, 818 bp, Cannabis indica
tcaacactagtggtgtatctattcgagtgaaatagctgaacaaactcctgtgcatggagaacaaggctcgacatcaagatgcatgcccagtggcatttctcaaatctcagctccagcaacaagtgtcattgaacctcatgtaggtagtactctaatggaatcctttgctttgaaattggacaggatcaacttacgctacggaaaataatagtttcagcgatagttcgtggtcatcaattggatgggtatcttagatcatgaatgatcaacttcttctcttgaatggtttagataaatttataaatccaaaaatgatcatgaaataaatatgtgaaccaagaaatatattaaacaagtaataaaataattctgtttctttattgataaatgaatatttaagattacattgaaatagaattttagttagggtacaaaacccaacagtttcttgttccaaaattaccaggcattaacatcattggaaataggggtgtacataaatttttgtaagccgtccaacctgaacaaccaacaaaacagagataacccggcaaaaaatgcaaatcgaaaaattcgacgaaatataacccgcccaatctttatattgggcgggttgaaaataatatcaatccgaactaactcgaccaacccgattaagaaagttttttatatatatatatatgttgaattatatttagtatatatattttataatttatatacatatttataaaaaataaaaagttcaaactactatatttcttttatggctgatgatttgaactttaaattcaatctttatatttatctcattatca

SEQ ID NO: 328416 - DNA, 1136 bp, Cannabis indica
acatcctatctttctagtgctaaattatttatttaagattgaaggtaaagcatctctggtcaaaactaattctccttcaattttgaacataattgttagaatctccaacttctaacacttgatacaaattagtaaaagaattaattttatggtaattttaaaagtgttatggaagaaagtcaactaaagaattgtatgataaagcatggatttgcaaaaagcatatgatacagtggaatgagatttcattgaagaaatgcttttggcattcaagtttccaacaagctttgtcaagcttataatggtctgtgttagactcctaaattctctctaatgttcaatggttccatgcacggtttctttgaggcaagaagagggctgagacaagctaatccaatgtctcctctcttgtttgtcttgggtatatggaataccttcccagaataatgaagaaggtagggcttaaacaagacttcaaattccacgagagatgtggagagttgaagttcaatcatcttagttttgcagatgatgtattgttattttgcaatggagactacaagagcatttacttcatgctttagggtcttgagctattctcacaaacatcaggtttgaagctcaatccctctaaaactgttgtatattgtaacaacatgggtgatttagaaattcaaagaattaaactcgaactttcaagaaccagattcaagcaatcaagaattggttttaatggcttcaacaaggtttgaggtggacaagttcaatggtgcaactgattttagcctatcgagaatcaaaatgaaggcctttctagttcacctatggatctatgaggcacttgatgatgaagccatgaaaataattgaagacaacaagaagaaacttgagattgaagccaaatcacatagtgtcatcctcctcagtcttggtgatgaggttttgagggaagtttcagatgaagacaaggccttgaatctttggaaacaagttggtatcaatctacatgaagaaatctcttgcaaacaagttgtatcttaagaagaagttgtacacacttcgaatggatgagtcaaaggattgagaaagcatctagatgattataacaaaatcattcttgatctgaataatcttgg

SEQ ID NO: 328417 - DNA, 1175 bp, Cannabis indica
tgataaaataatttccaacattagtgacttaataatagatgtttgttgtcttttatcttttttctctaggattgttgtttctcatgttaagagaaatacaaaccatgttgcgcatggtttagcaaaatatactttgaaggtggatgaagatgtttgttggatgggtgatatttccaatctcattttctctgttgttgtaagcgattataatttataataacagtgaaaattttaaaaaaataaaaataaaaatagaccctatttcttattttatttattttttaaatggaattataacctaattgaatttatttaattaagctaatctaaaaagtgatttttttattcaacttaattcctataccttttatatttcaataatttaataaaatatagtaaagttatatattgcacgtgtgttaaaaattagtttaaaaataaatatacaagtcatacatatttttgctgaaatatacaagtcataaatatataagtaatcgattttgtgtccattttgtaaaatcacagattgtatttcgttgtactgtatagtggatcctacgtactttattattttttaaatttttttgtgatttttttatttatttgacaaccggttgttgtaagtttcttcactatttatcaattttcttttttaatttaaaataaaaaagcacaaaaaatgtttaatcaaatgacagttggtggtagttaatagtacaatactctagaggatgggtctatgttgtcggactaaggttatatttatcttttcagtccttcatatttttttatgtatttgtgtggtggtagtggagtaccttatatcacgtaccaagtatatttatagtttttgcataatgtttagtaaaaaaaagagcacaaaatatcatgtacctagtacgtgcctttatattttgtagtacattggttagaaaaatttattataactcatgacattatgtattgttatatcttgagttttacattggtatatttattttattttaattaggttttagattgaaaattatcatagaaatattgtattttcaccttatacaattggttttttcaccttaaataatttagtcgttcatcaataataattttaaaatttgttcaagatgagataattacctttgtaaagtcctttttttggcaagttaggtgac

SEQ ID NO: 328418 - DNA, 1157 bp, Cannabis indica
ttcaaacaaaaaatttgtaatctttaaaaataaaatacattcaaaatcttaaaaagaccaaaatcttaaatgaaactagcaatacgtggctcggcacgtacatttacctagtatatatatatagattattttaatacatggccatccttaattaaacagctaggatcgatgtatattatggactattcctttgattttaatttcttttcaaatactaaagaatggcattaattgatgaatattatattagacatatgaatttcttatagcatcaaattttaaggaagtttttatatttttatatatactaattataatgttagtgtcactaataaaatcctattttattttttagaatttggaagaaataatagtatttcatcaaatagtttattataaaaaaatttgtggctataattttatttatgttaatctaaaaaaatataaattctagtctaaaataatataaaaaattgatcatataaatcttccttcaaatacgaaattactaatattttatatgttaatttcaaccatatatatttatatatttatttagctagcttaggtcggtgggcgctggcttatgaccaaataatttttattttttcaagcaagaaaatcaagaaaaaaaaattaaattagtaaggcccgagaattttttgatgccaagatccccaaattctttcggcttgcagatcgaatcccaactaaccagagccaggaagcgagtcttatcagagcaaccaacccaccagaacttccgcattgcctggtccaaatcgtcacagatactcttaaaaagaaaaaaagtagacatgcagacagagatacttacaactactgattggatgagagtagttctaccaacttggaataacaaccttaaaaagtgttaggcaccactatgttcaattaaattacacactgaaatgtcacttttaccagcacagttcgctactgtgctggtaaaagtaacttttacaagcacatttcgcaaactgcactggcaataaggtcatagttttaccagtgtacattcggagtggataaaatctaacttttaccagcgcatttacgcgctgggaatagtcatttttgccagcgctttttattttatgatggcaaaagttttaataccaacattgatttgccaa

SEQ ID NO: 328419 - DNA, 829 bp, Cannabis indica
aaattttcttaaaaaaaattaaaaaaatatacatgagttagaaaaaattataaaattaaaatcaaaataagtattgaaattaacataaaataatgtgagaaaaaattttaaaaaaatattaagagtaatttataaaattatttaagtttattttttttaataatgaggtgtatttataattttatggggtgcaaatataactccctttttccttcctttccttttcctcttcaaataattcataaccttaaacatgaccattatattatctgagatgaatccacccttttataaatatactttgattatccaacatgataccaagaagaataatcttaattaagatggttggccaacaccttagagaccaccttatatagaacattacaatgggaacttggtcttaggtcacccatattaaccaactgcttcttctttagaattcactattacaaatatcataattagcgacggtccttaaaataattttttttcggagaccgtcgctaaaaaaattaagtaactatttaaaatcgtcgagaaaaatttagtattctcgacggtttaaaaccgtagtaaacaaaataggcgacattttttttaatataatgaaattttttaatggagccttatacccgacggtttaaaaccgtcgagtatagtataggcgacggtaaaccgtcgcctataagggtccattaaaaaatcgtcacttacttctcgccacattttccacgtgcccacctacttttttttttctatttcccacatgccacctatttcttctcacttaatttcttctccatttcccacaccctaaaactgaaaa

SEQ ID NO: 328420 - DNA, 507 bp, Cannabis indica
gacatcccagggctcaacttgggtccagcatcagtgttaggcgcctaggttgacatcatgtgtgcattcttgggtatcttagatgctcctcgttctaggatattgataatatcatagcaaactctaacctatttgtcccgggtttgaatgcttctatgactatataagatccctccctctctcattggaagtctctaatgtcgctttcttggtcaatatcttcaaaggactcatatgacacattttcactgctgctcccctattcttgatcattgttggaaagagagggagaatcttcttcacttcccccttgtcttgagttttcttggggagtaggggagattcttcgtcaatgctctcccactcaagatcatattgaaaaacagtaggggactcatcatcaccctctcgctgctcgagttcatcttgggaaacagaagacaagtttgttttaatggaggcattaggtgttaatattgggttttgtgccctaaataaaacccatta

SEQ ID NO: 328421 - DNA, 778 bp, Cannabis indica
ctgagattctggcatttttcttttatttttgagatttatgcattcagatgttcccatattttgttttctttttggattttattacacatattttgtttttatttatttaatcttaatagaaaccacattaaaaataactttatgttatttgttttttcgattaatagtagagcgattaattggattggtgagacaattatttctaaaatttggcttttttaaaaaaagtaaatgtggtatttttgaaaatggtttaaacaatatgtatttttataattattattttttttagccttttaattaggttagtgaccatatataagccagcttaacatagtctttttggttatgtttgcaaatattgtatatgggaaaattataaaaaattaataagaaattaattattgtataaaataaaatgaaatgcctgtatttttaaaaattgtaaaaatgtttacaattttgtaaaactgtattttcattaaaaaaatttgttgtttttgtgaaataatcgctagttatatactaaatgaaattagattgtttattttatttaatttttatctttattttatattttttaagatataattacttttatacgttttcattacattttaataaaaaaactagggataacttgaagaatacctattttttgtgttagtcaatcaaaactatcagcaaactataatcatttaaattatactcacttttataaggagattgcctaatatacccctacattaacattgaagattgaaaattaagtctttct

SEQ ID NO: 328422 - DNA, 876 bp, Cannabis indica
atgaaggtatgatactttttctttttgtggttctaattttacttttagaaaattctatctttagctgtaatttggcttatcaaattgagttttttttattcttcttttattttcgtggtaggattttaatggaaaaatataatttaatagttctaccatggtaggatggtttatagagtataccaaaatttaattaaatgatggtaattaaagtgagaatcatcaattcatgatccaaaaaagtctataaggttttttaatattattattttttgaactatatataattgcttcttatttttttttttattctacttaagtacaattttgtgaggagcgttttatgttttatcttgaaaaaagaaacacatacatgtttatgtaattttattaacttttgaaatttttttgtattctatgtattttattaaatttatatttttttaatatatatacgcattacccatttcatatcttaataataatatttatttttaatttttcaaaaaacagtgcattgaaatttatatttaattttttatttattaattaatatgtttgttatataatgatatacatatgttttgtataattataaatataatttaattttctaaatacattaaataattgaatttttaatgatccatttctaatgatctttatatcattagaaagattaaatttgctaaaatatttatgaagacaactttcattgaattcctgtagttttctgtcaaaaatggtattctttctgctatactgtaaaagtatgaattttaatattagggccttgactcatgtcttattataacgagataacaaatattaagcaactggatttaaggtaatgaaattagatagttttgtatgtgt

SEQ ID NO: 328423 - DNA, 649 bp, Cannabis indica
tgttcttcagtttctggttgcctcctattctcatttctatgagagggttctggctgatcattctaattttcaaggggaatctcattttccctaggttgttcatcctggacattttcctatctcctagttcgtgagccacgaggcctgactcgtgatcttttcactctaggttcaagttcattttgagtgttagtcccctatgccacgctagctgcagctgcatcacgctctagttcattgttccaccgttgtgcctcctccatgcggcgtctaaggcggtggttttatgtttcataagtgttctctcccataggttgagtatcttcacgattgggtccttcatcccttattccaggattctggtcattcctttgttgatttctcctcgaacgtcttgttcgcgtactgggagcaacgtcaagatgggtcctcctagaacgagtggtccagtgttggggccaccctcaggttgagttctcctagagcgggtggtctgtctagactgtgggttggaagaccttctggagcccatgggttctttcctagaatggtgatgagtttctttgtgtggtgtattagtgtcttctgggttttcagccatgaaggagatggtttttctataaaaaggagggttttttctaagcttttt

SEQ ID NO: 328424 - DNA, 539 bp, Cannabis indica
gaaaactcaatagaatcaaaacttttacgtggtatattagccttttaggcttttaaaatgtgttacaggataagtttcacaataaaaatcttaattatgcctacccactttctaagttttttttgaggaagaagaaagcttagagagtattttatgcccaattatttctaagttttttctcattttgtgtgtgtgtgtgaaggggtaaaatggtttatataggttagagtctgggtccgagcatacatttggcccgccttgatcatgaatctgagcacgatacaaaattactagacttgcgggccgtgtcgggcataccttgtaaaatttttgcacaacacaatatgacatagattgtatttctttttatggcataacacgacacaatctgtattttaaaaagttttgaaaaatatgagtcgaacgagcacgatagatgcatttacaactatgttcgcatgttaaggctggggttggaaggttaaaattgacatcgagtataaaagttgttaaaaatgaaaataataaataataaataa

SEQ ID NO: 328425 - DNA, 702 bp, Cannabis indica
gcaacttattgacccagatacttatgagtaagagcttgcaactaattcgacccacatacatagtaaaacgttgtagctaattcgacccacatacttgcatggtttaaagggtgatattaacattcattcatcttgctctttatgcgttaaaatgaccacctcactaataccttctaaaatggtcaaagagaaccacaagaagtattgtatctctacacttagcgtttttcctataaagacattaaagaaggataatgtatactaacaagaatcatccaatacagttagcataactttcaatggataaagacaaaagaactgttatctaatattatcccatatgcataataataaaatgtgggggatgttcacgtttcactctacatatctataaatagggacataattaatggtaaaaaggacaaccaatcgagaaagagaaaagaaagcaagatattattgttattgtattatgtatcaaaatattatatctaataagatggactcatggaatatgaagaattaatttaaaaaccatgttaaaaaatttatgttatttatttattactatagtcaattctgtagtttatttattacaaaaatgctaatatttttagttaacgaaaatctgcattaacagtttggtacattcattgagagcctttgtagtaaaaactctgaaaataccctccacagagacac

SEQ ID NO: 328426 - DNA, 507 bp, Cannabis indica
gggactaataataaacaatacttgccaatataagttttattgggtctacaattaaaataccacgttgattagaaatgggaaagatcttcaatatataagaatggacattatctccattggaatgtgactttttagaaaagtgcccaaaaaaaaatttgtaagggcttaggccagtcttcgacgatcctaacaggtttcatgcttattaacttttacaacgggtgtttttatttctacttagtgttgactatattcattgataatctaatgttatactcctaaatttaatttaaaatttttacaaattaaaataaaatataaaccaattaattaaaatacatttatagttatttttttaaaaaatgtaaactaatttgtatataatctagaacactaataataaaagaaaataattatgtatacatacttgaatgatccaacacaattagcgcaatttgatagtgcaatactatcaactaagtcttcctccctagatctctaagtcag

SEQ ID NO: 328427 - DNA, 303 bp, Cannabis indica
gtgcaaaggcattcctggctacacgacctgattgttcacgtacttctagccatgggtcttgttcggatactagttcatataagttgtctttgagaattagaagttctatatctactctccagtcgtatgttataattttttagggataattttcaatgctatattgttggtgtggctcaaattaatattgaataaactataagataagttctataactagaatagctattattttttctaaaaaaatatgtatctcttgtttggccaagtgatgtcccttagcatcaaagacaaggacattac

SEQ ID NO: 328428 - DNA, 971 bp, Cannabis indica
acaaaattaatactcaatataacataatagatttttttttcctttaagagtaacaataaataatgagaaaatttcctaaatagaaaataaacaaaattgtcaagtactttaaccttattatagaatgtggggtccaatcatgcttgtggtggacactcaaattgtcttctcaatattgacaaataacaagttgtagttttttatttttattttttttaaaaaagaatttaattatctaattatgaatggtttttctattttctatatttttttcctttcaaattttacacaaaaaaccaaaagagttttttctagtgacaatttgaatccacttgtcacttgtcacacttacatgcgtgacactagacttttccatttcatgagaattaaatataatttaaataattctttttaataaataaataaaattaaaaaaaatcaacaatacacattcttaataaaaatatacccaaatattcttatttattttagtagaattatttaattttaactaacaatattttcaatattgtaaattattttaaatatctcaaaattttatataatatcttaaataattataatgtatattaataaaaaaagtttaaattaaattttttttagatatcgaaacagatagagaatgcatcaatgtatatcattttaatgggatgagatgcattataaaagcacccaataaaatataagtcttaattacaattttttagtcaatcttcatatacaaaatcatatgtcgaattatcttttacattttttttatagtagtatttttcataattaatataaatttttaaaaaaatctgaatagtttttaacgctcaattattcaaattttttaaaaaaattaaaaaagataatattgtaacaataaaaaataccactataaaaaaaataaaaaaataaccactaaataaaacaaaatcactaatggggtgtttggaatgggttaa

SEQ ID NO: 328429 - DNA, 567 bp, Cannabis indica
catctatgatttttaatttaagataaaagtaatgatgattttttaatctaggataacagataagtgaaacaagagaaattttgttgggttcttatataaaaagtatggtattttttaaataagtaaaaaaaataaatgtactttcaaaaagagaattttttttaaccctttcccctaagtaaatagacctcctactttagattttttagaggttttttaataaatataaaaaaatatattagagtttacttttttattgtataaataaataatgcaaagaatatgggattaaaaattaatttaagtttaaaatatggaaaaaaaaataataaataaatttgataaaacttgtaataataaggtccgtcaaaaagctgtcgggaagtcactgtcgtcagaacagttattggtaccgaaaaagtcaccggaaaaatcactgtcgctgaaaaaagtcattgaaaaaagtcacaagaaataaatgtctcagatataaacaaaaaatagaacctgttctataacataatgaaataaaaaaaaataattcaaaactggttataattgaaatat

SEQ ID NO: 328430 - DNA, 1108 bp, Cannabis indica
ttacatccaattctcatggggggtcatgagaattggagagtgtaattggaacccctcaattacttctaattacacagagacagtgtaattacatggtcagacaaacatgtcaaattgtgtaattacctccaattacacgcaaatccaattatattgtggctttccaaacgcaccctaaatgtttagctaatgtttttattaaaaatacaaaaaataataactttcttattaattttatgattactttattatgtaaaataataagaaaataatataaatactcattatttaatgttacagttaaaaatattaattgttatccgtatttctagatggaggacatgtgtaattctaagatggttttagctaattgttacaggcccaatcgcaggcccaatcaagataatggacggaatccattagcgaagtcaagccgtccggatgttggacagatgacacgtccagacatgatacacctcctgcacaacgtctcttcggtgtcattgggtagatcttccgaatgagtgactaatgggcatatagatctttagcttcgtatcacaacaatttattgccaaattctacaatatcaagactttatttccaggattatgtccatgattcgtatcttctaaataaagaaataaagtaattatccatcaagcatatatatgtctttattatccataacagtaggatacaatttgacaattattaacgtgaagtggcttccacatcagctaaagattaatgcttcatgggccaaactttatcaaataagcttaaagttaatgtattacatatatttacccgatcagagggcaatgtgtacatattagaaccttagcgctataaatataagaaaactcatttatgcaaagggttagaatctcattacttgagtgctcaagataattcaagggttcaaaaatttgtgtaaatcataaaacttttccagtcttaacataataatattgactcacggactataggtgataactctatgaaaatagagttatttatatctttttgggcattgaattagctttgttctcgagtatttttagtttattttagtgacttttatttagttttatttagttttgca

SEQ ID NO: 328431 - DNA, 749 bp, Cannabis indica
cagttattatttaaaaatcatactgctgtgatttaaactgttttaaaagaagtcaacgctggcgtggattaggacacactgccaaaggtatctcgctgaggtgtctcgcctagtacatgaacaacttagtttattcataagctttctagcaatggcatgagcaccagtgtactgagcaaacttaagaactactctttgactataaggcctggaccatcatgtccttcaagttacttcacttagttgttatcatgtatatcatacgctaaatgttctaatagtcaattcgcctcgtcggtgcctccttacatattgcgaggtcgatgcctcgctatgtgttgtttatgtcttccttgaaattatgccttctgacgcaaaatagtttctcgtcaatatgtgaatcaatagtttgtacatccttgtctcgctaaagactgtgcagtttgggagttataaatatactctattgattttgcatttaatgagttattcaatttaatatttattgatataattatcaatatattcgttgatttatattccctaagattgacatgtgtcaccttctaaagtactagtcgaattttggatatagcaattcccccttaaaaagtcctgttcaatgaaaagtactttttaaatgttactgagggtatatttgtcataatccattttgaaaacatgcatgcctttgattttggcggtttgtggtttcgagagacatcattagcattaatgaaccatccttt

SEQ ID NO: 328432 - DNA, 517 bp, Cannabis indica
cagtatttcatgtgtctcaactacgagcagtcattggcatgtcgcactcctctcctaccttgccaccaactctaacaacggatttggatttgattgttgaacctattgcaattcttgatgtgcaatggagcagactctaattctattattgaggtgcttattcagcgaaagaatctgcctttgttcgtagccacttggaaaaaatttgacaccatccgagctcaatttttgacatttaaggacaaggttaaagaaattgtggggtggggtggggtggggaggggggtaatgttagacccttggttcgcttcacttatgctaggagaagtaaaaagtctcactagaagtaatttagagaagtaaaaggtctttagtatatttattgtgtgattattgttggctttggtttggcttggtgagtgtgtgtgagtgctatatatatgtgttttgagtgttgtagtgggtatgcttgatctagttgtttgtttcagcaacaataggagaggctcaggctctc

SEQ ID NO: 328433 - DNA, 508 bp, Cannabis indica
ttgatagtattgcactatcaaattgaattgaagtaattgatatgtatcgaattgaagtaattgctatggatcgaattaaggtaattactatggatcaatcaggtacgcatacctaattattatatattattattgtgttctatattatatacaaattgatcttggtctattattaatttttctaacaaattgtttaatggagccgtacataacagataaataaataaacaaatatattatgcattggattcggtggtccaaataatagaataaaaataaaatgttgtacataaatacaaaattttgttattaattacttaattagatctatgcatgttaattatttaatgctatgcatataaaataattaaagtatttatagattcataagacatggacttaacgacagcacatggaacaattgtttccaaatcatgactttacagaccataattaatattatatatgaatatgattttgtcaaaacaaatttctttttttttttttt

SEQ ID NO: 328434 - DNA, 824 bp, Cannabis indica
tatgtagtgtaattttctcatataattttctctttaagcttgcagctaaggcccacttagtccaagagcttaattttttttctttttttaaaaaatatacatagtttttttttactgattttaaaaataccccatttccttttaataaagctccatttatttttctataacccactaaagtccattgctagattgcaatgaaaacatatcataacaaggccgttccaagtaatacgtactgattaaaattatttataaatttatgtatggtttatctaagatttccttttatataatattcattaagtgacaattaaaagagacacatagttcatttgacaaaaatatttatttttatttattaattaatcatttttaacgttaaatagtaaaaagcgatcatttgttctacttttctctgtgatgatctaactcctccacgattatattaccatcttcttacagtttaatcttggatcaaattctctatataagtcctattagaacaacagaataatgcatcctttccacaacaaaaattctacaatttttctcagagcaaaaacttagagtgtaatcgagtgatatcgttcggtgctgaaaatattgtatatagagactgttttatcttagagacaccgtggtttctagactgtcgtacacactttgggcagagccgttaaagaaagtgacatagtctgtgactcaaccaggatcttctttcagtaattcattctagttttatagttttaaattcaatataacaattttaagacgttctgttctgctatagctgctattgatgaatttttggtttcactttt

SEQ ID NO: 328435 - DNA, 494 bp, Cannabis indica
agggagtaaaaatactaatttttaacggtaaaagaagcagaacctaacagaataattatgtaacactgttatattttagggagaactttcagcatgtcgtatattttaaggggcaaaatcaggtagtgccacaaaaatgctaattattctatatacatattaaggaaaataaatataagtataaacaaggtcggccataggttaaggtgagttaggccagtgtgcttagggtccaaatgaattttaataagttttaaaaaaaaaccattattcgtccaagaattttattttttctaaggcccaaactcaatactggccctaagtatagtataggaattttatacttataaagtggaatgccatttttaatatttcattattaatattagttaacaagcttcttcacattaaataacttgtattattattattaaattttgggtaaataccattttggaccctgtgttttgcaaaagttacagattggaccctgt

SEQ ID NO: 328436 - DNA, 1187 bp, Cannabis indica
gagcttgattagaataagagtaggctcatgaatcatgattaagatattgagtgagggcttttgtgaattggactttaataaattgagcaaagtgaattaatatatgtatatatctacatataaaaaaatttgatgtatatatttgagtgagggctttagcccacacatgggctaaagtccctccgtccctgttcatgtatataaaatagtataatataatttttgtcttttatgatttatctatgttgattaagtttttatagttttttttctcattttctctttctcatatatataatttaacatggatatattatttttaattttattatttactagacattttttagaagactattaccaataaatacgtagaaatttattaattaattcataatttaaatttaataatattttatatatatatgcattatcaattttcttgaagaataactaagcaggcctatccatttttggggtcaatattatatataattaatagggtatctagtatgtatattcgagaccatgtgcttcgtacaccaaataaaaaatcaactttatatatatagtattaatatttatatatatatatgtatatacgtacactagtagttatttgtattctcactgtatgaacgtatttttaaatttaggtatgggaaatttaacgtgcacaactagctataatcaaatacgaaatcccataatctcaatatatttaaggcataatatataaaattatattgtttcacttttttccgtttgggtttggcaataatggatatggagtgtgcaaaaaaaaaaaaagtaatagaaagcaacgtcatttaataattaggtagaaaaagtcaaatagtaggacatttggaagctctcttaagtgtagtcaattattacgaatttaactatgtcattgttaattaatatttttttttcctaaatgatgagatttgtggtcggaaactgatcatattgggggacagtcttaataacttaaatttgttaattaatatatttcgaaattcagtcatccctaacatattattgtttgacttcaatatccagccaccagttaaacagtggaagtagctagaactattcatttctcgtcctctatttctgtctcatgattaaccaatatcaccaacagaaaatatcaagtcaaacttcatcaattatattga

SEQ ID NO: 328437 - DNA, 1199 bp, Cannabis indica
ttcgatatctcaaaccatgtatgttgcatcttgcaaattatgtcatttacactcaactatctcatttataaaacacctatatcgagcaaaaatatctgcacaaatcaacctttcaatatgctccttaattctctcatcattaaactcaagttttgtttgtaaaattttaagttagggtttaaagggaaaattgggagatattaaaattattcctctaaacattttgggtttccgttgtcagaataaaatagcgacattttattttcaaaaaaataaaatgtcgattatttccataaaggttaggatacaaattcgaaataaaaaataaaaaattcaaattatatttatccaaaataaaaccgtaaggaaaagatccccaaaatctaaaaggaaaaattaaaaataatgcaaaaaataaacaaaactcaaaggacccaaaaaaaaaaaattaaaatgagtaagcacttagtagaatttgggattggagagggtttcagtgaatacttcacttgaaacttacgataccaggagtttggtatgtaccccgatctcgacttcaaaaaaaagatggaaaatgtaagggaatataaggaaagcagagagggcataggttgtgaagaagggaagagagaagtgtgaagttcaaggagctttcgtttcccttttttccctaaaaatggtataaatgtggaaagaagaataaaaatttaaaaattatataaggcctcacagaaaccattcaattagatatgattactaatcaacggtaatcaacttatgaggcatgtgaaaagactggtgtgaagacattaaagggatgtcttagaaaataaaaaccactaaaataaaagtgtattcaatacacttgactatggtacgagttcctatgtggcgtatcaaaagtccatttgaaaatcaaaggcacttttgagtgggaaattattacccatttttcgagcataaaaatgcataactggtcgcatgacatgtgcacaaaataatcaatgaacaagattgattttgatcgcataataattactcaaagataattaaattcctcaatatataatatctcagtaatgttgtcaccaagaatgagacaactaacaagggaaataatatgtaatgatagaggtggttttcacaaagacaaactatttcttatttcgaataatcaaatatctttgtagaagattaag

SEQ ID NO: 328438 - DNA, 503 bp, Cannabis indica
ttatgtaacgtacttttttcttgctttgaaaaattctcactaaaactatctttaatgtatatttatttaattaaattcaatttcattttattatatatgtttcatttatatattttatttccatcatatacttttgtgctaatcttttttccttctctatcactataagcttgattatatatcaggagtttgaattttctactttgatcatctgattaattttaacttaatctttcaattgagtatatacatacacatacacatatacattatatatagcatatgtatattatgttttagtgaatatttctcatgtgttgattttaactatttttcatgtgtgtttgactctataacatgcttcttttgtgttataatttataactccatttatatatattctattattgttgataaccttcatcacgatagtctcaaacatgtggaggtgatattcttaacaatagtacaaaaatacttccagctggccaaataaacaaata

SEQ ID NO: 328439 - DNA, 688 bp, Cannabis indica
tttttgatattttttttaattaagtagctaaattaagtatagaaatttaaatttctcttttattattcgctatgggactaagatctaattgtttaatatttttaaaattaatatttatagttaaatttattaatgagtaatacccattaagaagtattccaatatataaattaaaaaattgagtgtctattttccaagcaacttctgcaagtaattaagtcttggctaggtaatgttatttggccagaatcttaccttgatttattggcgtggttgaatactaaacgtgatcgtagcatgcttaaaaagattattgcgactacgtgcgacaacaatttattttatttggtggaactggaatacttatactttttagcaaaaaatatttaggatttcttatgtgaataatctaattaaaatagcgctaaagcgagattatttcttattgataggaagaaaatgtttaaaagtgatcaataaatttttgattttgtttgtaatatataagtaagtcgatctattactgaactgtaaatgctggtttgtgtagcttttattctgttttgattgtgtgtttggaagtaactgtgtaattactagatggggtaattactagggtggtaattacacagtttagtaattacactatattttaaaattcaagatgcgtttggatatgaggtggtaa

SEQ ID NO: 328440 - DNA, 719 bp, Cannabis indica
caagtgctttcgggaaagaaacggatcgattagagaccagaatagggactcaatgcccaaattaacattttgtcaaccagggtcatttccatcagtaattcaaaagaattattttgggcacatccttcgttctcatcaaggattaagatttgggtgctttcgagaaacaaacagagtcatttaggagccaacactgggactgagcaccaaggtagacctacgtactgggcccagtgcccaggttgacattttgtcgacctgaggtatttccaatcagcttttagagaagtctttcgggcatattctctgttttgacaaataattaagatatgagtatttttcgagaatcaagcagaatcaactagtggcaataagctagaaccaacgcccagattgacgctggtgcttggtacaacgcctaggttgacattttgtcaaccttgctatttttagtcattttcttgaaatgggtttcgggcaccttttttgtcttcagatgaggacacaagtgagctcgaggagcaaatgagatcttctgggggtcaaaacagggacccagcgcccaggttgactggccttacgcccaggttgacatcaacctagttcgcatgaatctactcctcaaatgaaaattctactttgggcattcttcttattttggtaaaaaaattggataggatagctcattcacaatcttgaatgccttagaagtaccaaaa

SEQ ID NO: 328441 - DNA, 1053 bp, Cannabis indica
catttaatgatttttttgacattaccatctatcattctcctagaataactaatgagttgttcattaatcttgtctagggatcaagtataattttttgtgctaaaattcttgtgttggccaatgccattattcaataatgtttatgacacttttcttcgttggttttgttcttctaggttttggtgagtccaagtattttaaaaaataataacatataaatgattgttaattattacaaaataaaagattataggtttagaaaaaatcttatatattccatatgtattacagcttaaagcttaagattattttttttttattttgttctcagtaatacagcttagaattctagtttgagcaaattttataaaaagataaatatacacttttttttttaatctttaaaatgatttttattaaaaaaaaatagtttgttagtttttttttcatgtgttttacactttacttctttaataaaaattccatatataatttttttttctctattaatagttttatttattttaggaatatagagaataaaaaaataaaagaaagaagtgggaaaataggacatattaattttttaatatttaattaatgattataaatatcaaccattatatttgatcaaatggtcaataataaaatatctatatatgggtaatacacatcaagagcatatatgtgtgtgcttttaatgggtattacccataaatgagtatttaattattgactattggatttgatcaattggatgacatttattgttaataattattttttaaaaattaatattttttgttttaacttattacctgatgacatggcagtcatcttatttttcaaaccacattctttgtattcccttttcattcccaaatgaatgaaataattatttggcgtttggtagtacttttttaatctatttgctgtttttaaaatttgaaaagtaaaaatatttttcaaaaacatattctataaaactgttttcactttttaattttctaattgagaatcgaaattttaaaaataaaaaaaaaatcactttta

SEQ ID NO: 328442 - DNA, 971 bp, Cannabis indica
gagattttcgaattcttttctcaacaaaaaagacttcgaactttacttttacataattgtgaagggttgagcttctcaaaacattttttgtccaagtataagtgtttacgagctttgagtgtacctaccttggaaattaaggtgttgccaaggaatctgtgtgaattggaacatttgagatatcttaacctttcttgtaatgacaaattaaaaacacttcctagctctttagtaagattacagaatttgcagactctgaatctagcatggtgtagaaatcttgtacgattacctcaaaacatgaagaaattagtcaacttaaggcatcttatgattaaacattgttatagtttgagagagatgccccctgaatttgggtatatgagttcccttcacacattagatacatttgttgcatctgagttgagtgggtttcatgaattgagcaaccttattaataacttagaaggaagcttaacaattaaaggactcagtcacacacaaaaaacaaactattctgcatcaaaaataacttcaaagcgagtcatttgtgaaggaaagcatagtcttcaatttttaaagttaaaatggacatatgtaaacagagacgaaatgtcacttgaaggtttgcagccaccttccagcctaaaagagttgaaggtgtcatgtttcaatggtgtgacatttggaggttgggattcctcatggaataaccttgttaaattgaagttgtgggtttgtaacaggtgccaatatctcccaaaattagataaattatgttctcttaaggagcttgagattcgttgggttaaagcagagtacatgtgctcctctgtagaagatgatgattttgatgccaactcgttctttccatccctggtaactcttcaaatttgtatgtgtccaaatctcaagtggtggtggtggaaaaaggaagtggatgggaataatattagatcatttcctcgtct

SEQ ID NO: 328443 - DNA, 929 bp, Cannabis indica
atttattttctgtctacaatataaatgcataataatatattataaggtctcaaatattactaaaataaaaaaaaaaaaaaaaaaaaaacgttaaaatgattttcacttgttgtatggttcatattattttcttttttaaaaaataccaatttcaagcttttattgtcttgtattgttaaaattgagcaaaaaatatttaccaattcaattattgaaagtaaaaattacaaaacacatggaaacttaattatcattttttttaaaaaaaattgtatgagtggaaaattaatctgtttggattaattataaattattgtaatagtcctttacagtctatttcatttattttcatccaattttttttataagtaattcgataatcaaacgatctattatttggtacgttattcttattcacattttggtagggagactattcccgttagattaaggactatcatattagtctatttatcttaatgaagtcagcaaacttttattaaaataaaatgcatgagtgcataaatctagcttaattaacatcaacaaaccacttatccataattattagaatttgcttccttaaacaaaaaaaatccaattataattcaatacaaatttgtattttaagttgaaaatggacagatttcaaaacaatttgctcatgtataattgatgtggtgctaattaacttcaaataatgtaattattatatttaatattaaaaaataaatataaatcattactcttaataacattcttaaagaaaatagtgggggaagtaatcttttttttattattctatatttaacaaaattcttagttaagacttaagagagagtaatatttggcactattttatcacaatattattctagtaacaaatgattctcttctcttatttattattatgggtaaataccattttg

SEQ ID NO: 328444 - DNA, 1120 bp, Cannabis indica
tgtttactcaattatatttatcttataataaagttcttaaaattaatttaaactatagaattttttagcttgaaatataaataatacatttttatttttttaaatttaattatttgaattctagaaactaacaataataattataaaaaaaaagtgaagaacggtttggacgggttaacccgaccaaaccgacaaaatcattgggtgggttgaactttttctaaattttcattgggcagattacgattaaatatttgcaacccgatatttatattggattaataaaaatatgcaataacccaaccaaaccgaccgacatacatgaaggtataatgggatatttatagataaggatttagatccaggcatagtacttgtgacctcctaggaaaactgtacaaactagacttactatttgggtaaatacataaaatacatgactttaaggcccatacaggattttagctcgtggggtgaaggtttcgtatggatggggctcgtgtggtttggaacaggtgccacacacacagtaatgtatttcttttggtggtgtgcgcactaccatgttctgacataggagacaaaatctaatttggtgggaccaagtgtcagagggcagccacatcatccctcaaagggcttccaaaggcgcctcttggagttcccctccggatgcattccagtgctccttcggaggtcttcgctttttggaaggctagaagtcttccaaatttggaggagcttcgtctttggagacgaggcttttcagcttcagataggctcgggcccatcttctctagattgggccttccttcatggaagggctgtgactcaggccattaatcatactttagagataccacgtctcacccttttctggaaacacgaataataaatagtaatattcattaatatatagaataatctatatactatatctataaataaatttaatctgatactatatatatactacaaaagttcttacttttagtcacaataaaacttgtgactaaaagtaaaaaagttgtgactaattataaattatcattcatatgttgtgattaaagatacgtaattaaaattattagtcacaaaattataatttgttgtcactaaa

SEQ ID NO: 328445 - DNA, 1122 bp, Cannabis indica
cctctaagccttgatcttttgcaagcttagttttcttcagcttgtattgataagatcattcatggtatcaggaagccattgacgaaagtctcttatggatcctaccttcgtcgaaaacccacctcgcccctctggtctgaatcaagggcacttcaatccaaacaccccaaacccaaacacttggaatccctttcaaaattcccccagttcttctctcactgtcaaattagatcgctccaatttcctggcttggaaatctcaagtcattcctactgttatcagccatggattggatgatatccttctcactgggattgctccatcggaaaagctggtcactggtgaagacaatccaatgtttcttgcttggaaacgtaaagatcaattactcctcagcttgcttcgttcgtcaatgtccgagacgattcttgggtctcttgctcaccattccacattgtactctgcctggcgagcgttggaacaaaggttcgcatcccaatcaaaagccagatttcttcagatcaaatcccaactatccacgattcagaaaggtaacctttcaattgctgattattatgacaagattaaacttcttgctgactctttatccattgctagacaccccattgacgagagcgatctcataatgcaccttctgaatggtctggggcccgagtatgacccagttgtggttcacgtcaccaacttagttgataacctctcattcgactcgattcaatctctgcttctcactcatgagagtcgactggaacgacattacacttatggtgctccctcattaacaccagctgcaaatttgtctgttggaccttcaagatttggatctggaccctcagcgaatcgttcaacagggtatggtggccgcggatatggttcttctcatccaaatcgttcaacaaatcgtggatatggagtccctgggagaggaaactctcgcctcctctgtcaagtttgtcataagagcggccacacagcagctgtgtgccactacaggttcgataagaatttcatcccaccaaaaattggtgaatctcaggctttcttggcagaaatagaggatgaagaccagcttcaatactcatccaatacaatcacagattt

SEQ ID NO: 328446 - DNA, 565 bp, Cannabis indica
taaaataattttcaacagttataacataatttgtttgagaatttatgaatgtatttgtagaagtgtaatgtctatattgccctttaatgatttttaaatagaatattagcactaagggtaaattggtcttttaaccacctttttactagaaatgccttaagtgttttaattaaagagaaacaaatttctgatcttatctctctctctctccctctctctctctcttaagccagtttacatattgttgaatcttgaggaaaaatcaaagctttgggtggattttcgagtttgagcttggaagaattgcttgaggtagaattgttttctgtgatttgaattatgagatgagacttaactttcagctgatttttgggtatattgaaattttgataattttgagcttagtgttcatgtatcatttgtgtaatgaccgctttagtaattgggattagtaaaggcaattagcactaatttttattattttattattatttatgaaattatttaattgtgggccccaatatatagaaataaatattagagttataatttctcaattctggag

SEQ ID NO: 328447 - DNA, 699 bp, Cannabis indica
aaaaataaaactaataatctgacgattaaaaactaattttttaaaatggtaatatgaactcaatttttgttaatttttttaacataaccaaagcatgattttgttattttaaataattgatttttgtgtaatagttttattttggttactttataaaactagttttttgtcttaaatttttaactagttgataaacgtaattagtttctttgtgttaaattctaatatccaattacgacatttaactctgatgacgatgataactccgttgatttttcatgtgattttttcggtagtaataacaactctgataacatttttgacggtgttaaaaaattctactaattttttcaacaatgatgacaagttttgatgacttttctagtagcaataacacatttcgataatatttgactgatgaaatttccaacaatatttttttttttgaataaaaattataagatctattaattaataaattcgttcaaaacaataggacgtacttcagaggaacagtcctccaactgaagcacacgacctgtagaaaaacaagagtctcttgccaagctgagccaacttatttgcagattgttatacaaaacacaaatcaacaaaagataaagccaaaaggaaatttcgaacatcttgaacaataagaccaaactgtgaagacataaaaataccgctctgaatcgcttg

SEQ ID NO: 328448 - DNA, 310 bp, Cannabis indica
ggtaaaataatttccaatagaggagtcgaaaccatctgtttagcattggcatcaatatattcatgcaaatagttaaccgtataatcaaagagctggtacgaagagagtcctgttttttggtgaaataagttgtttctctgattccaaattgaccaaataaaacagaacaacaaagccaaatcagatttagtataaacatctaaagcagtggaccacaaataagcaaaaggatctatccttatggttattatagaaagtaaagaactttgaatgtttccaagcttttctagcatgattacacccaaggata

SEQ ID NO: 328449 - DNA, 632 bp, Cannabis indica
agtgaagtgatatatattgggagggaagtggtgtatttatagtaatgttgtgcataaatatctaaaagaaaattctaaaataactaacaaatttagtttaaatactacgtagaaaaatctagtattttttttttttaaaaaaaaaaccattgatatttagaaagatttagtttaaatttaaaatatttttaattacttatttatcgttcaaagaataaaataagattagaggatgaatataataacattaaaaagatttactttttcttttccaccgaatagttagtgttgaaataggtataatgtaaataataaaaaaaaaaaatagttttaaaaaaataaaatgataataaaaaaattaaaggacgaatctataatatatatctatataaaaattctatcatttttaaatttttttatgtgtttcataaatattaatcatgaatcaatatatatttaatggttatatttttattgtaaccagtagggatattcattggatcacatccaatgtttttaggcctatccagatccgatccaatcatatattgaatgttagattttcaattaatttcgtaatccaatcgatcaaacatccattagatgttggattggatcgattctatccattg

SEQ ID NO: 328450 - DNA, 685 bp, Cannabis indica
aatggcatgtcctctatgctcaatttttaattcaattacactaaggaaactaacccaaccaattaacatgtggtgtttgacattgttctatattcaacttctgctgaggaccttgaatttgtgtgttgtttcttactttttcaagacacaagagagcttcacacaaaaagcatagccaaatttataatgccacaaagtattatcactgattttttaatcataaatgaagtaaacaacatgaaagtcattctcagtcaagtaataaagatttctaatcctttcacccatcccaatcacttgattcttagtgatatcatgaatggtacatttattataaagaaaataaatgagtagtttgctgaatcacaaattgagatcaaattttgcttaaactttggaacacaaagcacatcttcaagaattatattgaataatttgatatttccaatgaaagaaattttgatgttagttccatttggtaacctaacatgtgttaatttgatgttcttttgagtagaataaaacctggtatgattagaacacacatggtgaatagcactatgttgctatatttttaaacactacgcaagtatacgcaatcaagtagtaaatctcacacaggtgaggtcgatcccacagggaattggattaagtaccactaaattatacttatgattctattcgg

SEQ ID NO: 328451 - DNA, 542 bp, Cannabis indica
tttcaaataatatagaaaaaaactagcatcaaatttaatatacgtgcctcgcacgtaatttttgctaatatatatatatatctatatataatcatgtaaaaggtaaaattaatactctcgtacgtatttgatacacattcaataaaaaacacttctctttcttttttgtttattcgaataagatctgtgaattggatcgagctcaagctatcctcaagatataggacaaaaacagtggagctaagaaggcaaaaaagatacgatgtaattagctcgagttataacaccaaacaagtggtcttggaatttgggtgaatccttgatgagtcttggatgggtctttcgagaatgttaagcatgaaggtactacctaccctcggcatctaggggaggtgacccaccggtagtatctcggcgaacattgagattagagcttttatggttatacccaagaaggtatggccattttaagcagtttgagggccttgagcgaaatattaaaatctcgcctttgattaaaaaaaattatcaatcaatatttt

SEQ ID NO: 328452 - DNA, 508 bp, Cannabis indica
ttgtcacaaaccaggccatttaaaagaaaaaaaaatttcttaatcggttttcctcctgattatggtgaaaagaagaaatctaaccaaccttctgtccataatgcctccacttgagtcgaccaatatggtgttcttgctaatcttacgaagcaagaagatattcaggccataattttattgctcatacagaagctacagccaacacctgttatagatgcctctaaaccttttgcatctcatgtttctagaaaatcctctcataattgcttatggattgttgatggtggtgcttcacgccacatatattgtgatatttctttatttttttactgtgcataagaatattattgcccatactattactcttcaaaatggttctactattagagtgcatatgtaacgccctaaataattaggcacgctacccaaaactgattatgaaccctaatcccctaatctggattactaattaaaatagcgcagaatttaaacttttatattaaacaca

SEQ ID NO: 328453 - DNA, 706 bp, Cannabis indica
gtgatccaataaactaccctacaggttataaccaaccaacataaaatgaaaatagtaaattgctgatataatacaagcttgggaagttttaccatcaatattaaataagttttggaattagttacaaacgtagtaaaatcaattttaagaggtttgttgcaatttacttttaatttgaaaacataaaaatagttcataatttaatgttgtaactaaatatactaataaaaatgaaataaaaataaattgaaaaaataatgcttttatgaaagtagtatatttatgataatgtatattttacatggtagtaatattgcgcaaaattaaacataatatttattatgtgttaaatttttcatattttttttatattaatttaattttacagcaattatatacatcatcatattaatttttttttaataaaagatctcgaaaacaaacactatattaatttagatttttcttataattattaatttaatttttttacactattagagtacatttttacttagtaaactatatcaattcagatttttcttataattatttagaataaatagcatttttgtcacttaattttgtcccttaaaatatacgtcttgttcaaaattctctctaaaatataacagttatataattatgccctttctcttaggtttcgtttcttttactgttaaaaattattatttttacatttgga

SEQ ID NO: 328454 - DNA, 661 bp, Cannabis indica
atatatatatattatatttatgtatgtttatatcactttgaccagaaagtatgatcaaagacaaagaatgaattgaagtgtagtgtgctctagttaattactcttaggctatgtttggtaggaaagtaggatggaaaggaaaggataggaaggatagagaatatgaaagatggaaaagaaagtagttctcctctatcttgtttggtataaagtggaattgaaagaatagaatttaaattaattactaaaattacaatactattctttctaatataattatttattattttttaaaaaccaaatatgatattgtatatatattttgtctttttcttaaatctcttcattttctttctttttctttttgccaaacaaataattttacttatttttctctttccttccactcttctagtgacggattcactaatgaaaaattaaatatgtattttttttatttgataattatactaaaaaaaaagtgaaaaaaactccacaaaactaaataaattaaataaaatagtctctaataattttttttacaataattaagcctccaattttaagtccactgcacaccttacctaaggattttctttcatccccaaattgggtgggaaatttacaccttttttcccaatttattacttttatactgttg

SEQ ID NO: 328455 - DNA, 1308 bp, Cannabis indica
tttttttagacaataatttacatattattaccgaaacatgaattgacaagtgaatcatattaataattaattatggggaaaataacatgctaataaaggtattactgtactctcaagctcaacttgggttttgtgggtccatttcctgatattttaatattccaattattatttattttttattattattactttgggagttggtgttagaagaatccggataaggatgatgaatccactcacacttattttattttattattattttttctctcttttgtatttaagaagctatagtcttccaatcataatgagatattttagatattattaattaaacaaattatcatgaaacatgaacaatttaaatattatttaagcttacgaaaaatcatcactaatcaataattactcatttttattttactgggtttagacttttgtagccatatcctaaacttggtttagagttgaaataaggggaatatattagtagtattgtacgacttatgaaatttagtagaaaatttaatggatgttggactaactcttcccaaaataaatattgttaacaaataatgtatttaatattattattattattattattatatttattttttgaaagaatgtatttaatagaaatcttttacataaaagattatcaaatttaatttttattacaattttactttcacattgctagaaaaaattgtataccactttcattattttatttacctaaatacattttactacacttaaactatagaagtattgatgtcattgttctagaatgacactcaattttttttccttttcttttttattacattttcccattttatttctagttttccttttcatttttcagttttagtttcattttgaatcatttcaccacgatcaaaatatttctttccaaaaaattactctcccacgatctccaacttccgttgaagctccaacccacgatttctctttctatttttcttttcttctatcaatttctagataaatgattgtcactcgttcctcttcttctccatctctatctatgaaaaatctagtgttgagaagcctatttctaaaagttttaaacctgaaatgggtgtgaagttgttggccaaaaaagacaaagataaacaggttattatggaagatgatgactctaacgaagattttattcaggatcgaccttaggcatgggcgggctaggcccgcgcatatggcctacttattttaggagcccaataaaaaaaaaatccttttaaaaaaatatacatacttttttaataattttaaaaa

SEQ ID NO: 328456 - DNA, 1546 bp, Cannabis indica
acatcaatttcatttgtgtttaagtttgcaatattaatgcccaaaattgtatgtttgatagctattttaatagagtcactaacacaattgacggagttatatataaatatccaacatgcatgtttgagggattcataatatatattattgcctccaaattatataagaaaagaaaccgaccaactgataaaacccagccaaaaaggagacagcgctcatttttttttttcgtaaaatctaattttatttcattatgtaccaaaatctgaatttcatattagcatcaacctgttttttctaataataatttttatatatatatatattattatagtattgaggttattttttataaattatacttgaattagattgtttgagaattttagtttaactttttgagatttgtattttataaatctaaaaattgaagttaggatattagttttatgaagtaaactgaatttcttattgaattttagtttcgtagtaatttttctgcacttttaattatgaatttgaaacagctactgttttgattattttttatcgtcttctcaagcgaaatggccgaaattaatagtagttctctttttggttagattatgctcggttgcattaggttgctgcgtagttgcccgaaagttgtctcagactaagtttttaatcctagaaagcatgaattctgggttgaatgtacgtgtaagtggtatttgtgtaatttttttatttatttggactgtatatttatttatttggtcaacggaaagtatttttataatattattattttattgttaaaaattaaaaaaaaaaaatcttagtaaaatatgtttataaaaatggaaaaaaaaataacaatttaaagattagtttgcaaattttttctaaaatgagacaactctagaaagataatactgtttgcccttttgcaaaatgacaattttttttaagttaaatgtttttcttttcgtttttttcattctctgcaaaatacttttccaatgatacacttatctagttttagaacacttcatcaatattgtttaaaatatcaattttgtagacaaaataataataaataaaacaagtccattttgcaaaaataaacttttaaagatatctatttaatttaatttcttttttttttttctaacacgttatctctatttttattagtaaataattgtattttgtggtttctgaaaattaatgaatgttcagtactttaagaggaccccaatggaatcaatattagatagccaaataattaaagttcaaagaagatcaaccaacagtgatatttggtccacatgcagtatatatatgggaacaaagatgtacccacatatttgtttaggatctcatttcacactttctatggagcttgtccatagtatatcattttattaatggtttatcgataatattgcttaagattttaggttataaaattatagaatttgtctatagtatatggatattttatcaatagtttatcgataatattattgtaggaatttttaagataggaatttactatctt

SEQ ID NO: 328457 - DNA, 609 bp, Cannabis indica
ttgctgaaaaatattgatgatttagcataattaacttgctgcccagactccctttcataatcatgaagtaattgtagcacattcaaagcttcattatcattatccttgcaatatacgtaactatcatccacaaatagcacatgggagacacgaggagcaccccttgcaactttacatcccgttaaccaacttcttctttcataatgtttcaacattgaggagaaaccttcagcacagaccagaaagagataaggagataatggatcctcctgcctaacccctctccccggagttataggacccattgttcttcctccatatgtgacattataattaactgtagaaacgcagaacatgattagcttcacaaaatgcagatggaaacccatccgaataagcatagcctcaagaaatgaccacccaacttgatcatatgctttgctcatatcgagtttaagcgccatgaaaccctccttacccactcttttcctctttaggtagtgttgttggaaattattttaccaagatctatttactatcatgtatgttggattaacaacctaatatgaattctaaaacaaagcaaataaacacatataaagttagaaa

SEQ ID NO: 328458 - DNA, 1383 bp, Cannabis indica
attattggtatttttttttttaagttgatacaatgttttgatatatatttaatatgcatataggttatcataaagtcgtttgtttattgtcatgaagttgtttaagtaagagaaaaataattgagattaattacatatcattatatgtagatggtgagtggaatttgagtgtgtcacaattattattcaatcatgagtatatatttagttttttcatgttatatacgtgattagtacttttattttattgagattgtttacatgttttttttttttgtttctttcaggttgtctacattatttgttgaattaatttacatatttaactagtattaactagtgttgttatctaattactttttagttacatctaagttgtttaatcaatcaaaatatgaaagtattatttttaatttttagttgttcaagcaaatgaaaaataaatacatgtttaatttttttaagggtatatatatatttttagttagtgagcaagtattttatcattagttttaaatttctttaattttttttaagtattatgatgtgttgattttaatttattatattttttcttgtatgttgatgcctagttaatttctatattaatgaggggttgttactctgttatttatttgttcaagcatgtattaagattatttgtgtgctgtgtttatgttgttaattaacaattaaaaataaaagacgcgaatgcaagtttgtaattttaattccacattatttatatttatgtattaaaaaaatattttaaattcattttattttttgcaagatatttaaaaaatttatcttcgttcttttaaatttttattttgagtttttattctttattttgatgggagttgttatcgttgttatttagttattcaagtatgtattaaagttgtttgtgtattgtgtttatgttgttagttagcaattaaaaaaaaagacccgagtacaagttagcaattttaattttattatttatctgtattcaaaagataatattctaaattcatttgatttgacgcaatatatgtaaaaaatttatttttgttgttttaaatttttattttgagttttgatgctataaattaaatgttatttattatcttttcaatagtatttttgtaaattagatatctacagtatttttgtaaatagtaaacttataaataatatttttgtaaacgttaaatagtataaatgtttattttttcttaattgatttagcttaatgtaaaaaaattcaactcataaataaggtagtgaaatgtaatactcttttttattatattaacaatattttttttttttttaaaaaaaatttaattaaataataaaattaatagtaaaaagcaatgtacaccgtactgttgt

SEQ ID NO: 328459 - DNA, 608 bp, Cannabis indica
ggagtaagtccaatctttttagccatggaatgataaaaattacacttgacatttgaataataataataataattaataataataataataaagaattacatataatactatttttttttttgtaagaaatttatatttttaagttcaattttttgttttttatatttttaatatattttataaacacacaaaaataataaaaaaactacataaaagtaatagtaaaatattatccaaacgacatatatacgatggtatttttaataaataaaatcataaaaataattaaaattctgtactctattttttataatttttttaattatttttatatatatatttttttgttgttgttaaactattcagtttctgtatatagtaccccatttctctgtacgtaacttgtaatgggccaaccagtagcaatatgattgggttcaacccagtaatgataaaacagggtcttgaaaaagttaagccctctaaggactaaggagttatattggactcgattctaaggagtttgaagtaaataatggagagtagactttttctacaagtaatatttgcttttgtataggaaaaacatatagagagagagagagaga

SEQ ID NO: 328460 - DNA, 1066 bp, Cannabis indica
tagatttaggggctccatggagacgaactatctccttcacatacaattcagcatattgatccactgaatatgtaactttcactggtaagaagaggatgacacatgcctctacttcctcgagccgggtcatcgagaccttatcaaccgccgcagaggaggatggatctaaatttgcccaggcgttcggggttacttcctggcgtaaacttcaggctctcctttctcctgactaggatttactcaagctcgggagtccagaagtaatgctttcacaaagcttggactacaaccttatggtaagttggccttattattacgatttatttttttttccctcttctcttattcatatgcttataatttctccaggcttcttttgtctcgtttacttctaaccgttgacctttgaagcggctcaaatacttggagggcgaggtccaaaaattatcatcctaatgtggggctgtgactaagcaacatgatgacgcctagtaagaaatcacctgcctcaaacaagaagtcacaaagataagggaagaagccgagaagaaggcaaaggaggaagccgagaagaccttaaaggcccaagctgatgaatttgagaagaagctcgctgagaaggagatcgagactacagaacgatgcaacaaagttggcctttgtactgtatatcgggcctggatggcgaatcctaatatggatacaagcttcctagaggagaaggaagaggagactttggctttttgcaagaagtccagggcaggggaggaagatgttgatgctgaggaagaagaagataatccaaccaaatcacccaccatgtagacttggtttttatttatcttcccccctttttttaaatgtcctttcgaccgagacaattatttgccccttgtggcattttttacaaagaaaaatttgcggagttggatggccaactttgccttttattttatcttttaatgcctcctgcttttatgtttaaactttgacttatgcttgtttttgttggaaattattttaccaagatctatttactatcatgtatgttggattaacaacctaa

SEQ ID NO: 328461 - DNA, 1236 bp, Cannabis indica
aaatcttcatctcactttcttacagctctttagtataatcatattctaatagttgccgaaaatctcggtcaacaatggtaaattgacgtcactgcgttcaggtcatataggcttgctgacctatcattgcattgaatgctgatggcacatcgatcactataaactgaactatcagtgtccttgttatgactttctccaactgtcagaggcagtcgaatgtatcacaaaggtgcaaggctttggcaaaagaagccatacattagttatgtacaaggtgctagatctgtcaatttgagccccatcttttcaaaggttgatttgaaaagtctgtttgatgaggctccattgttaatcatgcacatgccaaccatcatgttccctatttatgcagttatgaccaggggtcattatgagggaacttgacctggacagcatctgactctataagggatatggtaggctctctaagcttaagctacttggaatctctttcctctacaacaaagatgtcattttttttttctcatgatggagggtatgagcatagcactccttggccttacttgttttgcttgctatatgggttctgcaaattacgacccctaggtgacccgccactagcaatggcattgggtctccattttaggcaccttgtgcctaagtttggtcgttctgcacatagcaacacagctgaggattattttttcctgatcaagaattcaatctccatcttcaaatgcttgcattcatttgtgtcatggtcgaaatcattatgaaatcgacagaatttagaagtgtccctcttgctgatgtcctttttaatgggaggaggcttcttgtacgggaaaacaacttaggtggccatgtatatggttttgggagtttttattaggagggtgatgttgggatattatgccctaaataaaactcatttcaatataatataatttattatcaatagaagattagaagtcatttatgtttacatgtagttttcatgtttatggtttaatgtatacaatttatgttaagtccagaacatatagttattcacaattacagtgatatcaacacaatgaaagataattgtgattatatacttcaaaagttaatgtcccatgattcatcggtacactggatttaaactgatgtgatagtcagcgataaagcttacttacaccttggataagtgttatgttctttccaggacattgacaaagtatgctagtatcggat

SEQ ID NO: 328462 - DNA, 969 bp, Cannabis indica
ttcatgtaaaaatttcttaaaaaatactctaaatattctccaaacaccctaaaatctcaattttaagcatgtaatatcgaatttcccttcttaatttataaaaattgttgcaaatatttctcttcagtttcatgttgatatttttataacaatttgtctatgtagttaagagtcgctatacctataattgtagtatgagcctacgagagtctatttattagtattaaatatacaaatattatatttaagaattacatatatattcctataatttatcattagagtatttatatatattttagattaacgtcaagttaatgatatattaacaaattaattaaagaaatgagtaaaattataagtttgaaaggagatattattttatatgatttttatagttcataatcaattcttgcaataagaaaactataggatacaaatcttttcaaaaggcatagttcgagttacaaattttattaggaaattctatcatgtaccgatgtactttttttgtgttttgaatataaaaatagttttaattttattttttttaatgacaatataaatcataattatttaaaatattttgtaaaatttttaaaaaaattcagaataatttaatgcattaaaaataaaattctaacgatctgtagcactcgtgcttattttattttatacatgtgtgaaatatacgctttgaaccgtacttgctatattataaattattataaattattcaaaacttttaagaatgtcttaaataattataacgtcgattataaataaatagactaagaaattctttctggtgccaaaacaaacaggtgtggtgcatcactcttaacggtccacaataaaattttgaaaaatttacatgatagactaaaaattcaaagaaaaaattacaaaaatacgtcaagcacggaaaaatattaatttttacactttgtaaacttttttatttacaaa

SEQ ID NO: 328463 - DNA, 1186 bp, Cannabis indica
catgaaccaaaatatacacaaatgaatgaaaaatacttctgtttctttattgataatgaataaaatggattacattgaattggagttttatttagggcataaaacccaacatattcatcattaatcatcacattttctatcatcatgttggtgactcaaaccttgctaatgagtgggtcattctttcattgatcgaagatacaattagtgtcttccactgttaggaaccaaacagactgcctgttatcgtaaggaactagataggcaagtggaatttgaaacaatggctcagaggttgcctcagtcttgatttttttccccccatcattgatgttatttgtcaaagcattttgctatcagcgggatacaccactgtcgaggtataatgggttatgaattttgcgcttgatgttcaagcatcaattcactttatctcataagtgagatgaatcattgtagaagagtagtgtagaaaaaccctctaaatcttttgtataagggaaaaatcacaggttggtgaagaatctttgcttgataattccaactgatagaaccttgttaaagaaaaaactctaagagagaaaaaagaaaaaaaaataaagattacactaaactcttgctaagtatagagtcccatacttaggaagagtttagtaacttaaagaatatcacaactggggtaacatcccactcccagagggttccttataatcaataagaaaatttctactggatgaagtgtcctacttctagagagctttctataattgacaatactgttctttcttttttatttttgtggtctgcggaggagcacttgtactagaactttagatttataaactttggtcattatattcttatgtaacctcaagtgtttatatatcaaatcacaatagtgcttactcttgtctgcaaatagtctgtatgtgtcgttgatcaacttaataaacttatcagcactcgcactagcacttcaggattaagaagatcagttactaaggatcacatcaaaatttcattaaaccacactaactcaggtgtgtgaaattttttgaatgctcctataaatcttagctcccgtataccaaggtaatacctggctcctatataccaaggtatgtgacatacacgactctcgtgcaccatgattttttgtgaatgctcatgtaacatacatagctct

SEQ ID NO: 328464 - DNA, 885 bp, Cannabis indica
aatgcacatatccacattttattctcattatatttctttttaataattaatgtactttgtaattaaattttattaaaatagtactaactagtgtatattattgaaaatttctatagtggatctctaaaagattgttttggtaaattctttatcttttgtggcatttagaaaaaaaaaatattagtctaacctttttttaatgatagtatatattgtaactatttaggaccacttgtaattttttttaaaaaaattgaatagtttacactgtttaaaaaggcttaaacaattacctaccaagtgtataagaaaaaataattgtgtgtgtaataaaatatataaattttattatattataaactagttaaaaattttaaaaaatttacaagtggtcttaaatatttataacatttgcaattatgaaaaaaaaaaattaactaaaaaaactctttgtctaaatagataagggtctactgaaatattaatttttttgtaaacttaaccaatattatttttaaatgatgtaaataattgggttaatagaagtgtactgccgagacaaaattaattacagaaataataattaattataagacgataatataaggaggggcagtactacaacgtggatcacatactaattataaatatatatataaatatcaaaatatgtacgtacaccacctactttgttaaggatatttagttttttatgttagtggcatttagtttagtataatacataatagtaatgataatatatagtaatgaattaagataagaatagtaatgggaataatattactatgtttgattcaaataagtaataaaccacttgagctagtgtgtgagtgttggaggtcctgggttcgagtcccaagtaaa

SEQ ID NO: 328465 - DNA, 800 bp, Cannabis indica
ctttcaagtattttagattttggtagaattctattgaattttctaaagttctaattgatagttagagtgttcagcaacaaggtacaccattgttctccttacttaacaaactgaaaagactaaaaggagcattgagaactttgaataaggttggaattggtggcattcaagaatagaaagtgagggcctttaatgtgctcaaaggttgccaggaggaacataggtttccaaccaacaaggatttaattgataaagaattagcagccaatgaggagtataaataagtgcatcaaaattatttttctttcgctcaaaaggctaagatgcattggataaaaaaggagatccaaacaccataatttttcatgccattattagagctcgaaggcaagaaaattcacatttactcaataaaagacatggaaggactgtgggtggatgattcaagtaaagtaaataatgctttcctacagctctacactgaactcttaggagctaaaatggctaatagaagatcatttttgaaaagtgtcaataaggttggcccggtgctgagtagtgaacaaaatcagatgttggtcaaaccatacacaagaaaagaagtgaaagctactatatttgatattccaggtcaaaagggtatgggactggatggtttcaatggtcatttctatcaagataattggaatatagtaggagatgatgtgtgtgacggtgttctttatttcctacattcatggagaattcttaagaaaataaactccacaacaatcacttcgattcctaagatttcttgtcct

SEQ ID NO: 328466 - DNA, 1641 bp, Cannabis indica
aatatatatatactacttttcagtttttttaatatattattgcatataaaaatgatatactattgtgcaaaataactataccaaacacttaattattcaaggttataattgtaattttatcatcaaatttttcactaaaaggacattttgttaatttttttaaaaaagggacatttattaacttaattgttagatttaggaccattttgcatcttgaccctaattttatactcatgtaactatctattttaaattctaccttccaataccgaaaatgattcaatttttttttaaaaaaaacatgtgagatatgtatatatactacaatatatatgattctacagtggaaattttctaaatgccctatttatagagcatttgatagctcattctaattaggtaaatacattgtaataccgtgatgttaaatgcaacatatatttaaattaggatttcttaaaatattttttcattcaactttattttctatatttgctatttaattgagaaattctatttgtctcccacgtgcccatcatatactatatcatctaactaattttttataattatatttttattaattcattatttaattttattaaatgctatggaccccactgatataataatgcattaattgggataaaacttttttttttcttcctgatattgggttgcaaatagtcttctactgttgtttcaaacaccagccctgggttaagagctttcattgggttgatttctcttacatttgtttcgtgtgtactcgctatagagtttgagttgtttgtcaatggtttttccatgttgtattcacttgttgcatcaaaacatagaaaaatatcgattaaattttattcttgaataagatagttccagctctaagtgaagattttgtgtcacttttttcacctgttgtcatgagtgttgatctgatcatggaagatatccatttcgatcgaactaatttgatgaaagcaactgctcctgcaacatgtgggcaagccattaatgttctagatttcaaagcaaattcggaaggttttaagcctattggaattgccctggttccagctctaagtcaagattttgtgtcacttttatacctgttgtcatgagtgttgatctgatcatggaagatatccatttcgataaactgatttgatgaaagcagctgctcctgtaacatgtgggcaagccattaatgttctagatttcaaagcaaattcagaaggttttaagcctgttggaattgcccctagttcatcactttggggaatcatagcagctaaaatggccactcctagagccattatatctggctgaaatttagaaaattgtttcacttttttaatgtcacattacaaaatcttaagaaattgacatgcatatatagctacacaaataataagatggaagcgaaaatagttataatgacattgagaatattttctgtgatctgtccaggaccccttgatgaagaaaatacaataattaatgctacaagagatgagtttgtaaatttggaatttttcacaattgatagatataaaattttatgattaatttgaatgataatgttattttagtttggatttttttttaaaaaaaaatgcgtttataaataaaattgaagtt

SEQ ID NO: 328467 - DNA, 560 bp, Cannabis indica
ttcaatcgcattatatagactataaaaatgaaaaattataataggaagaagaaccaaccaaccagctcggctcggctcggacagcatgtatgtatggtgggtcaagtatgtgtgtcctcacattttcacacaaaacttgatatcccttgggactctatcccaagtcccaaaattataccttgtatacttttataagcaatgactcatatctcacgtgagactcgttttattacacacttagaatacttttattttgtcaaaaattcataaactttgtaaaaaattccaacactatttattactatttaatattgatttgtgtggacaataaatatatatatttatatttatataataagctcttaaataggggtgttcgcggtgcgagtgatgcggtttttaactattttttcaaataaactcgcacatgcagtttttctaattttccaaaccgcacccgcaccgcaaaaaatgatgtggtgcgatttctgcggtttgaactattacaattttttttttttttgaaatcatcataaaataattaaactatcattaatata

SEQ ID NO: 328468 - DNA, 623 bp, Cannabis indica
aactttattttgacaaaaaatcaattcaaggtcctatttgtactgttttagaaaatacagggtttattttatcatttaacaaaacacagggtccaatggataacttttataaaacagaggattcaaaatggtatttacctatataaaaattaagattcaaataatgaattgcaatcgtgctttttttattttataagcgtgctacagattaattttaactatattttaaatatcataaataatttaaaaaaatttgaaagctagtcacatgcctattatatgtactataatgtaaattatcatataaaaataattgagtttgagtatcaaaattgaaaatatccttaagaaaaattggctttggaaaaggcttgcattcgtcgtttctaaaaaacccctttgacgtctaataagtttttggaacaaattgttcttgtaaagttccaaaaagttcgtccctaaagtcaatattatttgaaacaaaatacttttttattttttatgacttatataattataatgtatattgacatatagaaatagaataattacataagacacaattttttgtaaaatatttacatttttacattcaaataatgttttttttttacatttttacg

SEQ ID NO: 328469 - DNA, 759 bp, Cannabis indica
actagaaacaaagagtgaaaactaaccgaaaatatgacccgaaacttagactaattttagcctaacaggtattaggttagggtaacaaagacaaccaaagactttaagagtagaatagtcaggctgagtttaaaaaagtttctctaaaggtgattgatatttgagaagacgagagggcatcctattaatgagaaaaacaaaagacatataagcttcatttcaatatttgagagcaaagaaggcttgagcaagaagggtgaggccactttcaattatgtgtctgtgtttgcgttcagcaacaccatttttcttatgagtatgaaggcatgaaactttatgaaaaatggctgaatcattgagaaaacttgtgaaggcttgatactcatctccccaatcagattagatgagtttgattttcttatttagttgcagtttaacttgtgttttgaaggtgatgaaagtaaacaaggctttatattttgttctcaacaggtatatcaatgtatgcctagagaaagcatctatgaaactgttgcgattttatgtcctaaataaaattcaagttcattgtaatcttatttaccttcaataaagatcaaaaatcatatcttgactcagtcataagctttgctcacatattttacacatgattatatgtttaatatataagttctatttaatcatgaacatatagttattcacaattacagagatgtcatcacattggaaagtaattgtgattatatgcttcaaattatt

SEQ ID NO: 328470 - DNA, 700 bp, Cannabis indica
gtataaataggagatcacctattggaataaatcactcagaaaattctcatctcttctctattttctttctctaaattataatattacataatactaatattttataacactaatttattttttaaagttaaatttggtctaatttttcaatctatgtgaaaaggatcttttatattttattgtataaaatattttttatagttctcgttagacatggaagtatggatgaaaaagtgggtaatatacatggagtgctccctctccttctccatccttttctctatcgaggcggggcaggctcggactgctcggtaaggagtctccattgggacaaataatccttatggtaatttacttatttaaaaataataaaattataaataaaaataatgtaatatataaaaataataataaaagaacacaatatactatattcataatttaatttttaatgtacaaaaaaattactaatatgctttaagactcataaagaaactatataataattaaaaatataaataaatatttttaaaaaaaaagtgtactaatgaaaaggcataatttttaaggacaaaaataaaaagaatgtgtaatttttgtgggaaaaaagtcgagatttgcggaataaataaaaaaaatatatgaatatattgaataaaaaaaaactatatatggggcaaaattttaaaaaaaaaaaaaa

SEQ ID NO: 328471 - DNA, 1149 bp, Cannabis indica
tgtaaagttataatatattttttacacactcgacccgaacgccaactacgtgtcggggtcccagatcctacgttcaggttcaggtccgggttcgggtctgggtttggattcgggcccaagtttaggtttgggtttgggtttgagtccggggtgtaagtctagggtccgggttcgggttctgggtccgggtccaggtccaggttctgggttcgggtcccggattcgggtccgggttcgggtctaggtcctgggttcggatccgggtttgggtcagagattggtgttgacctgaaatcctttgtaaatattataatacaagctaatacgtaccatttgttatgtattaaataatacaacatacattgtattaaaaattttgatcgtaataattaatacaatacattgctttgtccaaacatagtattatttatttttttaatacaatacgaccattatatggcgtaccaaacgagccctaatagtggtgtttagtactggatagtaaagataagataatggaaaagtaatgagagatgttaagaaatatagttggtgcataccactacttaaagtattatattgttattggtgcaattaagtatcagttctcacataatataatttaataattattataaattagcactaactatttgcaaggcgtttagttggcagacctaagattaaagttgagaaacatattaaaaattaatacaattttgtattttatagcattatatatagtttaaagtaaaacaaatcaaaaataacattcaaaaatttgacttcaatgattaaggtactaaatacaagtcttattgataaatgtttaaaaaataaactttaaatattaaaaataaaattactcttatttgaattagaaccttgacatatattatatgaataagatagcttaaccattataccatatctaatacactacatttaaatatagagtaatttgtggcataacctccttaagtggtcaggtttttacaactaacccccaattctaaaaattttgcgataaaactccctaaactcgtgttctgttagcagtttaatatttccatctatttttagctgttaactgccatggtggaatgtctacgtgtacaccgtgtacacgtggcacaattttattggtcc

SEQ ID NO: 328472 - DNA, 570 bp, Cannabis indica
acggaaggattacaaaacaaaacgattgtcgagtccaggaagtttagctataatttttcgagtaagggggttacatcgtaacaaacataaaaatataaagagtttggctgcaaattattcttttttttttaaaaaaaaaataaaaattgaataacatggtggctttatcatttattttgttaaaaattatcatttactatttgcttattactataattaacataaatacaaccagggttgagagacacaaattaaactataaaattttataggattaatgtgactcaaaatatgataaatcatacattacaacataataataataataataataataataataataataataataataataatagaaaatagatgagaaattattataatgttgcttttccatatataacattatatatgggaaatattattatttaattagaacatctctaatgatacattattttattaaattagtgtaaaatcttcacattttttattttagactaattagtaagttttctccctgaactttgacatgtactaaatcgtgccccctgaactttttgg

SEQ ID NO: 328473 - DNA, 1115 bp, Cannabis indica
aaaataaatgtaaccatcatagttacatatttgatgtaagaattaaaatttctccatatatatatatgacttcaaccataatttatgttttgaggtagacttgcacaatgggattcatattatttttgaattggatatgtattttccccagctttggttttaaaagaataacaattataaattcaaccaaatataagaaaaaaaaaattggaaatttataattcaagtcatactaattttaagccatgagatcaaacttctctgaacaaaaaaaataaataaataaaatatatagctaattctgactttgttcaattcatttccttaaatcactaattagaatatgttatgataacaagataaataagtttacggaatcaattatcagtatatataatatatgtatatatatacacataaatataatttcgtaatatcttaacatacaaatattaactattcttatgtttgtttgtttgttcatttttatattaatgcagttattagttagtatttacttatgattatgacaatatatatgagatgaaagggactaacttgtcttacaaagatgctccacttactataaataaacaaaaaccaaggccgaccgagtataattatatatatgttttaatattaatactttaatgtttataaccttaatattaatttacccatataatatataagtttgaatattttactaaaagtatttattaattattatgacagctcatatatgaattataactacgtacaataatttttaattcttttttaatgtaaactacacctcttctatataaattaataaattaaagactaattaagattttttaaacttgttaaattttgttttaaaatattatgattattaaatttaaaaatttattgagtttatttttgttcaatttatactaacgagcacctaatgtgggcaaaaattttagcgacatattttaatatactagatgaaagttacgtggcatgccacgtaaatattagttttatgggatattggcggctaaactacctgaactttacgttttaataacacttaaccacaaaaactagaatttttggtcgactaaactacctaaaccttggttccg

SEQ ID NO: 328474 - DNA, 576 bp, Cannabis indica
ataagagggttttgctaaccaaaaaaaaaaaataaggaggagttaattaattagtgtataaaagttaaaatacaagagggttttgccacaaaaaaataattaaacatataaaaattaaaacataaaaaaatttcactgcaaattgttctattatataatattatgtaaaataattaatatttttatcttttgaatttacatacagtcagaaaactattatttgataagatatacaactgactaaattagatattatttaacgacaatttgtaaaattattttgttgtttaaattttaattttaagtatttgttgaatacaaataaaatatttatgaaatcaaaccttggaaagaaacccaagttttttgtggttaaagaaattaaaatttgaaattatttagtatatagttttatttaaaaaaaataaataaaacatttaggcctatttgttgaaattttataattattcatctacgatacaaatataaaaattaattactactatactttatataatttttaacaaaaagtaattatctttacaatcatcaatatatataaatataatttttatt

SEQ ID NO: 328475 - DNA, 528 bp, Cannabis indica
attattttaaaaaaaaattgtatataccatattaacaaaattatatacaatcgccataaaataattataacatacttataaaattatatatcacatttatatttaataaaataaaaattaaacatgcatgatataaaataaaattatatactatataataaaatgtcatacacaacaaatcataaattttaatataaacattataagtaataacaatcttatacataataacataattaatttatgaactttgaacattctttaaaattaaattaattcaatcccgatatatctctgcatggaatgatgaacaagaaataaatatcttatgtgtgtaaataatattagtaatgttcattgttatttttatattttgataatttgatgcaatttcttaaaaaaataataattgggtcttcaaaactcaatcttcatttgcatcaataataaattattttaacgattttttatttgtattcatataaatacaatatatatagggtaatactatggtaggacctagcaaaa

SEQ ID NO: 328476 - DNA, 527 bp, Cannabis indica
atatttaagttcaaatatattaaaaataatattttattttaatttgggatttggaaatagcaaaaatcttaaattgggaaatatcccacaaaaatcagattttttttggggaaggcaacagctaggctgcacgtgcagccccaggaggctgcaaatcagccttccgcgcgtggacgatgaggaggacgccgagaaaccttggtcagctgcaaggggacgcacgtgggtgttgtcgtgaaaggaggggctggcacggtcgagttcaggacagggggatgtccgaacacgtgcccgcgcgtagcacccttccttgacctagttccaacccgaaacttccaaaattcataactttctcaatttttatcggaatcgagttccgtaaaaaacaaattgcttaattttaacaagaaatccaaataaatattttcagaaacagaaaaaatattttcatggaaattgtttttgtaactcacgtacattcattagtagcacataaataaccatgaagccatccaaatcaacacata

SEQ ID NO: 328477 - DNA, 890 bp, Cannabis indica
gtaaatttgattaattgatgaataaaaaaggcatttttcaacttaccccttttgtatattagagcacaattataaatagtaagtcaaatatagtataaacttattttttgtgctaaattttatacaaagtttaaatcttttattggagattgtcttaaagcacttatatctcatgagctaaaatagctcaaaaggtaaaaatgtagataaatgttatcaaaaagagactccaaaatagctcaaaattttaacttatggatagtacttttctcttcttttttttttaattcttttttcatttaattttttaattctttttatttatataataaaatatattaaaaaatataatatttaaatggtacacaaaaataatagaaaagttgatatatgatgtaaatgtaatataaaagtatgaagtaaaataaagaaaataaagttttaatgagatattttgaaaaataaaatagagaaactgatgtgagtgctcttacatttttcttctaatacattccaattcaatccaattagtaaaaaattattcatcaatctaatccaatttaatctaattacactcctaattttaattattaagttaagaacatgaagaaaaatatgtaaaaaactaaatacttctctttatttgagtttaatactcaataaaaatatcgttatttcaaatttaatgcaactaaaattttgaaataactcaatcgataacaaaatcaagtaatcaaataaaacaaaatatcataaacaaatacataaaacaattaaatgttacaagtttaacgaaaaaaatcagtaaaaatataattaaaatatattttcttaatattttttattatacaaataaatataaataattttaatacatattaaatataatt

SEQ ID NO: 328478 - DNA, 836 bp, Cannabis indica
ctgacacacaagaaagttaaaattatacatacattatacatatagtcatacataaaatatatataaatcaattatttattataaacggtccagtccggcataaccgttaataatttattacgaatcgcaactaaaccattacgcggtaaacggtccggattaaccggaccaccaaaagtggttttctcggttacggtctacagcggtttggattgtcgcggtctggatttaaaccacgattttccggtttcgatgaacaaccctaatgggcgaaccctacatggaggcccacaagtttaaattttgccattttattgcttcctatatgaaatttatcttttcttaaaaaaattatttctctattttaattatttaaatgttaattttacttatttaataattagggaaccaagccgcactttgtacttgtttagccctatttttgtaatttagtgtttcatatactgattgagtggtataatttaaaatataacattttaatttgtgcactataaacaaaataacagttttaccataagattctgataaatagtattatgaattataattattttgttataataagttttactattacaaatgaataagacacaagcaattacttcaatatctatttatgtttatgattaatttttttaataaaaaaacttttcgctatgtatcaattaattacatttaatttagctaataattaaaatagggttattttaaaaatattcgaaaaattattaaggttatgataaatatggcataaaaactaaatgccactaaatatgacattatctaaccaatcaaactaaaaatattattttttt

SEQ ID NO: 328479 - DNA, 887 bp, Cannabis indica
aaaaaaataaaataaaataacttagcggttacatcttatatttgtaatttaatcaccaatttgtaacaaaatagtagtgttattttacaataaaatgaaatgtcttagttaaggtaattttttattatccttttcttaaaaaataaactaaaatcaaaataataaaagagttttgtatagataataatatggctaattggtgatgatctagttaataactaaaaggttattgctaattaaagaggcatataacatatgggggaggtaattaggtagagttatataggaaatctcacacattagtgtcttttataagaaaaagtcattttagtactaacaaaattcataatataacaaataatcaattcttacaaagtatcaatattttatttcttaataactaaaaaatggatcacgtgatgcaaatctcttttccactcttctggtagctttgacaatcacgggaactacataccaactatatatatggactttatacctcatcttgtcataattcgatcattggtatacacctcgaggattctcatcccattaagaatgtcactaccatagcaagttagcctctcataaggccaagcacaatccttcctaatgaggagttgtggtgaaatttaaacccttaatccaagtaaaaaaaaatgttagcaaatgcatctgtactattacactatacaacacgtgataatttatatatataatccttaaaaactataacaactaataaatacccgaataatttttattaaaaatatcttaacagatttttcctaaaaataaaaattttcttttaattttgaggattattatttaatactttaaaatgtctaacaccacactaatacagtaaaacctctattcaagaatac

SEQ ID NO: 328480 - DNA, 1761 bp, Cannabis indica
gcccataacaaacatgccaaaaacaaagggctgctgccaacttcccacatagaaagtccacactcagtctcccattgcggttctgaatggtgaaggtgctaggacaagggaagcacatccctatgggtaagacccgaatcaccccatctacatctacaacactctgaaagctaaacaacatcctttgtgtaccggagccaggacgcgtgaatagaaacccacgagaaaacaatgagatttgacaaaagaggaaggaaaacaacactccaaaaagtcaaaacacacgccttagaaagaccacaaccaaccaaaatcctcaaaaacgaaatggtgggagcccaaagaagcccaccaccagcaccaccatgctgcccaaaaggacagaaccaccaagagcctttgaccagcggtgagaaccatctcaacaaagatggacaaccttcaagagcggcaaccggtcacctgaaaaaaataggcgccatggaaccggtccccaagagcgacgcccaacacccacctgacccgccaacacgaaacccaccaagaggggacttcctccacaacgtggagcatgccgagagtaggactcctgggcgccaccagcccagatctggccgacggtgcccaatggtgcataagaaaccctagaaaagactttagaagaggagagaaaaaaacccttacagagaaaaaaaaatcctacaaaccttacaaaatttttacacgaagtgaatgtgaaatttgacttaatgtagaacataattataaataattgtgtttttgggtttaaagtatcattatagagtatataaagttgttctaaaagtttgggagcatatgcaaatgtctaattatgatatctaaagattggaccatgattttatcgccatattgcttggaatgcatggaaatatgttaataatagaaactcatcaacatcgagtctaaaaatttccaacactttttgaaagatggataatttcctatttataagggaggctctactagtcttatagtagaggtggtccaaggggacaataaggtaatttttaggtctgtaggcacaaagtcgcaagtaacggttcattttttaaaaaagtacagataaatatgagtcgagccagcacgacactcacaaataaacaacactatttggagccaatatttccaacagttttacacattatcaatatgtgactttctaacatcccccaagatgataactatttatgcttactaattttagacaataggattacaagtgattctttttttgcacgctatatttttcaatcacaagtaatcgttttgattgaaatatgatagcaattagcattaacaattgggtaagcatatcaacaggattctcttccctatcttctcattttgattaatttctattgtctacttaagcttcttggattttaattcgttttttaatcttgaaaaaaatatcggttttccaaatagaatcataaatttagtctaatggtattcaatccaattccctgtggttcgacttcacctgtgtgagtttactacttgattacgtacacttgcgtattgttcacaattttcgtaacaacactagaggagcgttaggctcaattacagttgtaaacattactaacaaaaaaataaaatctctcgtacaccccatcattacctcatcattacaattacaacggtaaaatctacctaaggatcaacactattaaggggtgtttattagaccacatccaatatttttaggcatatcca

SEQ ID NO: 328481 - DNA, 721 bp, Cannabis indica
gtttaattaatagaaagattattattcttgataaaaaaatatagttagtaatacttctcatcaaatagttattgttggacctaataacataaggtgatgaagaatagaacatagacacttaaatcatacctctatttttgctttgtagaaagatattttagtatcacatggtagccaaatcttattaaacatagcaagaaaagcactacatacttaaccaaacaataatgataataataataataataataaattcttatcatgaactatacacattatcattaatatattattacaaataggatgctagcatcaatattctccatacaaaataaatccaaaacataactaatctaaataaaaatcagaagaagttcaataattttagatcccaaataaaataattacaactgagctgctctaaaatagtgggagataaattatgaacaataatcatgcttacaaattacaatgagtatgaattaaatcatatttaaaatgtaaataagaatttaatttacacctaattacgaagtgcaagtactatcttccgaacaaagagagccgatgagagaaagctcgagagaatgagagatccatatgttagaatatttttatattacatactagagaactaagccgcgcttcgcgcggtattgcacaatatttgttatttttttttagtattaattcagtgatacaatataaaatatgacattgt

SEQ ID NO: 328482 - DNA, 916 bp, Cannabis indica
atatgacatataaaatgcattctgaatttaaattaatctccataaactgataattcataactaatatgcaagtttcatgattaaaccctaattatctgcttatttccaaattaaagttaagaggtctttacaatttgaggaacatgtcaccttgggaagctgaagatgatgcctcctaaggtaataactttggtgcttgtggatggtcccccaccgttcttagggttgagagaacattacttgtttaattcaaagatagcaaatataacttttacatttggaactgtgtagatctcatttcccataggtttgatagttggtaccccaaacatcacgtccaattgagttgtaacacttcttatttttgaatggtcaatgaatatgttcagattaggacatgtctctgcttaattcttttgatgattatggtacttcccagataaactacattgtacaaggctaggtatcagtgaagtaccgtctcgtgtatacctacttagacaaagggtgagtcttatgttgttcattcgactataatagactcactaccaagtcttgtacaaagttcccaagggaaccacttatgagattacagtagtgtatacctacaaggtcttcacaaaacccttgtcgaggttaaaagaggaaaacaaacttggctgcccacttggaacattggacatggctagccaggtcccatgactcagccaagggtgcctaggccttagctgactagattttgggctaccccctatggccagccagctcccatgagaaagacccatggccagctaggtcttgaacaagactcctatggcttgccaaggtgtgtttcagatctaaatatgtgtttttaaagagctcaaacacgttcttagtgttcttcctgtttttcgtgactcaaagagtcaagaat

SEQ ID NO: 328483 - DNA, 1157 bp, Cannabis indica
catttgctatatggggtattgacttaataggggcattacccattgggcgaggaggagctaagtatgcggtagtagtagtcgacttcttcactaaatggacggagggcgagcccctcgtttccataacctgcaagaaagtccttgactttgtcgtcaagaacattatctataggtttggaattcttatgaagatagtatgtgttttcaccatgatcaggagatgatgaacaccaccaagcttccttcagctctcaatgaaagtaccaaaatgtttaccgagttttttagaaactaaatattttgagagaataaaggagataacaagtaataattaataagaacagtggatttttacatggttcaggcgttaataatccttagtctacgagtctatattattagcctctttgggcggatagtgtttgattacagagtattactgtatgaaaaacccttgtacaaaaggtgttactgcttagattttagcagggtgatagcacacgaaaggtctctccccccttcgtaagaacgaggatatttataggcacacatggggtaaaggcataccctttacctacctagggtttcatcctccatacgctactaaggcctgtactacaaaaggacaatctgaccatccactgggggaactttcctcatcgtacagcgtagagcgactgatgagaaccttcgtacgaccttggacacgtttcatctaaaggtctctcctttacgaaatagtctctacttaggcagttgagcagaaagcatgctcaagggtgcgtacgcgcattatcatggtctggtacagggaacaatatctgatcttgtgtttgaaaaatgtgtaaccgcctatggagcgccattttgtgaggagctaatgtgtccaatatctccctgaactcgcatcgctttctaggtcccttagctgaggacactgctcccggaatccgttacttcttacccccttccaggttcaggagttatttcttttaatcctcttgtatgcctcgcgcagaaaccatgttcccactttggtcttaccaagtgtccgatcgtagaattttcggataacagagtgtatattcaattttaatatttttaaactttatatttactattttaacttttaaaactttaaatattattttttaaaa

SEQ ID NO: 328484 - DNA, 1750 bp, Cannabis indica
gtaattttttggagcttagtattataggtccatatcctcatatcgctaccttgcaacattgtcaatgagatggataaagctatataatgatgttacaaaaaaatccattttaaatctacaaaatagtaattagtttatttgtaataaataatttgttttaaatttattgtttaaataaattatggtaaagaaaaagtgttgcttaggaaaagatatcaccattttcaggttaagataatggtggcgccagtcactgtgttaagacacagtgataagcgcctatgagataagatgggtcccactgaatttatttttagattgattaatgaattcaaaaagataaatatttatttaaatttaaaaagtagttacaaatatttatagtagttgagatattctctcaagtagttgagagattctctcaatgagttattagatattaaattcaaaccttaatatctaattcaaaataaatatctataatagaatcggttacagatatttattgaaatatttaaaataataaatatattagttaattaaatatttattattattttattagtttaaattaatatattgatataattctaaatctatacatatgtagaatttaaaaaacttgaaaaggttaataaaatcattactcacttataaaaagaaaagttattgctcatgtgttgagataaactcaagaacacattatgtagttatattctattagcccacactaatttttgtgtgtggtggtaaatctagaagatcaatgtgtgagtttgatgtcactattttaaggatataacttacgaaaagactcaaggatgccctgattcgcttcaacaactaaatatttctatttttttttattttagatttaatatatgtatatttgaagatccttagatgtggtacgataaaaatctaattaaattctttcgccacgtatctgatttagtaccacaaaactaacacaaaagactagtgtttggaagatgcaaggagcagatagatcaagacatagtcattggtcatgtgaattttgactatgttggttgtattgatactagaaaatccctaattggttattattttatcagggactgctgttaactagaaagtaaacttacagaaagtagttgctttgtctacaatagaatttgaatatatagcccttacataagccataaaagaagctctttagatgattggtttgattgaagaactcaggactgaatagaaggtgatcacaatgataaccaaggtgctattcaactgagaaaaaccaaatgcaccataaaaggacaaagcatattgatatacagcttcgtttaataagagggattgtagagaaaggagttgtcagtatttctaagattggtaccatagataaccccttagacatcttaaccaaagttgttccaaaaagaaaatttgagtactgcctaaaactgatcaatgttggggtcagctaagccctttgggatttggttagacagcaactggattaatgttaggttcatgttaaatcgaaccaaagtagagatttgtgaggaattattacaagttatcatttaagattcagtaagttagttttcttactaacttggaaaggggttgttagctggtgtggactactcggacagagttagttaaaataattagtaccatgtgctaggctataaatactcctcctactcttatgtatcctaatctaatcaacacctaaaatcaaaagagagagagagagaga

SEQ ID NO: 328485 - DNA, 1286 bp, Cannabis indica
acgtacaatcaatatggctgctcacggtttggctaagttcgcattaggggtggacgaggcttgtttttggttggaaaatatccctttacctatttactctgttattgtaaatgactaacccttttaatttataataacaagtaagcctgtacataaacttttgtaaaccgcccaaaccaaaccaagataatccgaaaaaaattacaaattgaaaaacccgacgaaaatataactcgcccaatctttatattgggtgggttaaaaataataccaacctgcccaatcaacctgaactaacccgaccaacccgattaagaaggttttttttatatatatttatatgtttttattatatatatttatatatcatataatttatatgactatttaaaaaatataaagttgaaactaatatattttttttattgtggttgatttgaactttaaattcactttatatatatatatatatatatatttgtctcattattagaattaactaaaatataataattgaatgtaaaaattaaaaaaatattaaaataatattagtggtcggtttggacgtgttaacccgaccaaaccgaccaatttcattgggcgggttactattttcttttttcttgattgggcgggttgcacttagatttttataacccgatctttacattgggttgaacaaaaaataccataaaccgaccgacgtacacccctaataacaagtactttcttcaaaaaaaaaaattctttacattattaaaagttatatgttttaatattttagttagagttttatatatacgtatattcatcttacaattgtgatccatacaaaattgtaccattaatttctaaaaaaattacacaaaatacttaaatagtcattttattttttatatttttatagatttttctttctacattttcagggactgttatttttcttaaaaaaaaaacattatttttatgttgttataacattatattatgtttttacaacataaaaacaacatttttttttaaaataaccaaaaaataataatttgcatttttgtaaaaaaataataattcgtagaaagataaaaaatactttttgtcatttttgagtatttataaaataatttttttctttcatgccattaaaaatgattaccaaactacattcgtagaaggaaaatgcttatggctttagaattgtggcttgtaatttgttgggccatcttgttgatctaatagctaaatatcatgggggcaattatccagcggaggtggttgaagctcttggt

SEQ ID NO: 328486 - DNA, 745 bp, Cannabis indica
aaaagtgcggattggatcggatgaacacccctaattacgtggtgccacaaacataatatattcatactcttacctcatttaatgtcaataattttgaattaataatgttataaaacaccatcactagagttgacataatataaatatttgaattatttaaagttgtgtgcaaagtattgtaatttaaattattgacacaattaaatttaagcagtactccttattaattaagattaagataaagtattaaactagacaaacttatttatttattttgttaataaaaaaagaagaagcctattttttaaaataagtcaaattttattaatttgtatatatattttacgtattaatcaaaattatatattaatgattcggcggcatttgtatatatatatttttaatttatatattatgaattatttaacattaaaaaaactgcgagtaatcttatcatactaccatttatactaaataccattttcaattgcaaattaatgtacctgatatgccttcacatatatgtatttattttaaattaatttacgatctaaacacttaagtttaatattcaattgtaaataaatatctaaatttaatttttagcattaataatacgtacctatgtgaaataaattgtaacatggcaattcataattggtccatgttattaaatttttagtttttttaaaaaattagtttaaatataccaataagaaaagggaaatttcaatttttgacccta

SEQ ID NO: 328487 - DNA, 483 bp, Cannabis indica
caccaaaagaatgtaaaggagtactgcattgttttttcttttcttctggcttctaggtcttggacagcccggagctcctcacggagtgggttaggattctgcctcttctccgtactgctcctacctggttgttcctccaacacgccaagaccttctccacttataacaaaaaggatctcaatgttggagacttggtcacgacggagaactgtcaaatggctaagctaatttctgagagccagttggttggacgatttttatctcacaaaggtcctctaccccaacgttcgcaccctggccgcagagaaagcgctccgggcagagattatagcctcggcggaggaccggtattaaaagtacctcttcagaagggaataggatctagcttacatcaaagcctaagccgccgctggaaggatccttcgcttggaagcaggcactgatcggatgccttcaaggcctaagtctctggttccggttccc

SEQ ID NO: 328488 - DNA, 514 bp, Cannabis indica
gcatacacaaacaatggaaagtgagcacaatcaagcaaagttagaaaaacaaaaaaattacaccataagtcccaaaaatttaagtttgatgcagacaagtccctaacttcgaaattagtagtatagtcttcaaaatttttatatgtccgtcagtacccaatttaacagatttatgaactgttggcaagaatgttatgtgttaaaagtttattggtctaaatcataatttcaagtagaaaaaataatttaaaataatttaattaataaataaatcattaaaaaatatataaagaaaattttaaatattttttatttgtttttgtttcaggtctccttcttctttttcttctatcctaatatgcctaaccacttttttcgcaagctttctattccttctccgtcttccgcaccaccaccaccacgagctccaccaccacccagttttttctgtacttgaattcttttgtcgcattgttgaagcttttggtgtgttgcttgtcattatattgtacct

SEQ ID NO: 328489 - DNA, 540 bp, Cannabis indica
aaacttccttatcctttgctcactttttttatcctttaaaattctcatgtatttttgtttgttggtttccagacatctttcatctcttttgttgcccaacggcgaggcatggagaaaataaagtatctggagagcaagatctagaatattaaagcgactccaaacaaacttactccaatctactttagccgactgcatatgcacttctctatagccaactgccactttattttgctttattatcaagaattagctaattattgtgttgttcaagacgtaagtggaagtgttgtccaagctgaaagctgaagaagcacaaaaagtacctaccaggggaaaagttggccgacccttcctttgctggaggctggccggcctatgctggcaatatggacggtcagtgtggtctggccataccccttaagttggtcaattcgttatcttattatcccacttaagtatttggataccttgtcaactgatatgttgtgtatgatgatttgactttcttgctgacaagctgtactccacgtggcatca

SEQ ID NO: 328490 - DNA, 1551 bp, Cannabis indica
tctttggagaattctgacatttgccaattgattttggcttcaaagaaggaacaccagcttgaaaatcatctatgtattgatcatcttttgctcttccggacaaaggataatacaagttgagtgtttctgacaatgatattttcatttgggtagggtttttgagaggtcaaagagtttggcatcactattggaatagaagagaatgacagggaaataatattttggggaaatttggtcaataagacaaagtttgtaaggttcaagatggtgagtttgggaagatggtgtgattaactctcttgagacaatgttgagttccatgttgaatttgtttttttttctttgttgaatgtttagtttaagaagtatatttatacatagatttaaatttgcataacatttacaattagtttacatgtatagagagtagttcctattttctccttctacaagtttaagtagcatgtccaattaattctacaatttcaaacaatgttgagaacttgataggtaagactacaaccagcaaatattaattgtgtttggcatattcatattcatttattgaataataaatgttaggaaaaacataaagtttttgaataatagatttagggtcggtttgatatattgtgtgtgatattgtattgtattgtatagtattacattaaattatattttatattatatttttatgtaatattatatttgatgttgatttgtatttgtatatatatatatataatattttaatataaattaaaatttaacataatattatataactaactaaaaattaaattatacttcgtgtgcgttggtatttgttaaataataattaaatcataaagttttattttgacatttttatgtaatttttttaattataatttttaattttttactcaattaaataaattataatatcttcaaacattatagtaaaaaaaattaaagactcaagaattattgcataaaatagagatttaataaaataatagaaaggaagataattgttaaacctatagaaaactcgttatcaccgtatctcacttgcatttgtcactacatttaaaatcgttatcattaacgtatttcacttgtagttctaatttcattcaaaagtgacgtcatcattgtaatttatacccaaaataattgttaatatttgtattgaaggattgacataatatatataaatcatgatttttattatttgttagtcttcttcgttattatttgtctagtaaatttatatttaagatttgtgatacttttctattaataattgtttcaataaaaaaaaaattaaaattattatatgaaaaatacaaattgacactttatttacaaaaaatacattcataaggtgtggacaatatgtataccttttatgtgcttttaattaccaaagggaaatttgatattctatacttaaaaattttcaaaatttcctttttgaaccaatacattttacactatgaaaaatatgactcttttttcaaaactccaaaaatacccccctctatctactttgtctctctctctctc

SEQ ID NO: 328491 - DNA, 1129 bp, Cannabis indica
aaaagactaataaggcttaactttactagctctttttccatgttgaggacagtaaatactacaccagctgtaaaaatacacttggatggacaaagaaataatattactttaaaattcttagttttaatttgttattattttttgataaaaaaattagaaaaaagtatttttatctctcggaaaatgtaatgattaaaaataaaataaaaaaaaaattccctactttgtaatatattttgtatatttgtatatacgtatcattactaaaaaaagagagtccgacactaatttgactcatgtgattactgtggtgctctttacttttttcctttttttggaaatagtttgatattttatgcttacaaataagtgatggagattagaattagaatgtagttaaagctaatagtactgctgagctccttctcccaaccagacaagctcctttaaactgttctctggttctatctcttcatctcattctatatattttactcaaaatgtatctgtagagtttgctctacatgttatatcatgtcatgatgtacataaagcatgaccaagtaccaaaactatattcaattctaaattagataaaaaaaataaaaattgattttggaacttgggtatgtcttgttcctgttttttggagcattaattggcttcagtctgcaaatttcatctatgtgttcttgaaattcaaatttgcttcttttttcaactttgcttttgtttcaggatgatttaataatgattaatatgttcttttctatcactaagatatcatcacttctcattattaatcatttcgatttctattaattttttttcaggatgatcaggaatgttcaagagaatttctctaattttggtagttattttggtgtcatgggcattccaggccacaaggcccccactacctaaagtatgtggctcccctggaggaccacctatcactgctcccagaattaagcttagagatggaaggtttttggcatacaaagagtatggtgttgcaaaagaatttgccaaacataagattgtctttgttcatggctttggatcctgcagacatgatgcactggttgcaacaaccctctctccggtacttaaatctctctctctctct

SEQ ID NO: 328492 - DNA, 881 bp, Cannabis indica
cgtaaaaccacactcatcatttttggcctcactcactttctttcttaccttagtaacgaactgatggacaataaccccactgaatttcaattcactggcattccaaaaaacaccaaaaggcgtctccttcaccttcagagtcaagttaaaagcttcaaatttggccgttattgaagcaaagtatacgttccctctatatataatacgccctggaaagtggtctgacaatgggagaataagttcaggagccaactgcatttaaaaagattaattagattttatcgcataataatcgcacaaacatcgcctaaaatcgcataaaggcagcaaaaattaggccactgtcaacaagaatagcataatatcgctaaaacaatgcagaacaaaacaactaaaaaaatcaagctcctatcagttaacatcgcccaaacatcgcataatattgctaaaatcgcataacctactccatatatactaaatcgcacaaacatcgcacaatgtcgcctaaatatcgctaaacatacccacaatgtattaacctatgttaaaatcgcacaacatcgcatattaaatcgcataacgtcgcacaaaaaacaaaagcaggaaaaaatagcgtttaccacgacccccataatttccccagatttttcttgctgggggtctcgagttggttgatgggtcgtcagggtggactgggtgtcgagtgggttgatgggtcgtcgaggtcggggtcgatggggtcgtctagttcgaatgtgggtggttcgtgtcgactgggtcttcgtgggtcgtctggttcgacgatggtggttcgactgtggtgattcgacggtgattgggtcggttggattggagttcgaatggagagagagagagagaga

SEQ ID NO: 328493 - DNA, 1035 bp, Cannabis indica
aaaagtaaagaaagagaggttattatgattattattaccttatgtgaacaagagcaccaagagccctaaagccacgaacataaagatcaacaggtctagccccaatctcacacccaccaggcaaagcaaccacaccaccaccaaaccgaccaaccaaacctccgatcacaaaaaacccacctcgtattttccttatttcctccgaacaaggctcaacccactcaaccccatcacagttcacccacatttcctcattaaaaatctcaactttagctcccactgacctcagaacagacaccattgttttagtatccgacaaattgggcacgttggtcagcttcgatgtgccccaacagcaaagggtcgctgctaaaatcggtaaagattcgttcttggaaccactgatgctgacgtggcctgaaagctctgaaggtccattaatggcgagtttctgggtttttgagatttttggggttttggggtgagagtagtttagacatgaaaggaggggttttggagtggagattatggttatggagaaagaagaagaagaaggttttagtgtgtttgagaatggtgaagaaatcgccattggagagatgaagaaagagagttttgccgccaaactctctttttcttttctcttttttttttttttttttcttgggttttttcaaattttttgcaattttgtacaccattgtgcaattttttgtgcgatgccaacagaaatcagaagttagggatggctttcattctttttggcgatattaaacgatgttcttatgattttgtgcgattttaatggttttgtgatttatgtacgatatctttacatcattatgcaatatggtttttttttatttattattttcttgttgtgttttttgtgccacattgtgcaatattgttttgtgtttgtgtgatggtgagtgtatattagacaactcactcataaaagttagtacattttaatgaaatataatatgatggtatttttgattaattgatacaaaaaaaacaagcattcccaac

SEQ ID NO: 328494 - DNA, 1845 bp, Cannabis indica
aatgacttagtctaagaagaatttattgtttccagattaagataaaatatcacaacaagatgtccctaagtaccaatagtaagaggttaaatgcacacttgtgtatgtattaaaggagactcctactgttagtgggagccatcaaagatgtaatccaaaaaggaacatagggagacaatcaagaaaaacttttggaaagtgacctttatgtcagataataagggtatatttagaatcatcaaaatttaatatcagagatggtaattactcttggggtggaggaattattttagaagggtacaaaactcatctataataatttagttccaccagtgaagctaaatcacttaatttcttttaaaaggcactaaaaagttcttgactgttatatctctattttattttggatagaattaaagttgtgtcttctgtacatttagaagaatttgttaagcagtgaagaattcagcatccctagaagagtaatacatatagaaaaatgatgttccataatattttataagcacaaaaagaagtaataatagagaaagctattgcttgctacaaccttatagttcctattatttgggtatagtcaaatacactacctttgatatggattgttgaccaaggttttcggcaactaattaaatgatataataaagagagctttggaataattaatgcaggtggttttaacgtggttcgcgcattaataagttgtagtccatgagtctttgttattaaggagaattcttatacagagaatgttcttggtgaattctctctctcttctttattcttttcgatcgattgatcccctccccttttttattttgttcagggatatttatagagttttacaaggatcactaaaaagagatcacttgtctttgagtgccagccatctgggcacacaagttcctaagagatataaaataagacatacatgacctatgtcgtaggtatcatagggattaggtgagagtaatctttatcttccattgattgatgtgattcttcataatggagtcgtcactagaatctttaattatcgtgtaatcactgtaaatgaggcttacgccatctgtcatatccttttatgaatgttctaatacgttttccctcatgccgcattaaatgtgaaatgactgtttgaacaggttctccttctctcagagatgctttgttgtatctctagctcccggagagtagagacatggtttatgctcctctccgggggctcactccctgaagtgtacttgcttgtctatatataacttagttaattttgtgggtgaggtgtccttgaaatccatgtgccacatgcaaccgttgccacgtattttgggaaaaatccaaggcaacatggatattaagacaatggattgattaaaatgcacttctagttttatgttagtgcaagtgcaagtgaggagtttgttgggatttaacgccctaaataaaacccatttcaatataatcttatttgcaatcaataaaagattagaaatcatttaagttttcatattattttcatgattatggtttgatatacaatttcaaataaattcagaacatattgtcattcaaaattacagtgatgtcatcaaagtggaaagtaattgtgatttaatgcttcaaagtttagtcccatgatttatcagtgcactgaatttacactcacgtgataattaacaataaagtttacttacacttagataagtggtatgtcctttccagggcattggtaaagtgtgctagtattggatgtatggagtatacatcagactagaccgatattgaacttagataagatatcataaacttgttggaaattatttt

SEQ ID NO: 328495 - DNA, 2711 bp, Cannabis indica
atttcaaaccttcagaatccatagagcatcaatggcttcctttaaaatttcaggaccttcctccatctccgacgactcataatcagaccaccactgcctcttccttccgttgtagaatccttcctcgtaatcttctccttctttgtcttcgtcttcatattcatctcttttgatcactgtgaaattaaaaccaaatctttgagaacgtctggtcacgaaatttgaatcccatcgacggtagtgggtctgacatgaacgccgacagtggtagtaagaaacccaaggaaagatgctgattgctttgatataggggatttgtttgagccattgacttcgttcaagacctcgatcgtcgaatgtttatgtgtgaaaatgaaaaacgaaaaaattaaactgagctgaaaatttacacaaaaacaccaaagtatgggaatcataaaatatattataaaaatatgacagaaagaaaaccacaaaaaagtaaacaattgtaaaattccataacccaaatgcattaaaaaaaatgccataatatgtttgcctgtatggtgaaaggcatcagtgttacttagcaccatgttatatattaatatcgctattagttcaactaagtatcgggtcttataattttttctttggtgtattaagtatttcgacagtactagtcttgtcttttgacatggtgtgaatttgttgttttggtttcgttccttgtctcttttgttttggctcttgtctgttttttgtttcgttcttggtctgctcttttcagcttttactgttatggcttcttcaagttctaataaggggcaaagtgatctggatgctgaaatcacactggactttgaagattttggtggacttgagttagatgtggaagaggatgaggaagaatatgatgtccggtggtgtcttgttgggcggtttttgaatgctggaattattgatgtccaagccatgcaacatatgatggcttctctatggaaaccagggaaggggctgtatgtgaaagagttggatcaaaatcgttttttgtttcaattctaccatgaaattgatatcaaaagagtgattaacggaagtccatggacgttcaaaaggaagcagcttatttttgaaaggttgaaagtcggagataacccacgttcgatcccgttaaatcggcttgacttatggatccagatccatgatttacaacacgggttcccaactgaacatacactgcagaggataggcaactatattggtaagtttattgaatccgatgagaacaatttttctggtgtttggcgtgaatagtttaagattcgggtaactatcaggcttgaccatcctttgaaacgtcgcatgaagattcgccggttggatagttcggaatggttctgggtgaattttaaatacgaacatgctccaacattctgttttatatgtgggattatcggccatgctaatagaacttgtccgaaaatttttgacatcccagaagaacaaattgcaaaaccgtatggagcctttatgagggccacggttcaaaggcaaaataaattaattggctcccagtggcttcggtatggtaggatggatagaggcgattggactgaaggtcctggttcttgctctgtcggaaataatggaggtctgactacggctcctggttcaacagggaagttcgactcattgatggtgcatcgtgaagaagatcggggacagggagataatcgtgggattacggagccaataatggtgcagaaattgggtcctgattttgaggagaatattgaggggaatattgatgttaatgtggtcaaccacattgacgtggatatgcatggaggtggaaatacagatttgactatatctgaacttaaaaggaaaagacccaattctgttgggcctggaactttgggctcacaaaaaaatagtatttctgaaaatgaagaagttttggtaacaaaaaacttgtttggggcgggtctggatgcacagactcgacaggaatcatgagtactttaagttggaactgccgggggcttgggaatcctcgggccatacagttcctgaaggatattgttgtccaaaagaagcctaaatttttttttctttgtgaaacattatgtggaaaagctattcttgaaagggtcccagtatctttgggctatgagggcttatttgtggtggaggcccgtgggcatagtggtggacttgccatgttatggaaaataaggaagagggggagattttttattttttcgacaagcatatcaatattctcactcatattccaaatatgcctacttggagacttattggtgtttatggtgaaacaaatagaagtcaaagagagaacacttggggtcttattcgtcaacaatcagaaaatgctcgttggccatttgtgttcattggggatctcaacaatgttactagccatagtaacaaacatggaggtcggccttatcccgagcgattgatatagggattttgtcatgttctttcggagtgcaatcttgttgacatggagcttcatggccacccttacacgtgggagagaggacggggtacatctaattggaccgaggtaagacttgatagagctttggcttcactttcttggcttaataatttcttgactgccaaattatttaatcttcatgcatcctcgtcagaccattgtccaatttttttggaccctattattcgaaacatattta

SEQ ID NO: 328496 - DNA, 1300 bp, Cannabis indica
ggtagggagtctgctatagtacccttacggagttacaatacaatgcctagcaaaacaacaagtgctgaaaaacctagggtgttgcacagcctagggtgttggatagccttaggcagaagtgtgggagagaatgaggaagagagagagagagagagagagtatgtcaaacacttagagagtttgagatcaggtttctagcttagagtcgacttatgcaacctagatttttagtcagaggttaaggcctttatataggaagccttaaaccctagatttacaattcaaatcctttagaaatcgtattgttagttagatatttacaaaagaccaaaatgcccttgattctagatattattcagctattctgttgggcttttggggcccaatttgtagtccatctttgttgtctacgtgcaggagtgtccagtgaggcctgcagagcatcctttggccggccaggcccttgtgctggccaggctggtcgactatggtgctgcccctgggctggccggccatagtgtcggcgaggggtggccgtccaactcctgagagtgagttggtctgtcacttgatcccagtttgagtgtcgggatctttgtttgctcaggtgctaacttggccttccttttagtgagttcaactgccacgtggtatatgttctgtccatgtaagcatgtcactttgtgaggacaaaattgggataattgatgcaatgtttaatatatcatttaatgctcatctaataatttattttaaatataaaataataataataataatacaaaaataaatataaaatttaataataaaataataataattaagaaaattatttaatgcaaattaacatgctcactaaattttaataataaaatattaaaaataagataatgataaacataaaaacatatcatttattgtgatataaattttgtatcatactatattacaatttaaatttagatcacttattattatgtgagatatttacatcataattagcacactaattaagtaaaattttgacaaaataaattttattttgtatttgcattatttgtatctctattatctataatctataacctatataaaagtgtgaatgtctttgtacttttactaattgaattgcacaattagccttcactatatatttaattacaaaaaaattaaagtaggcaattgaactattttttttcattaagctaagtttgccctccaattaacattttattttatgtgaaatatttgtgaaaatgggcattttgtcttgtgatttttttttctttttgctataaat

SEQ ID NO: 328497 - DNA, 771 bp, Cannabis indica
agagaggtcatttgaatgaagggggtaatgtgggaatatagtaaatgttgtcccatcttaccaatataatgtattataggtttagggaaaaaatttctccctaatgtaaggataaaaaatcaaatttccctatattaattcaaatgagtcatactttctaaatattacaaaaggtggtaagttctccatccataaacatttttaatcaaccaaaagagtatattttgtgaaaggtaaatagcagcataagtacttgttatttgtgttttcgaacgtatggcacgtagcatttaaagaaagggattagcttaataattccctaattaaaattctccaatacaaccatgtcacagagaagcctcgcggaaccaaaaacatgtcaagactgggaaggcacaacaaagtctgcttggccttgcctcagcttctcggatgcggaaggagtgttgtctcccttagacccgaaagggtccaaatacggaagcctggccagttgatacctggatgggtactcaacgggcctaatgcggatgtcgaccgcctaggagtgtcgcggatgtctacctttgatataagccaggtcactaagtgacaattatactttttctgacacaggatcagatcctatctcctacgtccaagcatggtagtgtgcacaccaccaccacctttttgtcaggcaggtattacagactcctgcttttaaataggggtgagcataatatccagaaaaccgaaaaaaccgttcaaaccgacctaccgaacaccgtt

SEQ ID NO: 328498 - DNA, 753 bp, Cannabis indica
gttgtgtatgttgtcgttatttaagatatcttgtaaaattttaaaatatttggagaaattcaacatgccaaaaataaaattcatgcatactatttttattttgtatgtgtgtgaaataaattgtttgaacattactttaaatattctaaactattccaaatttttaaaattttacaagacataacgtacacacctaaaattctttcgaataacgaaatagataagaatcatcagtaaatcttttttaggaatgtgcatcataaaagcacctaaaaataaatacctaaatagttttgactttattaaaaaaaataataataaagttttgacttagattattaaaacaaaataaagaataataattaagcatgatgattacgaaatctcaaccccatttatgtttggattttgtagcattattattcttattacattgagatccaaattagccattggatctaacaaattttaatgcaattttacgtaatcatttttctatttttattaaacaaaaaataataagtcaaacgttacaaaacgcaatttcataatttttttttaacaataaaatgcaaaattttcactagtttttttttggtaataaaatttattttattcttcaatcttcatcatcaccttcctaattgttatatatataattcgttaatgcgtgttgtaagcatattctttatataatataataatatatatacacacatcatttagttattatctacatatatatatatatat

SEQ ID NO: 328499 - DNA, 1048 bp, Cannabis indica
aaaaataaaatatacacttttttctttttaatatttaaaatgatttttattaaaaaaatagtttgttaatttttttagtgtgttttattttttaaataacaattccatttataaattttttatttctattaatagttttatctaattttaggaatatagagaataacaaaataggaaatattaattttttaatatttaattaatgattataaatatcaaccattagatatttgatccaatggtcaagaataaaatacccatacacgggtaatacccattaagagcatacccatatatataaaatgaattatatttttatttaatgatatctaagtaataaattgtatcaaattttaatttttactaatttttaatttttcataacagcacttctcggttattataataattgattagagcataaaccctaacagtccgaacgtttgttgattacttctctagaaactccaaatgatatcttctagattcccgctttgttggaagattatttcatctggacgagtcgtctgtccgtctcccgaaagagctgacttcgataatggatctgatccattatttggtttgggcatgaagtgattgagttgtaattggatttggaaattacacttgtccttatccaaaaacacttataattatttaagtcattttgtaaaattttgagaaatttaaaaaaatttatcgcgctaaagattcaaatagtacgcgtgactcttttatttatacgcatgtaaaataaggtgtcgtttggtaatatttttgtttttaaattttttaatcacaaaataaaagtaaaattttaatttttaaatattttatttttgaaaaacaaaaatacgttcagtaactatttttattttttaattttaaaaataaaaaacaaaagtgtgttctgttaagtttatttttattttattttttgattttatttaagtcgaatttaagttcggggtcagattcgagtttgggtcggtgaggggagatctgggttcaagtttggtcaaaatttaaaatattaattaagaaaaaa

SEQ ID NO: 328500 - DNA, 844 bp, Cannabis indica
cgactccatctaaaaaatttgccgcaaccgtttattatccactttgctaatctgaatctctaaaatacaccaagtagtgaactcccttcagctattgatgcatgctcatctcctcccaaagtgagtcttgaaaaaaaaaatcttttctcaaaaatttgtgctcacttcctcccaaaatgagacttagaaaagtcccgaacacccacacttgttcaaaacttctctataaccaattctatgaacaacaagagaacaataacaaagatacaaacacctagcaaaacactctaggttttttttatttttttaaaaaaaatactcttctcaccaactaagacatgaaatatgaatctagaagagatgaaaacattttggtactcttatagaacatagaaatcataaagacaaccacaaatatattttacaactgttagaaactttcttaaaataaatcctgatctgcgatagaattgtactctattgtgaccgctcggacagaatcaacaaactttcaatataaagccaagatcactaattttgtatttttatttcctgccaataaaaagattaacaaaatatgctatataattatactaataaaaagactgctatctacttagcgtcagttcataactgaagaaaaaaaattactatttgcatctatggctataacgtcggttaccccaaccgaaaaaaattctttatatgtcactgaaaaactaaagcatttttttttttgttagtgtctcttaaaaaaaataattcctacaatacacaccagccatagatcacaatatacaacaagaaaattaatatttaattcacaataaattaaataatattt

SEQ ID NO: 328501 - DNA, 389 bp, Cannabis indica
aaaaaaaaaaatacatgacacatatagtttcaagatttgattcatttggttaaaagaaaaactacaaagagtactgctatttatcctaagatcaatcaacttcaccattcacgtacgtaggtgttgttggattggttaactgtggcctgcaaagtctgtcaagaatactacttcgatttggtcgaaataggtagcactatgtgcatgaacttttttttctttttctaaggtggtattttaactattacaaatcttgaaaatcagtgaggaactgaagatatataccattgaatattatatcacttacttttaatgtatgaaagaaattccaaagcaacaggaccttttttttgcaatatactataaaatataaattggtgaaagtcgaa

SEQ ID NO: 328502 - DNA, 695 bp, Cannabis indica
aacaattacaaatacaattgacttaaataagtttgaactccctttaaaatttttccgctatcttttgtaatttccttggccaatctcacttcttaacacaccaaacaattaactcccttcaacttttaatgtgagtgtgcttacttcctcccgaagtaagtcttggacaagtcttcttctgaaaacttcttctcttgttcaatgaagctcttcaccttattctaagaataggcaaagaacaaaagtacagaaactaaaacctagtagaatactctaggttttctcacaagaaacacttttcacacaaattatgaaaatataaaataacaagacttgaagagaccaatttgtttgtatgctattaggtcctatttataacatatagaaactttagatacaaccacaaatacaattctacagtagtacaaaacttttctaaataaaatcttgatttacaacaacatattcacaaagtgacaggtcaaacagaatcaatcggcaaacttttcatataaagtcaagatcacaattttgcctttactttctattataaaggattattatacaatctgctatatccatagcgagattgaaaaaattaattaccattaattagaatcaattatactacatataaattatctaaacaaactttccgtaaataaaatttatcatctcttagagtatctccaata

SEQ ID NO: 328503 - DNA, 845 bp, Cannabis indica
ctcgcttgcggctggctaactctttagataggtgtggatcgaaagcccgctagggatatgactctgataccatgttgagaatcatggggttccatctcaaaaccaattgacaatgagtggagtagcccatgttcttatatatggctcaatactttcacatttaatccatgtgagacaatattctccaataagggtgttcttgaaagtgattgatagggcatgaaattggtgaagttgcagcaattgattatagtggtcaaggcaagtaagttcttaacaactaacacttgcgtgaccactctgcttttgtttagtgggatatactcaaatttcaagcaactcatcaatgagagtgagtcaaacaaaagtaaaatattgttctttgtgtaacatatgcacatatctctttttccttaccaaacttctagctttttttttttcactctaattaaaaagaaaaagaaaaaacaaatctcgggtaacttagtgatacgatcgatatgattttcaagcattatagaaaagaatcttgcttttttgctttaactccccatataatgtgtgattagaaataggaaatatttttatatatttatattgatgtgctatttgaggccttaaattcaaattcttctcatattttgtcaaaataaataaaattatattagctaaattattcaaaagtaaatgttattttgattcttgtactttacaaaagttattaatttgatcttttgtttagtcaaataataattcagaccacgtgttttttaaaatagtaccatgaactcaagtttcgtcaaattaaaacattactagttatattttttttctttttttttgta

SEQ ID NO: 328504 - DNA, 1195 bp, Cannabis indica
aaaataaaaaaatttaatgatttgggccaatcaaaaattatcacgtggcaatttacttaacacttaactgtcaggtacctacataaaagtttaaaaattataacttaagtattataatcgtcaaaaattaaacttaagtgtttatttacaactgaaagttaaacttaaatatttatactgtaaagtactcattttaaaaatatatcacctcattaagaagaattagacaaaaagataaaatatgcacatgatatatattaaaatgatcttttaataaaattacaaaacctactgaactcctattctgttttgctctgtaacactctgtccaaaaatcacagttaagtgtcacggtgaaatgtcaacgtgtatatacttgtacacgtgacaaatttttattagtccatataatttaattattttaaatattggaaaattaattaattttaaaaataatttatttttaagaagaaaaataatttaaaaatctttttttttctttttcttttcttctgtaactctcgacaagtcctcctcctcttcttcttcttcttcttcttcttctcttcttctaccaataccaccactagaaatccacttgtgctcctcctcctaaagcgttcaaaccaggaaaaaaacagtcgaagacaaaccaaacccaaaattacgaaaactcacaaatctcaaacccccaaaatcacatccacatttactcactggcgaactagacggagcaaactataacaaacacagtcaatgctttctccctttcttagtcgcaagaactagacggttcgtctacttcgtctccaagaagctgccgaagatgcattgtcacaaaaaaaactccccccttcgtcagttgtatttcgaagtcagttcatctacttcgtctacccatctttcttgtctgtcagatttgaagcttcttcttcctcctttgattttatgattcgaagcactagttcgtgtctcttcgtctggtgtgttttgaagttaggagtcttactattgaaaggggcagaggggtcgattggggtgattttgagttcttttaatttaagtttggattttatggggaccacaggtggattactggtggtattggtagaagaagaagaagagaagaagaagaggaggagtgtcgagggttacgagaagaaaagaaaaagaaaaaagaaagaaagaaaaagaa

SEQ ID NO: 328505 - DNA, 984 bp, Cannabis indica
aaaaaaaaagaaaaaaaaaaaataaaaaaaaaaaaaaaagaatatatagcgatagattggatattatctatactcgtcattatttatatttgttaaaaaaaaataaaatcaagggcctagcctccaattatctttattttaaaatactctttatttaaaatcccttacaaaaatatatgtatttattaaaattcattttttttaaaaaaaaaaaaaaatcaccgtaaatatatttttttataattagatgtttttcgaatttgttctaatatctaatcttcaccaaaaaacaagaaaacagccccaaaaaaatattaataattatatataataatttttcaaaatataaatagggaattactttatatactattttttttacttttcttttttaaacttatgttttgggttactccagtagtttatatattgctatacgaattttatttgcgatttgaattgctatgttagttgctataggaatttttctgggaatttttctgtgaaattctattaaaatacaaaaaaaattattttaaaaaataataataaaaaaaaactccaatatatattatgtactcagaataatgtttatatttcttttaaatacataatactattttatatatatttaggacttttacaatagcaatattttaatattattaaatgattatttttaaaaaattgtacaaaataatgttaagagctcaattttcatcatttttttaaataaccaaacataacccaatttctagtgcgaacatatactaaaatgtaaccaatctttaatataacaccttcagatcaagttattattaggttttatttttatcaaaaattgagttcacagtaatatcttgtaccatccattaaaaaaaatcttacgtttagtcacaacaaaatttgtgactaaagtaaaaaaattgtaattaattataaattatcattcctatgttgtgtctaaaagattcatggctaaag

SEQ ID NO: 328506 - DNA, 1132 bp, Cannabis indica
tttgtgtaaaaaatcctcctactgcactaaaacaaaactttttacatgagttaatcatactaaatgacgagataaagttagagcttaaacattgaaagtaacagatattagtatgaaatttaccctatctcattacagtttcaataagtctatcaccttgttacttcctcttctttacacggcatagagcagcacattgcacaacatttatccttgtttccattcatttctgaaaaacaatataaaaaacttgagtctatacatgtgaccatgtaagtcataagtagcggtaagacaatgtagtaactctttaatcaccatatgaatatacatatataagcaatcatatagacatatgatacaagttggccatgctattatagtaatatatataattatatttttctttcaataaaaaatatagataggtagtggagggccaatatctctccaagcatatgtcccaattcggatactaacatggaactatagaaggtagaatataattcgagcttattaaaaataaaataaagaagaagataaatttttcaaagaaaagtaatataataatgaacctataaatcattagtgaaaaagctagcaaagttctctatgactacacacaagtacgaagtcacaaataaatcaacatctgtatgtgtagtgtaatatagcattgtaacataaaaacctataaatgaatttggtgatttggtatgatatctaaaattaatgaaatatcaagataaagaatttggattgtgttatagatagataagaacctgaatatataataaaaggatccaaggaataatcctcatctctggactgagggaagggaatattgcaagacccttcaaatacaccaaagtacctatcaccatatacaaatgctaccaaacaatagtttatatcaaaatataaaaatatagaacttgattattgagttaaatgcaaaacaataatttattgtacaatatcatgatcatctctattataacaataagaaatagtgtggttctacaacttcatacatacctgttttgtggtattagtcaaaacaccaattactgtcatcattcaagataatctctcaaactaacctctgtcactgatacagaaacctcgcaca

SEQ ID NO: 328507 - DNA, 912 bp, Cannabis indica
aaaatattagaaggaattcttaaaaagcatccaaatacagtttgtctaaacatttccttctattcattggaccaaagagaattgagagtctcaataattttataagaacaaatagaaataacctgggtagtatgaaaattttcattactaaatttattatcccataactaaaaaacaaaatagtaaaattaataaaacagtaaaataacaacaactataaaatatacataaaaaaattaatacataatcaaacaatgacaagaacaaaaataaacaaaatctaaacataaaaaactctaaatagcaaaaatatataaagaaccaaataaaattagagtatatacgaatacatttgtaaaattataaatgaaacctacaacatcaaataaacaaagaataaacaaaatataaataaaaactctaaagataaacaaataagaaaataaatagaaaatcaataaagaataacaaatttatatgtaaacaaattcattgttgtataaattgacaaaaagcctaaatagaaataaaaattttaaaaaaaaaatatggagaaaatgaattatataaaaattgtaagttaaaaagaggactaaacccgtaataatatataaacaaaaaatcaacaaaataaatataaaatagaacctacgattgtattgttatgaacaaaaatataaataaacaaaatataaccttaataataaacccaaaatagaaaaaatatgcaaataaggaaggaaaaaaactgagaatatacaaatatatttgtaaaatgaaaattaaaactcccaacatcaaatcaataaagaaaaacaaaaaaaaaaagaactaaaatccttaaacagcaaaaaaattaaaaaaaaacaaaaaaatgaacagagaataacacatttgaataaaaaaacacat

SEQ ID NO: 328508 - DNA, 584 bp, Cannabis indica
taatactctataaaaatattattgttacaagtgattttttttttttttttgagtatagcgtaatagtttttacaatcatatattagcttaataacttaaaggtccttggttcgaacctatgaccttctccctttttcccattcctccctcaccactaagctagctttagtggcttattgttacaagtgatctaatacaactaaagtttaatataagtaaaacaacaaccttactaagtaatcaaatagaacaagatattataaaaataaatatacaaaaatgttacaaatttaacactgaataaagttcattaaaagtataactagaatatatttttaaagtttaatataagtaaaacaacgattttactaagtaatcaaataaaacaacacattatgaaaataaatatacaaaacaacaaaatgttataaatttaacacgaaataaagttcactaaaagtataactaaaatatatgtctttttattatacataaaaaaaaaatatgaataatatattttaatatacaaaaatataagaggctttttttatttttaaatttcaacaaaaaatcctatagaaatt

SEQ ID NO: 328509 - DNA, 1570 bp, Cannabis indica
aaaaaataataaaataaagtgaacaccagattttaaagaggtttggctccttaagtgtggtaatagcctactccccttgtatttgtattaacttgacagaaggaatgaagtgttcttcctcttgaaagctcttacaattgatgtctgagtaactttctctcttagatcactcttttctctccattgtatatttccccagcaattcgctcgatccctttcatagtgagcctacgtaactatttattgagacttaatacataagggatggttttctttttgcttacaatgaataaaataggaaactacaatgattctataattacaatgtatgaaataggaaactaaaagaggtattcgtcatgctctgactcaatcccgtaattacagggattatcttcgcgtcttgacacaatgagattaatctctgaagttgtcatctctcgtacgtcgctcgtcataaacatgtctaaacttggtcgaactttttctccacaatcttgctcggatacctgactattacagatgctagttagttatttataggttgttagggacatttttctttgccaggtatcaaaaatatgggacacatgtcattcaattctattgccacgtcaaggtgcaaaaaataggataacagatgtggaatgatgatttcctttgagcttgacctaatagagataaatagtggagtactcatttcagtaattaattagtttactaaaatattatttataggtagctaggtgttttaaggataaaatacattaaagggtggaacggtaaatttgttcctacttgatgtagatcatctatagtggatcacagattattaggattacaataattgataattcatagcatatctatatcgtggaacatatagagagttctatataattaagagtgcaattctgaatatatagtggcgcaaggagaaattaataagttagagaattcatttggtaaattctagacctccttattggaagcttggttatatacgcgcatggtccctactctagttgagacaataatacttatagactcagtcaattggttttaattaatcaattgtaattataaaattagccaatgttttatttatgaattttcactaagcaatggcttaattgtgaagaaaagagattttaggatttatttgttaattaagagaatttgtaaagtctaattaataaataagataaatgacaattttatttgatatttaattgtaattattaaataaatagttttggcatttatagaattaaaatttaaaaaaatattgcattagtgaaataaaaaataaatgattgaaaaattgtaaaattataaccagtggagcccatctatatggtcaaccattatgtgtttatttttgctactattttatcattttttattcgatataatttaaatcctaaccctaggtgaaatagtataaaaggaatatgatggtctcgttctcatccaactcttataacctagtttacattctattagacaactagcgttgttgagagcctcctttccttctcctattttgaaatcctctctctctctctct

SEQ ID NO: 328510 - DNA, 948 bp, Cannabis indica
taatttcccaaatcgcacccgtatcgcgaagctaaaaaacctcataaaccgcaccacaaaaaattggtgcggtgcaatttttgtgatttctgcagtttggactatcactaaataattaaactattacaaatacaacaaagcttgagcaatacttgtcaaaaataccataaggcttgaaaataaatatgaaaaaaaattaaagtttcaacaatacaataattagtacgctttggctggacattcacatctaaataaatataaaaaaaaattaggcatttttataatgtgcagtgcactgtggtgcagtttttgaatcgcatatttacaatttaaaaccgcagtgtgggatttaaaaaaaattacaaaccgcgaccgcaccacaaagaatttcaaactgtaatttttacggtgcagatggtttgagcggtttgatgaacacccctatatagtagagacatgataaattaataaattgggaaacttatttgttaaatttcggacctatcttgttgggagcctgattttatgggctcatggtcctacgtagtatttataaaaatgtttaacggtaggttacattaattgattatttaatcaatcaatatttcacatttattattttgacaattttgaaaatatttcactcagttggtgaaaatatagatgaaagaaataataaaagtttaattattaattagacattttgttgtgaaaaattaataataagtacttagataatatttttattaaaataattatcttaacataattatttaattaaaaatattatttaaatataagaattaaagtaatctatgacataaacaaaaaaagcattatttaagtttattgagatttcagataatgaagagcacaacactagcccaataccactatgtggttcgaccatgagagaacttggaaactaagtgtatgtttgacatcata

SEQ ID NO: 328511 - DNA, 544 bp, Cannabis indica
taagaacatgagctactccaccacttatcaccaataagttttgagatggaacctcatgattctcatcatggtatcagagccatatagagccatatctctagcgggttttcgatcccgcacgagatctagatggtgcaaagatgcttgagatccgaacaaaaataagcgagcaaatgacttggcctatgataaggtgcatcaagattggtgagctcgccttggacttgcactatcaataatggtgggttacaaattggttcaaagactccaaatcacaactctaactggtaatctctcaaaaaatttctctacgttttataaaaatctctcttgatttttctcacactaacaactttctttatttttctttacaaaatgtctcactgtctctctcttcaactttgtagaatttttgaatcttgactttaatgtaccgttgtaaatgcagtttgtaactgatgagcacgtaaagagatttattctaagtgattttggattttagttttgaaaattaattttttttttgacgtggtgaacagagtca

SEQ ID NO: 328512 - DNA, 762 bp, Cannabis indica
ttaagtgaaaggtgagttattgcgcaatccactcacaaaattaggtacattttaataaaatataatatgatggtatttttaattaatggataaaaaaaacgtattcctcacttagagacatttcatttataacaactttcatttgcaaattttaattttgaataatttataatggctaaattcgaatttaaacaaattgttacattcatacttatttttatctggaattatttacagctataatataaacaaaacattaagaccaaaaaaaaaaaattaccaaaaatatagtaaacatatctcaattaaatgtatgacactatatatatttgtatatttataaaaaaaattatatttatattaataaagatgatgattattacaggtaagactccattaaaggtagggtgcatggatttttttgatgagctatatggcattacttatccaaaacagtcatctttttagttgtgttattaatttaattaaattaaattaaaattccataattccaaccacacacagttcatattccacttctgaaaactagaaactattgcatatatatatataataataataatatatatataatatggggtcaatgaaaatcatcttcttttttttttttcttttcttataatgatatgataaatgacaccaatatttttataaagaaaaaaaaattaaatgaatcaatgaagaaaaaaaaaaagaaaattgaagattgtattgagttttaatttgtatatatattttttg

SEQ ID NO: 328513 - DNA, 1013 bp, Cannabis indica
tgtaaggatacctatcgctgattatcatgccaatctaaatccagtgaactgacaaatcagggaattaaacttttgaacatataaacatgattatattttactgtgctgacaacataaaatcatgtacaaatacatatgttctggacttaatagaatttatacattaaacaatcatgaaataaatcatgtgaaccatgcaacataaaatgtgatttctgatctttattaactagtaaatctgattatattgaaatgggttttatttagggcacaaaactagaccaacaaatagctccctcaatattgatctcattttcgcgattcaacttgcattttaaagctctttaatgtaatgtcttatacccacattgtaattttgaagatttcaagtccaaaatcgtgccaaagataagtgggattttttctacatatcacctaaaaatgattcgacggacgagattcaactccgaatattaaagattttcatcaacagtcaattttaacctttagatcatcatcaatggccaggattagcccaaagtaattttttaatattttattattattttaataggatctctttctctataaaatgagagctcctctagtttatttttcacattcaaaaaagagtccataagatcatagcatctctctctactttccctctctaaaaattagagctcttgcattagtcaatttcttgtaattattgtgaacaataaaaactcgaagtaggtgtaactttattaccgtcgcgacacagggaatgaattactgtaaatctcttatgtctctctaattacttactcaacttttattttctctttctaatctagcgaggagtgttagtcaaatttttaagtcaacaatagagtttatttcgctaatcgtgtttcattattaatctttgagttaaggtaaatcattttattaaaaaaataaataaattttgtcaaaaaaaataatataaataaataagagattagttcataaatacacaaaaataacaa

SEQ ID NO: 328514 - DNA, 1461 bp, Cannabis indica
tatatgtatatgtatatatatggcctgaataaaataatgttttattcatactaacctaccctaatgctacattgatccctacactgaagaataagaagaatagtaaagtgaaggggaaattgtgaaaggcaatgggaattgagaattgggtacctggaagatctggtgaccaaaacgcggggctggtctgaagaagataggacggaagagagtccttcgctcaaacgagatgtgctagaagaccccaaatttgagtctcttctaatattgcgaataatgttctgtaaatatttttcatcaaatgaaaaatggtgaaaaaaaaaacatacaatcgcagttatatagacatacataaatatggaattttctgtgaaggtgagattgagctcttaattacacaaaaatgagaattatcaccggagaccctttgaacatgcttctctattctcaccggagaagaaggaacaggagaaatctcgatcgatcgttggtatatagtgtagcaattaatgactttgttaccgttgttatatagcgtatcaattactgactttgttaccgttggtatatagcgtagcaattaatgactatttaatgcacctgtcagtatttaatgatgtatttccttaatgacacacccacgcagcagtctctaattggcagaagggatcatgagatttttactttttaattttaaaattttaaataagatattaaatgattaaataaaaactaataaaatatataaaaattctcgcactctcttaaaatagatatattgatgcatccttatctattttaacacctaaaataattttttagttaaattttttctcatggtcatgtacgttataattatttaagacatcctgcaaaattttaagaaatttgaaaaagtttaacacgccgaaaaatacattcaaacagtgtgttgtacatgatccgttaattaaagagtacaaatctgattgaaaaagggatgaaaaatatggtaaaaattctataataaacaccccaaaatcttttgttgttattggctattattgtttttgtgggcctagttctatggggtacatattgtattagattttcaactgttaaaaagagggtgcactagtgtgactcgtaaagctttttattattggtacacctgtttacgcttaagttttaagggtgtgcataaaacatccaatctaatgacaatcgatcgatctaattacaaccgatcgctaaatattagatatctaattgtgatcggatcggactgaatgttatttttgaatatccaattggatcagatcggatgttggatgggatgtccaaaaatccaatacatccaacatccaatcgaactaattagaattttcatttagtttggatgaataattaaattttattttgctatacgtaaaatatatatatgtatatacaaaaattaacactaaaattctactttttttt

SEQ ID NO: 328515 - DNA, 470 bp, Cannabis indica
agatatatatatacatccatattttattttaattttatgtttatgtaagattattttaaatgacaagtaaaatgtaccccacttaataaaacattgtaaaagttttgtagatttcgtgtttaatttcttgacacctctcttagtaaaagaaagaaaaaattattgatactgttaagtaagaaccaaataatccaagctcaagaaaataataaaatagtaaccaaaacacacacaacagcagcaagattgatatagaaaagctaattacatacgcatgggagtccttaggccccttggatgtaattggagattgcctcaattcattgtatatccactctattctcttactcactgatatataataactaggaaataaactgcgcttcgcgtgaggttatattttgtttactgataattaagttataaaaatatattaaaattgatatttttttaatagtatgagtaactat

SEQ ID NO: 328516 - DNA, 701 bp, Cannabis indica
aaaaaaacacggtttcatttcataagagtgaaagtgcttagttctaatttgtgtgcttttgttggggccaatgattatgatttatcgggaagtgtttatatatgatcacgtcactcatattatttatacaagtgaagtgacccgtacacatggaaaagtgtgaaatttttgtcactttcaaattcctcatttatgctttaaaacgcccacacttggattagtatgcaattaggcaattatcacttgttgaatgacacaacacaacacaagctctgctattacatatgattatgagttacatatgatgattaattgattactaattaataatattatgttgagcaatttgcggcgaaacttccttatgttttggtttttatacacttaatccccttatctttatttttggtggcaaaactcccttatgttttaatttttatacacttaacccccttatttttttttatggcaaaacccccttatgttttaatttttatacacttaacccctctatcttttgttttggtggcaaaacccttcagtttacttttctttgcaaatttaaaattttagttaaatattaccgttaaatactaactggattactactgtatcgacttcgaggttttaccgttacatatacaaaggtgtatacagtggtcatccagtttatatttaacggtaatatttaactggcgtgt

SEQ ID NO: 328517 - DNA, 1065 bp, Cannabis indica
gattgatattgatattgatgattatataataccttgtatttaattatactaatagtagcataaggagttaagtactactgatactttaagtatttctctataaaaaatactaaagaatattaatgtctaatacttttatgagatattattttattacgaatataatttaggataatgcttctattaaaaacaactttatgtagagttatttttttttaatatgcatcatcattttatttttatgtccattaaatattatttccttatttaatttttttacatatataattatttgttaaaaatattatcattttctttaaaaaaaaaatatcattcacttctctcttattctcctcactttttttttttttaaaaaaaaaatttcttaaaagttacttatcaaagaacctaaactataatcaaaactaagaagtttgatattctttcttttaaaagaaaaatagagattaagactcagaaattctcgaatgacgaagtcaaaaaactatgcaattttttttttttttgtacatatctcttctcttagatcatatgcaccaaaaaatattttttttggtagatatgagtatttttgacaaataattataaaaaaagtaaataaggaaataaaattaaatatggacataaaatgaaacaatgacacatattaaaaaaataactttatataaagtcattttcaatacctttattgaagcattatcctataatttaatatcaaattttatttattccattttaatattaatgatagaaaacagttaccatttatagtacaatacctcatgtagtgctaatggtaaatggtaatgctcaatgcgccttataccattattaatgataatgtaaataaaattaagttattaaggtgacgttttgataacaattttttaattagtttttttgtttttaaaattggaaaagtgaaagtatttttcaaaaatatgttttataaaactgtttttactttttaatttttttattgagaatcaaaattttaaaaacaaaaaaaaaaatcatttttaatatttttttaaacattttttt

SEQ ID NO: 328518 - DNA, 886 bp, Cannabis indica
ttggctgcatctgtgccgttgaagagggtgtcatggagtagagcacaaatctcttgcagggtgatttttcattgagtggtttcttggatgccaaggcagattgagatgatgctaagacaataatgagcaacagaatgaaagaaaaggctaacttttctgaagtgtgatctcctctcatcattattatgtttggatgatatttttgtatggcttaattcttaacaatttttctaagactatttatagggaaaactcttaattgggttttatactttgtaattgtttatgcttaatcatttgaataaagaacacttttttattattataactaagtagaatattatttagtttcggatttttttctatttattataatcatttatttgttataattaattgattgttgtctctatcaatcaaataaaaggatcgtttgtatggaaagaactaataacaaaatttcaaaatatgcccttgttgatagagttagtggttaaaacagtgatagctagactaagcctagtagaaacaagaagaaaaaaattttaagtcaatattagggaagtgtataaattgatccaattcaattataattaaccaccaaatattaaatatgtaaatgtgattgttggatcatattgaatgttatttttgaatattagattggatcaaattagatgttcgatggagtgtataaaaatctattacatccaacatccaatcaaactaattaatatttttattttgtttagatgaataattaaattttatattgtcaaacttaaaatatactagtttgatgttacgtgcaatgcacgtatagttagttttttttaattatatttaattaggtgatgttaagtataatatatgtatgtttaatttt

SEQ ID NO: 328519 - DNA, 993 bp, Cannabis indica
tatttattttattttaaattatattttcatattgatttactaaattttgaaatatatttgtatctatttactgagtttttggaaaatcgattaaaaaaaataaatagatcttaagaaataaacaaaataaagaagaagaagactaagaattttatatagttggagcgttaatgagccttagtccacaagttaatattattagcttgaaaagctatggtgtattacacaagaataatgttcttgcttgagcttaagaaccctaatttcagtcttaatgtttgaataatgattttccaaccatttgcatgaagataccatcttctatttataggctagggttttgactactaggatttttctatgaagctagacctactaatggagtaaatacatttaatattgactttggaccaattaggaaagacctgatttacaagtgaacactcattcacatttgcagagtccatttaatgatgacagttgtcgtacactgccaaatttatacaagaaatgttggaggatatggcactaggtgaatccctaatttagtgggatcccatatcagagggatctccatgtaacccttggcttccggatgtctttttgacagcccttccaggaatatcccataagggtattcggatatgccatattgggccttctttcttttggccaagaaccctttttgaaccagatgttctgaccttgtaaaggatgagttcaatctgttactgaacacagagttgcagaaagactcccttagtgggctaacccaatcatttgggcctgagaatgagcctccttaagtgaggcaaatcttggaagaacacgtgtcaacctgccagaaacattgatagcggtatcatatgcaatatgtattagattttaaaatactattttttatattaaaataataattatatacttaatttatatataagggtaaatactaccctgtgttttgcaaaaattatcgattggaccatctgtttt

SEQ ID NO: 328520 - DNA, 932 bp, Cannabis indica
agtttaattgcttactctttcactgtttttattttctaattttaatcctttcttaatttttattcaaccgaatagaagtaaaagtttaattttaacgtacttaactataatcctcgtgggatcgacctcactcttggtgagtttactacttgtcacgacacgtgcacttgcgtgtgaaaaatttcacaacaataatatcatatcaatatggagaaataaatagtgtctgacggtccttacggtattagatatatattttaatttttttatttaattagggttttatttctgtctttccaccatgacttactgctgacattcaaaataaactttgggccactctctgcttaggagatgataattttgttaaaaaaaattataaataatattttcaaagataatatttatatttgtttgtttgaaagacaatatttgtattagtttatttgagttaatcttaattttagttgcttgtaaattaattaataatttatttaaaatataatttttattaatttatatttatattttattttactttcctcaaatggtaaaacattaaaaatataaactagcagcggacctcattattaatgttcgtcgtcccactgctaatacttgccgctattaatatttattactagtggatagtggatactaagttcgtcgctaataaccatcaataacgatagattactgtcactattaataattagtagcggaaaataaaatcattaccaacagagcagacccgatctgcagctaacttgttgaaaaaccgtatttttgcaaatgtcagttatatataagaaaatataaaactgtatgcgtctgcagaagcagaaagtaattctgctacagcagaaatcgttttgtagtgacaaaacagaacaggaagaatataaaatatttgcagaaaaataaataacttg

SEQ ID NO: 328521 - DNA, 1047 bp, Cannabis indica
tttttaacaactttaaagtttagaggtcatgatttggtacatgtaaaaattcggaggtaaaaatcctaattaatattttaaaaattattatattaaattaaataaaatctaacacttaatgactgatatgagaggatgctaagtaaaaaaattggatagtgaagttaaaaattgaaattgaaaattaaaaaaaaaaaattacttcaagattggtaaatgtcaaagtctagtgtatagtatgagtcaccatatcatgatcatggagccggtatacccaaattaggaagaataattatcaattatatacatgattatagaattaacttagcagttttacaattgtattacattaaatattattattatttttttgaaatgcattaaatattattcgaatatacttaaaaaatatttatagaaatgcattagaactttagaagataacataattaattaattaattactaaatatatacacactagtcgatcgaacacgtttctttatatgatttggctattaaataatacttttttctaaaataagctattttaaaaggataaaagtaaaaaaattcttacttattttagtgagttacaagaaaaataaaaaggttgtattaattgtattgtatgtcattaaaatgatgacatatgaggacataattaaacagtaaaaattgaccagtttttaaattcaggagagtgataatatggtaaaacaactctggtcccattctttttcttattatttatttgcattatttcattttggatatgaataaataataaaaaaataatttgtggtataaatttttaattttaattattgtttataaataaatatttaaatttattttaacggtaataatacataaattataattttgtaatttctgtaagtttataactattaaatgttaagtaaattgctactttaaatatactaataaaaaaaataacatgtaggataataactagacatttaatgatcatatatttacggaattccaaaatataatataaatattattacaaataaaaattaaa

SEQ ID NO: 328522 - DNA, 933 bp, Cannabis indica
aaaagtgtattctataaattttatttttatttttatttgttgtattttatttaagttgagttcggagttgggtttgaagttgggaccggggataggtccaagtccgagactggatccaaattcagttttcaagatctaagctggggtcagaatacaatatattaattaaaaaaatatgtttaaaaaaaatttaaaagtgatttttcagtttttaaaatttagatttttaattaaaaaattaaaaagtaaaaacaattttatagaatatgattttagaaaatattttcacttttctaattttaaaaacaaaaaactgattacaaaaagttttaccaaacgcactcatagtgtaatcatcattaatttgtttagttacattttacacgatattcagaattgtaataaattaatagagaaatgtaacggaataaatgaaaaataatcagaattaatatatgtagaataattagcggcgaaattctttatattttaatttttatacacttaatttttttcattttttggtagcaaaacctgtttacttttctttataaatttgaggcgtcaattatatcagacttaaatattaattagataaccactatgtgtgtatacatgaaagtaaaacttctcatttttctttatttttctcttattttgtattttcttttccaccaaacttctcattttttatgttctctctatttttctcttctacaatttctttctttccacttttcttcaaggccaaacatagggtaaaggtatggacaacaaaatgggtcatatttagagcaacatctctaatggtgaatcatttcactaattcagtatagaatcttcacactattcaacttcaagaaaatactaaattagtgtacaccaaatttcatattattaacagtgtcagatattgaatctacttaaaaaaaa

SEQ ID NO: 328523 - DNA, 1745 bp, Cannabis indica
ctttacaatctaattcattataagtttactttttaaaaaagtttcaacaaaaggaaaatcctaacaaaaaaaaaaaaatatatatgaaaaaattgctacaacactttccaaaaaagagttacgtgcttctaaaattttttattctgtatttaatatcaaaattcttttatacatattaccaacaataaaaaaaataaatacaataactaaatgataatgagtaatattaaaataattttttaatttattttttctacataatcgatacattataatattctaagaccataatgaattttgaggtatcgaacctctaaaaccattattgccaccaacgtataattaagaaaaaacaacacctaacaattaagggaattcaaacctaaacctgaacccgaacccgaacttgaatccagacccatgaagcctatatagctagagtcctcacattcttatggtaataaataattaagaagtgataatattaaccaggttaataatgttcatttataaatgggattattgtactgaattgaccaatcatatgaggcaggtaatataaggcaagtaggaagaagtaagaaagtagtaatattaataatgtgggtcatcaccaacctgcgtacggcggttctgtcggtgcaaaagtgagcacaaaaaaacaattgcatgggtcacctatctattctatatagtattattcatcacctacctatacacctcattcatttttatttcaatatttacaacaactcatataacatatcatgtatatacattgtttactcattactacttagaggtggtgtgcaactattggcattatcaattaattaattatgtatcgagttttatataatttaatttaataaatgttattgaatatcgctaacaacttgcaagatgttatctcgagatagtgcgagggctgacccttagcattgtgacacagtagttccgtgatcggtaaggagaaataccaggtaagctgtacaatcccacatcgcctgggaaaggtcaagtgggatgattctgggactactgactgtcacatatagactggagatccaaggccgaccctgagttaatttgggccctagtaaaaataatttttttgggccctttttataaaataaatagtatttttaaaaattattaaaagaatatctatatttattaaaaaaaaattcatttgggctcttgataggagtggaccataggcatgggcctaggccgcctaattagactaggaccggtcctgtggagatctcaaaaaataggttaaatgggtaataacaagttatgatgtgataaaagatcatgctatacttatatgaaaagtaaagcatgaaatcctgaagtgataaaagttgagttaatacactactataagaaatactattcacgtcggtcaacactactatttacagtgttgaccgacaaaataggtctgtggaaatatgaagtgagccttttaaaccgacgtatattcactactacaaaaaggggtattttcgtcgttttataagtgacatataaagattttgcgtcggtctacagaaccgacgtgtaatccgtagacgtaaatagtgttttatttgcgtcgtttttaaaaagacgcaaaatacaattttcgtcatttgaaaaccgacgctaaaaaattacttttctattttattttaagcgtcggttaaaaagtgacgctaaatgtgtcatggcattttaaaactgtcacaaaaaactta

SEQ ID NO: 328524 - DNA, 674 bp, Cannabis indica
cgttagaaaaaggactaacggacaaacaaaaattggggccttaggtactttcaccgccaatttttgaggttgaggactaatcggcatcaacctcaagtttttggggacttttgccgcaattatcccttttcttttctaattgctatttcctaaacaaatgttagatgtttttggataatggtttttttttattatttttactattgacaatggataatggtgtcagtttactaattccaagtgttgattaaatttgactgccatattaatttagagccagttccatttcttttcacttgtagccaaaacaagagacctcttaaatttggtcattttttcaaaaaaaaaatacctcttttattaaacaaaacattaatggcaccgaactcttttttatttatttctttcaagttccaaaagtcatgtcacaaaatattgagatttatatataaagtattagcattttctgtaggagaattgttaaaagatatttgtacgtattttttatagggtggtgcattgttcggcgtgattctctcttgacgagactgattgtattttcagtagtcactctttacttactgttattatttccctagttcaagatgatttaagttaataaagtttcgattttattcaaaaaaaaatagtaatcctctatttataagtagtgt

SEQ ID NO: 328525 - DNA, 989 bp, Cannabis indica
accgaacggtcgccatcttctgccattaacatgtctggccgcatcacccataagaagcgttgcttgctgttcactaaaccgtaccaaagctcgattagctcggacttagtcatgacaacaatactaccgaaactgacataaataaccgactttggaggttgagaatctagccaagtgagacagcttcggtctacgtcgtaaagattattggaggatggatatgttgacgttttggagttttgggcttgcctgtgatttaggtgggcatgaagaggcccgattgtgtagatattggggcaaaactcagttaagcgattgacaaatgaaccttcgaggtcatcaaatgtgtttaggataagtgctcgggctcgccgagtttggttggtcacttgagaaatcatttggaaagatttgttagttgtgtcgctcactcggcacatactaggcaaatctcggaaccgtagaaaactttccattcctggcacacttgttacaagcctgtccatatcttcatttcgatgtaagtaattgatcagtgttctacatcttgtaaattgtaatcataaatgagatgatataattatataatactttctcctacatcatcttatccaatataagttagaaggcagagattttaatgtagcatgtgctactgtgcgtttataagattagctcaaaccataattggaccaaaggatcacagcttctcagcactcaataaatgttttattacactgtataaaaagttctttaaattatagaagctatataaaattatcactgtgtatattagaatttctatttaagaatactttattcaagaataatctctaatttgttattaaaaaaattaagtcccgattcgggcccgttataaataaaaataatctctaaattgtaattagttatacattttttaagttccatattaacaaagtatatctctatagaagaataattacatcttaataaaatatatacatgta

SEQ ID NO: 328526 - DNA, 730 bp, Cannabis indica
aaaaaaaatgtgaaaatgcaggctactgctgggttgagatctttatctgggaatacctcagaagaaattttggaagaagtaagtaattattttctgaaacttgtttatatatattataaatatatgtattttttttattattattattataaattgaagtgtttgatgaattttttgtgtgttaaaatttaggttaggaaattactgaaagaaaaaagtgacttcaaacttgaatcagatgactcagttgctgttcttgatggaattcaagaaggatcttatttgtgggtatgatataatttataataatcatcctattaattaattatacttatttccattaaaagtactatcactaaataatttcattttttttatttttattattatttttaacctactttctgtttttttgtctttgttttgtcatacatatttctaaacatttttctttagaagaagaagacaaaatgagaaaatagaaaatagagaccatccaatcaattactctctcttatcaattaatatagatagatagcattaaattatgaccatatttagtagattgagaatggaccatataataaaatggtaccattttggtagggtgtcttaatttttggatattttttttaaataaattataatttaaattttatcctataataaatttttttgaataatgtatgatattaaatcatttgaatttatagtattaaaaataaagttt

SEQ ID NO: 328527 - DNA, 539 bp, Cannabis indica
aacaatttaataaatgagatatatagaagaagcacagaagaatcaataccaatattatgaataaaaagtataataactacactctaatctcaccaatatttctaaaataattcacttaaactaaactagaaataagaagtaatgaaaggagtataattttttctctgaaatctaatgatgtttacattgtatttaactcttatttatagagtaactttgctctaagattcatacatttcgtgtatgagaatagtggcttagtgggacaaattactgagataaatgggaaaacatggggtaaaattgcatcaagtaagataggtggtgcaatattggtgggcgttgactatgtgcatcagcatcaagtgggtcccaatcgaggcaatatcttgctctaaagcggattgagttattgctgcaaaggtaagcctgacccttgaatttgtactttattgaccgcgtgattaagatacagattagtaggaaaattagcattaattattgttatttgaagattacatataaatatatatgttggt

SEQ ID NO: 328528 - DNA, 595 bp, Cannabis indica
ttttgaaaggctaggtgtaattgtaatgtcggagtagctaaatttttcccagaagataaaactcacatcagcaccgccattgctggcacccattctaacgaatactattcttctaagctcatatctaacacacaatcctatgggaacaacataaaattgggttgaaccaagatgagataaacatttttaagtgtattaccttttaatataataaaaaatacctagcataaaatttaatatacgtgcctcgcacgtaactttttactagtatatatatatatatttttatacatatcacaatacatgaacaagaagtgatgctcttgaagcataaatttatatatattaacatgtagtgcggattcaaaatttaaagtgcgggggacgtaattatttttgtaaagctagaggtaaaagtaaattttaaaaaaataaattgctcttagtgagatttaaacttttgatctctattttaaatactatttagcttaacgattatattaaaattaatattatatctataaatatcacgttttattataatttcatgtcgtaactaactaaaatacatatatatattttttgattttttttt

SEQ ID NO: 328529 - DNA, 1302 bp, Cannabis indica
actaagaaaactctcatatgaaaatagctttgggaattatcaagccttttagggttttctagcaaagtgctttcttgatagaaaacttcatctctctctctcaaatgagcaccaaagacctccttttataatgtataggtgatcacttagaattcaaaatacacaacacctcatttctctcatataaatgagtattaatatagtttgtaacaactatatttcataacatttgaattccatcatcaattgtgtaacatctcttttattacacaaaatatgatcaaccaaaagaagttacaaaaataattaatcttgtaactcctctccatattacaaagtgtaggttacaactttaggtttaataaattatatattacacaatttatttaccaaacacttaatatatattattcacataataatatatattactacattttaatctgcacttattatattataaaatataacacctcgaatctaaacatgtactaaatcatgcctcctgaactttcatccatgttagaattttcttactaaaattggacaaaagtccttaaattgaacaatctcaatagttcctggggtatttttaactactttaaaagttcaggaacatgatttagtacatgtcaaattaggagaaaaaaatgctaattaacctttatattttagtaccgatgtgatccaatataaaaactttataatctaaaaatattataaatattttgtgtaacaccgcgcgcggattcgtttacaagttgtatcttcatatgctatgataaaaaagaaaagaaatagtccatacttaatatttttattttgtttaatgaattcatttttgtcttccagaccaagtcatctatttcccaaactttttgccagaaaattctcatttcatgaatcatgatatatatatatatatattatattttaaatttcatatattctcacaaataagctaagtcctcccgtatcgtgtttaagagagaaaagaaaaatgctctgcctaattgcaataaatccttaatttgccttgtgagccatgaaatataaaagtcaatataaatctgtcctccgtgctttgaaatcttataaactaaggctgagccaggattgatatttggaggttggttctagtgtattatctcattttggtgtactaatagtacttgttcaaatttattattattgccttatatatgtgtataatatatatggggcaaaattatggtaggacttagcataaactttttaccgttagggaagtattttttatcgttgattttagatcatgtggtt

SEQ ID NO: 328530 - DNA, 762 bp, Cannabis indica
taaagataaaagataaaagaaatatgtatggtaaatttaaatttgaattgtaatattaaaaaaaaaacaaaaatattaatttaaagccacatttaagataaaaaaacatagatatataaaaatgtttttattacctttctgagagttatcaccaaatcttgaatttattttgataatatcacatcaaatataccatttatctaattaacaaaaaaataagattaaaactattattagctactaagagtaatataaacagcatgagcaatgcagaagaaacacacacaagtttcaccaaatcttgaatcctgttagtagtcataattaatgtgcgacatatcaaaacatttttatttctatgaataaacattcttgttattgttttttcgctagtcattattgttattgttgaaaataaatatatttcatacctcattggtattaagttataatttttatatacaattatagtttaatctatactaggatgcgttattattattattattattttattttgggtagagataattatatttttcacagctttttttacataatatttacacgatactattacataaacaaactatataattaattttatatagttagagtctaagagattttaaataatttaaggtacatgagttaaatactttgttttgtttaattttttttatgcctgtaacagaatattttaagcttttgctttggcatagtaaatattcaataaatttgaaaaaaaaaaaaaactaatta

SEQ ID NO: 328531 - DNA, 1400 bp, Cannabis indica
gatttgtagagtgaaaggcctttgagacacaactatgcatgtttttaatctagcaatttctaggccaagaaagaatcaaggatagccaaggtattaagttggaactttgagtgtaggaaaattttgaatgtagaggcatctgtgtcattattgctggtaattattatgtcatcgacatagactaagagggtcaggaaggcattaggagatggccttatgaagagataagggtcattatgtgactgtttgaatccaatgctaaggagagtgaagcttagcttggtaaaccattgcttgtaagactgtttcgaaccatataggctcttattgagtttgtaaactgcatttgggggcaacccccctttgtgcacataacctttaggaatggacatgtagacatgttcttttaaatcaccatgtaaaaaagtgttttttatgtccatttagtgtagattccagttgttaaggaagagttttagggtattaaattttgcagatggtgtaaaggtttcaacacagtcaatgccatgctgctggttataacctttcataactaaacaagccttatatctttcaactttaccttttgagttctatttaattttgtatacccatttgtttctaatgacatggcagcaaggtggaagtgaaactactttccatatgttgttttgtttgagggcaaagaactcattgtccacagcttttagccattgagaaattttttttaactataggaggtaggttcgagttttgtgtatgcttgaagaatgacatttctaaagtttttgtgtaacctgtcataggaaccctagttccagccataggccggtcagcctagggacatagttcccatgaccggctagaccccatgaaagccacccatggtcggccaggcttcaaacaaagcctccttggccgactagcatgtccatggatcaaacatgtgatttttcaagaactcaaacattgttcttcgtattcttcgtgactcaaagagccaagaatcacaacaaatgtctgattcagttctttttcatctataaatcacacattatttatccttaggctattatgcggatcaaaataccgaatggactacaatctactggcagaatcgaagcatgttcaaaataagaaataatttcatgcattcatgacgaaatcaattaaatcaagtgaaaaagagggaatagaaagcttacccacaacaagattccaatgaagatgaagatgagaagcttggattgttaaaataacgcacaaatcccaaggagaatggagccaatagtttggccacctagagagaaggaggagctttttcaagagccaaattctagtgagagaaagtaaaagtgaagaaaaggatttccccccaaaactcacttatgtagtacatg

SEQ ID NO: 328532 - DNA, 1077 bp, Cannabis indica
aaaaatgacaaaaaaaaaataaaaaataaaaaaatgaaagtgtaaaaatgaacaggctccttaatatttttatatatttaaatatatataataaattttatttatttattaggggatttctcgcctcatcctcgatgagaataagcggggatgggaacatgggagcactccacgccaatttcttgcctcgtgtgcattcttattggagatgtaaagttgtgctaaaaaaagaatttgtgatatatttacattaattttttttattttgcaataatacataattgtaaaatttaatatttaattaataattttattaaaaacacatataaaaattaatgtaaaatatttataattcaatctaataacaaaatattaaaatagcatgaaaataaatataaaagaagtgtacttttttatgaatcagttattgttattgcaaattaactatatttgtaaaactaaaagcaccataacaatcaagtcatggccttcaattttctatacaatttacaaaaaataaaaccattcttcctctttttgactaagcttcttaggctacactactacaactctttgccttacattctcttttacactattcacaacctgagccaggatgggctctttatcttgccacaaaaattcatttctagtttttcaaagattgtacactaaactagcaacacaagcagccattattttttttttcttaaatttgcttgctttagacctttggatccacctggttattcaaggtaaatagggatgtaaatggggcggggcaggtgcgggaattgctcccccacccccatatccgtttcttaaattcaccccccatacccgccccattacccgtttaaatttgaagcaggggcggggtgggtattacctgacgggggaaggatccccatcgggtacacattacatatatatttttgaaaaataaaatgatgtcttaaagagaattaaaaaaaataatcataaaaacttagtaaaataataaacttaagtggaatagtgtgtatagtaaaaaaaaaagagtataatcaataataagcctaaagcatgaagttattt

SEQ ID NO: 328533 - DNA, 866 bp, Cannabis indica
agtttatgtttgaaatgtctagttactaacaaaaagaaaaacaaattcccatattcctcccactaacttagtctaaatttatcctcaaatattcaattcaaaagattcttctttcattttttttttcttcaaagttatattgatgaatatttttttctcttacttgtaaaagttatggcagttaaaattgaacagaagaagccataataaggtaagaaagatgtgcagggagagcataaagaaaagaatatagaatccatatacacctacttgacttttgactggccaaactttggacataatagtcaatttataacagctgatgaggccaccatttgtcatgtataatctcatcctcttgccaaagataaatgacatttttgataggtgcgaaactggaataagtagtgaaaactggtcaagaaattaatattaagattaaagttgaataaagttatcaatatagaaaataatcttatcaatatagaaaataatcaaacctaattttatcaagggcttttagcttaatatttaaaatacagtacctcaaaatcaaaaataatatatataaaattataaaaaatcaaaacctatgaaatggaatctaatccgaaaagatcataattaatacaaattggggaaaacaaatccttgtacaaattctacttatattacaaaattatggacttttctaacaattaaaaatataagagaagggttaccgtcaatctcctattacaagctcttagtcaacttttacacctaaacacatatgtcggaatattttttttcaaatttcttttttacgggggtgttcgttatgcttacaacatcatccctgtaaattttttgaaaaatttcgaata

SEQ ID NO: 328534 - DNA, 1387 bp, Cannabis indica
attacaaatacactatcataaaacaattataaaaaaaataaataaatggataataaaaaatggttaattagcaatttttcttcccgaactttgacatataccaaatcatgccccctgaacttttttggccgttaaaaattcccctgaactattgagattgttagatttaaggacttttgtctaatttcattcaattttattgtttcagtgattgtttatgtactaaaccatgctctccagactttgatatctaccaaatcatgcccttcaaacattaatatgtactaaatcatgccccctgaactttcaaccatgttagaatttttttactaaaattagacaaaagttcttaaatctaacaatcttaatagtttagggggaatttttaacggccaaaaaaattcaaggggcatgatttagtacatgtcaaagttcgggggaaaaaattactattagcttaaaataattttataagtatatagtaataacctctccatctttctttccaaacaacttgaaaggataactaccatactctccctcccttatattctctatcctccttcaactctccatcttttatcctctacatctatctcaccaaacatagtgttagacactaaatttagtattagtattgcactaatactaaatatgatattataatctcttttattctaatcacaatactaaaatttacacataaaaaaaataattagcggtaaaattcacttatctttaatttttataaatttaattaacctcttattatttttttattgtaataccctcttaactttactcttctctacaaatttgaattcaattgttaaataccaactgtgattattattgtgcacgtgatattaaaatatcgaaactaataaaaacatgtcccgtatatacatatatacacagtaacaatccagttagtatttaactgtgtaatttaattgaccctttaaatttgcaaaaaaaaaaatcaaattaggtagtattgtcacaaaaaattagtaaatttagtgtataaaattaaaatataagaaaaattaacccgcaaataacccaaaaaaaatattttttattattatattattttataagaaaatataatttttttttattattattatatttcacacaggtataaaataaaatagacacgcatgcaagataatgtttgaactttatttttgtcgtgttaattttttttttgaattttttaaaattttccaagatgtcttataacagtatgaaaaaaaaatgtaaaaaatctcttttatgttgaaacagatcgaggatgtatcaatacttttcttttaggaagagcaccataaaattttcctaatatatctatatatttaaaatttattaaatataatataat

SEQ ID NO: 328535 - DNA, 802 bp, Cannabis indica
taaacttatattgcatttgttttttttttgttttttttttttttttctgttttggaggtaaagtgattcaaaggaaactagcattgttcaaaggctaattataatttttaccctgaactttggtatgtactaaatcatcttccttaaacttttaaggttgttaaaaatgacccctgaactactcagattgttagatttaaggacttttgtataattttagtaaaaaaattataacaagaataaaaattcaaggagcataatttagtatatgtcaaaatttaaagggcatgattttgtaaatattaaagtttggagagcatagtttagtacacaaacaatcactgaaatagtaaaattgaatgaaattaaacaaaagttcttaaagagaaatttttaacggccaaaaaagttcaaaggatatgatttggtacgtattaaaatttaaagggtaaaaatcctaattaaccttgttcaaatatgtattgataaatattgtcttacattacatatctaattatatttacatataaatattattattgatataagatatttatatatttagttttgaacagaaagaattcttgagataaaattattgtaagtattttgtagtataaatatttaaatttaatgtttaattataaataagtatttaaatttaatttttaattgtaattacacttaagttatatttatataaatctgtaggtatatggttattaaatataaagtccttatttacgtttcattttttattggtaaatttgttaggttatttttagtattaattttagattaa

SEQ ID NO: 328536 - DNA, 1379 bp, Cannabis indica
aaatatgattaaaaatatttataacattttaaatagttgaaatttaaatcaaaatttaaataatttttatttttaaatatatatataataatattgtaaaattaataaagaatattctattaattaataggatattctgttaaagttaacgtagaaatctaaaagaatagttaaaccaagaattatgttacatagccacattttatatagaatagatattaaatattaatatattagattcttaaaaagtatgtgcagggtgagtttatttgatatacatgtagggacggacccacttgtgttaatgtggggctatagtccccactaacaaaaatattgtattttaaaaaattaagttaatttttttatttgataattatagactaaaatagtagaaaaaacttcccacaaaattaaataaatttagtgaaagtgattataacttatgtataaatattttttaataataaaaagcccccacaaaaaaaaaaattctaggtctgtcattgtacacatgttaggataaatgtatatgtgtaaggttagatgtagcttatatatatggagttaaatttattatgtgtacggtttggctaaataggagatattttttctaattgtgaggcacttaattatatttggtttattgaatcatactactagatatacgactagatattcttatatagtttggtcttttttgtttaattaactattcattattaaatatatggctagatttattatacggtttggtgtttaattaattattaattttgatttaacaaatagaaaaatagaggattaaggagagaataaataaaactatttggactaattttatagatataaagatattttaaatattttaaatttaaatttaaatttctttatataaaatatttacataatttttatttttaaatatatataataatattataaaattaataaagaatatttcgttaattaataggatattttgttaaaattaacgtataaacccaaaaagaatccttaaactaagaattcggttaaatagccacattttatatagaatagatgtatgagaaatttatttaactattttttatacttttaaaatattttacaaaaattagataagaaaaattgtgtttctaacttagtaaaacaatatattttttagaaaaataaaaatcatcaaatgttaatatatgatttattaaattattattttcaaattcatctattttttaacattttattaattacgttattattctatttttataaataattacacatcttaatttgaaattcttaactctattggagttatggtgtgcatgttgggttttatgccctaaataaaactctttacaatctgattagttatc

SEQ ID NO: 328537 - DNA, 1257 bp, Cannabis indica
ttaatagttattattcttatcttacctctgcttacatggtagcgagtttgaatatttttgttaacggtaattcctgagtcgagttatttaatgtacatttaatgatacacgactttggctggttggtatttggtacacgtgttaacttcttaatattaatacaaatacatcacatttttttttccttaatatccaaaatattttcacttccgacatggaagagtgaggagctaatgcaattattgagccccttttttttattttattttatattttacttaaagaaaagaaaaagaaacgaaacaacaaagcctagcggtttccaattccgacacttgaaacgctcaactgttctgctgtctctcgccaatctatcccctgaatacattaacggtcacatttcctcattcattattataagaaagaataaattcacttcacttcactacaccccccaactcccataaacgcctacatttttttctctcttcacttcactcccatcccaacttttatattttcttctaacaaatggcgaaaggcttcgattatcgtcggctgattatactctcactcctactcaccacccactgtctcccactgtccggcgcctcgatcaaggctcagaacggcgtcgtttccatggagctgtggtgcgtagccaagaacaacgccgaggactcggccctccaatcggctctggattgggcctgtggacctggaggcgccgactgtagcccaatccagcaaggcggtccctgctatgacctctccgatgtacagacaatggcttccttcgctttcaacaattattatctcaaaaacggcatgaccgacgatgcttgtaactttgacaacaccgccgcactcacttccttaaacccaagtaagtttttcctgttttctcaacaaaatgatttttattttttctttctcccgatcactattgtgggagtttgaactatagatctttactctcggaagtgtcagggtatgagggtttttagatctgaaaagttttcatctttgcggtattaattatttaatttttaaaattttgtttcaggtcatgataaatgcagattcccatccaggtattgattaattaattgctatttatttggttgtttggtgggtttaattccttttatattgattcaattattagctcaattatcaaacctgttagcttactcataattcctgatccagcattattatattagtgtactttgagctctttgttttttttttttt

SEQ ID NO: 328538 - DNA, 855 bp, Cannabis indica
aggacccacgtggattagccccaagtaacaacaactgaacctcgtctccagtactatgctggaaaaacaaggccaagaattggtaaatctactattggcaagccccatgtagacttgggagaagatctcgagttagccagacttagagaggtcgtctgccaagtttgccaaactaaagaaccacgcgtcgttggttgtaatgtattcactcaacagagatgcgaattttagagatggatggatgaccaagaatacatcctctgatctcaccaagaaaagctggaccgccacaacagagaagccaatgacctaataaggtagttcaatgaaagaactactgggaaaggccaagacctcatcagagatcctctccaagggagactagttgatagattggggagggtctatcgaaaaactgtccaaataggttctctaggaaccaggatagacctccccctacttgaaggaggataggccttgccatgaagggttcgatggcaagaatagccagaacgtgacgaccaacggtttgagggccggctaccgatcttagtctcaacaactccccacattggccaacccttggccaaccaacctctaggtggtgcacctctggccgacaagggacatgaactctcttcccaaggcatccaggagaaggtaatcaagagaccaatcttcaagcggctaggcccaggagtgggtggaaacccaaaataacaacttgataagtgagtcgaatcacttcaagtatctagatccacctaactctagcaagtggtgtgatctacccgttgacaaaaaactaactgcaccagccaactagggaagtacatgttagaaattattttacca

SEQ ID NO: 328539 - DNA, 827 bp, Cannabis indica
cgtctctcgtctcatctcttatccgtctctagtctcgtcttcctccctccgcaccgaccataacttcaggcaccgtcttgtcttcctctgtccgcacccaccacatccatgaggaccaccacaaacgaccaccctcctcctcctctaatttttaaggtatacatacatattttttttatgtatttatattaatattttttatttatatataattatttattaatttttgataaaattaatacatatttatatatatctttatttttttaagtcatatatatatttatatacaaatttatatatatttatttatgtacatgtaggaaaaaaattaatggctttagtttaaagttagttgttattgtataaatgtaatgtgtaaaaacttgaattgttttaaaaattttaatattttttcaagttaattgttattgtaatagatttaaggggtaaaaaatatttgttattttaaaaattaattagttattttaatttagtctatgtaaaattataaattgtaattattaaaaataattgtataaacttaggtaaataaatgttttggtataagtttagtattgttcgggaaaaaatgattattacagtagaacctctattacactttgttcaagtaaattatattctaattgagaggttataactacataaagttatactaaaaaaaatttgaaacaccaaaaaatataaatataacaacaataacaataaataatcctcaatactatatttgttggaaattattttaccagaatcttagatctactcacaagtatgtttattaacatcctaaataagaactttctaaa

SEQ ID NO: 328540 - DNA, 818 bp, Cannabis indica
cttatttataattggcctaaatcaggacttgattttttttataacaaattagaaattattcttgaatagagtattcttaaatagaagttctactgtagtagatttgttttcagcctaataataaatataattgggaaataagtatcaaataatggacaaaagccgatgcaccttctgagttcatagtatagacaagaaatatagatatttcatgaattaattgttattgaaaaattaatatgcatatatatataaatctattaattgagtggtaggagtaggagaaccgtctgtcttcttgaaattatttccttttaagtattgattggccccttcaatcatcctcccacaaaagtcaagcctcatgaagaatatatatataaacttattgttattgaacattataaacatgttgaatttcaattggctagcgatacttcttaaaagttattatattaaattatatggacccgattatattagttgaatcaatagcgatattaacatatataagagaatgttaagtaccactaatatattttaaaatttctctataaaccttgcttgtgtttaattatatatatgcacattattaattttattgcattctcaaactgtacacaagttaataacaagagagcctatataaacctataatacgcaataatcgtacgtagacagattcacaaatttcaaccctcttctcatattttaggttttggcaattataataataataatttgatcaatttcagaaagcaacatgtccgagggggggcatgtataaatatatatatctatatatttttatatatata

SEQ ID NO: 328541 - DNA, 541 bp, Cannabis indica
ttttctttcacatgcttttatttctgttagactttaattttacttcattgtgcagctcaacctaaaaatggcatatacatactcacgggccaagtctacggccttaaaagctacaactagcaccaccaacttgaaaaaggaggcaaaagaggctaaaaaggagacagagcataagagtcaataactaggtgaggttaacaaatagctcccgacagccaattgttgtgatattttgcacacgcaagtgcatgtatcgtttacaagtaatagactcaccaagagtgaggtcgatcccacggggattgtagttaagtacattaaaattacacttttacttctatttggttaaataaaaattaaaaataggaaaaatctagaaaataataaaaacagtgaaaggagaaacaatttaaggaaattaacagttaataaaactagggatttgatttcaattatttctattgaattatggcttaatatgattatcttcctattatcaatatctatgaagtagcaggtttactaaggtaatttatagtct

SEQ ID NO: 328542 - DNA, 576 bp, Cannabis indica
tttctcttttttcttgttgtatttaattgtgtgttgttttcttgttgtgtatgtactcagccttggaagttggaactaggtagccctcattttgcaaatcctttttatctttttgaagaagttaaaatatgtctaaacaccctctaaagtataatatcattaatggtgaaattaaatattggatcatatataatttaatgtaataatttttggaatatcattaactaatcgcaaaatatcacctctaagtagtgctaagaatgactagtgtctaataacaatactcataaacttattgaagaattgataaagaaaaacttaagctaaaatctaaaactagtacaatccaattaaaaaaaaaaaactattttgagaaaattgattaaaacattataattaatttatttattataatttgttatgtttttcgtcattctaactttacaactggacctgaatgactgtttttttattatcacaatagttgtaatatatatatatatataggtgattatttaatagttacaattttattgtaatcatgatagttactacttttatggttactattttttt

SEQ ID NO: 328543 - DNA, 666 bp, Cannabis indica
ccaaaccgctcaatgaatatattaggtaatttacaaattattcaaaacctcccaattaacttacataaatcgatttatacatttttaaataatactagaaacttacaatagtaattatataaaaaaagtaaagaactgtttagacgggttaatcagaccaaatagaggaaatcattaggcaagttgaactttttctaatttttaattggatgagttataattaaatatttacaacccgatatttatatatgttataactcgaccgacgtacattcctaataagtattactaataaaaatatatacaaataaatttttaaattttgaattagtaagtcaaaactaattattccaacaaaaataaatgtgtatttaagaggttaaaatcaaaatttaagtatttaattaattgtataatttttttttgaatagaaactttcattaaactaaaaaaatcaaccacaagaatgatatctaactttgaagatgttgaccgaggttttcggcaactaataaaatattataaagttagagggctgtaagaaaattagagaagaatttttacgtggttggggcgttaatgagccttagtccacgagtctttgttatttatggatgtctttaatacagagaatgtatttggggagtgtttcactcttataaatac

SEQ ID NO: 328544 - DNA, 837 bp, Cannabis indica
atatatatatatgtatataagatctaaagggtggtggctagaaaagaaaagttaagagcagagttgggtagctgtctgaatatgataaatggtaagaatataagtaataatgtaagagaagatattattcataagaagtgatatcgatcgatggtttggcaaagtagtgatggctatctatgctccttataagctggaagattatggggcggtggtgttatgagatgatgatccttcagaccaagttggcgaatatttttctttttatggttatacatatgtattgtatatataatatatataacaagatgggattccttttatgtaaaacaaaagacacgagaggactcaggagaaaagaattatattaattaattttattttaactactactgtagtactcttaacagtactaaacagtagctaccctagcttttcacatatatagtttataatttttttttattttttatttatttagcatgtggaaatttatttagagaattttattttttcataggttgataaggttttagatcccaattgtcagtaccattaacgtagatgcgctataacagtatgaacatccactccccacaatatatatatataaatatatatagggatatgattactttcacggaatgtattctatggtacattcgatgggtctcagggtacattaaatgagtgttagggtacgttcttactttttaaccctaattatccctagatcaatctcatccgtcagatcaataacttcctcatctgacggctgcagtcgtacatcacggattacaatccgtgaaagtacaataacgggacaaaatcatatcc

SEQ ID NO: 328545 - DNA, 767 bp, Cannabis indica
tgtgtctttttagtcttttttttattaaaaattaatataataataaggaatattttttagtgtaatttttggtgttgtggttggagtgaagatagtttttaacatcaaatttggtgatagtgtgacaccatatttgatgagctccttggagatgctcttataatgagagagcaatactttataattaatttggctaagtgttaagaaagggagcaacactttgtagtttagctaagtattggaagagggagcaaaggaacttgaggagagatagagagatcaagagggtatggagctcccttgatgcatgtggggagtgatgagagtcggagctcccttggtgcatgtggggagtgctgggagcggggatctcccttggacgcgcggagatggtggagcggcagcggggagctcctcgtgcagggagctcaaaccgagtcttgacgtgtcgacttgtccctttacgtggatcgactttcgctttcttgtcaatatgcttttagtgtattttgaaattttatacttagtaaattttttggatataatattaatgacaaaaaattacacttaatcatttttggggtcaactttatttatttttattttactttactcatttaaataaaatatttatattaattaaagttaaagaaaacaattaaaaagtaataaaaatataataaacatgacctaatgggagtaaaataaattaaagtaacaaaaaataaaataattaaaaaaaaaataaaaataagaagaaacttttt

SEQ ID NO: 328546 - DNA, 1102 bp, Cannabis indica
tatcatttaacaaaatataagtaatttcttttgtaaaacacaaagtctaaaataatatttactttatataaatgtaattgtgataaatatgatattttttaacaaaaaaaataaaaatataggataaattatcgaaggaatattattaaaaattttaaaatctcatgtgtaaatttaagtacttctaccatgtgttcttttaaaagagtgcgcatatacatattttgtttgagaaatttgttaaaatatacttaaaaatttagactattcttttaatataccacctttaaataaatactctaaatattctccaaacattctaaaaccccaaaattacccttacaattcaaaagctctcttctcccactctctttgtcaaacttcccccctctctctctgttattccaatccagccccgactgtcacgagctccgaccgaccaagatgacccacgaccgagaatacccatgacgactcgcgatgacccacaacgacccatgagaagcacccaagacaacccacgaccaccgcatttttttttctggtttctaacccatctagtgcttattttctgcatttttttttctggtttttgacgatgtcacgaaacatcgctagatgtcgcgaaacatcgcaaaatcttgaaacatctctaaatgtctccaattcataacaatgcttgttttctgtattttttttattttttgacgatgtcgcaaaaaaatcgctagatgtcgcgaaacatcgcgaaatcatgaaaacatctttaaatgtctccaattcacaacatcgcgaacatcatcgcgaaacatcattaaacatcgctaaacatcgctaagtatcgcaaatcatcactaaacttcttccctgacctcagatttgttctatcattgcaaatacatcgttaaatatcgcaaaatatcgcaaaaactggtaaaccagaaggaaaaaacgcaaaaaatgagtaaagttttttttgaaatgtaagacggtcgaacaatactagctctgttgatgggtcgtctgattggtagagtgtgtgcgtgtgtatggtgtgagtatcctggtgtgagtatcctagagagagagagatggatgtttg

SEQ ID NO: 328547 - DNA, 656 bp, Cannabis indica
aaagggttttatttagggcacaaaacccaatacaaacaacgagcatttgtcaaaggcaaagtgatgtaaaagaattaaagcaaaagatgtgaagaagaagatacaagttattaaaaattacctcgcgcttaagtcatttagattgtctctgtaaataccaaaaggggaccaatggcccccgaataagaaataatatataaaaaggaagagagaaagatgttagaaattttagaattaagccttatctaacggaagttgggtaggatcgactttaatagaagcatcttcatttgctagaatcctcaacaaccggagctttagaagattgaacagcttacaaagcttggacttgggccacatatgcctcctctttgtggtacctagtttaagcatgttattaattgagatattatttgtagcaataatgatttatgttagtaaattgttaatgtgattaattattgaaattgaggtaatataatatatgaaagctttacataatgcataataaataagttaatggtatatagataatatataatacgctctcaattaagtgtgataacatacattatttatatatatttattttgtagtatattcagatatatatagaatgaagtttcaatggttacatcaaatatgtaaccatcatg

SEQ ID NO: 328548 - DNA, 1079 bp, Cannabis indica
ttattattattattatagaaacatgcagtacattttcatcgtgtttcttatgtgtggataactccaatttttggcatactcaaattaatatttttggtgttattaaaaaagaaatatatagttttagtggtagtcagtagtctagacttattcctttcctaaaacacacatttgatattatttataatacaaagtaaaggacagttgtgattttgattttattatgaaaaagagctacatttatttcgtcataatccctaaattttactgtaagagttgaattggatttgtataattggtcctttttattctttagcttctttctatacctcttttgctacatatgataatgatatgcactcgattattggttgaaaaaagagaaaaatactataacatgatcatagagtcttattagttttttaaaaccagaaatgattcattgagctttgtttatacgcaacgttgtgatagtgaatattatttaattttactcaatttgtggaattaggagccacatagagatgataaagagattcaagatatggacatacagagaaggtgatgtacctatggttcacaatggccctactacatacatctactcaattgagggccactttatttttgagatggaaagtgggctgagcccattttcagcaaagagtccaaatgaggcccatgcattttttcttgcccttaagtatctcaaaaatcactgattatcagtataggccccaccatgagacatttttccatcgtatggttcgcgtgtttgctgactatgtctatgtgatcgcaaataaacatccctattggaatcgaactagtggagctgaccatttcttcctctcttgccatgattgggtaacatctttttactctttcttttttttttatttatttttcagggaataaaatctaagtagtctctccttcatatcactatattaataaaattagatattgaatttcacatcatttaatttaataactaataaaaaatattacctatttactaggggtgggcatccgatccaatccaacctttttttgctcatccgatccaatccaattag

SEQ ID NO: 328549 - DNA, 605 bp, Cannabis indica
cacataaaaatatatttagagtttgaaattgagtcactagttagtaattcagtactaaacattgacatttttttgttaggattttcgttatgcataaatcattgatgcacaaggagagagacacacgacgatttcaagtaggattcgaggcatttatgaagtttgccctaaagaattctaaaaatgtcgaacgtattcgttgtacatgcgtagattgttgtaatagatcaaaaggaaatattatgatgattaaggatcatgtgtatttaagaggtttcaatagaacttacactacatggtattggcagggcaaacatttaactgatgatccatatctattaaggaagcagcgggtaaataatatttagagtaatgattttgatgatcatctaatggacttgcttgatgaagcacaagagaaatttctttatgatcctaaaaattttaataatttgctaagtgatgcaaataaaaatttggaaaataaaaatcctaattaaccctaaaaatataataccactttcattactttctactatgtctagagatgcacattttccccatggggatgggccctcgcagggacccgcccttaatggggcggg

SEQ ID NO: 328550 - DNA, 883 bp, Cannabis indica
atgatagtgtaaaccgctcaaatggtaccacaccacaccacatttttgcggtgtgatttttgtagttttattatctcgcggtgcggtgtcggttggagaaattacaataactgcatatgcggtttggtttaaaaaaaaaggttacaacccgcaccacatacaccgcgaacacccatacaattggcacagttttaaagaaagctaaaaggtattttttgaaaagaaaaaaaaaattgtactataaaagtatttggtaaactcttaaaaatgagcttattaaataatttatagaaagatgcaactaaaagctaaagttgttatgaactttatttgattaaaaaacactataataaatttatttatatatcatatattactaaaaaaaataaattattataataaatagataatatttaattattttaatttattttaaatattttatatttttttggtattttttattagaaaattatagtaaatgggcccaaatcataggactgtatatgttagtttatgtcctcatttcaaaaaatatatagcaaatgaccctaaatcataagactatgttagtaaatgtcctcatttcaaaattattaattttttttttttgtattttttttagaattataagcaaattatttaaatattatggtatatctatattatttttgttaaaatcttttttattttaaagttatgtcaattttttttttaattttttatgagttgttttgagttgttgatatatagattttgttgtacggtatatttttattttgttgtatggtatattattattcttagatgatatttattttttattatgatatgtataatagtggtatataattttattagcataataaaattattttaatgt

SEQ ID NO: 328551 - DNA, 1097 bp, Cannabis indica
cacgggtagcttgtctcttgtgattattgtggtctcgctattttgtatatacataatgatgatgatgatgatgatgaacagttttgttttaaaagctaaccatgcagggatttttttaattatatagcaagtcatttgatattagttgttttcctactgggctttataagctcaccccctatatttcctcttccaggaaccagatttgtacttgtgggtgagagggaatcgttgatggagaatagtgtgattagcttagtcttatcttagatattaattaactattcttttaatgattgagtaagtacctaattattaatgggtggtctgcatcattcaaatagctatttaacaattatggatgaggaatatgatggatgcttagcattattttggtatttttcttattattaaatctaatcatttggtgactacataattgtagaaatataattattctacatatatatgtatattgatgagtggtcatattttattataactattttaaatttgtaatagtagttattctattgttttaaatatgtattttatttatttttgtaatgtaaacaaaaggatctcttaggatcgcttgtaggtattatttttcaacagggattagagtgtgacctttgaccactcaagttatggatattatatatctgtcacagtttaaggctcgggttgtgatagaaaaatggtatcagagcaccaggttcaaagcctcggagtgtgtcaccaaataggttggatttgcttaaaataataaaaattagttatatatttttattttataaaattatatgtttatatagcatccattccttactaacttgttagcttttggtacaaagaccgaagaaaggcatctaagacgaagtgtaggaagagagataccttcaaaagggaagagaagcaaggagataatgcgaatctaaggccgcttaggccactactacaatttagccttttagtgacatgatttagtgacacacacaaaaatgtgggtcactaaagagttaggagtgatttttagtgacatgtacaattcaactctaaatgtttagtgttagtctcctataatatgcatcact

SEQ ID NO: 328552 - DNA, 963 bp, Cannabis indica
ataaatagagcttttgctcattcaatgaatgtacagaatcatttcaattcaatctttgttattctctctattttttcctctttccttataggttcaagtctcgagacaatttttttcaatattttcttttatatatttttgaaaatgaatgatcttaggcccatataattacaggaccagatcaattatcatttactacgtcactcattttataataaaattgaataaaatatggtagaagaactacgttagtgtaaaagttatatttcgagtggtattattaataagccctctattataagaacacaacaacttagtagtgtaaaaaatttaaggaaaaaaatcctaattattatttcttttatttatttttttattttatattcttgtgaaaaaagaacagtattttgtaactatatctgctaagaatgttcacaaattttactttttgaggaaatctataacttataaataaattgctataatggtatatattaggtgtagaaagtaaaaatcccaaaattgtgtccaacggactaacgggagttgaacgcacagagccagcagatccgttggatttgtcggtgttagtaatcaaatcgctgaaaagacgttattagttattacctatatcgtcaatactaaaacaaaaacacagcatggggacaattcagtgtatgggcttttattttgtttttgtttcatgaaatgttaactctagtcattgttttatcccattatgagttcaattcagtaagggtgttcatcaacccgttcaaaccgttcaatttatctgcaccgcaccataccatcacaaaaaaaaatgctgtttgaaattttttacggtgcggtcgcgatttgaatttttcctaaaccgcgcggtgcggtgctgtttgcggttttgaattgttaatatttgtcaaaccgcaccgaactgcacattataaaaatactaatttttat

SEQ ID NO: 328553 - DNA, 798 bp, Cannabis indica
caatttttaaaaatgttatatatggagtattttaagaagtaagggagtacaaaaataatagtaaaagagagataaaataaatattatatttttaatgatgtgtaaatttttaacatccttaaaggttgctaccattagagatgctctaagacccttatttaaacgtctaaaatttgtagttaaattttaacccaaaactataaatttttgcaatatttgacttattatttataattatatatacaagatgttaaaataacaaaaattaattaattatattaatggttatttaatgttttattgaagatatataaaaattattattttgtattctatttattattcaaataatgataatataataaataaagaatataacttaagtaaaaattaatacatcataataattattgatattacagtaaataagaaaataatatttactgaataaatttacaataatgttatatcttgtagtaaatttaacataaattttagtatgggccaaatttagcacattatttaaaacaccaatagaataatatttttttaaagtgtactaaaatataatattacaccatctttttgtcattatattatagatgctctagtcataaatgttgggctcaagacaatgttactgtagaataaatttagcacaatgttattttcagggccagccctgagggtaggcgagttaggtgtgcgcctcgagcccccaaccgctcaggccccgaaattgtgaaaaaaaattattaatatatagataaaatattaaataagaagaaaatataacaa

SEQ ID NO: 328554 - DNA, 1594 bp, Cannabis indica
tcacgtatagtaagtctatccccacgaagttgatttatgagcaatgtgcaaagtttagcatctaatttcatttttcttaatatgttattaaatttttataaatcaatcaagtatttctatttctacatgataatttaaaattggagaaatattaaaaagtattaattgttgtgtaattttataatggaatctcatataatttaatataataatttttatagatcattattaaacattaaactaccacctattatttgtacataatatcaatttaataataattaaagtaatgactatttaaaaaaattattttcttattaataattactaagaaaatttaaaattaatttatttttatttattgataattagtaagaaaataaattatttaaatttattacacatgttgtactcatatgaaaatattttatttatttattaataatagttaaaaaaaaaaaaatcataactagctagcataaaataatttaggacgtgaaaaaagtttaaaatttaccaaataatatcatgggatcaatatttgaatttaaattgttttaccaggatggaagaaagaatatagttaaatttagtattttacttatcattttattttatttatttattcgaatcaaattatgtcaatgtttatttaattatatatcatttcttttttggaaagtatcatttacttgtttattctatcctcaaaacagagttattaaattagagcattgatattgggcaacagtggtacttagcactcttaagatgtggtaccttgcgattggctagcgatactccctaaaagctattatattaaactatatgggactaattagactaatagtaacattgacacgtaggaaggtgcttaacaccactcgtaccttttaacattggaattattgacattggaataaagattggggtaactcaacactaaaataaagattgaataaagattggggtaactcttaacactaaaataaagatttgtacgtatgcacttcaattttcaattaataaaatattcctacataatatatgttaagtggacgaaagtggctttatatatataagtgagtgctatataaaaagtatgttatgggattgctgctacatgataattatacattataatgtattcttccaattatgtctgtctattgattaattagttggttgtcgatggattgaataggtaatttgagaattgttaaagggtatttatattttatagtgattaatattattattgtgagttgtaatattgtattggtgctgtttaatattagtgtcccatatcaatgctctaagcaatttggttgcactaattaatcaaacaaatcttttcaaaaccatttaaaaaaaaaaaaataaagaataaaataacgaaacaataatctaatccttttaaaaacattataataatatgtgagggggcagttaaacttctaccgtacgtatatgtcgttgtggattataaattaataacaataagacttgagattagaagggacgaaactaataatatataggtaatattaatctatggataaaaaaagatcgataaatatatatatatatatag

SEQ ID NO: 328555 - DNA, 676 bp, Cannabis indica
aaaaattgaactaaaaaacttttttacatttcaaaatagataaaagggatctattaaaacactccttcatataagttcaacaaaaatttccttacttttgtcaatgaaacttcttaatatgtattattaacgaagttaagtaaaagtatattttacttttattgacaaaaattatagtatttattgttctaacatacgtatatagttttaaatttaatcattaattataatttgtattactagtaatgttttttcttataaaattttatatcattgaaaatatttgtactacacttttttaaaggactgtttcagtaaatttttatctgtttcgacattcgaaagagctttttagtccaacttttcttttttcatgatcccatacaatattgtagttatctaggagcacttgtaaattttaaaaaaattctaaaataatttatagtgcaaaaaataaaaaatcaattaggtgcttaccacacaataggaaaaactaatcacacgtgtaaaaaaaatagttatatacacttttagcattttaatttattgggggccaaggtcactactactaaagcctaatagacattttctgtctcaagtttatgtcccacaccaattataatttaacacctataattaaactttgctacctaaactaggcgtttggttgggagga

SEQ ID NO: 328556 - DNA, 643 bp, Cannabis indica
atgaaagtaatcatgtgaatcattaaataatttatgatcttctattaattagtatatctgattatattataggttttgtttagtgcataaaatcccaacagttttcatccccacctccaattctagcaagtttttgattgagtttatcaaatcgcctcaggcacatttttaaatacccatgtgatcaccaactcacagtcaaaaattcaataatgctaaataaccatttcatatatattattaaattattcagttaataaacataacttcctgccatgctttactactttcacattatctattatattcatataattttaaataatcacaaattaaaataaacatataaaatttactacattatgagtcgaattggtctctatagtaaatgtatatattcagccggtcttcaagaactttaaaatcttgatcactctgataccatgatgtaacgccctagggatgccctatatgtgcttttttaaattagtttatagtaataaattatcaattttattaaaaatcgtgattaattaaaacttgattaattcatacatgagtctgaaaaatcgcggtttgtttagcacttctccaaaccactgctccacccccaagagtaaacaccatcccagatgtagatttc

SEQ ID NO: 328557 - DNA, 688 bp, Cannabis indica
gtccgaacactagtggcgttttctaattaagggctagattttagattctattacgtatggtagtatgcatggtatatatgtaccctgtgaagtttggggtggtttggacaggttccagcagcgtttcggtgagtgcgtaaatttagaaaattacatttttttacccctgacaaaccaatcaaccagttgggaaccggtcaaccgatcctagccaaccagtttaccatttcgggcagcctcgggaacacaggaatcaaatttttaccataacttttcactcgagtgtccgttttggacgttctatataccgtttcgaagcttgtgacgagatataccacatggtgtatgttttagagcaaaaataattttttttagtgtatttgtactacggggtttgctagaaaaccctaggttatcttttgcagctgttaagcggtgttttgggataaacatttattagtttaccattgttgtgattgttaacgcagattttcactagctaaatttgagcctaatcgtgataatctcacacagagaaaataaagctataaaagtaaaaatatgaacacagggttttttacgtgattttgcagttaaaattctggatagtccacaagtcaatcttattcagatttctgattattttctcaggccccttttttttttttttttatcttacttgccacta

SEQ ID NO: 328558 - DNA, 753 bp, Cannabis indica
aaattaaaagtcacccatgaatttttcaaaaccaagaatttcagttatataggcacactttatatagaatagatatatactaggcgtgaagtacttgctaaagacacataatttcgtcaaagattataatcatatatctaacttatatcaattatatttaaataattataaaaatatatatttaaacaagaacattgtgtcatcaatcgtcatacttaaatgttaacttatataaaaaatttctaatattatttactaataataataactaacaaaaatttatataataataataataataataataataataataataataattattgataccatattatataggctaattaggatttttttttccctgaactttgacatgtaccaaatcatgcccttaaacttttaaggtcgttaaaaatacctcctcaactattgagattgttggatttaaggacttttgtccaattttagtaaaaaaatctaacgtggatgaaaattcagggggcatgatttagtatatgtcaaagttcgaagggcatggtttggtagataataaagtctggggagcgtcaaagttcaggggcaaaaatcgtaattagcctattatatatgtatatatttgagaaaattacaaataatttttagtggcacagtgtaatacccggaattaagaaaaggattagcaaaactctaattagataatgatgaataattgaggaattatattattatatagtatgcctgtgttgt

SEQ ID NO: 328559 - DNA, 575 bp, Cannabis indica
ttgggaatcatgaattgacttaatataatattttgataaacaatgagtttttgttaattttccttgtgacatttaacaaaaaataaaagttatttgaggaatttttattatttaatttttgatttattagtctatccatactatattttgatcatgtacaataaaggtgtacataagttggtttggttgggctgtagcataatttcgccaactcaatctaaatatgaggttgtaaatgttacttgtagctcacctaattaaaaataaaaaatatattctaacacatttaataattttgtcagtttgaccgagttaacttgtccaaaccaattttcactttttttatataattattattgtaagatctttttggtaatttaattgcaaaaatatattctaatttaatgtttagttgtaaatattcattgtaaatgttttatgccttgatttgtttttatatggttgatcttaattgtattaattctcagaaaataggaaactttttttgttatggaataaagatgtaaagtcctttttagtcaagttagatgccaaatattttccttttatggtaa

SEQ ID NO: 328560 - DNA, 491 bp, Cannabis indica
gggcataaaacccaacactataagggtttgtttgaatgttacataagaaaattttcctaacaaaattattttacccagaaaaaacaagaaaatgttttacttctaggtaaaaagagaaaactaaccttaacagtgagactatagattgtctataggatctttgaggcttgccatatctcatgtttaagtctatatattcacccagaaaaccaaaactaggagatgggtataaccaccaaggaacgaagctggcggggagaccgggagtgcgactgggacggcaaggccagggaatgctccaatggacgaggggcacataggaggtagtctctaagattccaaggacgagagaaggagcgaaggcatgtgggcctcgacggtggagggttccaccgcgggtggtgattccgacggagacagagatgttctattttattacttgataatgttgttatacttatttcaaatttttagttgcattacacttgtaa

SEQ ID NO: 328561 - DNA, 973 bp, Cannabis indica
aaacccaacaggatgttgtcaacaaaaatcagctgggggtttaggcattaaaagcttgaagagtggaaaaaggttgccatgtgtaaatacatgtgggccattacaaataggcaagaaagtttatggatgagattggtccatagtgtgtacattaagagagatgattggtggagctattcggcttctgtccacaccagttggtattggaagaggctggtagctttaaaagatcatattaaatcactcactaatccagcaagattccaggcacagaagtataacattgcaatagggtacaaaatgatttgtcctcctcaaaacagattgcaatggagtcagtaggttgggttaagattgaacattccaaaggacagtgcgatagtatggttggcaatgttgaataggttaataaggatcgactcattaagtttggtatgaaattgactgaaaattgcagcctttgtactatgcacaataagaatggccatcatttattctttgaatgtagttttgctgttcaatgtctccaagagattaagaagtggttgtcttggaatgctaggtccaataagctagctcaacttgtaaagtggataggtaaagcaaagatgagtaaatttaggaagcaagtgcttgctgcagcagttgcttctctagtttaacaacatttgggaaaccccaaataatgtcaattggaatgggggcaggtaaataccatcggattactagaagacctcaaatggaagctcaaaattagaatctttatattcttaccaaaaaaaattacatgtatagatagagattgttttattacattgtaaggatgtacatacatagagaaaattgtatagttaaactagaggctccgatgtgggagtgctcttagtgtgtaaaaattgatttgagcaatataacttcctgatttataaaaaaaaaaaaataatattaacatattcatatattcatatgataa

SEQ ID NO: 328562 - DNA, 642 bp, Cannabis indica
acatccttcttgagggtcccatggtacctctaggggactcgaagacatcaaccaaccatttggtgtcgtgattcacacaccccaagtgtgcctaaactagggttcatgggcccacgcgagcattttcaccctaaagatctcaatctgccaagaaaacctataagaacttgactcttttgggcatgaaaaggcttaaacttgtacataaagtcagaattgtataaaagtcccatgcactaaagcctatgcgcccactgtcatatgaagatggtagtactctccagtttttaccacaaggagatggcagcggtcgccacctatgaagcaccaaaggagacttgtccaaatatgttcccttgataccaaaatgaaagaaactaagtgaaagaaactacttctcaccaaaatgaaagctcaaccgactactgacatctttgtagcacaaattgtggcagtggttggccacaagaaatagggatgagattttttgttaaaaatacattttcatcaataagatgtcaaaactaagtgagaaaagtcaccaagtggtatagaaaccacttggtcgaccactgccacgtttttggcacaagtggtggcagtggtcggccaccacataggagtgggagtttctttggccaa

SEQ ID NO: 328563 - DNA, 876 bp, Cannabis indica
accgcactgtaactaattgggcgacattagtaacccatataaatagtggttttatcttactatttagggacacgaaattaatcagagagaacactcaagagcgaaatcacgatctaagagtaaattattgagaaatctttgtaagaactttcgagaatgaatactttatttttatctcacaagttaatacaattgaaagggaagtaagctattatcattatcataggaccgaacctctttaaactcgttgcgtaaaaccgaaatcaacagaaataaaatagaatgattattccacttaaaaaaaccattccaataataattcttttttatcaattttattttatattttaattcctatgtttcgttttttccaaaaattggaattatcaaattagctctcaacagttaaacattaacaacgaattcacaataaaagtggcgtcgcccggactcgaaccggagaccttcagtgtgttagactgacgtgataaccaactacaccacgacacctttgtgctgtttgtgaaatgaatatggtaaatatctatttttaatgttaatataacccttacgcgttaagtcactgtcttcctctggctcaatctaaaaaatagctcaaacctctctcaattcaaacctctttcttctcttcttcgtccatacgaaaccctagctatctctgttctttcacctttgtccaagtgacatctttctcagaggccaacatgtcagatcctttaagcatgtcccttgaagatatcatcaagggcaataagaaatctggatccggaaaccctaggggcagaggcagaggctccggccccggccccgctcgacgacttcccaatcgcgccgccaatcgtatcgctccttatg

SEQ ID NO: 328564 - DNA, 2072 bp, Cannabis indica
ggccggcccagtagaggataatgcaggcccaataacctctctatgagtcccatcaccttggcccaagcctttgagtaaagtcaaagcttgataagtattattcaaattagaaggaggaaaagtctgcatacccttttgcccttcatcttctccaacgttacaaatattacccagagaggaaaccccaggttgtcgattgacagtaaggagcttgggaacccacactttctgattcgcctgtctacccaaagccgaggttcgacctgtcaccatctccgattgcttcgaaccacgccccaccatgacctgacgacccaatcgtcgcccactcgaaatcatggtcgccggcataggcttcctccgaaacacatcacggttagcccgagaagaagaagtctgaggcgggaggattgagtttgcgccagaaaaaacatcaaggtatgaagaagccattgaaagccacgggccatacatgggatatggaataccaaactcattggccacggtaacaggggaagaaagagagcatcctcttctttgatgccccagtttaccacaattgtagcaaaaaattccaattctctcgtacttaaactgaagccagcggtggccacccgattccaactcaaagaagcacccagaaaaaagaggagagttcacattcaactcaatcgaaatcttaagatattttccccacaaagccggagtaccctcgtccaagtcgaccaagaggacattaccagctttcccccccaggatccttccattttcaacagagtagtagtcccgtggaagattatggatttgtatccaaattctcgtcgagtgaaaagaagtggagagagcattcctaggggtccaagctttaagaatgaaagtatagcctcggacacaccacggtccattatcatgagcccaagcacggtcctctgctcgcgtgaaaccaagctcaaagcagttagggatattagtagtctcatacaaagcagccacaatcacctcaaatttccaagttttgtccacaaagtccctaatggtatcttcattaacagacataggggctaaaactttccccacaaggccgaaagtggacaaagctttctgagaagaggcacaaggagataactttatagtagattccacacgagaaaaacacttgcccttaccattgaatgcagggttggtggcattaactatgtccataacgacaacaaaggacaaaaccaccaaacaccaccttaaacactataaaaagatacacaacacttaacccccccgaaccccacacagatgctcacagaaggagacagaccaaacaagaagaaaggaatcgaatcgcccaaaaaaactcacaagtcagccaacaaaaacaggacaaagataagaaaccaggagggagtgaaatctacagaaaaagctcgaaagggagcaaacaaacaccactgagctttgaccacaaacaaaacctcaaaactcaccagatattccactcacactagtcaacagcctctcgaaaccacactctcaagctcaccagactcaccacacacaccagacactcactctcactctctcacactctctcgttctaattatatgtagatatatatgagatatctactctacgtcatttagttttgaccctatagtataaggtagtaaagtaaactaatgagaagttaaatattgaaagtcttctttagttacagtggactgttctacattataattgaatttatttattattttatataactaaaattactttatataaagaataggcatacttgagtgttttataagcgcccagcctagatttgaattttttttatactttttttttcagtttttttagtttattattactaaaacttaatatttttttattttatctcaaatttttatattctaccatattaccatacatcaacttctcagcaatacaaaatttattttatttttcaaattttaatatattttattcatttcaaacatataatattaatatttacatatatcctcatatgtaaagtaaaattaaaaccccaaataattaatcaaatatatttaga

SEQ ID NO: 328565 - DNA, 1359 bp, Cannabis indica
atgtagggaccagagttcgaccaggagaacgagtgtttccatacttaccagagagttccagagagaaaagatccgtttactcccgcttctatataattatgataccacaacatatcattccaatgtattattatctagtattatttatgagataataaatgagatattatttttctattacatttttacaattttttataaaaacaacataaaagtaataatagaaaaaaaatatataacatcaaaataatatacatataacaaaaaattaacaataaatttataagagtacaatattaaaaaatcttattttttgtaaataaatcatacaaatatttaaaattctgtgcaaccatatttttgtaatttttcttattatttttatgtatttgtgaaatagtcctttattttatcgtctcacttttgattattttacaccttgatgtttgataattaatttaccttttgatttttgacatattattattttacccttatgtagtaaaataagtattattttacactctaatttttgacatagtattattttgcccatagtataataagtattattttacacctgacttttgacatagtattgtattataatcaaactaattaaaattataattaacaataaattttaaatattattatgttttatttgtataaataacacttaaattaaatattttttaataaaaataattttatttattgaataacatctacaaaaattaattatacaactaaacaatacatataatcaaaataataatgaagaatataactaagtatacgtgtattgcacataatactaacctagtatacactattacaaaatattatttttgcatcggcgaaacacgtcagtcaatgctgaaaattgatgtaagaaaataagattcgtcggttcgaaactaacgttactttgtgtcggtttaaaaatgacattttaatttttgtgtcggttacaaactgacgctacaattaaaaatcgacataataacaaattgaaaaaaaaaattaagcctaaaacataaggcccatttacactaaaaccctaatatatattaaaggctaattaggatttttttcccctaaactttaacatgtaccaaatcatgcccctagaatttttctagccgttaaaaatttctcctgaactattgagattgttagatttaaggacttttatctaatttcatttaattttactatttctgtgattgtttatgtactaaatcatgcttctcatactttgatatctaccaaatcacgctcctcgaactttgacatgtactaaatcatgccccctcgaacttaaacttttttactaaaattggacaaaagtcttta

SEQ ID NO: 328566 - DNA, 738 bp, Cannabis indica
ttaaaaatccaaaccgtaaatttgaaaaaaaaaaaataaaaaaatagtatatgaaatacttctcctatattttatcacactaaagtagcatttaaataatatttataaataaggtaagagaattttatatttgactatattattgattaaaataatataaaacggaattattttaaaaaaaataataatttagagagagagtgaaagaaaataataatctaataaaagatttttgaaggatcaccaactctattttccatatatagaaggaacaatagtgttgtaaaatgaattacacattcacctgatagagaaattttttcttatattttaaaatttttgaaaaattctccgctatgaaatatttgataagagcacactgtgaattaaattaatttggaccagaataatttatggtataaataacgtttaattatcagttgtaaataaatatttaagtttaattttttacggtaataatttctaagttatattttagtaaattccgtaggtaaataaattgctccatgacaatttttaattggttcacgtcattaaattttttttaaaaaaaaaaattaattaaaatatactaataaaaaaaatgacacgtaggtaattatttgatatttaaccgttaacacctatagagttttaagaatatattttaagtattatactaaaaattaaatttagatatttatttacaagtaaaaattaaacttaactatttatact

SEQ ID NO: 328567 - DNA, 1165 bp, Cannabis indica
gtaaaaatatttaaaatttcgtaaaactgtatttttgtaatctttatattgtttttgtgtatttgtgaaataatcccttttataatacatcatttgataagtgcatatgtgtctcaacagcgtttttgtaaaattcattcattaaaaaaaatagaaatttaatgaaaattgtgattatttatgccatttaatctattgcgaacagccgattctaaaatatagttgactatgaaaaatattctttaatttttatttaaaaaaatattataattttaaaaattagtaagaaaatatataatttaaaaaagaaaaatttttttagtccccttaacttaaatgaaccttagacacgggcttaattcacttactcaagacgggacctaattgtgaatattgcttctcttttttttggttgaaaaatatttaaattatgaatttaaagtatactttttagaagaaaaaaaaagtgtgtaagttaagaaaattaatgtgttttttataaatgtaacttatcccactaacaatcgaaaaaagcacgtgtaccacaacatatttgtaatctttttttagaatagtatctacaaagggaaaatgaaagaaaaaatatgcatagaatagaaggaggtaatgtttgaactttgaatcatgtaaagttaccatctttttacatttcacatatattttgtgaaatggaacataatgatatgtgtgcttaattttgattaaaacaaattagggatcaagattagactataaattttttagggttagggttaccaaaagtttgagtaaaattggactcatgatataatagtattttattttgcaaaacacaaaatttgagttgtcatttaagaaaataaaaagtttgattaatgatttttataaaatactaagtatgatccaaaatattatttactcataataaaaaaaattagtaggagcatgtctattcactccagtaggaatatcttatttttttacgtatataaattattataggctaattatgttttttgtccttgaactttgacatgtaccaaatcatgtcccttgaacttttaaggtcgttaaaaataccccataaactattgagattgttggatttaaggacttttgtctaatttcattcaattttactactttagttgattgtttacatatt

SEQ ID NO: 328568 - DNA, 738 bp, Cannabis indica
cctagattaatctcagtcagatcaaataactctcttatctgacagctgctgtacatcataaattacaaaccgtaaaagtactataacaggacaaaatcatatcccaataaatttaaggaattagtcataaaacaacaacgccctgcccagtggccctacaattaatttaactttaaaaagtaccaacgttgtctaagaagaaccgccatcattaaattttatttaataagtatatatattgagagtaacgaggcagtctcaactggcgaaagcagcaaacaaaaatcaacacagtcaaagtgtcaactccttccaagttaatatggatatagtatatatttatttcaaaaaaaaaataaattgatagtatatattttgtattaaatttagcttaaaatataattaaattatatttaatttaattttgtatttatattttaatagataagatataaattaggagtttttttatttttacactttaaaataattttttttatatttttacaaaattttacataaaaactcatattataattaatggagcaactacaaccaaaatccgtatagtaaacctcatagaaaccaccagagaaattcaaaccataaatttaaaaaaaaaataaaaaaaaatagtatataaaataattttcctataaattaattattaatagagaaaaaaacaggaatattctaaaaagagaaaaaaattacaacaatattgtgggccggcccaat

SEQ ID NO: 328569 - DNA, 760 bp, Cannabis indica
ttcaactaacatagaaaaaaactggcataaaatttagtatacgtattttgcacgtaactttttgctagtatatatatttatatgaaaatagaaggatggccagccaacactctatgattgctacctcaagagaaatgtttgcactttgcaccaccaaattctaaacttttatcttcctacttacatatataaaccatttattaatgactataatatcatcctttactataggttgccacagaggaattgagcaacaagactgtagccttattcattacagatgaatctcaatctccaacatgagcaagaatacaaaatcttggaacgaatttaccaacaaaagaagcataaccccatgaaaatggatagtcattacgagatagtttgggtaccaattgttgataattgggatgaagataaactcattctctttgagatactaagaaatcaaatggaatggcacccgattggccatcattcggtggtgtcaacggtggtaagaaggtacatcaaagagaaatggaacttcaacaaaaagccaattcttgtggttatagacaaacaaggtgttgttgtgcaccatgatgctaccaacatgatatgcatttggggaaacactgcctacccttttaccatcaacagagagaaattattgtaggacattgatcttcttattgacaacctcgagcctaattagaatgcttgggtcaattttttttcttttactttttctttattttttgaaataaaaaaatgttta

SEQ ID NO: 328570 - DNA, 885 bp, Cannabis indica
ttcgaccttgctcagtaaatcatacataaatttcacgttcgaacttcaaatgagatgatttaacatgttttgaaaaactgagaacgagctatatcattttagatttcataagctctttgagaaaatgatgaaaacattgttaaaaaattggttcaaagatcttagtctattacagaattgtcttttaagcacaaaactacacttggagaaaacacatcaaatctatacataaatacttatttatctaataattgactaaaaacaagtgtataaatgtgaactcatcaactgctcagacagatctctcaggctaagctctctaagtttaagaacaaaataataattataggaatagcgagcttggtgtatcaaatatggatgaaccgaaatgatgattgccttttaaatgacaagatgaaaacaattaaaagttgtgttcaacaagtgaaagaaaatgtaaagcatagaatcaaaagtttggatgtaaaaacaatttcaatagaggaaaatgtgtggtttaatactttgtaagtgattaacttgtaattgattagtttttttttttttttgtaacaatggtgagaaattttattcaataacgtttaaccattacaatgtccattaaggatgcaggagcagtatgctaattaaaaatataatctgacatgaaacaagactctctagcaacacaatgaaaggccttatttgtagatcatttaacaaaacaaacagaaatatagtttagagaagagagtaataatcgacaatcttgaactgaaaatccaaactgtgaggtcatggggaccgagctattgacagcttgaaccacaacttaagcatctgattcaatcaccactgtaaagtccttttttggcaagttaggtg

SEQ ID NO: 328571 - DNA, 827 bp, Cannabis indica
aattttttattatttgaaaaaaaaaaaaaatacataagactaatcatgtcttcatatctatataaaagcgttattatcgtttaacaatttttaattcaagttcaaattcccttctcctaatattaaaaaaaaattaatttttttagttagtttaataaaatattattattaaataaagaataaacacccttacccattagtatttctgttttgttaaataataatttgataactcaatcttgatgtcaaatgaaaacttaacaataatctgaaagtgttataactagagtagttacatattttgcatctatttgtattagaaattggttttagattagttatattgaaaaaaatttaatgaaaattgaagttagaatattattttgtatattattttaaaaaatacagaatttgatttgtcattaataaactaaagagttgatcgataatttttgtagaacaaaaaatctaaaaataatatttaatctatttgattatttttaattaattttaaaaataattgctttcaaataatgtataatatttcaatattttgtccagttttaagtatttaattttaatgaatcagaggtcaaaatctataacttctgaaaaaatatttttcaaatttgtaatattcgagggttttaagctgattatatattacaaattatagttggttacgaaatttacaaatctgttttgaaattttagtaatagtttccaatttcaaaatacatattaataaattagatattgtttttaaaaaaattaatgaaagttataatttggtgttaaataatcattttttagacttcacagtatat

SEQ ID NO: 328572 - DNA, 1153 bp, Cannabis indica
ttcgtaccatctcttattgggacccctaaacagtattccaatggtttttttttcagagtgaaatagagaaaataaaaatataattatgtttgtcaaaattatcaaaacgtgataatttaacttcgcataatgagaatgtgaaatttaactttatgaagggagcaattataacaaaaaaatattttctaattctcaaatgttttatgaagtatataaaagtacctgaaaagttttttcattctttctttcttttttttttcctcaaaaaaagctataatcccaataaataaaataataagtacaaaaattacaacttaggctatctccaaccagcctctaaaatactaaaactgtatagtttcacactataactatgtggtttcacactatatataatctaaccagacactatacttaaactaataaatgagattgtctgcagtatctcaccaaatttaataggcactgtagaccacggtatttttttttctttcaaatttttaataattaaattatacttttaacaaaaaaaaaactaaataattatatattgttgcccctgattttgtccaaaatacgtgaaccaactagattgagacacgtggactgaagaggcaaggctttgagataattcaactaagtctccttaatcaaacggatcagcattcaacgtgcctcccagagtaggcatgaaggtttcatatactcccggggaacaagaccacaaggaagcatctccgggaggtatcaaatcctctttgaacaatcacctcgcatttaatgccgcatgggagaagacgtattgaaactgccataagtattaaagtctgacggcgtaacccccttctgcagctactatgctatgattaatgagcctagtgacggctactttatgagaaatcacatcagtcaagaaaggataatggattacgtccattaaacccctaaaaagcctagggattagaccatgcatttcctatgatgtatccattgggaatgtgtgcctttactgaatattacagaaagacatgtacctcaattctagggatcaccccacaaaaacactataaatacccccaaactcattaaggcaggggtcgagaattctgggtttcataagaactagagaggaaaactcaccaagaacattctc

SEQ ID NO: 328573 - DNA, 520 bp, Cannabis indica
aaaaataaaattttccgtatcataaatgaaatcccatgtttgtggctaaatgttatttttttaattcaattttcaaatatatatatattttttctttagtcccaattaaaaatttcttttagctatgaagaattatttaatcacaagttgtcatgtagtttaacttactcacaatttttttgattaatatttaaaaaaaattacatatatattagaaaaaaaaaagttaacctaatttattatgctttaaattatgtaaattgacagactgtgtgaaacttcatatatattttatgagtaatgatatgttaaaacttcaaaatatgtaaaaataacattatataaccaatcacattgatctaaattacatcaagttactctataattgtacatatcgatatcactaactcatattttattttatattttttatgtggataatatttgatataacaactaaaaaacttatttatatataaaagactataattcgagcttaacaaaaaaaataaaaaaaaaa

SEQ ID NO: 328574 - DNA, 1228 bp, Cannabis indica
taatagaaaatactctttaatcaaatgagtaaggaaatggataactattggagcacatgggatgtgagtccaataaacctaaaataatatttaatgttttattgaataaagagttaggaaaagtgtgtgtatgagtatgagtgagtgagttggttcatttccactataaataaatacacaacacaacacatcacaacttctatcatttgccgaccaatttcttttcttctcttcttacttaccattattaattaattaattaatattatatccattattattttgggtttgcttgttttgctttctttcttagtattctttcaaaaactcatcatattcaaaaaaaaaagtacaagttcaatttgattcctctctctctcttaatttatataggtccaaattgcattttgtttattaattagacaaatttcttaatataaaaaaaataaaataattaagttaatgtcatattttttagtctaatcttttgtaattgtgttgtaatacacattggatttgtttttaaaaggccaacagataaatcatttaacttttagtgaaagtatataaaataaataaataattaaaaagttttaaattagtataaagaatattatttataataataatatttatagttattatataaatttaattagtgtaatattttgttaactgaggaacttattaaagaaactatcctattaaggaggggcagctcactcaccaataaattaaaaataatgtactaacaatactctacaaaaagaaggaactgatcatttgtcttcgacataatttttaacatatattaaatttagcataaatttaatattgggataattatataagacacaatttttttataaaaaatattacatttctatgtttaatgattttttttttatatatatttttacagttttttcatagaaacaacacgaaaataacaaaaaattacataaaaaataacaggaaaataatattcaaataacatcaaaataacaacaaaaaataaaatacaaataataaaaaatacaactacaaataacaagagtacaacataaaaaatcaatattttctgtaaataaaatcataaaaatcgtaaaaatatttaaaattccgtacaactatattttataattttttttgttgtttttatatatttgttgaaataattcctttaatattactacactaaagtgttatatgtatataatatatattt

SEQ ID NO: 328575 - DNA, 803 bp, Cannabis indica
ggaaagcaagactcatgtctcaatcaactcgcacggtgctgactaccaaagttcttagtttaggctcgccctgatgtactctagtcggcctatttttaagcttccatcagccattcattcagaattggatagattgactagaaggttttggtggaaaagtgatattgaacaggtagatatctctcattgattgcttgggagaatttatgtaaacccaaagtgtgtgggggtctcggtttcaaaaaagctagggacatgaacttgtgcttcttggctaaacttgcttggctattggctaaggaagaggatgctctctggattaaaattattgaaggaaaatattaccctcagtctttctttctagaggctgatttaaagggaaatgctttggtcgttgctcggggaatatggacggttaagtcgttgattgcatctaatacgaccgcgtgtaagtattcattccgataagagtctctaggctggagactggattatttttgatgagatggtcgtaggggttggtgatattaatcccctggaaaagaagaatcttatgattggagatctgatggtaaacgagggactagcctggaatgaagcggaaattaaatcctttgatcttgctcagaaagataccttggtctagactccggatcctcaaggtaatttctctcttaaatctgcgtattgggctttaaataagaacactttttctgttgatgatgagttatttaagattttatggtgtagttctctacattcttgcattaagttatttctttagaagttgtataaagatgctt

SEQ ID NO: 328576 - DNA, 771 bp, Cannabis indica
tcaaaacggtatatagaacgtctgaaatagatacccgagtaaaaaatgatggcaaaaagtacgattctcgagttcccaaggctgctcgaaacagtaaactgattggtcaagacctgttgaccgatttcaaagccggttgaccgaattttcagaggtaaaaaaatttattttctaactttacgcactcaccgaaacgctaccggaacctgtccaaatcaccccaaacttcatagggcacatatataccatacatactaccatacttacgtaataaaatctaaaatcgagcccgtaattggcaaacgccactagtgttcggacttaagttataaaaagttctaaactcaatttctaacccaaaatcacctcactttcagcaagaaaatatcagaactagtcccatgactacccgagaacaatcctataagctcagaacctttataactattctaatttgcaaaatccctatacgaaaccaattgttttaaacttaaaatggaattaaaccttaccttaaactttcccgctctgataatttgctatcccgctactactggagcttagatcgttaaattttggattaaaaattgaagaaaatggatatagaaaggagaggattttgacggaggacgagggtttcgtttcgtgaaagtttactgttataaacttttctataatatttatataataaatgtaacttataattttatataaaaaaatatagtattataataatataataataattatattaataatataataatatta

SEQ ID NO: 328577 - DNA, 1527 bp, Cannabis indica
tcatgccatgcagggtgcaatgctaccatttcatccgcactttagaaaaatgcaaactatatcatattaggccgaccccaactaactctcaatggtataaagtacttatctcccatgttcgtgttgtacgcttcccaaggatagggtcagtcgctgcccatgacacaactggtgttgacttgaaattccgcccaaacaaaataggtgttggtatttcattttttcccagattaaagagaagtggttgagtggcatcacaaataccgatgtgtcgaaaattggcagctgtgtggaaattattatttctttaaaggcatggacacctattatagccgtctccaacacattccctcattttgttggcctctttttactctagaactcaggaagagggcaaaggagatacttcgacttccctcagatcctcagaatatttcacttttggctaccgatgccaattatattaagtacaagctttactcaactgatgatgatgaaggggccaagcaggtaggggttttatctggtcaggaagaggaagcttcaaagaaaaagaaataaagaaggccccccaatgtgaccaagtacctgttgagcatccagttaggattagaaatggtctcgaagaggctactcatcctttcgtctaggtggaaggaaagggaaaagccattgtggtcaagcaagaagaagacaactcttttgatcagcattctccttctttacttctgtaggagggtgctcatgtacatgtgcagggtagtccatttttttcttaactttgtttttacttacttgatttatgcatttctaacacatatctcctttacttgtgtgtagttatgtctcaaaggatgttgcttacataaaaaaaactggtcgggtgatgcctccggccagaattctctagcaaaatctaaggtggacaacacactaccaaagagcatttccctgagcagaaagactcctcaagtgactactaagagtagttcagttgtcactgcttttgtatgctcacgaggtagtggtcttagactctatccctctggccaagaactctaaatctaaatctgttgttgccccatccaagggttctaagggggcaagcactaaagggcccaaactgcccaagcctgaagctactcctcccgcgttaaatccatagacaaagaagggaaaggagatgctctcattctaccaggatcatgtacttcctaaagtgaatgattaactggtagggggagaggacatttttgtggagctgctcatggacgggttactgaaggagggtagctgagtaagtatcttcctttttatttttcttacacatgctttaaactgtgaaagctttaaccttatttcattgggcagcaaaatctgaagatggcatacacttactcccatgtcaagtctacacccttgaaagtcacgaccacaaccaataatttgaaaaatgaggtggaggaggcaaagaaggatgtaaagctgaagagtactcaattgggtgaagtcaataagtaactccaa

SEQ ID NO: 328578 - DNA, 917 bp, Cannabis indica
tagttttttttttcttaatcataattttggactccaactcccaaatctagccaccttaggatcgggactctggccccagccccaatcctggactcggaccacagccaaagtcccagacccgaacctgtaccagacttaaataaaatcaaaaaataaaaatgaaagttatagaacacatttttattttctgtttttaaaattaaaaataaaagtgatcttaaaacacatatttatttttaagaacacaaattttattttcatttttgctattaaaatatcaaagaaatattaccaaagctttattaatttatcacaaaattattttagaattttagtcataactagagtacattttaataaattagctactcataaagctatcaatatattagctactgatatgtaaatgaaaatttaatgaatttatgtgagtattgtgttttgtattcttaatatattatttagtagtcaaaattagttagtatactataaataatgtttggttaattacgaaatcacatatttattttcaaatctaaaataatttattaatttgatttcatatttaaatttgcaatattaaaatgaggatattagaaaaataaatattttcaaattatttgtttctttgtttttgagtttttttaaaattaaaatgaacatattaataataaaaatttattataattataatcaatatactttttttgaacaaaaaaaaaaaatgcatatgaccagacaatttatctattaaaatagcttaaaaaagtaacgacaaaccccccatcatatgatcgagggaggaacaagcggcagtcgctaaaaaattgcatgtcttcttcgcagatcgtttaataaaaatactggaaacattgttaagatcagacattaaagtacgacaatcaaaaataactaaa

SEQ ID NO: 328579 - DNA, 559 bp, Cannabis indica
ctcagcgtttgggtggttcggggttgagcgttgacgccggagctgggtacactgtggacggccgttggttgagctgggttgaatgggtggcgtcgactgaaagaaatgggtttgagatttcttggttcagctaagagagaagaagagagagggatggtttgaaatgtaaagggtagtttaggaaaattaataaagtgatcatatatgacaaattttaatgactatagatattttaagcatagaatttcaaatttcccaattaatattagtcgttgtttcttagttttatggtgcaatttgtaatatcatttatagcaattgaattagataaacactcttacatctaacatcagatttaaaaacaattagtatgtcacatatgtcacaccatacatatatttccttgtatatttattaatatataattttgggtagctggctgtgtaattagaccatccaaacaattctacatgcatgtcacactctattagggtagacataccctacatacattggtcgattgagaaaataatgtaaaatgagaatgaaagttagaaaa

SEQ ID NO: 328580 - DNA, 505 bp, Cannabis indica
gataacaaaattaagcttaaaaaatcaatttttttttataataatactcatttataggtaatactgcaacttaaatattcgtataaaataatattattttatctcaatgctttaataacacgtgttacatgttatattttaaattattataaattataatttataatatagtacaaaaataaagataggtgaaaggatttcttttatttaaaaagtttatcatctatttaaagagcatattaaactaatttatgaactataatgttaaaattataactaacataagaaagaaatatctttagaggactgaacaataaaactttaatatcattaaaaaaaaaactcaaacattccacccacccaaaggaacatatcttaacatgaaaaagatatgttaacaatattagtatcatctaacaatttttaagagcattcacatcaacgcctctactgttggaatttattttaccaggatcttagatctactcacaagtatgttgtttaa

SEQ ID NO: 328581 - DNA, 771 bp, Cannabis indica
aagaataaaatattcaacaaaataaccaattttgaatttgaaaacattatggttagaatatctgtaaaaatatctaagttgatttcaaatttattaattatttaatttatcttataagatcattttaatgtaatatttcaaattaaaaaaggataaagatattttaatttaaaatatgaccaatattaaaatatttgatcttataattaaataatatataaatattaaagaaattaacaaatttttaaaatttaatcataattcaaaaaataaaataatcaatttttaaatttaaacctcaaaatatcaaagaattactaataatctattaaaaaattaaatattatttatttaaaattgatatttaagtttaaatatattaaaaataatattttattttgaaatttggggtttgaaaattgcaaaaatttgaaattggggaaaaatcccacaaaattcggattttgggggcatgttggcagcaaggctgcacgtgcaaccaaaacaggctgcaagcagccctatgtgcgcgcggggaagggaatttctagcctctggcaccaagaaacctcggtagctgcagcatccccttcagcgtgaatgcagcctcaagcctatctgaagccgtgcattccgtgtctgatgcatccagacatgcgcgtacatatgggccttgtccgaagcatctggtgcgtgtgagcaccattcttgacacccatggtcaaactttgataactttcttaatttttatcggaatcgagttccataaaa

SEQ ID NO: 328582 - DNA, 1211 bp, Cannabis indica
ttttttttataaattttaaaaaataccattttttttaaatgagggcccaaaattatttttttctctatggcccactaaattttagggccagccctgggtgaaccatcttctaatcaaaatctcacaatccatcttcaaaatacaatttgcataatcggagcccctagatatttaaataatagactatcccgtgagtatcgagaagcatcaagaactctttgcacttcttgcttgtccataccacaataataaatcacgaatttcgattcattatgaaactgaagtttcagaagagctttaagccttgaagcataacataaattgacttgaaatttccatgaaaaataataacgcatcatctgcaaaatataaatgattaagcgctaaatttttaaacctgtcatgaaacttgaaatctgatccaaattcgaaatagatactctaccctaacataagtggagacatgagatttatattaacgactattagcaatatagtaagaataagaataacataattatggtcctagtatttgagggtttctttttaagaaattcaaattgagtttcaaatataataataaataaacaagatttaatatgtaaataagaatgcattatatgaagagtataattgaattaaaaaaaactctactaaaatgaacaaaaaaaaaaaaacaaataaatgaagtactagaacaaattttttcggtataaatttttctgaatagagaaagaaaacaaatgttattgttaaaaataattagtacaccctccagtccaattccaaaggattgtttaggtataactaataactattatttatttcgacattcataataatttttagtgtaattttttttacttttataattgtatacactaattatttaagatgatttatagattttgagaagaaaaaaaaatttgaatagtttataatatgctcaaaatttaaaaagttaagttatattataatattaattttcgaaataattttataacttaccaaaatatattttaaataataaaatatcacttaacagtttatatctcaaataatatgatcttaaaataaaacttttaattcacttttgaaaaatccaagaaaataggtacatgtttggcatcataactaaaaaactgttttttgtttttaaaaactgaaaattggtttttaaaaataatttggcttgtttggcattgtttttt

SEQ ID NO: 328583 - DNA, 663 bp, Cannabis indica
gaagtgatatggttctttatgtcctcattagggttgggcaaaaagtagagggaggatttgttaaaattgaccatctaacctgaggctaggctatagtcctgtaaaacttcctttatagttgcagccgccgttggagaagcggggctgaaaatgaggctgtcatctacaaagaagatgtgagatatggtcggagccgtacgagcgatcttgaggccaagaccatgatgacggggttgagggtttaaggtcttctgggtaatgagagtagagagaccttctgagcagagaaggaaaagataaggtgaaagtggatcaccttgacgaatgccccgggtaggctttattttccttaaaacgtgctgattgatggaaaaagagaaggtagttgtggaaatgcaagccatcacaagattaataaagcgagcagggaacataaatttttccattattttttgaagtacaccccattcaactctatcaaaagctttagccatatccaacttaagggccatccaaccagtctgacctgatttacgatatgacagagcatgggtaatctcttgcgcaatgatgatattatccgaaattaatctaccatgaagaaaaggcactttgagcgggggaaagtgacgcgactgagtataggcttaagacgagttaacc

SEQ ID NO: 328584 - DNA, 540 bp, Cannabis indica
tccaaaccttgatgaaatagaaaaggaaaagattccatatgattgttcttcaaaaccaacgacccaaaacttcaattccatctccataatcggcgtgatttttttattttatatatatagaatgaactatttaaatactattttttatattatatataaattattttaaatttttcaaaaattaaactatgcaaaaatattggacttaacaattactgaaaaagataaaaggttcattactgcacacccttattaagtggtgtattatagaaacatcttatatattttttttctttttaaaaatttatagataaatcttagtagtattaaattgagtttttaacaccttaaatcacgactcatattttttatgggtaaatattattttagatcttgtgtttttataaaagttactaattggaccatttgttttgttaaatgacaaaaagaccctgtattttttaaaattactcaaatgggaccctgaacttatttttgtcaaaataaaacttaataataatctgatctagagatgttatg

SEQ ID NO: 328585 - DNA, 1365 bp, Cannabis indica
tagcttgctagtaatcattatcttatattacagccaaaataataatggcccggtatataaaatcctacgaagtactgactatagcattactcgattgccatttctctctaaatataaattttgagcttgcttcataataataaactaaaagcttttaaagaacaagaacactcattcttcgtgaattaataatatatacatattatatatctaattttcaaacaaatgcattattctgaaatggttaagttcaaacgtatataagtttacgagctacataggattctgaaatgcataaatacatattatctttggatgctccgctcttgtaattaagttaatattaatttgttttcttttttattattctataattgaataaaaataaacgtatatgcgtaacgataagaataatggtgtcctatatatatatattggataacttaattactattaattattacaattagtacatgcacatgtatatacacaactttctttaactactatatatgtacatatatatatacatagtattatttcagagagaaaatggaaattaagcacctgggattgttgttccattcattcattctctctttggaagctgatattagtgttattatttctatcatatcaaggatttactagcaagggatcgagtaattaggacaagataagaaaattattccatctgaatttagttatgtgagaaagcaaaataattcatgtgggtaatttagaatttcttttaatatttttatcattaaatttgctctaataatgaagaaaaattgttttataaataaaaaagataaacaaataatgtatatatatatttttagtctatttcattttttcctacctaaaatatatattttgattagccatgtactatacttctaaaaaactaaaacgaaagaacatttaatggaaaatttttctactagttgaattttaacaaaatgtatattgcttgtgaactttataatcgtctggcatgtcttatagatctatctgtcattgattgaaaaattgaaattgataatggttacataattacagcattaattttaaaatttctatattttgtcgtaattgtgttgagtattatccaaaattatttatcaataattgatcaagaatataaattttatacctatcaccgtcatcatagtggaaattataatcaacttattaattaataagtaagaaaatatgttccaatatttttgtttgattcagctataggtagctttttttggcacaaatcagtattttcaagtatcagaatgataataggcttctaccgaatttggaggcatcaaatatctttgaacctcattttttgccatgcaataaata

SEQ ID NO: 328586 - DNA, 808 bp, Cannabis indica
ccaccggcgctggaacctcctcgaaccaagataacttatcgtctaaccgtagagcatgttttgccaagccattaataaaaataagaactaaaaaataaaaagactgcaaatttattagcgtaattaggaaacatagaaagctctcacacacacaagcttaaatacgaatctattttttgaggcaacagaaaatcgacatgaacacgactacgtacaaaaaaaaaaatacaaatttaagcacgatacaatacgatgctacaaatcggaacgacacaatacgaaaaaatatatctttaagtatgatacagtacgagaagtaggaaagacgggctatatgtaaacacgaatagactagcccaaaaatacgacacgcaataaaataaaaaacacgagacgacatattaaaaacttaataataataataataataatatatgaatttatcattataaaaaatttaaagtaataataaaatttaaataatacttaatattataattttataatttaaattattaaaagataaaaaataaaagtatatattaatttatttatagggcgtgatataaaaatatatttataagtaaatatttaaaaatatatatatactttagtcattataaaaaatagaaatatgaaaaagtaaagtacgaatttaagtcagaatataaaaataggctgatctgtttaagaaatactggtcggcacaaataaaacacgacacaaaatattaggcctgcggatcttgttgggcctaccatttaaaaataggggaattacctataaactattttttaacttttttttt

SEQ ID NO: 328587 - DNA, 1484 bp, Cannabis indica
aaataacattaggtatttaagtgtataaaatctgaaacattaggtatttatgccgcaattcaccctaaattaaatataatcatacagaatttcttagtaatactttgttagtttttttttctttcaaaagggtagatttatatatttatataaataaaatataagataaagttgagaggaatcaaatttaaaatcaggtctaccgagtaacaaacaaatacctacacaaattacgttgtctagcaattatgtattgtttctatctctaattttatataatttattctaaaatttgagagtgggcttaagtcctttctgggctctatgtaggtctgcctatggatacaaggttaattcatatatgaaaggttaattttatagtagtcctaatttatttttctaattttaagagagtttcatctttaataaaaaaaaatatatatcatttattttcttcacatgtaatagtaaataaaagttttacattatttaaaatttattttatagtgctgaacgtagtatacaaataaagcttatattttttttttaaacattagtttatatgtataaatttgaaaagctattttaaaattttaattttttattagtgatttagtagtaatttttgtaataattacttttaaatttatataaattaatttaagttgataggttattcttataattttttatttttagttaataattttataataattatttggaacaataatttttatattatatttatttataaattatctttttatattttaatttttatacacttaacccccttaacttccttttatttataaatttaagatgccagttaaattttactatcaaatattaactgggattgtacacttgtgtacacgtgacaataaaacttcgaagcaaataaaaatatatcacgtatacacatgtgtacacagtggtaaaattggtatttaacagtgagatttcactagcgactcaaatttgccaaaaaaaaaagtgaagttaagttaagagggttttttaatccaaaaaagatcaggggtttcgacaccaattatcaaagaataccaataaacctgaccaccacactcttgccatatccaaagacaatgcaagtttaaaaagattgttagctaaagagttcacagaatgattacaaaagaaaattttagaaacattaacacggttacaaataacataaatatatttaaaaattaggccaaactcaaccaagaacaaatttctcttcttcaggatatggataacatgttgacaatctgattcgatctccatattgttgaagccaagatgcaaacatagaagtaatttatatgttaattttactatttttatttgtcgcaaacaatatcactatctttctatatatttttgaaatagtaaattacatttctaatttcaatactattacattgtttataatacacatacatcaaaatgttatattttaaattatatataac

SEQ ID NO: 328588 - DNA, 897 bp, Cannabis indica
gctcaacaataataatttagaaattttttggaagtagactcctaaagggttattctagtttacaatgctgaaaaatatacgtgcataaaataaaataatgtagatgttaaattactgaaaattttctaaaaatttacaaataatcttaaataactataatatacacgattataaaaaaaaaataagactaaatattatgttaaatatccaatatatctcatcaaaattgagtgaacttgatttcaattgatagttctactacaatgttagttaaatactataatattttaaattatattattaatattataaatacaattcgataataactttgctataaacatgagttggacttttgacacaacatgaatctgacactagtccagaaggcacgagcatgactaggcacgcgaaaaatacgaacttggtcacaataagtaagcacgaatagattaacttgaaagacacaatacgcgacaagcccgaaaaatacgatacaacatgaaaaagaaactctgaaatttattatcaataataatagatatgtatttatcaattataaataagttaataccgagtattataattgtattattaaaactattaaaacatgtaaaactaaaattatatatgttatattatttattatataatataatgtttaagattaaaattgtgatatgttatatatattattacatataatataattgggaattatatgcatgtaataatcacaatattatgtgattgggagttacatatagttgtaacatataagaggtggagttaatattttgtaacttccacatgatcactaattaagtgtgtaaagagtggttacacaacttaatttttgaaattcaaaaactataattcaaatatagttgttgggga

SEQ ID NO: 328589 - DNA, 475 bp, Cannabis indica
tttttttttttttattttatgtaccttgtattttaatataatacacatttggtaatctttgttttagataatgattaattagtaccatttatttataaaaactattattttagtactctcaagtaaaattttaatattctcaaactacaccattattattattattattattattattattattattattattattattaaacagaaattatttaacataaataatttctgtttattaataatcataataattaaaatagggtaatttggttatattaaaattttacatttattaagggtactaaagtgatagtttttgtaataaagagtactaattgattattatctaaaacagagagtatcaagtgcattttaataaaacataaaatatcaaatgagtatttaccgtatagtattatatttaaattttattatttaacttatttataattaataaattcatatattattatta

SEQ ID NO: 328590 - DNA, 1104 bp, Cannabis indica
gagtttgggaacccgaagcgcacgcctaatttactttaactttatgatcggcccttatgggataagaaatggaaataaataatgaatttacctacactaatttaagattaacaatctcttaagattgaagaaattatgatcacttctatttattcttaaattataaattatgatatttgctctcattttactttttttttttttttttaatttagggtgtgtttgaaagtttttgtataattattaagtcaactaataattatactataatttaaaatagtgttcgaatatgttagtaaaataattagtaattatatagaaaaataataattttttgccgttaatatttaaaataaaaaaatttggttattatatagagtaattatatttaattctcataaaataaactatttaattacctttaataatataattacattataattatataataaaacaaatataacaaattgtataattacctttaatcacttaaatccagttactccatggttttttttaaacacccctataataagattaaaaaaatttaaatatataccaataagttttataaatttatgtaatacaatcccttaaaatatcattatcgttatacatatcttatatctattttggcattaacaaaaattaatttatattttttttcatgatcgcgtatgttgtagctatttattaagacaatttgttttaaaaaaaaaatttaacagttttcaataccgaaaattagatttaaacaattatttttttatgtgtataagaaaaaatagttatccgtccaatataatatataaattttatttttcggcattataaactaatcaaaattttctaaaaatctaataatggctctaaaaaactataacgtacacgattatgaaaataaatttgataaaaattttcttctatacatcgaaacaaataggggtctacttagagcctacttatcttagatgcccaaataaaaaataatatctttaaaaatagagattatttcacaaaaacataaaaacaacaaaaaaaaattataaaaatacggttttgcggagttttaaatatttttacaatttttttttattttat

SEQ ID NO: 328591 - DNA, 725 bp, Cannabis indica
ccccctttttcgagtggggtgatcatgccaagagtttttattttccaaccttggtcacttcgttaggccagtctcggatggggtccggtcctcccgcacctatccctttggatcattctgcctaattatcttccagttggttcctctcctttgacaactttctaggggacgacgacaccagccttttaatgcatacttttgctagggcagaattagatcgccatggtaggattagtttcattacattattcttgcatggatgactttttgataatgctctaacgtctttacttgtttatttctttaagcagcccagctgatggatgagctcctggatgcgcttgccctgacatacagtcctgaggctggtgtgcctcaaaatcatgacccaacggtgactcccgagaggtcttcttccagtatcccccaaaaccaagttgttctgatcgacgaggaagaaggggaagaagaaggcgagattctccctcccttggacaggaagcgcaaaggaaagatggtggagactgaggttgctaaaaagccaaggcgagtagacacttcggctcccaacttagactcaggaatgtccgaggcggacgagtatactgttccttcgggtatcgtcctaacccccattcctgctgatgagaaaataacccagcttcggatcgccaagcacaattatgccacggtggagtacacgaaggggaatgctgaggtagagg

SEQ ID NO: 328592 - DNA, 540 bp, Cannabis indica
gttgctatgtgaattttaattacaattttgagtaactctattggctactatgtggatttctatgtgaaattctataaaattataaaaaaaaataactagctttaaaatataaaaatacaaaaaaaaatcatttttttaattagtattccatattttacaaaatatgtatatatcttttacataagagtaaatataatttttgatttaatgagagtaggaggtttcatttttttaatttttattttaaactaattaaaaaaattaaagaaataacttatattaaattatactttttaatttaaataattattatattcatattacatattaaaataaggttgtgcacgtgtcaaaaactagtatcaatcaatccctttccatccgcatcaatttttgtaaccctttcagatttattatgattccgtgggtcataattggaggatgctaaagggtactagtggtgtctagcactctcctatgtgtcaatatcgctattggtccaactaagtatcgggtcccatataatttaatataatagct

SEQ ID NO: 328593 - DNA, 925 bp, Cannabis indica
agaaaataacaaaaaaaaaaaattgaagagaggtttccatactctattttttttttctagaattttgaatttctcgcttactaatgacacaaagaagatattaaacaaggagacaagctttgtcaaacaattttgggaaagcaatgagaaacaaaaataagaaaacagatttgtggcacaaatagggaaacaaagaattcaacaatacaaatcggagtttttctttttgaattttcaaatttcaataagcaaaaaggaaactaatgaacaaagaaaaatttggaaaacaagaaatcactaaaatcaaattatggctctagaattttgaattttgaatttttgaatttttttgttaaattttagattcttttttaagaagaacagaaaaaaaaataagggaaactgatgacatcaaagacacgattttcgacacaagaaaattatcaaaatgtggttctaacagttttggatttcacaaagaaaaaacagaagagatgaaacacgaattgacaggaatatagaacacaagttaaacaagattgtagaacatgaattgaatagaaaacacaaaagatagataggccaaattcgatgatcctaagctctgatacaaatgatacgaaccacaccaagaaatgtgatgaaaactgaaccaaatatggcagcctctaaaaattcttgaaatttggatgtggaactgcgacccaatgcttagttaagcatgaaccttggtatgaaggaagacgccacaaacggtcatggaaacccatttgataagttaggttgaacgccacaaggaatactgcttgatatgttcgaatagttctttcaagaactcaagaagaaaacctctcaaaaatttattaaaaaataatatgcttttccaaagtgtttacaaggctttaaatagccaacttacaaccaa

SEQ ID NO: 328594 - DNA, 534 bp, Cannabis indica
gaaggatctctttagtgatcatggaattgcttcgaatgatctattctgaacaaaggtcaattgggtgggagacatcactttactcaaaatggttctaagtgcacaacaatgattttcaaaatcaccttataggacacattacacaaagagatcaggcagaagtcattgactgtagtttgtccttcctttttaggaatgagcacaatattagtttagttaaggacctttggtaactcagaaaattcgaaaagtgtatgatcatccctactaaattgtgcttcacaatattctaatgatgtagatagaatgagagtggaaatctgtctagcccgaataccttatttaaatccatcatctgaatacatttaatgatttcctcttttactggtatttcagcgagcatgtcattagtgggctcattaacttgcggggggatgcaatgtaatatcccgataagcctaatggtaaataattagggtttatatttatattatgggttaatcaagtaataagtggaattatgatcctactaat

SEQ ID NO: 328595 - DNA, 790 bp, Cannabis indica
attttctaatatatatatatatatattatatttttcaattttaattacgataaattataatatatcaatttaaattttattgtatatatgctgcaaatacatataggaggtcaatgaattcaataaatgactactctttaaataaaagaatatgtatgttaaggagtgctcttaccatttggagaaaaaaatttcacaaataagttataagaagcctatgtatctttaaattttattattttcttattattaatacttttatgttgttgtgttaatcctcttttatcatcaatatgtatattttgttttgttttatcatcagtacaaccattggaagctagaatttcaattgacaacaagtttattattagatcaggtacaaatctcacatttatatttgttctagcaacaccatcatgcatcctgatgacaacagaaccaatgccttgcaccttacaggccttgttgtttcccaacagaaatgattcccctgaaatttcttcaaagctactgaaaagatctttatttggacacatgtggaaggagcatccaaaatctaatattcaatctccattggacacattatttgtaactaccagtacatcacaagattcatatccatttgacactaaaccaacttctccaacatcaggttttccttctttattagctttattcttgagaagataacactctgatttataatgcccttcccttttacagtaattgcagaatttacctcgtttgaatttggattttcctctgtgatgattgttgttcttgtggccat

SEQ ID NO: 328596 - DNA, 561 bp, Cannabis indica
gctgaaataaattagtaggatcataatcccacttattacatgattaattcataatatcaatataaaccctaattatttaccatttaacttatcgggatattacacagacatagatcctcaattttgggatcctgcaaacaactttggacttttagaagaattcgaggaattttaaattgattgaagattgggaaatgtttagtgccagaaataaaatcactcttgataaaatttgtaagagcaaactttgaactcttgacatggtcgcatggaaacatggtgggaatagatccttccatgatgacccatgcactaaacattgatccaaacttatgacctatgaaacagataaggaggttgtttggtaaagagcgcgcccaagctctaatagatgaactcgaaaggctaagcaccaatgacttcatcaccaaagaatccgctttgggtatccaaccccgtactggtacccaaaccaaacaacaagtggatggtgtgcatagatttcacaaacttaaaagaagcatgtccaaaggactactttctgcttccaaggattgacca

SEQ ID NO: 328597 - DNA, 676 bp, Cannabis indica
gtataaactatgtcttattcacaatgtgatgtcacactattttttttgtgtgacttgggtgaccaattgatgtaatgttgcaggtgggactatattcaagtagggcagcaggtcagtaaagacatggatcgtatgctcgctttccagagagcactcaacacatgggcagggtgggttgatgcaaaagttaattttactaaaactatggttttctttcaagggatttctccatctcattacaagtaagtagtatcttattatcttattcacttactctttttttagagtttatagtcatttgattttttttctttgtttacatggtgcacatgacaatcattaaatttcatatattacctttatataaaaaaaaggatagacaccaactttcaatacatgtcattactaaattctagctagctgataaagtcattagtcttagtaatagctgctaggtggcatggtttcaagatcaataagtgagaattcaccgcactctttaactatatccactaattgtaatgttacttaaatttggggcaataattattgggcataggataactatttaatttagaatggtacctatagttttggttgcaaaagcaacatagaattatcaagcagttatagttttcctgtcaatttctctataattacacagaagttgaaatat

SEQ ID NO: 328598 - DNA, 1224 bp, Cannabis indica
ttggttcttttttttatttttattttttgaaatatacatgggtttcatttagatgagtgtattagtcacaaatcaattaatctatatatattttagggtgcgtttggtaatatttttttaatcagttttttatttttaaaattagaaaaataaaaatatttttttaaaaaaatcatgttctataaaactgttttcactttttaatttcttaattaagaatttaaattttataaataaaaaaaattactttcaattttttttaaaaaaagtatttttttaattaatatcttaaattccgactccaacttagaccttgaaaatcaagctcgaacctggctgcagacttggactcccccagtcttgatctcggacaaaactcaaataaaatcaacaaataaaaataaaataaaatttatagaacacatttttatttttgtttttaaaattaaaaaaattaaaataattacaaaatacttttataattttttaaattaaaattttaaaaacgtaaaaattttattttaatttttatgattgaaaaatttaaaaacgaaaatattactaaacatcactaatgtcagaaaagcaagaattcgagtgtgagtgatgcgaaactttgttttaagtgctttcacggttttcttaaatataatatcgatatatcaattatttacttcataaaatttgagtgtcatgcggtattactgcctagttatttgtagagtaaaaggctggctttctttattagaaagacaaaagaactcaaaaaagattacctactaggtagagtccttatcacacatggcatcaccttgtctatcacaatgaactacattttaaatcaatataacaaagatacccataattataatttgttagtacctagatatataatatttgcacacaactattcaatcacaagacaactatttaattacaaaataataaacgtatcatacaaaaaattattctgtaattatttaatacacataccatttttttataaaataaaataataaaattagatttagcatataattatcattttgactaaattaagtaaagcttttagtgattgtactcttaattataaatagaggagtgctaccgtcgacctcttatttcaagctcttaatcaacttctacgcctaaaagtatatgttggtatactttttttttaattttttttttcacggcggtattcgttatgcttacaacataatc

SEQ ID NO: 328599 - DNA, 709 bp, Cannabis indica
ttgctatatttttttaaaatgagaacataaactgacatagtcctatgatttggggccatttactataatttcccgaaaaataattatatataatttaatctattttttctagtttaattaaatatttttaatataaagtaattaagcccagaaagattaatataatttactagaattatttttatttattcaataaacgtaaatgcttggtaaattaatgattatttaattgcaaaattattattaaaacaataataaaagattgttagaattataaagcaaatactgcgataaaattgtgaaaatttgaaaaaagaatttctaaagtgctgataattacaaaaaattattgtataaaagttgtagaaaaaaaataaagataatcataaaattaattaaaaaaatattactaaatgctaaataaagtttctaatcattttttgctttgccatagatagagaatagtgtaatatttatattttatattttttcattttttaatataacttgattatgatattttcggcaaaattacagtactcataaacatcacaccaatcaaactccagtatcctgagttaaaaaaaaaaataccaatatccaattgaaatgattcgatgattcaattagttatatactagatttagctactagaattactagaatattttatttatgaaaataattttttatttaagaaaatgatttt

SEQ ID NO: 328600 - DNA, 1177 bp, Cannabis indica
tcaggataaaagacaccaaccttgtcctaaagtcaatggtaggtgcctagcttgttcctatccctatgagatttgtctttttgggttaattaattcaattagataaatatctgatttaaaagtagttaaaaatattttaagattgttgagatattctctcaagtagttgatagattctctcataaatattagtaaccgaattcggttatagatatttatttatttaaataattaaataataatttaattaaagagatttaactactataaatagaaacctgatttgagaaattagattcattcttttacactgttaatttcgaaatatataaagcaaaaagaactaatttttctctctattgttcttgctcatgtgttaagaactcaataagaataagattaaacactttatcctaataacccacactattccttgtgtgtggtggattgatttagaagacattggtgtgagtctaaattgcatattcctcatgaactggattaagggatacaacacacgagaagcttcgaggataccctgatagacttcaagaggtatactctaaacttattgtttttattgttttattttgatgtacacacatatgagatgctaggttttattgtacgatgataatcagataataagaaactctttcgttgtgtaacagatttagtaccataaaatcaaaaattaatatcaagtgtagttccatgaatgtgtatacattaaatgatgtgtgggtttgattcatttagtatgtcttattattcagatatgcatccagattcatctgtctaaatcttaaaaaaaacgtaaatgcactgtaaatcttccaccatatgactactcgaagccatccttaatcagaatcaagacatcactcataaaataaactcaaaaacaaatgactactcacaccatggaaaaagccaagactaaacggaacttatatatgcaatttgattatctaattgtattagtatttgaaatttattttaaaaaaattctaatgatggacccttttcattttaattgatcattagacataaaattctatacatgagtgttatcccaaatttggcactctgacgtggcattacgagaatggtgacacgtggagtccacttggagcatctgctcagaacgatagaccgagcagggtgcctcgctggc

SEQ ID NO: 328601 - DNA, 641 bp, Cannabis indica
tgtctaaaagcttatttcccctaccacaagtacttaaggaaaagagaagaatgaaaataactttatggatttatcaggcataaagtgtttctagcaatgtgtttttttgatagttactagtgtctctacaaatgaaaaaaaaaatatctctatttatagtatttgagggatcacatataaaaatcaaaatttcttcaccacatggctgttaccaacactttaattgatgcttattaggataaaatttttggacaagagagctggaaacatgttcaataaatttatgtacatttatggacaatatttcaaaacttgctccacatgaaggagaacaacaaaataaatagtgggcactgtaaaaacaccttttgtactagtaatatattagaagataaagtaaattgcagcaaaaccttcaataattttactttgagagcaattaacttctaaaacttaaattttggcagcaaagccccccaaaattgctataacattagaaatttacactttccatccaaatcgaactgttaagtgccatagtggactgttcatatgtacatactatacacatagcacaattttactggttcacataataattattcttttaaaaaattaaaataaattaatttaacataaaa

SEQ ID NO: 328602 - DNA, 1243 bp, Cannabis indica
aaaataaaataaaaaaatcattttgtggttgttactggctatagctcatataacatatatatctctttttcttatgaccatttatatatctttagtggccatttgaagcactattgctttcactccttcactatgattatttatatatatatatatacatatatatattgatataaattaagtagtctttgtgaccatcatgaggattttgaacaaaaaaaacacaaatgtgtcatttaattctcataccaattccaaattcatcacctacgtaccattaaattaattactatatatatatatatatatatatgatcctatacaaatacaaaaatactaaaagatatattattaaatatcaagtctcatataacttaatgtaataatttttaaggtaataatcactaacaaattaataaaacaaacaacgtatagaaagtagctagacactactggtacctaatagcaatactcattcttatattatattattgttaaaaggtactactggtacttagtactttactcgattttaaactattattggtgtaattaagtatcgagtttcacataacttaaaaaaatattgctaaccaatcagaagacaacacatatagaaagttttaaatatcgctagtacctaataacaatactcatttatatattatatttttatagaattgctaaaaagtattattggtgtctgacaccctccttagtgtcataccgctattggtgatattacgtatcaagtcttatataatttatgaaaataacttttaaagaatatcgctaaccaatcgtgaaacgctacctataaaaatattgtatttttataagtagtcatcaaattctcattctctaagaattagttaagtcaacttaggagatagcaaagttttattattaattattatatatatggacaatatataatatatacacacattaacaatcgttttcagagcttttgaaaggttaattaatgtcagtgccattaccataattaagctcattctcaagacagcatcataatatcaaactatatatagtttaatatatataattattaattagttaattaattgtgtgtttatatatataaacaatgtatatagtaaaaattttagtggagcacaaaatgatggtgtttgtgttttacctagatgaattcaaagaaccaaaaatatggtagatgttgttgatgtcaacattgtattcatcaaaaaactgaatactcttt

SEQ ID NO: 328603 - DNA, 738 bp, Cannabis indica
aaatgaaataatgacacctatttaaaaaaatgactctatataaaattatttttaatacctctactaaagcattatcctataattatattgagtgatataatttaaaatataatattttgatgtatttattataaaataaaaataaaagtatcgaaatcaaaaacataattttctatttttaaaatttataaaaaggagagtgattacgtggaaataataaagaaattgtatatatttctatgataaggtaaatgaaaaagataatagtatcagatgaatttaataaagtagtcttgtaactaataatgtatttatttttaaaagattgtttattaattttttttctttaataaaaagaacaatttaactactattcataaattttttacattttatctgttttgaaaattgaaaaatgagggatttatataaaaatgttagtgatagaatttttctatatgaaatgtttagataaaatgattaatttatgtggatgtgaaatttataccctaaaagtaaattgtaatgatgaaaaaggatatgatcagcatcttttgaatcttcttcacatatagtttttcttgcgcgtctcgtgcatcaggggaagtcaaagtcccatggtcagcaaccctctattgagcagccagcacttgcgcgattgttataatcataatgtgtttttgtataatcattataatcattgaaaaaataaatttaaatttgtgattattttttatt

SEQ ID NO: 328604 - DNA, 1390 bp, Cannabis indica
ttatattttgttttttttttaaaactaaagcgtatatagtagagaaaattagacctcacagtcattacaaatgatagcattaagtattgaggatggctccacaaaacctgtaatgttctgggcgaaagccaatctggccacattatgggcagcgaaattacaaaaacgagaaataaacgaaaaattacaagatgcaaagtttttagagagttgattacataaaacataattatcaatattccacatagagtgaactcctttcagcgcattgataaccatttctgaatccctctccaccaagacatagttatgacacctgagtctagctgagtcaaagagtaaggcgacacgccgctgcttcactaatcaaagggtccctgaagttgaacatggacacagcagcccacaaaacattcccagtgtgatccctagccagagccgcaacgcacatagactctcccccaaccttagcatcgcaattgattttgatccaatcctcaggcggaggtgttcaggtaggagaagccaccggtaacgactgagggaataagcacgaagcataatctgtgtaacaatgagaggtagagtcaatggtcgttacaatgttacttgtttggaagttatgtaccttatcattacaggttctccaaatcgtgtccacaatgattgaagcataaaggaacagcttgtcagagtccaccccattcgatttcaacctccaaagaaatttaacccagtcccagatcctaccaccagaatcaaggatcgggaacaacccccacggggatgatctccagagatggtaagcgaagttgcaataaaggaataagtgttccattgattccgcagcctccccacacaaagggcacgtctcgttttcaatttggattctcttagccaggatgcctcggacatgcaaagcattcgaaaggatgctccacaaaaggattttatgtctttctaaaatcttagatttccatagtttgttcaataaggctggcaccaccacacaggcgggggctctctcatacgcctgtaataaataagcagatttagtggtaaattttctgctccttccttagtccaaatccacctatcactcctttggcccgagggccttccccctttaaggatacaagaaatcgtttcagagtcgaaaagggattcgagcctgggtgtatcccaatttccatcacttttgagtagatcagccaccttaaccatattctcatgacaaggagaaatggtgtaatgaccgctttagtaatttagattagtaaaggcaattagcactaatttttgttaattttataattatttatgaattaattatatgtggaccccaatatttagaaatgaatattagagttataatttctcaattccggag

SEQ ID NO: 328605 - DNA, 544 bp, Cannabis indica
gctagtttttagagaaggggaaagttacagacttttacactcaaactaagaacacctaggggatagtgtctcacccttaacaaaagaaagaaaacagaagtacccatatccttttttttcttctttatggaaaactctgtttttactctgatagactcttcaaaaactatttatttctctctagtccatcttcattaacttatctctcatttatttttttattttattatttcattgtttagttcttaggtttaatcagctttttaagtttttatcatttgttttgttccaagttgtttagtattggtttttccgtaattatttgctaatcaatcccagtgaagtgtgaagacaatactcatcactttattacttgtttatctattgtgtaaacttgcacatttagggctcgtttggtacgccgtataagggtcgtattgtattaaataataaataacactatgtttggattaagcaatgtattgtattaattattacgaccaaattttttaatacaatgtatgttgtattatttaatgcataa

SEQ ID NO: 328606 - DNA, 673 bp, Cannabis indica
attaattgctaacatgtggatcttatcatttttcatttggggtttttatataaattaattttaaacttaattagaaaaatttggataaataaagaaatattttaaaatttggaaactaaattatgaactaaaaagatggaaatacttagatttgtatataagtggtatttccatatatatttcaacccattcttccaaattgaacaattcactcccttcttctcttcttgtgcgattttttctctcaccattctcctacaatttcttcattcaaaaattaatttcctttggtgcgattgttctcaaatattttcttctccattagactgttcaccgacgacattttcttctccatcgatcttcttcttcttcaccatgtttcttttgtcaagaaaaatattttttaatttaaaaaaagaaaaacaaaaacaaagaaagctataaaacattaaaatttattgagtgatttcttcaaacaactgtaattttaaaattttttgttatgtttattgttaacactaacatgtaattatataatctattattttgaaaatgtatctttttggttgaatcattgaataataaaaaaatgagttttttaaattaaaaaaaaaaagagaagcatcacatgtctctctaaagaaaaaaaattgttattatatttctttattta

SEQ ID NO: 328607 - DNA, 904 bp, Cannabis indica
atatatatatatatataaagtgcagaaagcaagaatacaatataactgaaaaatatttagagaagttaacaccaactgtgagtgtaacaaactcacttaactaactacaactggatataattataactaactaaatctaactctcttcactaatacccccctcaagttgtatttagagtattccaaattcagcttgttacatacaaactgaaaccttggagaagataatggcttagtaaataggtcgtagtttgatcttgagtagggatgtaacaaatttcaagcttattttctacaatttgatctttgatgtagtgtacatcaagttcaatatgctttgttcttgtgtgaaaaactgaattcaaggctaaggcttgagcactatgatcgtcacaccataagattggtggtattttgtgcaacttgatgccaagttcagtaagtaaatagtgcatccataccagttcagtggctgttgaggcaagggctcgatactcagattctgtgctagatcgagccactgctttttactcttggaacttcaattaacaaggttacccctagaaaaatgcagaatccactggtaaattttctatcatccaaactagaggcccagtcagcatctgaataggcttcaagagcaaacaatgtggatgattttaaatgaagactaatgtgaggagtgcctttgatatacatgaggatccttttgcaggcattctagtgattaatagttggagcttcaaggtattgattgagcttgttgactgaataagcgagatttggtctggttaaagttaagtattgaagagctccttgttgggttttgtgccctaaataaaatctatttcaatataatcaaatttactaattaataaagaccaaaaattattttatgttgcat

SEQ ID NO: 328608 - DNA, 539 bp, Cannabis indica
gtgacatgacattctaatttttaattgtcatttatttatggtttttctaagatttatctaattacctagtgtaaaaataacaagctacccgaaactgtattaataaaaaatgaattacagaatgacaaatagacatcagaaaaacaacaaactatacactctaaattatatcaatccaccatttaaaaaaattatatcaatccaaaatacactaccaaataacaaaataagtacaaaaagaagacatcatttttaaaagtatcattccaaaataaaataaataaaacaacaagaaatcataatatatattattatattattattataattgcttctagatttttcattagtttttgtgaaggtgttaataatgattaggcctatttctctaaatccttttgttagtccaatgtttgggaaatttaagttgaaataattacataacgcactattttttataaaataattataattttacattcaaagaattttttttttttttttttttactattttttacggttttccaaaaaaaataa

SEQ ID NO: 328609 - DNA, 1153 bp, Cannabis indica
gaattagattatggacgacttcgaccaccttttgagggagttctagaaggtaatgattgagctagtttgtcatggtttgacacaacgaccatggcttgttggcttactcggcctctcctggtgttttcgaggttctgttggaggaccgagtaaatcttcagtggcttgtctgcttctcttcacaggctgcttctgaagtttcttggtgggtggctgtgtctatatatatggaaaaaaaatagtaaagtttgcaccgtcattaatgaataaacacaataaggtaagtaaacatattgaaacataccaagttttttccaacaggtgtaagatagtctttcggccatgctacgtaacattttatagcttgacctactgttgtcaatgaatcttcgactatgggacacgggaggagtgcattctctacattgacttcttcgatcaatacccgacgataatctttgtgtaggtacatcattattaatggagaactttccatctttcaaatagtaatacccttcaatatccgtttgtcttctccgcaagaactaaaattatgttttgagattgttaaataaaaatatagagaaagaagaagataaacgaacataacaatatattattaattgaataacaagaatataaatacaaaattatgaaatacaaaatcaataattgaaaaaaaaaaagtcgagacacgtgaaatacgctttcccctctttacttatttggtacgttagaggatacgtgagaaaccacttttcaagatacaatgactaatcatgagtagaagaattcactactttcattactctagggaacctgaattaataacttaactctatcaccaaaggactatggaaaagaaaaaagaagacaagagagcttttgagtgagggtgaacaccaagtaaattaatgcaaaaaatcctacaatattagtgatattattcgatgacaatattcattataatttctgttgtaattccagcggaaataacattgaggattcaatcataaaatctgcaataatctcaacactttgacagcactaatgaacataaaccaattaatcaacacaatgaatcaaacccgaaatcaaacaaagaataacacacaattttatcctggttccggtcctagagatcaatatgatc

SEQ ID NO: 328610 - DNA, 681 bp, Cannabis indica
ggttttgagttaactgagacactatgtatattttcctgtgttcattctgccggctattttatcatcaggacttataatttctttttttctcgaggcatatttattagatatcgcgtcattcaatatgcaagctgaattattttacaatattttatacgtgttatatgttgaagtcccatattaactactcaaaatatgggtataacttattcattattagtaattgaggatgattgttaagggctagattaatctttaactgttttttaaaattgtattatcagcttttatttactttttttctttcgagatatttaattttgttctaaaaaaatctcctcttttaataactattttttttttagtagatactatttaatttttaataatagagtaaatatagtttttgtgagatgatcgacccgtacctactattgtaccgaaataattaaaagtatttaaataaaattaattagtaaatttaatatgctttacgacacacatcaaataaaagaaatatattgccctaccaaagcaaaatcactatcaaagattctaccagaaaatgaaagttacttggaatctgttagaatcaagaatatacagactaacttgttggaaatattttactaggatctagatttactaacaagtatgttgaattaacatcctaaatatgaa

SEQ ID NO: 328611 - DNA, 664 bp, Cannabis indica
gaatttaagatacggtatgttttcttttttaaattggggaagagctatttaatgtcagttcaaatactaataggatttattttattatatataaataatattttattattttattaaataaaaactaaaattcacccatgaatttctcataaaccattattttattatatataaataatattttattattttattaaataaaaattaaaattcatccatgaatttcgcataaaccaaaaatttcggttatatagacacactttatatagaatagatactaaataatgtttcgtgaatatttattaaagctactatatatatatgataaaatactattattttgtacttattatattatttatgtcacaaactattagagaatttcagttggaaaaactaaagaattatttcattgaattaaattaattaaatagtataaagagatgagtgtttatatagtacaaagccacttgagctggacctaactaacctataacacaaaataactaacacaacagaataagctaacttaatagcaggggtattcattggaccacatccaatatttttaggcctatccagatccgatccaattatatattggatgttagattttatcatccgatccgatacaattaatttcagtcatccaatcgatccaaca

SEQ ID NO: 328612 - DNA, 864 bp, Cannabis indica
attttttaataattaaaccattttatttttaatataaataaaaagtcacccatgaatttctcataaaccaaaaattctgttatataggcacactttatatagaatagatatatatacatgttcaattgataaactttgaatttgctattgtaaattgttcactctttttttttcaaaaatatatatatacatatatataaaatacacactaattaaaatgtagattgttcatataaaataaattggcttatgatttttctaaatatataattaagaagtgttccatatataagactttttttattatacattaactaaaatataattataaagtaattttaattaataaatactttttttataatcgtatcaaatataatctcaaattacttatcaaaattttgagtctctaactcaatataatctataaaactaaataaaaattaaaaaataataaaaaaattaaaaaataataaaaaaattaaaagtaaatacactgtaatttccttaaaaaaaactcaaaaattataacttatttatttattttctgaacaacaaaaatttatctataaaatctcatggatcaagatatttgagctatatgtctctcagtccacacattacatggcctaattgatggcccacaaaagggtgacttgtggatcattattgggttacggcagaggtacacaaaaggccccacttatgagctcaccacactggtccattcattacagcatttaataattacataaaacacaaattttaatatatttttacgttcattttttttatattttataatattttataaaaatacaaaaaataataaaaaaatccgtaataaaaaaataatatcaaaat

SEQ ID NO: 328613 - DNA, 706 bp, Cannabis indica
agccaaagtgacgtactcgtgtacaagagtcatcattccgtgggtgtaaggacccaatggaggcttgaaacggggacgttacaatgtgcgtagccatgtacattatactttgcctcctgagcaaccttcttgcctttcttcttctcaatgttctgcttataatgcatcatcatagaccacatcaacttatgaaaaacacactcgcctcatgtatatttgaagaagaacttgatgtcttcaacaaatttcagcatgtttggacaaacaatgatgttgccatattttgcaacaatacaccctcaataaaggcgcatagtccgagcttgtacacatcatctttatctttgcatctctccagttgtagcataagtgtattaacatgcacactactcttccctttgaaatacatcctcaaaaagtggtcactggacttggcttgtatctcttcgtctatagggaaagtacccatacttaggtcagttatcagaccgaacccaatccgtccaaatctcatatcagttttacccacataaaaccatatctcatcttccttttctttattaactttcattttttgcaacagtagttggtgcaccaacgcaccagagaaagtaggggtgttcatccgatccaatctgcatttttttggtcaaacaacatccaattcgcactaagtgcggatttcatattttggatccaatccgat

SEQ ID NO: 328614 - DNA, 642 bp, Cannabis indica
aaaaccaatgtaacagatacagttaagaaaaaacagttaaaaacaacggtgttaactgaattaactaaatgtatttacactatacattcttattgggcgcaaataatggttctttctaagagggagttcctaaaaaaagtcaagtttgaaagactttatttggcatggcaatactgataaaagcaaaccgggttctattgcttggaattaaattttccaagaaaaaaaaatctggtggtttgagctttaaaaaagtagaagattggaatcttggggccattacaaagcatgtttaggtcattgagcaaaagaagaataatttgtagactaagtggatacacaatgtgtatttaaaatatgacatttaaatgttgttgtggtggtgaaggataagttcaaagctttctacagtcaaagtgagcttgctcagatgcatacatactcaatcatatctgtaagggcccgtttggttggtggtaatgggccagaaaggaatggaatggaatactaatgggcctgattattttgtttggttgaaaaataacaattttggaatagaattccatagtaatgctattcctccaaactaatggaattgctattccattttttatttggtggaattataattccattccagca

SEQ ID NO: 328615 - DNA, 610 bp, Cannabis indica
gaagcgactcttgatgtgggaagagcttgttggaagctagaaaagtgtgtttggagggtacgggtatcttgatagctgatggcagttgttagctttggaaaagaccttggatcccttggagacaaatagataatattaaagacaacttccagtttaaacgaaatcatgctttctggaaggttaaagatttgtttgtggatcaaactcgggtttggaatgaatggttgattcgagagtgttttaacgaggagatagtgaatgatattttaaggatcaaacctttgcttggggtacaaatattttattttggaaggctataaaattgggcattttctcggttaagggtgcttattgggtaagtcaacaacatcgttttaaaattccaagagagttgttggttaggctatggaagctgagtcttcaccctcgtttcaaattgctcaattggaaaattttatctgatatccttcctactaaggcacgacttcgagttagaattagggaacagcaaatgtgctgcttctgcaacatggaaattgaatgaatctacttttaacctattttgtcattgctccttctgttgggttttatgccctaaataaaactcttt

SEQ ID NO: 328616 - DNA, 1727 bp, Cannabis indica
actcttatgtgtttatttcattgttttagagatattcatatttaggatgttaattcaacatacttattagtaaatctagatcctggtaaaatattcccgacagtaatttggtagaaaaccctaaattttacatatgggtattagaaagtgttctaaattagacactaaccatttttatgtaaatgtgacatagggcatctgttcagcaagtgacatttctattcagattgatcgacacacttgaatttagaaatgaggtaagactagcataagatatttatatgtatatgtatatgtatgtagattacatattttatgtggttcgtacgtatactaccaaaactagtacagtagcagtaaaaagtgtattggtatagtatatggcttttaaagagagtgaaacagtattaccaacactagtatgggatgagtacgtagggcatgtgacacaatacagcgatgcggttcatccctaccaacactagtacaggataagtgcttagtgcttgtggtacagaggtcatacttctgttaagaacgttcttgatcatttgaagtcttttaaataggtgtatggcgcctaaatacgcgatttctaataaacttgttgattacgcctaagctagtagggtcttacactcagtctcacttgtttcttttctatttttttgttggaaatatctaagttgcatcgccacactagagctccctctcaccacgaactcctttgttagctgcaccaccaggagcaatacaagccaccaacatgctcacgcaagacaataaaggtattcgtttgtaatttttttcctttttgctagaaatcttattgtgagttgtggttttaaactgtgaccctagaaaaatattgtcacgtatcgctagaaatcatacagtaacagttttggtttcaaactgtaataattaaaaaggaaaaatatgtaattattattttatctgactgaatatttagaattcttttataatttaattagtatattattcataataatatggtacttttttaattatagaaaattaacctaataaagaagccaaggccaacaacaaaggagaactcaagagatgactattaggtggattctattattttagttttattttaaatttttattcactataattttttatttggaatcggatgactgtataataattttaagtttatattattttgtgttaacattttggatactaaactaagatgtgaatttttttgcattaaattttaatttgatgattcttatatgaatatataatggtaatataaaaattaaacttaggacaaaattttaaaagggttattatccaactcgatgtatagtttgttgggttgggttgtacaaaaaagaaattttgaatgggttagaaattttcaggccgacgtaattgggttggctcattaaaatactgttggattataatttaccaagaccaagatttactaacaaatatgtttttaacatcctaaatatgaacttctaaaacgatgaaaaataaacacatataaagtatgagaaaccttacattggttgcagtagaattaaatgactcatactgctcagatttctaacccttattcctttctgtcgcagagtataatcaagatttgagcccgacactccttcagttttttggattcttcacagtcttacacactatgattgaggactaacttactatgggtgggcatacactcgatcact

SEQ ID NO: 328617 - DNA, 840 bp, Cannabis indica
agggcataaaacccaacatgcaaccgtactagtattggtagtgtacgaatcataacatgcatgcatacatcacacatacacataatcaaatatataagtgagttggccgacctgaacagaaaagctcgtgctggatggatgccttaagtcacatttacgtaaacggtaaatgacatgtcaaaacctaatctggaaaatccaaactcactactaagggttcttctattaataactcttataaaaacaccctaaatatcaaggaaataaccaactaaggctctaaatataacatgaatcgacaaaacaaactgttcgggacgcctgcccctcatccagttaaccagttttacaagacttgtcaaactggttaactggtttgcaccaggttacttcaaacaaaaccaaaccttgcccaaatcatgtccaaaccataccaaaccttccaaaatgcctgtaacaacctcaaacaatattttcaagcaatagaagtaagaaaaacacactcaattcaaaaatatcattaatgacccaagttcgagtttttcaaactcaaacatgttcattcaccacataacacatcaaaactagcattaagaactcaatctcaactcaaataaaacataaaaactgaactaaaaaaaattctaaccctagcagcctctaaaattcaaaattgcatgccataaccaactagaacttagagaattcacaaaacatgagcttctagggcatacctcaacttgaatcaccttgaattcttgctgaattcaagaaaattggaagctggctgggttgattcctctggttgtgtgggagacgagcaagagagagagagagaga

SEQ ID NO: 328618 - DNA, 2115 bp, Cannabis indica
aaaacaaattcagcctttagtgattgagtgcttgctcacccatatcaagttagtcttcattcatagtgtgtaagacagtgaagaatccaaacaactaaaggagtttcgggctcaaatctttgtgatactctgcaacagaaaggatacatgggttagagatctaagcagaaggagtcctttaattctgttgcaaccaatgtaaggtttctcatacattttatgtctttattttcatcactttagaaattcatatttaggatgttaaaaacagacttgttagtaaatctagattctggtaaaagatattccgacatgtatgatataaaattctattaattcaagctccattaagtcagcactcaactccctatctttgatcctaactggcatagacctaatgcgcttattggagataaccaactctccgctaggcattagggttccaaaccatctttcaataaaatcacatggcctacccaaaaggtcgattacccgtgtttccacatataattgtgtagctcccgaatcaaataacacagtgtcaaaggagtttttgacaagaagctgacttatcaccaaggactggttgcagcatcagcttcaatgatggtaaacacctgggcaggtacgggttttagctctggcttctgtctctttctttgtctgagggcaatctttcttgaaatgccccaccatgccacactggaagcatgtcttctggttgtactaactggatgatgtttcttgcaacgtgggaacttagggtaagagtaactctggcatccacctcatccttggttcccacgaaactgcttgctctgtcccgagccaccagataacctttcttttctgatcagtggtggaattaccaccatccctaccagacaggagtaggaagagtgggggtcccaccaacactcggagtcacacgggtctcctgaagaaacttaactgcaccctcggctcatagagccttttcaaccatctctgcatatgatgttgccacatttgtagtaatcactagatcatgtctaattttcaaattcagacctgctagatatttctccttcttgttgaagtctataagcacaatacctgaggctagcttggccaaatgatcaaacatttgtgtactcagttattgacataccctcagtcttcaccaactcagtgaattctttccgcttagcactgcggactgcctcattgtaatacctggaattcaacaaatcttaaactcttcccaggtcctaatagtgacgtctcaggtgaggtagaccaattcctaccatacgaaggcatcttcctagaactgaaatgtagcgtaggttactcgatcatttccaactacccccatgatattcagaattttttctatcactctaagccactactcagccttcatcacatctggacctcccaagaacactggaggtcctttcttgtgaaacctctcatataacgactccatacggttgtcagcaaaggttgttttgctggcacaataggaactacgacggcctgaacttgcactggaggcactgcaggaggacccttctgccttagtctcaaaatttcttcacctttcttgcggatacgatcttgcatttccacaaatctctgctcccactctggaggagcctgaggtgggttcacatgtggaccaccctgaaccctgccacggccttggcggcgaccacggggattctcgagaatttgatttccgtgaccgcctccggtctcgaccctattaccctgactccttgtatttcgctaggcatccatttaataggacttagcctgtgaacccataagccatgtaggtcagacagcgatcataaaaacctagtactgctgttatggatttcaaggcaacgcatttaaaataaacaactacaaactaatatgcttcctaacatgctttaataatcacatataatactaaacaagtacgggcttactgaactgtgagccgagctttctctgatgaagatggtacatgtcttggcgtgcttcggtagcaaacctggcggctctgatccaaaattgtaacaccctaatgctaaggcacgctacaatgattttacaattgcagtgctatctttgctaatcaaa

SEQ ID NO: 328619 - DNA, 682 bp, Cannabis indica
agggatccccttgcctaatccccttagacggcacaatgttaccaataacatttccattaacattattgcataggtcacagttgtaacacactcgtaatcaaaccaatccaccccaggtggaaacccaacttttccatcatacctcaaagaaaagtctaatcaacactatcatagaccttagccatatctgctttaacagcgagaaatcatttactatccttcttatgtcttttaaataacattaaaacactcaaagacaatcatacccttcttatgttttttggtttcgcggtgcgtgtggtgcagcttttgactattttttcaaaccaacccacacatgcagtttttctaatttcccaaaccgcactcgcatcgcgaaactaaatatcgcagaaatcgcaccgcaaaaagtgatgtggtgcgttttttacggtttgaactatcaccaaataattaaactatcacaaatacaacaaaacttaagcaacacttgtcaaaaataccataaaacttgaaaataaatatgaaaaaataaatttaattttaacaatacaataattagtgagttttgggatacatattggacctaaataaatataaaatttgtatttttataatatgcgatgggatgcggtttaaactgcatattaacaattcaaaactgcaaactgcaccgcaccgt

SEQ ID NO: 328620 - DNA, 1014 bp, Cannabis indica
aagctttttacaactattttagttctgttcacttgccccaaccacagagcatcatttcgagccttccataaatgataaattgtggctgctacaacggtagagtatacaaactttcgaaatctgcttagtcgagctcttattgtatccagcaaaacaacctgtttaaagacaattaacttgtcttccaatctagatggtttgtcaccaattccaatctagacaattaacatgcagactacacatcaagcaatttgattcatcaattactttgaatttaaacaatcttgcttttgtcttcaatctatcaagtgtagctaacaacaagatcacactatgcttaggaaaatttaatatctcccaaatttcaggactccaagagacccgagtaatagcaagaatcaaaattgagtaccctttctgaatggagtagtactcattttgcacaaaattttgtgcatcaaggtaaggtttgaaactttattataacttcaactatttttctctaataccaactattattcaccggggctttgtaagcccaccaatcgtcctccttaagatacacattgtggatccatttcatatgtacttaccaattgcaaccatgttccatagaagaatgtttctctaaatctcaaccctcccttcttggggtacaagctttctccgaagacacacttccatgccccataaaatcagcttgccccataaatttacactttaagaattttgcatttttaaattcatctgatggtgtttgtagtgaggactacacaataacctcgggctatgatgccatttcactcaagagtagttgtgatgaatatggtattgtctatggcaggccaacaaaaaatgttcacagcaagcgggtcaatttgcaattatcttcttgttcttttctttcatttggtagtgaaaatttggtgcgcatatcaaatgcgcgtctagagcaggtccacacataggaagcgtttggttggaaggaatgaaaatataggaatgggaatggga

SEQ ID NO: 328621 - DNA, 672 bp, Cannabis indica
aaaataaaaaaaaaattaatttgggctcttataataggtgggccttatgcatgaacctagtccctcttaacctatgcataatagatgcctaatgcatatttgtaaatatctatatatatatatatatatatttatataatgtaacaaaattggattaactcatataattattaaaatgtgggattaattgtataaattgaatattgatgcaggaaattgatttgcacaacaacaaccaacttctacgagcaaaggtaaaaataataaatacataaataatccattttcatatacataaattatgaaattgaattaattcttaattttttttttctataataataatatttacagatagctgagaatgagaggaaccaaagcatgagtatgaatatgaacatgaacataaatatgaacatgaatgttggtacaagcagctatggtcatcatcatgaactaattcatcaaaatcataataataacaatgataataataataataataataataataataatgatgatgagggtgcagcatcagttgtggtacaccagcaaccagggaattatttccaagtcaatgctttacaaccaaataacaatcactactcacgccaagatcccaccatggctcttcaattagtgtaagaacatatcatatatatatatata

SEQ ID NO: 328622 - DNA, 761 bp, Cannabis indica
atatttggacaattattccaacacctacaaaacaaaatcgttctttttagtacccgcataattttgggtcctttgatgttagtctttgaagcctttggtattcatataaccttatgataggctcgaatggggctatcttcgagcaatacttgaaatgatggggtttaatggtagatggattaatttagtaatacattgtgtgtgatctgtttcctactcgattattcatggtggaaaagaaatgggtccaattgttgctcaaagagggttaagtaaaggcaatcctttgccgccttatctttttatgctctttactgagggattctctagtttattaagaagttatgagcaaagtggctcggaattatcgtagaaggatggttgaagcctataccattggcaaggtggatcgtgttcaacctgagattgcagagatcattggcattaagaagctttaagttgaattgttcgacactcttgggggcaagttcttattgaaactgatagtttagtttgtgtccaagctaataatgtgtccatgtcgtcttaattcggtcttttacaagatgttcgtactttgcttttatcttacaattatgttgagttgtgttttgttaaacgatttgtaaacaaagtagatcattgtcttgtaaggagttcttgtttctctacaagtcgtgtgcttcagttggaggattattcctctgaagtgcggtatattttgaaagattttactttttaatgaaagttactagtttatt

SEQ ID NO: 328623 - DNA, 699 bp, Cannabis indica
acgaaaggtaacataaatattgttacacaaaaaaaaaatatatacaatataaaagtacatcttaatcaatgtaatataaactaaaaatgaacatgtagtttaaaataactaatctaaaaattaaagattatctacacgagatatttttatttaaagtgaatcattttatgaaaagaaccaattggtatgttatcgaaatcataattaatttaaatattactataaagtacactcaataaactattccatatctatgctgatttgttatagtatatgaaaactatataatttttattgtaaacttaaaaggtaactaaaaatataactttaaaataactaaggagtaatttgaatgcttactaattatactaataagttatatgtaatttttttttttttactttattgtaacttattagtttattaaattgacttgaaagtaacataagtattttaccaaaagtaaaataaaaactaagtaatgcaaaagtattttaaataacaaatttatttaatataatttaaaaataaacatgtaagtttcaaagttattatattatatgacaactcattagtttcaaaaataaactttaaggttacccaaatgtattttaaataataacataacacaatataacttaaaattagctaattgattattaagatatttacaagtaaggttttagaggtaaccaaatt

SEQ ID NO: 328624 - DNA, 671 bp, Cannabis indica
tatatatataatataaaaaaagactcgtatttataattcagcctctctctctctctcttaattggtatcaaagcttaaaattcttaattcattttagattaaaaaaaaaaacctaaatccttattctgtaatccctctctcttccttgcgtctctagatcttcatcatcagcctcagccaacctccgacaaacgtgcaacctaaaccccattttctctctgcctaaacttctccgcctaccacaacagcagttcaacctccagcgatgtagatgcgagataacgactcaacctctgcctcgacttctctccacctcgtattctcttcgcgtcccccaatcgtgggtgctaataaactcgttttttgtatatggttttttatttttcaatattctttatttgtttgtttctcggtctctctcttatggaggtatatgacattgaagctcgagaagatctcgctcgtctgtgttcaaaggcttggtgtggttgacgggatgctaggttcgtgatttaagttggatgaggcttggtgttcgacgggcctaagaaatttgaaatatttatctgattttttggataagtttgaactattctggtttgaggattgtattaattattatgtccactagtttattctgtgattaaattgaatgttttagttcaattttt

SEQ ID NO: 328625 - DNA, 1683 bp, Cannabis indica
aatcaaattttccttttaaaatagctagttgtatgcttgttaaaacactgagtgccaccaattgttttgaaatttgttattaataccgtaaattatttagaatttttccaaaattagtgggtgtatgatataactataatatacatcaccatataaccgaaaaaagagatgtatgttatagtttctctaaaataccgaaaattgaaaacgctcatacgataagggtaatatttgtttttgaccgttttcacccaggttgtattggatgaagctgctttcttgttggatttagcttctgtggatgggacttgggatgaatgtgttgagcgtattgctgaatgttataaagaggctggtcttaatgatgttgcaacattcatacaatacacagattgacaagagttgagtttatcactatcacttcttcctattcttcttcttcctattcttcttattcttattatttttttttaagataaaaaagaaatatacatatatatgttttgaatttttgtaaccacattgaaaacattcatgtagctacaattttgagtttgaagtcctatttgatcctatataataccacatcattaatttaggtttatatatataatttgttgggatatatgttgaatatgaatatgctggttaaatgttaattctatcaaaattttattaaaaagtgaaatttatttatttcaagaataagacgagccacttattttgctaaaggagtttgtaagtcaaatgttagcatttcaaagattggaaaaacttgtgttaggaaagaatcttgtttcgttgatgagagattagagattgtgagattttgagtcaatgctctacgttaacattaatttttaataataatttgaataattgtgttggttattcaaatattttgttactttttaagtgatcctacatcacaaataacacaattatatatatagagactaaaaaactaaaattatgtctataatcataaaagaatatattaactatgtaacgtctaaaaataaatttgtaagaattttaagctcaaaacagataatattatactaatgtgaagataaatattgtgttcaacgtactaacaagtggtattaggattgggttccaaaattatttatgtgaataaatccttaaaataccaaacaaagaagatgagcatcgataatctcacaataggatccatggatgtgcttagttggacatatggtgtgctctagatagaagagttgacctggataattgcaagaactctcgaggtagtagtggtgctccatataaggcatttgatccaacacatttgagagaagtatacactaattggtggagagtttgacgaatggagaattgtttaaggggaggcaaggtgatcttttatttgaggagagagttgttgggttttcagtcaaaatccaacattggctaaaaaatgaaaaaaaaaaggatatgcatatataaaaatggacaatatctccattgagtataaaattttttgaaaaggtgctcaaaaataaatccctaaggacttggacccaaaacaaacaatcataccaatgtgaagataaacaaaatattatattacttaagataaatatcgacataaatactcaaaattttaaatttgtaagtggcataaacaaatatttatttttagcagcataaatactcaat

SEQ ID NO: 328626 - DNA, 989 bp, Cannabis indica
acaaatttgaagattgtgaaataacgggtgatgcctattgacactttggaagccccaagtattgaaacattgggggtaaaagccataattgccactcaatctccttgataggtttgatcttctagtaattgaattatgaagagcttccggctgacagggttgcagtatagagaattgacttagtggaacctcctccaactgtaaaggatgagtcaagtatgccatagttgttgtagaccacttcaccaagtaggtagaggcaaaacctatgaatatatagtcacctcaaataaggatttggacttcgtcatcaagaatatatagtgttgtttttgccttctacataagatcacataaaataatgggatgcaattcaatagtgtgcaattcacaaacttttgcacctagcaaaagattatcaaaagctttttagccgtggccagaccacaagttaacatacaagtgcaggctgtaaataagattttaaaacaacattaaagatgaaactacaagcttgcaaatctcattggtcggaagaacttcccagtgttctttgagcatacgcaccacaaaaagaacttcaagagggaacaaaccttactcaatggcttatggatgtgaattagtcatcgcacttgaaagtaccattctttcacacaaacgagaaacctatgacccaactcggaagcatgctctacttcaagagtctttggacttaatctagaagctccaagaacaatctcaggtccaaaaaaaaatttatcatggcaagatttttaggcgctacaattttaaagttaagagtcaaaccttcaaagttagagatctcgccttaagaagagtatttccagcttgtcaatattcaagagtgggggtcttaggacaaaacgttggatggaccgtacgagatccaacataaagtggtaacggtatgtaccattgaaaagactggatgaatcgggacttagtcttttgtattcatatgatca

SEQ ID NO: 328627 - DNA, 2108 bp, Cannabis indica
ttgtgtgagtttcttctacctgtttctctatctttttcatgcttggacagattaagagaaactgtgtaatgaatcacaataataagaaactatatttccctcgaaaaaggcataatatagatgtaagtactattgagagaagaaatggaaaaaccctagatactaagagacaagatatatagaaagacctctctctctctgggataggcaaaatgataatttatttcattattacttgatggtatatatagagataggatgtatatatatatatatatatctataagtatatgtatatatattcctttagtatacatatatggtatatatgtgtcatgatgatatgcatgcatgcattaattaatgtcagcttagctagctaggaatattattgcaagaaattaaaaatagaagaaaaaaaaatattgttgatgggaaaaataaatgtgtatatatatatttatatctatatatgaaacatatatatttgggcatggccacgtgattccaaatccttttcattttctatatggggtttaaaaaagaaacatttgtcttgtaataagtatttcaattctccccggttaaataatcttacaattattattattattattaggttttaatatgtgttgcttctgtaaataaacaacaataaaggtcaaaagtttactaaatgtgaatgagactgaagctatacaaaattaatatattaatatattagtgttatatatatagtggagattcaagatataacttaatcattacattaaatttaatattatgtctcattataaaattttttattaatttgtgactaaaaataaaaagcatgtgactaattataaatcactattcttattttgtgactgaaaggttcgtaaataaagatattagtcacaaaaattacaattttttgtgactaaaagtatttttaatcacaatacttattgtgactaaaagtaaattagtgccaatttatatttgaaaactatattttagtcacaattgttgtgactaaaaattacattatatttagtcacaaaatttatgttatgactaaaaatttgtcattaaaagtacataaatgttttttgtaatgtctataaatatcttttattataaataattaactataaaatgtatatacattgtttttcaaatttttttttgtttctatgtgagtctgccctaatatttataatatatataaatgggacaaattgcaaggttatttactattttaataaataaaagtaaggaccgagaaattgtattatattgctaatttattactacttatgtctttcttcttgtctcgtacatatatatcataccaagtaattaatagtttgaacaaattaattaagctttaattatagtagactttttgtttcaatttttgtcctttatgcttggtcatgatgaaatgtctatatatatatatatatatatatatatatagaattacttttcaatgggtattacccattaatgggtactaaataaatttaactatgaatattaatttaaaaatattaaaccattaaattttggtccgataacgaataataaaagagaaatttgaatttctatgcttaatttagttacttaattaaagaaaatatcaaaaaatacttctttttacactaaattaaaacatgtttatatgaaaaatatttaagtcaaagtcaacttttttatcactttttttgaccgaaaaacttttttttttttattttttttttcagctgatgaaccaatccaaacccatgtaatgtaaaaatgagaaatttttctaattaaatagaaaaattaatcataaaaactcaaaattttctaatattatccattcatgggtaatacccattaagagtgtagaataaataaaatacttatattaaaatcttaaagttaaaatacaataaacaatagtgatacagacatttccaccaagaacatttagtatttgcaaaaataaatttatgaataagtgtgcaaaaatcatgagatcaacaaataaaattaagtatctcaaattacacaatttggcaagacaatgaaaggagaaagcataagtcaaatttatgtggtctattttggaataa

SEQ ID NO: 328628 - DNA, 2142 bp, Cannabis indica
taattacaacctcttagttaaccgccgctcttgaaaaacacatgccagaatattttttttcataaggtatcaaatctataatatcaggaactatgttgtaattataactaacatcgccatgaaaatatttcggcatgtgtttttgggcgtaaaaattgactaagaagttgaaattagaggttgacggtaaaactccacaaaagtgtttgtttgatacatgatataaggggattttctttatgttgtaggccgagaagaacgaacttcgagatgagaaacagaggctaaaggcagagaaagatatccttgataaacaagtgaaggccatgacttcacaaccaagtttcatgcatcctcctgcaatgccgtctccatttgccagccctggccaagttgtcggtggcaaactggtgcctttcgttggttaccccggactctccatgtggcagttcatgccgccagctgcagtcgatacctcacaagatcatgtacttcgtcctccagttgcataacttgaccttaggcaggccttgtttttcaggtctgcaactgtgcagtaaggagccgtttcctttttctacttacaaacgtcgttcccggatacttcagttgttttctgtaatttcaaaggttctttttaaccattttggtaaatttggtttaccaattttgattactctagaacaaatgttgctgagcattaatttagagacatatttggaggcattggttagaaatgtaatgtaatgatccaacttattcttgttacctctatttcccttgacatatatgaactattttattattaacttgtttgtttttactgtaactacgacactaacagtggttcttaagaaatttgtgtggcaatttttttttctttaatgattatcaaaacataaaggcaaatttcagcttattttgaagtcgttggtacatgagctaaagatttagtgatgcaggagcatatctctattttatattgtttcccctgtttgcatattatgcaatctcaattatgtttctttattctatcttaagccttttatttaaactatatcgttttaaagactttgtggaactacttgtcgttcctttgccttttctactgtcgttgggcttatggtatatataccatatttattactcaatgaaagggttagtggatattatacagaagaggttatatcagtttgtctctattcttcgagctctcaacagctcccttcgatccaaaccagtcctacatcatttggtatgagacgccttagctttcttggacgccatggcgtgacttctcactaaagctgaaggataaggtcttatgcttgccttgcttttggagtgaatccatgggtgaggtgctcctagcatgaaatctgttgagtgaagtctctctctaaagttatggagtgtttccctcaataaaaagtaagaaggctcgagttgcttcaattgattcgtagggttcttgtctcgcgacatgccccttccatgctgaccttttggaggtgctattagtggatgacatgaagtcactttcaccagcatacgcggttgagacccttttttcctgtcagtagcttttgtactgaaagtgtgaggcttgaattttgcctttgagcatgctactcaacattttttgcatgtcatttatttccttttcatagtagcgagttggaggcttgagctcaatgagtacacccgcctctccattctgggtccacatcttgaaatgtcgagttttgtggcacagatgatggagagtgttgttccgaagatggccttcttgatggttgagtaattctatcgacggggatagccatcaatgtcaatatcaagtcatgttgtgctgggagctcttcttgagcaatagcttagtggtctccactttgtttattctccctttggtcttctccggcaacgagaggcagaggttctcttatgatggcgaacaactggttgtcatatgagtaaactctaatgtctcgaagatgatgtgaacgtctatgcatggtggttggttaacactcaggaaaagacgtagatatagacttgccttttctatagatggtactaaattattgacggtgagtaggggtgttcataaaaaccgaaaaaccgaaaccgaccatcaaaccg

SEQ ID NO: 328629 - DNA, 767 bp, Cannabis indica
acaaagctgttccagcaaaaaaatcatgcggctccagcaacaaacaatgctgctcctacagacaaagctgcaactgaaattgaacaacccatcacagcacctgattttccaattgcaacaccacctgctgttactacagaaaataaccctgctccaattgtaatttcaccaactgctcaaaacaattccagccacacctacaccactaaatctggcagacatatcaacaaacctactcatctcaaggattacatgtgtgacacatcaacacacacatcaacagctcatcccattgccaataacttgtcttacaaaagattttcaaaaaaattcattgctgcaatccttgctgcagaacagatcattgaacctacctcttacagccaagcaataaaatataaagtctggaacaatgccatgggaactgaaattaaagccttggaagataacaaaacatggatcattgtccctctcccacctggtcaacacacaataagcaacaaatgggtctatcgaatcaaatacaacccagatggctctgttgaaagatgcaaagctagattagttgctaaaggatacacacaacaacctgggatagattactttgatacctatgcccccgttgccaaatttaacacactaaaactcctattttctctagctgccatgaacaattggcacttacatcacatggatgtaaataatgcctttctccatggagatttacatgaggatgtgtacatgacactacctcaaggatacactcc

SEQ ID NO: 328630 - DNA, 965 bp, Cannabis indica
ttttagtgttagaaacttttacgcaacttcagtacaaaaaataaaataattacataaattatcaataatatacggtacaagacatatggaagctcgtgttgtttgagactgaatacaatatttagccctaacataacaacaccatagaggtttaacaacaaagtagcagaaccaaagtacataacataacagttgtgataatcaaacccaaataccaactgtgataactcaaatcacttgatgagtgtcatcacttgattttacattgagctttttcaactttgtgtaggactgaccgcagcccataatcatcaccagatatgtaaactattgacagtgtagctcctactactacaaaattagtcttttccatcagtttaaaactatcttttatactattttcgtcagttcctaaaaccgttagctatgcgggtgtcataaatacaaaactttaaatgatagcttataattattggaaaaattcactttaaatgacggttaataactgtcgggaaaaatcacatagtttataatgttgaggaaggcattcgcgccagacagtaacaaacggaaaacatcattttaaatgacaatttataattattgtaaaaattactttaaataacggttaataacttagtaaaatagttcttttctatataaaaaatttatataaatttacaaaaatcaaaatacacctggtataaaaatatttatttttattttgcccaatttttatgtgagaataattagaaacaaaaaaagttcataccacagtaactacaaacaaaataaattggaaaattattctcattaacactaagttaaaataatatctcaaggtaattcactaaagaaaaatttgacaatctatgcttaaaattgagtttttggtacttaaactaagtaaatttttgttccaattttacccttaaaaaaataaaaaccaacacactcaaacttct

SEQ ID NO: 328631 - DNA, 950 bp, Cannabis indica
ctctaaagggtgtttttgtagtagtgtggtgagatctaaaaggaagaataagaaaagaaaaaagatgagacgatggatctcaaaaaagaaaagaaaagaaaatgatttttttaattaatattatgtttaattattactttcaattaaaaaacagattttgtttaataattttataatatttaaataattaaatttaagaagactattaaacacatgccacttatacttgggttaacatagataatttaatgtattagtaaattaactgcacttaacttaagagtgtgtttagacgttattatgtaattactaaaggtaataattacaggtattaatgattatactatattttaaaataaaaaatgtatttaaatataatgtgataattacatacaaattcttaatgtcttgacaaaatagttaatattttgtttgttaccaaatttaagtttggcaagttttacggttaaaaaactacttactattatgataaaaaaaaatataatataaaataatattgaaagaatgggaaactaaatcatataataaaggaaaatacattcaatcatttaggtgacgtttggttggaggtaacgaaatgaaacaattttcattctattcgtttgtttggtttcatattaaaatattggaatgttattctaatgaaatatttttttatattattttgtggacggattatttcattttaaaatagaagaaaaaattattctaatatataataagaaaaaatttaatactattttgattaatttttttatatattttaaagtttattcaatcttataagatatttataaattttaattttatataaaaaacgcattatttaaattttaagattctatcgagaataattaatttaaatataaaggatttaaaattaaaacctaaaaactaaaatttctttgtttctctctcttctctctctc

SEQ ID NO: 328632 - DNA, 562 bp, Cannabis indica
atagtcttatgatttagggccatttgctatatttttttgaaatgaggacataaactaacatactcctatgatttggggccatttactataatttcccatttttataacgtttgtgacactatgcaaaattatacaagcaaactatcaatctcgtgttctcagaatacaacagcctagtcgaaccacttattggagctctattgcacgataaataaccatcgaaataccacacccaacaaaacactacttctcagaatacacattgtatgtaatataatcgtatataattatgtatagatttttctgtaagaaaaagatgtatttctcccgttagttctgatgctttatattaggaatacacagagggcccatttggtacgcggattggactggattggactgaaaaggattggactggactggaatagattggattatgctgaaagtaatcatgtgtttggtttaagaatagactggactattttatatttttccttttaggaaaaacaaattaaattaaaataaaaatatataataagaataataataataaataaaaaga

SEQ ID NO: 328633 - DNA, 601 bp, Cannabis indica
cttaaaacgaatgtcatttttgggacttttcctatgttaaactatttgaagactcatagccagtctctaatagactcataatactatatatattataaagatggatgaaaattctatctatagagacgcatgggactctaatacctacgtccttccatattttcaatgggaaggagttaaatcgttttttgaaatttgtaatcaatatcactaatgtgattcaagtttcaacgtgttagcttgaaaagagaagagaacttagagaaatgctaagaggctattgtgtctagtactttttttttttttgttaattaagtatggtaaaactattgtccaataacaatattctattaatctttctatcactattactctgccacagttttgaagtccattgcaattgatgtagaagaaaatacttttttaattaatatttaaatcgggaaaggtaggcattgacacccccccccccaaaaaaaatattaaaaaaaaagaataattacataaggcaccactttttgtaaaaaaataacatttttatgtttatagaattttttttatttttacggtttttcatataaaaaacacgaaaacaacaaaa

SEQ ID NO: 328634 - DNA, 1036 bp, Cannabis indica
tattttcaaatcaatgatttttgtaatgatgtttaatcattatcgtcaattcattgatagcaatacatatgaaaatgtttaggcagaagaagtgtcacttttattattattgtaaggacaatttttttcaatttatttttgcctcctaatgaaattataatctaattccttttatataacaatgtacattattacaattatatatatatcaattttttttttaaaaaaaatccaaatataattcattggtaccaactcgtgattgattgtgtagattttgttttgttatagcaagaaagtgttggtagagattgctcactggagtggtatgccaatcaagtcttttgacatgtcaagatatgatgaagtggatcaccaaagggaagatttctcaaggcaggcttaagctgtatttttatttaattgctgccttggtgtactatctctagcaaggtcgaaactctagctattgggatcacaagattccaattattagagtcatggttaaagggattattcatacagtttgtaatagattgaaatatttgaacttcaagaaattcaataggaaagatagagattgggaggaggttcttttaagagatttgaaaaaccgtgtttttgcaaatgtcagttgtatatacgaaaatataaaaactgtacgcgtttgcagcagcagaaagtaattctgctacagcagaactgaacaggcagaatataaaatatttgcagaaaaataaataacttgacacaagagatttatacgtggtatcagtgttctcccgaacactcctagtccacggggccacgcccagagaatgaaatcaattaataaagtatcaaaattacaaagacaattgacttaaacaagtttagactccctctaaagtattgccgcaatcctttgtaatccactttatgaatctgacttcttgaaacaccttcaagcccgaactcccttcgtctttgaagtgtgagtgcttacttcctcccgaagtaaggcttcaacaagtcttctcccgaagaccaagtgctt

SEQ ID NO: 328635 - DNA, 1732 bp, Cannabis indica
gtgacaaaccccacaagtccctgactgagcttgccaaactccatggccccttaatgagcctcaagcttggtcaagtcacaacaatcgtggtttcttcatcggctgtggccaaaaagtccttcaaacacacgaccaatacttctccaaccgaactattcctgatgctctctatgttcacggtcatgaaagctctggccttccatggattccagtctctaacttgtggagaaaccttagaaagatctgtaacactcaattgtttgcgaccaaagttttggatacaaaccaaaaactcaggttgagcaaagtgaaagagcttgttgagaaagtggaacagagtagtttgagtggtgcagctgttgatattggcagtgctgcttttactaccacacttaatttgttgtcaaacaccattttttcttttgatttggctgactctgaatcggaattggctagagatttcaaggagattacttggaatctcatgaaggaagctggtacaccaaatttgagtgactatttccctttgcttaaaaagattgacccttttggtataaggcgtcgtattaagattcactttagtagaatattacaacttgttgagggaattatcaacgaaagggaatgttcagattttgttaagaacgatgatgttttggatacccttttgaacatcatgaaaggaaatgataacgaaatcaatcgacaccagatagtacatttgatattggtaaagaacattttatcttattctccatttagtgacttgatttcttaattgtcggaattttgtttaataggttctgttcgtggctggaactgatacgactgctgccactttccaatgggcaatggcggaactacttcgtaacccagaaaccatgtccaaagccagagcagaactcgatcaaatcattggaaaaggaaaaccagttaaggaatcagacgtttctaaactaccttacttacaagctgttttaaaagaaacgtttcgattacacccagcagtaccattattgcttcctcgtaaagccgaaagagatgtcgaaatcaatggcttcactgtcccaaagggtgctcaaatcttggtcaatgcatgggctataggtagagacaaggacatatgggatgaccaagaattgtttaagccagagaggtttattgggtcagaagtggatgttaaaggaaggagctttgagctgataccgtttggaggaggtcgaagaatatgtcctggattgcctttggctatgaggatgctgccattaatgttggggacccttatccactcttttgaatggaagcttgaaaatgggcttaaaccagaagaaattgatatggatgacaagtttggaatcactttacaaatggctcaccctttacgagctgttccaagtcttgcataatgttctttctttagggaaactttttgttggaaagtgatgtttggtttatcctaatgtaatcctaatggtaattggtaatctaatgtaatgcttattacattgatggcatgtttactaataagtaatgggaattaaggtaatcattcccttacatttgtttacttgcattattaaaattaggaaagggagaagttgattaaataagggagaaaagaaagggagaacttctcccaccaattttataaggaatgccattaagggtaatggatttttattatttttattttattttttaatattaaatatataatgacaattttgtcctt

SEQ ID NO: 328636 - DNA, 1015 bp, Cannabis indica
gtaatttatttttgttttttcctttaacaaaaatgtgaaagtgttagaaaatagtaaaaatagttagaaaaaaagataagatgccacttaagatcttttgtgctttcctttatttatatatattgattattttgaattggtgcagtgctatatgttctataatatattaaaatataaaataaataaaatttatttctagaattatgattattatacagtttttgtagaatctgttgctaaatttcttctaatcaaaaaaattattattttgtagttgggttctgggtcatttatttaaattaatttattgatataacactaatataacattaatttagcacagtttgaaattccagacgaaaaataaatacataaataacagtctaattatgagagttatgtagtgcattttttagagctattattcatatgtttaatgccaataaaatagattttagataatttagagttattaaataagtcattttagtgcaattatacttgtaacgcatagtcatataatcaaattattttaaaaataagcaagcatgtaattggaggagaatatttgtaacgatttgcatagttcatggtaaattttgcaacaggaaaaattttaagaaaatactctacaaagattatagttcaagatagtgactgacccaaaattaaagtcgagggagcatactttttgtttgtgtgtgtgagggggtaaaaataaactaaatattaaaaataaacatatttttgttaggatttgaacacttcatctctataatatgtccaatataacttaactatcatgccaaagttaatattatatttttatcccaattttttttcaggagcgactgctccctctcgcctagagatggaaattggtcggttaatgtacggggaatgcaatccccgcccccatccccgctacctatttatacccccatccccgccccatccctgtctaataaccaacggattcggggcaggggaatacccatcggttatggggaaccca

SEQ ID NO: 328637 - DNA, 783 bp, Cannabis indica
tctaatatatttgttatgataatagttgtgatgatatgttttttttgaccaagtatatgatgatatgttaatataatgtgtttgttaaaatttaaatacaaagttttaaataaaacatgtatgtttattatttatttttaccatatatagtttgtacataaaaattaagaatatgtttttcatagttaataaaatgtatgataaattgttaattttttttttttgcacatataatgtaatttaaatattataatgtctataaaattgtaaattctccctacttttttggattttaattgttctgattgttatctctgttgaatatggtttttttctcgatccttttgttattatttttctcaatgattattgataaagcgcttgatatattttttgggaatttaggcttactctcattaataaacatgatcatagatttcatcaatttttaaacccaagaatatattcaattcatatctattctcatggaatgaatgcaaatcttgatgttggaagaataatattcaaactataagtttgaatcttaataatcaaagatgtagatgagaagatgattattaataagttttatcatggacacaactaatagatatgttactgttggtgccttgaaagtgaatgtaaagacacagaattaaataactttgcaactttgttatatttaatgttatattattttatataatataatatttagattaaaaaaaattgagttatatctcttctatataaagtgtgcctatataacaaaattcttagttt

SEQ ID NO: 328638 - DNA, 714 bp, Cannabis indica
aaaaaaaaatatacaaaattattcttttttattgtttaaatagcagtaatatgctaaataaaaaaaaattgtgataaattaatacgcgacattatttacagtttcattattaaaataacgatataaacattcgcttttagtagaggcagtgaaattttaggttgatatatgcaagggaggacggtgagttgttgatgctagattaaggaaaattgaaagaagcaattttttcaagaactattaattgattggagcaagaatgggcgaaggtcatgaagaaaaccctttcaaattagactgttttttttgcatatgatagatcgtctttgactctgtgcatgatgaatcaattgagcctgagactatagtgtgaacggagagtttttctcattcccacgtcaacgtcttcttctgtgagggattcaagagcagtcgtctgagagtggttcggttcggctcaatgacgtcctctgttttagatttttgttttcatttataaatttactattattagtttaatttcaattaatgtttttatggggttaaaattataaagagttcattccttaattaattttaatgttgtgatcgtgtttatgtctgatttagtttttccattaatcttgttttttgatatggttctttagtcttgtcttttgacatggttttttagtcttttccttttagttttttctagttcgagtcttgtctttt

SEQ ID NO: 328639 - DNA, 1687 bp, Cannabis indica
agttgggtcaggtcggcagcaaaatggctcatcattttcgaagcaaaaggagctaggctaggtcccacaaagcgcttaaacctgtctgtcaagggatctaaattcaaatcccaaatgtctctagcatattcacctcgaaaagatccatcctgggcatcccttagcgatttcttcagggcctctgcctctgcatttcccttggtgtgttcccccaaggcatagttgtacttggcaattcaaaactgaaccctttcctcatcatgatgaacgagagtcaagataatacccggaagtgcaggatactcatccacccctaaaggaatccccgaattagcgctgggggctggagtatccaccctccttggtttcttaacaggcgtcgtgtccaccatcttgcctttacgtttgcggtccaggggagggatgatctctccttcttcttcttcctcttcctcgttgattaggatgacttggtcctcgggtagtccagcagaagatcttcctggagtcaccaccacatcgcgtggctcgggcaggccagcttcaggtctttatgtacaagcaagggcgtccatgaggtcctctattggcttcgcttcttaaagataaacaaaggagtcagagcattgccaaaaaaccatgcatgcaagaataacataatgaaactaatcctaccctgatgatctaattctaccctagcaaatgtatatattaaaagactggtgtcatcgtcccctagaaagctatctaaggggagaaaccaactggaagtgaggtatgaagaatggtccaagaggattggtacgggaggaccagaacccatccgggactgacccaagaaatgactaaggttggaaaaataaaaacttttggcattataaccccatcgttaatggggcatccgaaacttatgcaaccgaccgtcaaattccattggccttaggcccgcataatcttgaacaaaaggaatgtgatgaataatcaatggagacttataagttccaaaagtgctggcatcaagagccccagagttgggaacaaggaaaggaaaattagggtggatgggcacctgttctttcccagcctcctcccggaggatcctccttgaagcagcctaagcgttgatataggccaactcggtgttccttcttgaatttatacttcttgtatttgtcttcgaaggaggagatgatgtcctcttggagcgccttctcggtctcagggttgcgaatatgagggcagagaatcttggacaacttgaagttgtccactgactggccttccgaaatcaacttggccctcctacagttaacggtagtgaccaagtccccgacattcaactcatccttattgtaattagcaaaaactttcgcgtggtgtaggaagaattgagtgggagcggtatggtgcatgggaggaatcctgacccattcagtaagcaactccggacgctcgacagctttgaaaccggaggagaagaagaatcggtgacggtactccttcacgtccttctggaagttaaaaggcatcggaccctcagtggcagggtgtataatcgagaaaaatatttagcacaagcaaaatacgaagagactgcctcagaagtatcagaagtcgcaaaggaatgttaagttaataatatgtctgaataataagacctatttttgtcgcccttcatttcattaag

SEQ ID NO: 328640 - DNA, 1526 bp, Cannabis indica
ataacctagtttacaacttgtcacacaattagagagttcttgagacttcttcttcttatttcttctaatttcaaaatctcatagtgttcttcataaaatcttcaagccattagtgagtgagtgcatgcccacccatagcaagtctagtactcaatcattgtgtgtaagactgtgatgaatctaaacacatgaaggagaatcgggcttaaatcttgataatactctgcgacataaaagagcaagggttagagatctgagtgggaggagtcattatattctgctgcaatcaatgtaaggttacttaaacttcatatgtgtttaaattccattgttttagaaattcatatttagaatgttaataaacatatttgttagtaaatcttgatactggtaaaatatattccaacagatttgtgtccaagtctacagacaaatgcgtacccttcttcaacattctcagagccaacaaaaaatctgagtggacagtggaatgtaaaaacacattccaagagctaaaaaagcaattagaccaaccacatatgttgtctaaacccctagacaatgaagagctaggcatgtacctaacagtcacagagtacgctctgagtgttttccttacaagagaggcagacaatgaagatcaccttgtatactacatcaacaaattctagtcgacacagagagtcgatgcccattcactgagaagatgacctacagcttgctcttagcttccagaaagttgaggccctacttccaggcacactccataaaggtgtacaccgaccaaccactgcaacaggttttgtagaaacctacagcatcaggctgactactcaaatgcgccattgagcttggccagtttgagatcacataacaactaagaacaaccgtaaagcgtcaagcccttgaagacttcgtggctgagtgcaccactcaactcttgagacccctcaagactcaggagagcagtaagagccagagcacaagcgagagtaagagcatcaatgaaatcttgaagatctaagatggaaacttcatgtagatggaagttgaaattccctattgtccagtgcaggcattgcccttacacactaggggacaaaaaattgcacaaagcaatctaattcggctttcacagcctcaaataatgaggctgaatacgaagccctgatagctggcctcaagatggcgcatgaagtacgatctaaccacctggacatattcagcgattgtcaactagttttgaatcaagttttgggtgaatacacaattcaaggtgataaaatgttgcctacttgagcaaaatctgagacttgttaagtcaattcaaatgctacacgatcaagtcgatccccaaagaacagaattccacagcatatgcacttgcccgcctagcgagcaggtgcatagctgataaagaatatctggtgcccatccagttcctagaagaaccgattattgttttcctagaggaggtcaacatgctggatgatactccaacatggatgacacctattgcagcttac

SEQ ID NO: 328641 - DNA, 636 bp, Cannabis indica
ttttagaaagttgttgatgacttgcgaaaataagtcttgaatagcttttttatccctttaagtctggactgagcatgggttgggttagccgggttgagactattttaatggaccaacctaataagatcggtttatcaaattctacccaacccaaaccacgcttatgcccaagactggacttggatgcatgcgagtttgatcaaaaggacagtgcaccctctgttgtttgtttagtctcatgtactaaggggttcttatttagtgatgtgtttatgtctagatcatttattttgattaataatatttttgttttttgctaaatgatcattttctctagtttgtttgaggttttctcaattaaaagttgggtatatatttttttttggagttctcctttttagttgtaataataccttatattttgattatatatataacaccttatattttgtaatgttggctttatatgccttttttgttaggtttccctttattgttatcgttgtttggtcgtctaattatgagatttatgtagctcatttatttttgctttgaattttttagaacttgttcttccttattgaatgtattttatatcgctctacaaaaaaaaaaaaaaaaaaaaaaaccagacct

SEQ ID NO: 328642 - DNA, 524 bp, Cannabis indica
gataatgaagaggactagaattttatgtagagaattgtgttgttttggttggttgagttttagagtttagaggaatcacaaattagtgacttctattgcaaagagaattttagctagtttgttttgtttacttttttttgggtgtcttgttagtttataaaataatatcaatttaacgattttgtataaatggatgcaaatttatatataataggaccaagaacttcaataacttgctccttaaaaatcaaattgatatgtttcctctcaaaagttgaattaattatttccaattggtgcttttttgcatgtacgtaaaaattagaatacaagaaataaataaataaatgcaaaacacattttatttataaacataagtttttattaatttgagtttgacctattcaagattatgaaaataattttttaattataattcttttgttttaagaaaattttgtaaagtcctcctaaaatccaacaatcaaaaaattttaaatctctccttcaaaaaaaaaaaaaaa

SEQ ID NO: 328643 - DNA, 512 bp, Cannabis indica
tgaatttttatatagaaaaaaaacgaccaaaccgactgatgctcagccctaacctgttgatatatcaatgcgatagaaccacaagaggcttctaaatgcatctattctgagtacaccaaacaaagtagactactgctgcaactgctgccgaagcaattttagctaccaagcctctccctatgagcttaaccaccggtttaactagtcagacaaatggtttggtcgaatagtcaaatcaaacaatttaaaaactacttgtgaaaattctcaaaaagttcattttgattgtaaataagttcttaactttgaaaaatagtggtaatagtctctaagttcgagattcttacaaatttgttggttctcattttaagagataggttaattgctcctaaaaatgttaagtgttgatattaaattacaacataagtccataaaaagtttactttaatgcagataaattcatattcttgaaaaaattacaataattgtaatgaccgctctagtaatttgga

SEQ ID NO: 328644 - DNA, 883 bp, Cannabis indica
ttttttaaaaaaataaaaattaatgacctggaccaatcaggaattgttacgtactttacaatttatttttaacatttaacaacgaaatacctagctacagaatttaaaaatataacttaaatattattacggctaaaaattaaacttaaatatttatttttaattaaaattaaacttaaatatttataccacaaattatctaataaataaaagttattcactgcccaatttaatttaggtggattgtaaaatctttcgagtattatataaacaatgaagtcaaagtaactttaactattttttacggatttgtacgtcaattaatttcttattttttgattgtacgtagtgtaaaataaatattatataaatactcaatagtggcaaaaaattattattcatatttttagggaaaaatcctaaaatatcttattcctttctccaaattggaaaacttattattatttaatttttaaattaattttaatagcctttaattacttgttaaaaaattacaataattaacttgacagatatttataccataatgcaatatcttgcatgcattcttattggaaaatttgattatgcaatcttaaatatgttgcatagtcttattctatgctacctttttaaacatttaaacaaaatattatacatccctaaaataataaaactaaacccattcccttatcttccccctctttctctctacaaagtcacacacgcgcacacacacccttgccttactagagtaccatttgtcggagtatctcaattgacaatcaaatgtgtaggagtaacccaaactcttaactaacataatttttgaataaaaactaggggttttttcatttttacacttaaaaatagtttttttttt

SEQ ID NO: 328645 - DNA, 968 bp, Cannabis indica
cactaaaaataaacattgagttgatatcacttataaatttaaaattttaggtacttatgtcgttaatttattatttatttatttattcaatgctcttgtgttttattaacttagtttttttttcttaggtatgatttgcaaccattaggtttttattttttacatatatatatacagagaggaaatataattaaaactttttcatataaattcgtaaaaaaaataaaagataaaaagaagatatgcttagataaggattataatgattttgcctagaactaaagtagatttaatagcaacttcaatggtgctctaaattagtgatgcaatctaaaaaaaaattatagatatactaaatgtcgagtataccaaaatgatcattttgagattatactaaaatattttttgtgtagttttaatttgttacaatacataattttttcttgttattcaaaaataataattgttgttagatagtaaatatggtattgtaatatgtatgtagtatgttgctatcctttttcttgttattcaaaaataataattgttgttggatagtaaatatggtattgtaatatgtatgtagtatgttgctatccaatcatataccatactattaagtatccaaaaaaaatattgaacattatttttattgaacattaatagtgtcacctattttttataggtgacactttatgattggttagcgatattctttaaaagtcattttcttaagttatatagaactcgatacttaattacaccaagtttaatactaaggaggatgttacaattatacactaatatagtaatatagcattctttaagagtgtaaaaaatttccacatcacttaaaaatatattattttattttatctcttccatatcatttttacaactttttgtctctaaaataatttaatagtaaatatttttaaaaattactaaaataattatatattattatt

SEQ ID NO: 328646 - DNA, 715 bp, Cannabis indica
tttcctccacacaatttagatccttctcaagcttgtgtttagtgatccaatcttccttactagttgagtttgcgaggctctcaatctttcctttgagctcttttgatttggcaaacatttcctttttctactgaatgttccaagtatttaaatgtttcccacaagactctaaaagccgagaaatgtggagaaccggttcacccctagatttactttcccacacctttgcaataatcttttgacattcttcattgttcgcccaagcttgttcaaaatgaaatctagtaccccaccttttgttgaaagtttccaccgtcttccccggacttgcttgaatcaaaataggtctatgatccgagttccaccaattcaagagagatactttattctttcgaaatctgtccttccaatcggggttgcaaaaaactctatcaagtttctcaaaaattagatttgcggccctcccattgcaccaagtaaaaccatcatcttccggtttgatttctctcaaccaacaatccgagagagcatttcgaaaattcctcatgagataatcgagtttgggcccccctccttttttttcttttctatggacaatctcattaaagtctccgctacacacccaagcaccattgaacatcggtttaagccttttcaaaagcttccagctttttaatcttcctctcgggtcggggctgccataaaagcctgtaaa

SEQ ID NO: 328647 - DNA, 658 bp, Cannabis indica
ccttcacaaatccacccccatcacgacctatatctccgccccagcagcaacctcaacccctccccatccgtgcgccggtccctccttattcaaatttcctaccctgtcgcatccttcggccgaggattcatccccaaggccatcgataaacacctctcctttttcttttgttttttttaaattgatcgtgaatggatgctttggttgagatagtcatggcagaaaacgagtgtttgtgtgtattttgtttgcattttgtttggttgagatagtaatggcagaaaacgagtgtttgggtgctttttttaaatttgcattttattttgtgactttgtgtgtatttttattagaacatgagagttagagttgaattgacatagtttttttgtgtgtgtatgattattgtttgaagaggtgtgatatggctgagtcaaataggcttgggaatgtcaaactgaccattcctattctttgttttttttagcagagaagaagaagaagaaggaggaggaggaggaggaggaggcggcgggtagggtttctgaggtgaatgatggggacgatgatggctgaatttgggggggcgggggtcggctagggttagaagcaatcggctagggttagaaaaagaagaagaaagaaaagaaaaaaataaaaa

SEQ ID NO: 328648 - DNA, 816 bp, Cannabis indica
atatatataaaattattaggggcggagatccgccggtaataataggatccgccggtaataataaaagtataatatttaaaatattatttaaatttattagcggcggacttccgccggtaatagtccgccgctaataaatttaaaatttaataccgggagtattcccccacaaactaattctttcattattattttattttttaaaaaaataaaccctactattagcgacggatttagtccgcccctaataattctgccggtaatgtaacattttcttgtatactaatttataaatcaactttcttatataaaaccgaaagatttattggatatatttttatgaatcagtgcagttgaattaattcaaaacaatatcattacaacctattgagcaccaaaaaaaaaatgaaataataaaataagtcctcagcaaatactacttacatcaaattaacaactataaagaatcaaaatattcattctctttcagtgtaaattgtttagttctaatgtttgagattctatgcttaacaataaactttaatgtacacaagctgcaattgtttgtattttttggttccaaaaacggtcatttctatttatctgaatttggtaaaccaaaccaaccattgctgcccgcaaaatctacttcttaaatcgttgaagcttcgtcctagagatgcaccgcagcaactctggcagcagtagcggacccaaaatttaatctagggtgggtaaattttttttatatataaacatattccaaaaaataagtaaatataaagaaaaatataattcaatatttcaatcaactaa

SEQ ID NO: 328649 - DNA, 897 bp, Cannabis indica
atgaaaagaggagtccattcatcttatatttggtattttatttttataaattagtaatgtgagactaactcaaagtataggtataacgaacaactattaagagactacaggacagaacgtgacatttgaaagaataacacaaggcataatcgagaaatttagagattttaaattaaaacaagttaaaagatcccaacactaaaaactgacacatattgacagaaaagtgtgtggaaaaagatattaaaagagagacagcataagttttcggtttggctcctcttggtagactagcagcactttagatttacaactaatcaagcagctctaataattctaataatatgattactaagagattgcattgcataaagtggaaataataaaacaaagattaaattccttaagccatgtatcattgtgttacatatcatgcccattattacttctttatagtgctcacgaattgatcatggtgggtaatgatcgattttcatttcgcaatatacccatgtaaattatttataatttatggaatgaagcacccatgaacctggactaattaagttatcacaccgacaaatgagtcgtcgcccggggtccattctattctgtgggatgataatgtaaaatctgaaatattaattaatacaatatttatgataatgattgtatggatgatgacataccattagaattgttattagcttgatttcagataaaaaaaaattaaaaaatagctagctattagcttgatttcatctattatcttcgtctttctttatgttaattatttaaaggtcatagcatagcatgattcattttttatatgtacaagtattcatttaaaatatattagatagtgcaaacagtttcataaataataataaattaata

SEQ ID NO: 328650 - DNA, 544 bp, Cannabis indica
ttacaatagagttgtaatatcttgattttcttccgttgtaataaatctctaacactttttgtagtaatcaaaatactacatattgaatcttattttcgtcactgaaaagtattgtttgaaatttttaaaaaacttacagcctaaaatttacagcttaaaatttacagataatcctaaataattttaatatacattatcatgaatacaaatcaaattataaattttgtagatgcccaaattgaaaaagggtgcacaaaaagaccatttttaaaagatgtattatatattttttcaactaataacacaacagtcatgaacaagcatcaatacaccgttttcttttcaaaccaacattaatgaaatgaaattctagatcatgtaaatgattctaatttttttaatttatatttgctgggtgtcaatcccattattcccgtaagatttcttcacctcttttttcatataactagcaaaaagctacgtgcgagacacgtatactagattttatgctagtttttttctatgttatttgaaagtgatacaa

SEQ ID NO: 328651 - DNA, 730 bp, Cannabis indica
tttttttttttttttgttacttgataccttaataaacccattaaaatttctcttcaaaatacaactaagtaaatagtaagtgtaagtattatccttatttttggagagaggacatgaataattccaagacagattcaactcagttgttctaggcctaacaggcccaacgaagataatagatttgatatattattgaagtcaagccttttggatgtcgccgatagatggctcgtccagacaagatacacctccgacacagcgtatcttcggatggtatcaaagagatcttgtagatgagtgattaataggcatcccaatatctagctctgtatcacaacagttaataacacattaatgtgtctttattatccacaaaagttggacacagtttcacaaccatcaacgtgatatgacaaccacgtcagtagaagatcaatgcctcatgggtcaggcttaaccaaatgagcctgaaatcaatgtattatcagcatatacgccattagtggacaatgtatacatacaagaaccctaacacaataaatttaagaaaatgcattcatgtaaatggttagaatctcattctttgattgctcatgcaaatccttgtgttcaaacacttggtaaaacacttgtgtaaataaataaggctttttcagttaatgttgcccaattagttacactgcggtcgcgttagtaaataaactatatgtcgtatccacagggaggaaaa

SEQ ID NO: 328652 - DNA, 754 bp, Cannabis indica
ccatatggttacaataaaaatgtaaccattgaatagtcacctatataaatatttaaattttttctatgtaaataggggatgtctatatataataacttgtacctttctcaataaaaaaaatctcatactttgttaaaaaaaaaaaaaataactcatagcatcaataaaggcggacccatatctgcacagtgaagtgataattgttcaaaatgacaaaacaatattttgaagctgctacacatataaaacatatatatatatgatgagatctcataaaataaataaatggttgtatgatataatttgatagatatatgcacctttcaaatataagtgtgttgatgctaattattgagaagtttagaataggttaacatcctcaaaataaaatttaaatagtttgttgtacatacacacatatatcttttttttattattataactgcatttgaaataaactatttaaccctaattttcgtattataaaatagtctaaatttatagaaaaaattatttaaattatatatatttagatttatagaaggagtgcatcattaaagcacttgaatatttattggagaatgaattagtcagcagtcttgaataggaactaaagatagtttgcctccataaatctccgggagctgctcttcatggatgtcattcagcaaagttggttttagctttttgttatccacaaatacgatctgcccaatcaattaatattaacttaattaattaattaattcttttt

SEQ ID NO: 328653 - DNA, 637 bp, Cannabis indica
atatagtacaattaaataaattttatcatactaaaaaggcagtcacacaaacctaacaatatcaaacccactccaacattcgtacaagtctggagtaatatacattcataattcgaacgcaataccaacgactagtgcacccttatcgtgcattgctctacatatatataccacatcatcatacatgtgtggtcattaatcacacctgaaagcacctagaacatggttaaatattcatgtacaatctatcaacaaattaataacaattccatcaaaaccattacaatcaactctttccactccatacacaacaagctacaactagcattcaaacaatgaaagtgcaagtacaagagtaatattttccttacctcaactccattgtaacataagctcacaatcatcttttaagctctatcatcaatcagtgaatacttagaccaataatgaacttaatatttttgtaacacctactgtacaaagacttttaattcagaatttgactcgaaaaaatttgaattagataaattactctcacctataccattagatggctaaataattatcatcattgcattctatattcaaaatcatctccaacgacatataatatgattatatttaaagtttagagttc

SEQ ID NO: 328654 - DNA, 1333 bp, Cannabis indica
tttattattattgttatattttataggactattagtgatttgtttgttggtttattttggtgagatcttgttctttttctgttttatatttatataatttatgtttggattatattttgttgcaatttatttgtttattaaaattttataattttaacctttttgttttttatgtttactttatgtatagtttattatttgttgtttattgaggatttagggtgagttagtttggaatttcttcactctagtatattattaaaaaaaagagcagaacattctctgtaagagatacttgcatattaaatatcagaggctcgtggattaaggctcattaatgccccaactacataaaaatacttgtatttactctctttaaatcactcttagtgcattaatgatttagttgccaaaaatctcggtctacattttggtgctttcattgagagctgtataagaagattcagagtacaatggtggagactagaaatcatagacgccaacctcgtccccccaagatctcagagaactgggggaagaggaagcaacttcacgagtagacgtggaggtagaagaaaagaagaaacaatgatgcatacagtacgaagaaaatcaagaagaatatgacgcctatgatgatggcagttacattgagttattgtccctgaggaaaaaagcagctgatcacgaagctgaactagcagcactgaaataggaaaataggaaaatgcaagagataatggtcgccatcaaaaggatatagagacggtaggcatttacgtgcatccaaaagccatgcctcatggactaggaaaaataagagaaaaatcttcaccaagtacccaaagacgtgaaagtcaggaaccaagctctatccggtatccctcagaagggtgtccaaagagaaatctcacatctttccaagaaaagaataagaaggcttaggatccacgaaaggtccgctctgatttcccaaagggaaaaggtccacagaagggcaggctccctagagagagcactggccctcaagaccgggaagaccaaaaaagcatattcgtgtatcaagagcccgaggaaagaggaaggaaaactaaaacacccctgttgatttaagacaaaagcttaacgacaaacacgacgaccttaggaatcacttggagaaaaagaaacaagcaataccagtttcaaaggaaattcaccatgtgatttccatgcctaggcatgtgatttctaaagtcaagaacaagaaatttgccattggtgatctggtcctaataagggtcttcccagcctcccaagaacccaaagtgggggtacttggaccaaattggga

SEQ ID NO: 328655 - DNA, 1442 bp, Cannabis indica
tgccaaaaatagaattaacagagcccaactccagttctcccccgaggagtttctccactaagaatcaacaagttacaaacaccaattgcagtacacaaacaccaagaacaatcaatgacagaaatggctctccaacactcaaacttagacccactcaaccatcatgatagcatgatatgcagccatttctgatcttgatttctttcttactctctatgtttctctctgccttagtcttactctctcactcccacattgaatgaatcaaaatgtggagccttatatactgttagtagctgaaatgtccaacacttaatagctcaacaaataggtttaactaacataaccgactttcccaaataagaaagatttgtaacagaaaaacagttatgtaaaaactgttaggagacaaaaataaggtttagttttaaatggattatattccacacaaagtatagtaatcatattcataattataaatatataaatttgtatttacataaagagaatgaacaacgcaaatctgactcaattcaaaaccttagattgtctttggccatattaaatccatcgttaaagttttcttcttcttccattgatggcaatagtgtcgttttattctccatttcctcctaagtcaattacatatcacaaaggttcatgaatcatgatacttgatatgataatgataattttttaataaaggtgatgtatacactatataatagaaagaatgaaagagtattttgtttttacctctttattccaatttgtagaataaaagtctgcatcatagtccctcctatataaatattgttattaaaactataaaattgaaaagttcccataaaaaaataacttccccaaattacttttaaaattgagatgcaaaataaaactaaatttagaaactaagtgtaaatattatttttaaaaaaaaaattaacaaaatagatgaatataataaattagctaataaaattataaaaatatatttactatatattaattttttttaaaaaaattatataacaattaaattaagttatttataaatattttagtattgtgatatattgtaacaaaatgaatatatattagatcataaatatatacggtactatttaatatattgaatcactaaaaattaatatatcgtaataataaaattattgatatataccacaaataaattataacaatattaaacataatattttaatactcaaaaaaataatatatcatgctaacaaaattatatataccactattaaaatatgtataccatactaaaaaaattatatataattattatataataataaaatagaaactaaacatcatcttaaataaatgatatactatacacaacaaaaaatatataccatacaatacaacatatatacctacaataaaaactaaaataaaataatataatatta

SEQ ID NO: 328656 - DNA, 1002 bp, Cannabis indica
gttttaataccaaaaaattagtttatgtagttaagtgtcactaatcatagagtttagataattttgtcgctaatattcttttaaaattttatatatttgataaataatttgtcaaaaagaaatgataaataaaattttattaatataataacatgactaaacggttgttaaataattaaatttgaatttatagctcatataattaagaaattggtaaaattttattatttaatttatgatacataaaaattaaaattaatttagagtactaatattattttattatttgaatttatgatacaaaaaaaaaaattgaatttagagtaacaatatgtatggttttcaaatatgaagtatcaaatgagtattcttatctaccttgatcaaatttatggtgtagagttttcctatttatagtatgcccactttcttgctctcgaattgactttgtgatgatcttaataagctagttaggagattttggtggactggggctactaagaggtctagattcttggctctcactaactcggagtctatatgttgtcctaaagagaatgtgagcctaggttttaaacaattatgggatcttaatgttgccctgatatcaaaattaggatggtgtttggcttctaatagtgatttcttttggtgcaaaaatttatgtgctaaatactgtaaattaggagttaatttttaaaatctcactttaccctccaatgcttcttttgtggcccgggaaattatgacctctagggagcttattagataccatagttgtttccttagtgcgagatgggaatttgattaatctgtagaatacaccttgggtctcgtgattgtcttgggaccattatagagtgttggataaaatctaccatactaactgtcactatgggaaaatgccttaaacaagttacagaaaaataaagtaagatttttactagtctcaacagaccattataactcttggagtagtcggttctgtttcataggcttaaa

SEQ ID NO: 328657 - DNA, 788 bp, Cannabis indica
atagttcaggggacatttttaataactttaaaagtttaggggcatgatttggtacatgtcaaagttcggagggtaaaaatcctaattagccatttcttattattaaaagaatgaaacattgaggtgatatttttattgataagaaatctcttatttcacaactaactcttatttattttttcaagtttttgctcaactttttgatgcatttatacaagttctcttatatatagatatatggatgattaattaaaaagtttacaaatcacattacttatatatttatatatgtataattaaataatttagtgtcttttttaaaccattttttttttgttgtgcatgttcttttgtttagtaaattaagtcatatataatattcttaatttgattatttattttagggatattgatagtaaaactagttaaattttatgattagtgacatttaatcacataaattaattttttggtggtaaaaccctccaaacctaacttttgttaattatttaccccctctgatcaaaaggctctgttaagtgccacgatggacatgccacagtgtacataagtgtatacgtggttgttaacgcagtttttcattaaccaaaattgagcctcacgaatatgattcaacgcagaaattaaaaaaaaaattgtagaaaattaaaataagaacaccaggttttcttacgtggtttgacagttaaaattctgcatagtccacgagtcaatcttatttatatttctgagtatgttctttttttcagggcctctcgcgtaagagt

SEQ ID NO: 328658 - DNA, 886 bp, Cannabis indica
aaaagcttggttttgagtttttggatttataaaattgaagactcttacttattttacttattgtgttgacagtggtcactgaaaggccaattcctacccccaagatggtcgagcggcacataattctgctaggtcttccttttggactgcgatcagcagattttcttttaaatgagaccaatctgaggactgtcaaccttcttggctccgaccaattaaactgtgactacaagaatccaaaatattctaagtagcagagagtcccagttccacttgatgaggaggatagagattacgtggctcgaacccattatctcaaaaacataaaatataaaatatagcttattatcaaaataatgcaaacacatattataaaatataaaatattaataaaaagatagcttatatacaaacacttaaagtaatgtaaatgtgtatttatttaatttttcaatttaatatgtatttatgcttattatatataatttatacttaatttaattatattaataataaaaaaatatatacatatatataaaataaaattagatttttaataaaaataaaaaaactaatgataaaacacaaaattttaatgatgagaaaaaaattataggacgcccctatggagttggttattgttatttcataataaccgactgcacaggatccctacggagtcagataaccgaggtcatggggaccctatagagttggttattatgaaataaccgattccatagggtccctacaacgtcagttgtttttaacccctatagcgtcgcttaaaacagcatcggtaacgaattttgccaaaatcgacgttgaaagaccttaaaaaattgcctctaaaagccaattttatagtagtattttaacaaaaatg

SEQ ID NO: 328659 - DNA, 927 bp, Cannabis indica
tcaaaaaactgtatcagagaaattgtacgccgaaacgttataagctaaggctatctaagaattatatattctgagatattattgtaagagctataaagaaaaggaaacttcttccttattcttaagtcaatacaactaacgaggattaggctattaccgaactgctcggggctgaacttctacaaaatttctgtatctttttattgctttattatatattcttattacgacatatcgtttatcgcttatcaaaaagacttattgtcgttggctaaaagcgaagtcaacaataatggaccaaaagtaaattgggatacagagatcataaattgataaaaccatatgcataaatgaactagtaaagttcaaagctttatatttttgtgtggacacaaagttgattttccatatcccatgttttggcaggagagtaaatcaaaacttgtcacacatgaccaattagtgaaactttaagaaaaatgcagagtaatgaaatcacagctcaaaggagactgtggaggaagattatcatttatagaaagggttgatacaatcaataaataaaaaacacctctaagggtcttacacgtgttataataaaaacacacaaaagagaataatatcatcaacacaaatacaaagcaaaatatttggggattcacaattttaacaacctctaacggcatgggaccacagaatatctctcattgaagtattcacaatttcacctgttcggccctctcatcactatgctggaaaagggaagcgtgttctgtctgagatattaggtgatgatggacttctgactttctgggcggacagtcactctgcgttttacttctttttcagcttctttaatttcatgctttgtattttctaccggtttgtgctaaccacgctattattattctgtgcagacatgtctcg

SEQ ID NO: 328660 - DNA, 513 bp, Cannabis indica
tattagtaagtatattaattcaaatttcccaaagacaatttgggagtgcttggtatgatcatacagcttacaaaacaatatgaccttttttggttgttacttttttagcgttatagtcttttagataatgagagagtcaaaagggtaattaagttctcttcttcatatacaagtatctaaaattaaacatagaggtgccaacaacattttggaacacacaaattgtattatatattatttgacctagataactaaattaatttgaataatattgttatatactattttacagtgacatcggaggcatgatttttattgagattcacctgttgtaagtaagatgtgtatatgatatttgaagatttgtgattttctcagtacatgtcctttctaagagcatcttcatcttatggtgcactattttatcaaattatattggaatcttcacactatttcactataataatagactaaattatgtacaaaattttacattattaatagtgttgaatt

SEQ ID NO: 328661 - DNA, 1673 bp, Cannabis indica
atattttaatagttgccgaaaacctcggtcaacattattgatttacttacttcttcttttcattaattctttatttgttttctaattttaattttctcataatctcgatataacaaaatagaagtaaagatttagtttttaagtacttaactacaatccttgtgggatcgacctcactctttgtgagtttataacttgttaatgatacatatacttgtgtgttaaaaataccacaacaaagagacacaaaatatttacagtagtttactcctcatgtcgtgacaggtatagagctacatctacttcgagtttttattgctcacgataattacaagaaaattgactaaggcaataggtctaatttctagagagagaaaagagatgctctgaccatatgagctcctttctgaatgtgaaaaatgaactagtagaactcttcttttatggggaaagatgtcctattaaaataatatgaaaaatatagaaaaaaaaattactttgggctaatattgcccattgatgatgatctaatggctttggagtttgaatctcgtatgttggatcgtttttcaagaaatctgtggaaaaaaattgcacttgtcttagggacgaattttggacttaaaatcttcaaaattacaatatgcttctgagccatgacttgaaagagatttgaaagagctttaaaatccaagttgaattgcgtcaatcagatcaaattgagggagttatggctattttactgaaggttgttcaacacccggcgcccaagttgacatattgacatcaacctggacgatgggtcagtgaaaaaatgtcctaaacttgtagtcaatttcttagttttggtgaagtttttttaccagttctcaaagatgttgcctttttgtaaaatcgggtagacgcgaaacttctcgaatttgctgatattccaccttgttgaaatggtaaaatatcaaagtgtgagtttgacttgttacaagttgtagctcttgtttactacaaaaaataaccagatgctctagacgaaatcaaaattagataagcagaacccagcacacttggccacatgtcaacctacgcgctgggtgctcttcgagatgtttctcagggctcattttgatacttctatgacattcgagattgtgaatgagatctcttaccacatttttaatcaaaaaaagaagaatgtctgaagcaaattttgtatttggggagcgaaaacatgcgaaccaggttgcatgtcaacctaggcgcaaggcccaatgcccatgtcaacttgggcgatgggtccctatttcgacccttagatgatctcgtttgctccccgagatcacttgtatcttcgttatttctgaaaacggaaaagattcccgaaacacttttttgataaaatagttggaactagcccacgttgactcaacctaggtgatgggtcccaattttgctcatcaaatgcttttgtttgattcctggaaacactcatatctcagttattggtgaaaatgtagaatatgtccgaaagacttctcaaaaaaactgtttggaaatggtccaagtagacaatatgtcaacctgagcgatgggcaagcccagccctgtgcataggcaggctaagcctgtgcctaggctcacctagcccaagggctcaaaaaaaaaattctcttttaaaa

SEQ ID NO: 328662 - DNA, 1063 bp, Cannabis indica
tataatagtaatttttatttttatttaaattactattatgattttaaatttcaatgattatcactacattgaatattattaattttaaaattatgatattaaaaaaaaactaaagtaaaattaacatacgtgactagacacgttaacatttatctagttataattatatatataaataaaattattggtgctggactttgaaggaatattatattaatatttattattttttcaatacttaggaataaaataaatattcctaattgttaaaatttaatataattgtacacaatattatacatattcattttttcataaatttgatttgaaagcataaatttttatatatataaaataatagtttttaatattattctttaaaaagagattacttaaaattaatatatctatatatatggaacacttcttaatgggtaacatccattgatgggcactaaaaaaattaataaggtaacaatctaataaccttttatggcaagtttctaataattatttttttaaaaaaattatatttattttttataaaattggaaataataattataaccaatactttgaaaaaattataaattatttttaaaaattaattgaaattactactttataattttatgaaattgtgagtttattaataatttattattgtaaaactaagaatcatttacatgtatattaatgtgttttttttaataggagaataagagcttgattgtggaatccaattgtcttaatattattcatgctcttaaaaataaaacgctacaatacttcttagttcttacttagggtatcattgttagagaaatattattatcatctaatgatttttttgacattaccatgcatcattctcctagaataactaatgaggtgttgttcattatttatattattaggattggaagatgataatcttgtctaggggtcaagtataattttttgtgctgaaattcttgtgttggcaattgccattattcaataatgtttatgacactttttttcttcgttcatttttttttgttaaaattttcttcattggttt

SEQ ID NO: 328663 - DNA, 730 bp, Cannabis indica
caccaccacctccgcccttcacgccaccacctccggtttctcccgatgatgttagtcacatcattacttcctcgcttttcgagaagatgctcaaaaatcgaaatgatcctcgatgcaaaagtaaaggcttctacacttacgacgccttcataactgctgctagaaaatttcctggatttggtactactggctctcttgaaactcgtacaagagaactagctgcgttctttggccaaacttctcacgaaaccacaggtatatatattggttaatttatccatgacatgtgatgtgatttaagtaatataacagactaattttagtctaactgtagcatcagattatagatatagctgatatataatttttccacttaaaaaacagagaattaatccatacagataatataattttcctataaagatttgttgattatgtttgtgaatcacaggaggatggtcatctgctgatcagggaggaccatatgcctggggatattgctatatcatagaacaagatgatcaatctccgcattgcgtcgacagcctagaatggccctgtgttcctggcgaattctactatggtcgtggacccatccagatcagttagtaagtcatcaagttttacataatacatacataagtatatatatatatatatgtatatataccatgcatgcgtgtcatttatggagttgtactatgtgctttatatatgttttaatactttt

SEQ ID NO: 328664 - DNA, 536 bp, Cannabis indica
agtgattaattatttgattcctattgatatgtaggaccttagataggattctcatcattcatactagttgcaaggtttatttccggaacaaaagtcccaaccactatgagtttcctaaatacaaaggggagtaagatccaaaatcacattcttcttcatcgaaggcacaaataatggaacaaaatcttgggattgggacggggtttgggttttttttagtgtttcaggtgtagggggtgggttctcaatggtaatggtggaggtgtagaaactgagaggggcaattttgggcctcctaagagaaactaatccttaattaaatgtagggatgacaacaggtaaagtatgggtagagttccatgaccctactttatgaaaaaagttctacccatattcatatataccgtattacaccctattattttttacgggtaggatacatgtattaccttaacgagtataggatatccacaggtaaactctgccctaataaatattaagaaaaataatttaaaaaatcaataaaattatgtcca

SEQ ID NO: 328665 - DNA, 774 bp, Cannabis indica
ttaattatgtagaataaaataggagtccgtctcttctaaataaacatgtatagttacacttttatattatattattttagttgaatgaaaatcttgagtctatctatgcatataaaaaccatgaattaaaactatatactatattctaaaaacaaatcaaaccaaatttttagatctagagaattaattgaagtatgattattaatcaatcttgaggatacaattatagctaaattagcctcatgcgtgcacaaaaattacctaagtttattaattagttgataatcaccaacaagtaacactatcaacaaatttagttggcatattaatgttatattaatgttagttaatatgtcatttttattgttataagtttttgttaaacacaattctcaattgtcaaagtaattattacaaaagaaatttacttgtagacatcaaatttccgacttaaaataataaggttgtggctaaacatattttgtcattaaaagtttcttaattagttataaaaattacaatttattgtgattacaattaaattagcaataatttttatttaactgatatttattttatagtaaacaaatgggatttataaatgactaatattagagagcactaattgtgtttattatcgataaaaaataaaataataaatctcaaatacttttaaaattagaaaagtaagatattttctaaaattatattctataaaactgttttactttttatttttttaattgagaatcaaaattttgaaaaaaaaatcac

SEQ ID NO: 328666 - DNA, 2269 bp, Cannabis indica
ctaatccaaattactaaagcggtcattacataaacataaatgacttttaatcttctattgataaaaaataagattatattgaaatagattttatttagggcataaaattccaacaaatatcaattaaaattcatactatatgaattttaattgatattcttttatctatttttctcattgttaattaataaaataaaacaattaatatcaatatatataaaggaaaggccaaacaaaggtgaggtggcatgctgcgaattttttattgtagtgtatcttttctctcatttttttaatttattttttatacttcattagagataaaaattgtatattttttatacttcattagagataaaaattgatattttttttacctaaaaatactttttgtagatttatatataaattaaaaacaaaaatatgaattttaaaataaattatgtggcattctatatgaattttagttgatattattttatctatttttctcatttttaattaataaaataaaataatcaatatcaatatatataaaggaaagtccacacaaaaaatggggtagcatgctataaatttttcattgtagtgtatctttttcttcattttttatttattttttgatacttttagtaatataagagtttttgtgaaaaagtctcacatggtttagacaccattgtgagtaatatacgtataggttatatagatcactattttttaatttggtttgtatcaaaattagtattatttattttttatgtgggtgattaattatgaaatatcgtattttagtatttcaagttttattatttaattaaatgcgaaataataaaattcgtattgaaacagtttttttgtaattacagaaaataactctgtaactctagaagaaaccttgaaagacaaacagtgtagaaaaataaaaacacacaagattttggtacttggtttcaacaatcttttcatattgttactagtccacggggccacgcccagagataagattcataagataggtctcaaaaatacaaagtaattaacttatgcataaatagactccctcttattatatgccgcaagcttgatgtattccaccttctaaccaaacattgttgaaacttcaagagctcgaactcccttcaatctccttgaagagtccttgctttctcccgatgtaagacttgaaaagcaatctcccgaaaactttgtaaaaccttctctcgaaggtagcactgttgttcttcttctttgtagacttaaatacagactcaagacaataaaaaatacaaataaatagagtaagagtcgaacaagctcttctctacaaaacaaagactctcttttctaaagatatgagtgaaaatcaaagatccaaaagaggtacaagacctagatgctataaggtgtatttataatcaatatacaccttattgacagctcatacacggtctgaacaaaaccacaacccactagacaatttcctaaaatatatcttcaatcagcccaaatttttttatttctgtacctatagaatcgtgagcagtaagtgggactttccttttatagaaaaagaaaatttagctccagtttctcctcaagaaatctaatcaatcaagataagaaactcacacaagatcagaatatttggttagatagaaaagaaatgagtaaacaaacataccattttcacctaattttccataaataagaaagctagacaactttccttccaaaaataaattgattaatataaaagttaaatacacaaaatataaaaactaatttatatactccagctgaaattaataataaataataaaatatttttgtcacattaaaaatgtcaaaaatagaattaacaaattatgttaatcttgcccaactagttaattgtttttttttttttttgaaatgaaggaaaaataatttttacatttttcagtttttgtaaagttgaaaataattataaaaaattctttaactattttttttttttatatatatctagtattttctttaattctttaggaaatattacatatatttaaagaaatttatatttttatgataaattttatatattttttttaaataaatacataaggttacaatctcttattattattattattattattattattattattattattattattattattattattaaaataattttaattttatgtttaaatttaggaaaattatcccatatactatttttttaactttttttttctaaatttacggtttggatttc

SEQ ID NO: 328667 - DNA, 637 bp, Cannabis indica
ctctcaaagaaaattagtgcaacccttattttctctttgaaaccttcgaagaattctctgactaaagctcgctcactagcatccatttaagcacatttacaaacttccaagccgtgagtaagttctctttcttcttttcatgcaacttctttaaatacatgtaccattattttaaactactctgcgaaatttggattcttgaaattgttctttgatgatttgagactagaaattttagggcttttgatttttgatgttaatacatgcccaggacatataggttttctaatttctagcttttcctcactgttttgctagaaaatatttaaaatgatccattcaaagcttttggagattcttcaacttcttcgtcattcattaaaccatcttattttgggaatttcattattggaaggaaatttcttcctttttttcttttaaatgggtctggtcggcatattagtgttgggttttgtgccctgtcctaactagaactctatttcaatgtaatcttgaatattcatttatcaataaagaaacagatttatttcattacttgtttaatgatttattatgttcacatatttatttcatgatcatttatttgatttataaattcatctaaatccttatcaca

SEQ ID NO: 328668 - DNA, 1005 bp, Cannabis indica
atttatcttttaataaaaaaaaaaataacttgtttatttttataaaactgtttaattaatttcacgaaattgtttattttgagttttaataaacatagtttattatttaatgattaaaatgtatggtttcattttgtaataagttttcaaaatatataagttcttaaaataattttttttttgcacattttttgtaattatgttatttgtattgtatatttatgaaaaaagtccaataaaaaatgatagcaaattacaaaattgatttattatgaagttaattaaatatatataatttcagtgcggaagatttatatttgtgtgagttttattatcaagtttattttgggaataattttaaactctcttaaacacttcaatttggcattttctatatctctgaactaaatctcaccaattaaaacttataaattacacaagtttagtttcagaattgagttacaagaatttatatttatatatatacatataattatttattcatcaaagaataaagacatagtaattaccaacaataatgttttatacttcaccaacttgttaaacatgtatgtttttcatccatttattaatattttctttatttatttttttcaatctaaacatagtaaccaaaaacaaaaatgtttttttttttttttttttttctacttttcgttgtttaaatttctttcttcttctatttttcttttctcatatgtattatatgtttataatatagggatatgattttgtcctgtgatgtactttcacggaatgtattccgtggtacattagatgggtcttagggtacattaaatgagtgtcaggcacgtttcttgtaacgtcctcgcgtcaagcctccattgggcccttacacccacggaatgaatggctcttatacacgagtacgtcactctggctgcttcatggactgacgactggccctacagaccaacacgagtattttcagcgagctttgtcctcactcacacgcatcctggg

SEQ ID NO: 328669 - DNA, 889 bp, Cannabis indica
aaaaaagttcagggggcacgatttactacatgtcaaagttcagggggaaaaattactaattagccaaaaaaaataaaataaaaactatctagacgttgaatacagaaagaggtgcatcagtgggatgtaccatagaagcacctaatacttttttttttaattatagttttttaattaattattaatgtaagttataatactcattttcgaattacaatgttgccattaattattttttaaatatttatttttaaaatcttataattagaactttcgaacctatgttttacccctcatttttcgtaaaaagtatttttcaattaagggagttttgtttttcaatatatttctcatttcaaggttctctatcatctgcaaggatttctcattcctaaacccttagccaccaaaggttgtcttttctctccggccgggcccactggccctctctgggcttaggcattgcttggtcgaggtttgattggtgcagcaagtgtagcatgatgcatctctatgtgtcgtattacttttctctatgggttgttctgtgttgtcgacaatttcttccaagttctgggcttcatccggtgtatttgggagattcgtctgatcgggatatagattagattgttggtggtggcatggtggtctaaggaagaccttgctttcagattgggcatgggctcaatttgggtttcaatccattgtgttgtgatgaggggtcgtggttccaattcaaaactaacaactaggttttgttacttcaattggttttaatgttactatctcctagaacaagtaggaataggagatgcaaacctaatctaccagtcttatctctgtgacatgtgttcgagtgtcttttattttattttgtttcgttgttagt

SEQ ID NO: 328670 - DNA, 673 bp, Cannabis indica
atggttgaattgattgagaagttcaaggtcacaattgctccagtcgttccgccgatcgttttgtcggttgttaagttcccggatcttcaccggtacgatttgtcgtcgattcggaccatcatgtcgggtggagccccgatgggtaaagaccttgaggaagccgtcaaggaaaaatttcctcatgtcacacttggacaggtaaattaattttacttattaattataataattaattaatttttcatctatacaaccaaagatttcctaagttgattacaatgaaaatttaataataatcattaaagtgtcactaagtacattatgtcaaaatagggcaccaattgccaagtccaacaattatttaaaatgattaatgtgttatggtatagtttatattttcaatcattatctataagtatatatatttccactatatatggatatgttttaatgtataatatgattgtagggagctcgaacaatcttaaaaagattagggataatttaaaatgtcaaaattaattttatattattttgcatgtgtataaatattaaagtaagtatgtaataaattgtttaaataatgattttaataattgtttgaatttttcatatcatcaataacttatccgtagaacctctatttaaaaatactctattcaagaataacctc

SEQ ID NO: 328671 - DNA, 515 bp, Cannabis indica
gagttataattaatatgtcataaatttaaaaaacatatttaaacaaatattattatgagtacatgtacaactaactgtttaaatttattacttgaatattttcgaaaattaagtatactatattagtgtatcatatgaaaaacaaaaattataattttaggtacagaaaataaaaatacatttccctacataaatttatatatatgtatatatataaatatatatatatatatatattacactaaaacaagtagtgatacctgtttccatggaaaatgtcgaacggcggcgaaagcaagagtgacggcggggttcatgtgtgcaccggagatgtggccgacggtgtatatcatgacggtgacaatgaggccgccggcgagtgatgctcccagctgtggcactcttttctcattacttccacttagggcagccgccccacatgtcacaaacaccatcagaaacgttgctataatttctgccaccacctatatatatatatatatatataacattac

SEQ ID NO: 328672 - DNA, 516 bp, Cannabis indica
caatacgacctaatacggcgttacaaacgagccctaaaagtaatattttatataaaaattataaatattgatttaaataatatataatacatgtaactactaactagatatcatcattcaccattccatacactccaattaaaatccaactcaattataattggacaactactttattttaattagactgaattagattgtttcagtataattaaatcattttgtatatatttttttaaaaaattaaattgaattaaattaattcagtgtgtaattggattatcttgaattatattcacctctaattgttatagctaaaattgtatttgaaataagtttttgtggtgtagaagactacactaatacaagaacaaaattcaatcaatgccttcaagaaaatgagaatcaaactaaacaataaaagggccggtaaataatattttggaccctgtgttttgcaaaagttactaattagaccttctgttttgttaaatgacaaaatgaaccctgtatttt

SEQ ID NO: 328673 - DNA, 1338 bp, Cannabis indica
gaagcaaaggttggtgatgtgttttctaaacccagtaagtaaaatccctggtttgctgttattctgtaagagaagagaatattattatatatatatatttaactcaatcaagaatattctcaaacagttgttgatctttttatatatgtagtgtatcatccgtacccaataagagcgaggaagaaaaactgtatagtaaaatttaggttcatggcaggcctctccttcctgagacaattaggaaataaaaaattactacaccatttggaagaaaatgagattaaagatttatatatataatgagtgatttacttctctaagaaataggcaaaaggaaggagcaaaagcagggcaatgatgttcctgtaaactgggaagacgagcttactaatgcccatattaagggcagctcttgaaacaacatgaaacccagcataaccaaactgcaaggccaacatggctccatgcagctggagcctttccggcaccgaacaccacattctccttgaacctaaatcagccatgaggctcagtatgaacacaaccaataataataataattatattaactatataacatacacttcttaattattatctgatattaatcgagagagaagggaagtgaagtgaagtgatgatgaaaaactctagtagagtagggtggtataaatacaatgagcgatagcgagagtgtgcttaggtatgaccccacaaagggtcctaaaaagacgttacgtcaactgttgctaagcttcagatgttttcggttgtctcccacattctctctatataaatatatatatccttggctgacaaggtatatgcaggccccactatcccactatatacaaccccagtgaagaaaattagaatcaaaaattttggtggtaaacatatcttgcacaaatcaaaactgtgcctggggttgttaattgaggtttttctaattcttttttttcttttggttatttctctacactcaaagtttggtcactctattatcagaactatagcccaataaagtgagaaaaatgctaagcaatagcgaaaataacataaacaaccttttaacaacttacaaggcaccatatagtgcattaattctctcacacatgtcatcttattatcagaacgtactacagcgaatagactaaaaaaaaataaacaagaaaaatatttttcttgttttatgagaggagttgtaatgtaagatgtaaaattatactaaatttaacgctaaaaataagtttaatcatgggttatatctcaaaaccaattggtcatgagtggagtaataactcatgttcttatatatggctcaattctctaccattt

SEQ ID NO: 328674 - DNA, 1218 bp, Cannabis indica
taacatacaattaatacaaaaagaaaaatataagaatgacatatatatatattagagttataattaggtaattttatttttattagcaatattataaatataaattataaaattaggttctttaataatatataattataaattttaagacattcttcaattattaagttatatacttgaaaatacagtaattagcatgattttattttttaattttctgtacaattttcttaaaattaattagttaataaaattagtagataattaaggcgtgtgcgactctgttcttctctcttccatggcgaagaagaagagagctgtctgaaagcctgtaattcaagctactgatccgattgacaaggagattgaaatgggagaatcgtctgggatcgatggattgaatcttatggttgaaattgcagaaataagaaaattagggcatgaggtggcgattcaagactctgcttctgggaatgagattccaatcgaagaccgatcgactggtagctgggcacaaaacgtgaaagatgaggaataggtgattaatcaaaggacgtttgaagcttcggctaagaatcattggagtgtgttggcgaaggagcacacttcctatcatgctctgaaacttacttatatggaaccgatgatcaagaatggcatcaaaattgctcaagttgatattaatgaagtttaggaacaagcaacttgctggaatttagctattatctgtatggtattaggtgccaatccacctctcattgtattcgaaggattcataagcgtgtttgggggcaccttggaatcgttcagattgcaagaatggcaaaaggcctgactatggctaggttcaatgatgaggctactaaggatcaggtattggagaatggagtgatccaatttgatcgaaaacctgtaattgttcgaccatggactacggatatgaacactgtgaaattggtaaaatcaatccctctctagattcgtttacatgaccttggcctccaatattgaggggataatagcttgagtgctctggttagtactattggaaagcctataatggtataccaatatactaaagacagatcgagaatccaatttgccaggttcttgcttgaaatggacatcacagattctcctccagaatcaatacaatatctaaatgagtttgggcaacttgttgaacaagctgtagactatgatgttggaaattatttt

SEQ ID NO: 328675 - DNA, 960 bp, Cannabis indica
aatagcacttagactcttattatcccaatattgcaatcccaaatcaaagatacgaatccaaggggtaccgacagaacaagtttgatcgaattcaaatccattgtccaagggcgaacaatgactggtttttgatcaaattgaacgacccctgcctccaaaacttcattccttgtagcctcatcattgaacttaaccattaccaaaccccttgacaatattgctatctgaacaatacctagatgcccccaatgtctcttgatgaatccttcaaaaacagccatgggagggttagctccaagtatcatacaaattatggcagaattccaactctcaacttgctccttgacttcctcaatatcaacttgggctatcttttggccattttttagtaaaggttctgtatagcagagtctaacctcagatgacttactctgttctttggcaaacgaattccaaaggttcctggcagattcatggaatttctggttttgaacctcttcgagctcgacttctcttgcccagcttgaactaggcggtggagtaagaaattccgagatgatgggagaatgacggttctgacctacatcccctgcacccacttcgccttcttcctctgaacaaacctggaacgagtcaggcatttcctctctttgatcctccttctccttcgaatcaataatagggatgagtgatctaagttttcgcacagtacgcctcttcttcgccatggaagggagagagtctgtgacgcgcacctttgggtcacaaaaaataaaatttattttatatcattttacttattaaaaatttataaatagtattttaattatttaaattacctagatatttttgtagaaatttaaatattgcttaatataagatattttgagatataattaggataattattatttacttattatcttattcttaaaataataatttcctaaccatatctat

SEQ ID NO: 328676 - DNA, 631 bp, Cannabis indica
aaaaaaaaaaaaaactaatacttgatttttttttccccttgaatcaaagcctaatgggtataaataaaaaaatactataattaataatatataaataacaaaaaaatcaataataaaataaccagagtactgtataaaaatacactaatagcatctttacttaaaactcacttgtagaacaactaaatatcttatgaattaataaaagttttcctaccaataaagatcttcttttaaaaagtactatactatagtgtattaaaccgatctaaatatgacacaattattttgtttttagataaaaattatttgcttgaatgtataagggctcttttatcgctggaaaaatgttagcgaagagttctatgcatgttcatgagcttacttaattataaagaagaaaaaatagttatctttcgtctatttaaatgtaattttatgaacctcttagagactgtcatctctcttcttcttactcttacctctcacaacacttcaaccttcctatttcttcatcgttgttcgtgatcacatccccagtacttacttctccatcgttctgatcctccaacaaactatcacggtaaatatctctctctctattttctttttttcttttcgtagtctgaat

SEQ ID NO: 328677 - DNA, 613 bp, Cannabis indica
atttgttgacttgtaatatacaccatataaaatcagctgcgctactccaaatactacccctaatccattgggtacctgaaattattattattattatattatttaatttcagatacaaaattatacctatacataatatatatttatatattgacttagggtttataaaaatacccttattatagtagaaaaagatcttaatgactgcattagttgtagtcataacaaaattgagaaatttcaaacaatttataatgtccaaattaaagttcaaaataatcataatttacgtgaaataaattatttgaattttaatttgattgaacataataaattatttaaaatttctcaaaaattttgcaatagaataccttctctataaccaaaatgaatagggtaaatcgattatcgcgacaattaaccgacaattatacatatatatattatatataaagaagagatgatcgaatattacaaggataaaagggtcaaaacgaataagagcataaatagaccaaacgagacaattgaagaatgcagcaagtgagagtgagaatggcataaactccacactttttgttgatatcaccagcttctgtatattaaatataat

SEQ ID NO: 328678 - DNA, 660 bp, Cannabis indica
tactcgaaattgaggacttagtttagcataggataagacttgttcaagggggtaaggtgtagacgaggtatgacaacataatctgttaagtgtttaggtttggtgatatgacgaccaattctggattgagttggtattttggttgctgaagtggtaggtttctcttgtgtaccttgtgaagattcaacatgaaatttgttattagaattggtgtcatcgggtttgtccaagatatgtggaatgtctgctgctttatcatcattagaagcaggcattgtattgttttttgctggtgaatgattgtcaccaggattaatttctgatgtgggaatggcatcagggatctgaatttctagtgtgagattgtcaccaagattaatttctgatgctggggaattataaggtgcattagaaagatctgaatttgacaaacttgtgtcaattgagggatctggtgtgggagagacaccaggtggtgggatgggagttttggcccaagttagagggctaaaaactagttttgtgagaggctgaaataactggtgtatagcagtggtagactactgtcaagttaatgggaaaatgtcctcataaaaaataacattgcgggagtggtagtgtaacgccctaaataattaggcacgctacccaaaatgctta

SEQ ID NO: 328679 - DNA, 990 bp, Cannabis indica
gagagagagagagaactaaccggagaaaaggaagaagtgttgatggtaaggagagagatctcatcgaccttgggcctgaagagggcaagctgagaatttttgttaggaaggtcgagccttcgatcgcaaggagacagctgggatttgtttgcattgccaaagaaattggaggaagcgaaagcgattccaaaagtgaaaccgtcggagatctgtacctgagtgtcggtgcagggagagtagacatggttgttgtcgctagctgtaattaaccctagaatcatcatcatcgtcgttaccaaaatcgaaagagatgccatgattgattccgaatttgagagacctctccgcttcttttgttgtgttttcagttttgttctttgattctgtcaatagatttggttgtggtatgatctaaaccgttcaaaatggaagacaaaaactttctttagtttccgggccttgacagcagattaggcagtgtcaaatgaaatgaaatgaaatgaaatcaaccaaatatttctaactggcctaataaaatttcctgtttaaaaattctgttccaaacaaaatatctttaagaaattttgttcaaaacacaacacaatgggacctcatattttgaagaattaaaaaaatttatatatgtaaccagtatttctttttttttggtataatactttgttatgatgaattaaattgtaagtcatttacaataataatagagtaaatggaaaaagaaatagtctccaactaagagcaaattttcattgaactctagaatacaccgagccaatccttgaactgctatattgacactacatttgacatgagcaatgataactctagaaaaaaaagataaaagacttaaggtggtgtttggtttagtgtaatgtaattgtaatggtaataggaatagtaatgaaatgtaatggtaatagtaatgggattactattaccatatttggtttattttgtaatgaacattgtaat

SEQ ID NO: 328680 - DNA, 823 bp, Cannabis indica
aatcctggatcaacgtcctcagattgtagaaacaacccaaaactgtttcaatctgaatcaagtcaaagctctgatcttgatgaattatacagaaccattttcgaactaagtcgatcagatatagataaactccgtcgaagggtgacaaatccaaataaccttcatttatcttcttttgttcttacttacgcttacatgttcgattgttttctcaaagcaacagatggagataaaactaaaagtaaagtctttttagatttcgccgtcgattaccggaatcgtttaacacctccggtgccggaaaattacttcggtaattgcgtggtaatcaaggcaaattacgacgacatgagagaggaggagtcgacattcactgttcttgtggaaaaggtgagtgatttagtgaaaagtgtggggaaagagaaggatttacagagcgaaacagaggaagtgatatcgaggataatagctacttcgtcggagaattgttgccatgtcggagtagctgggtcgccgaagttggaactttacagcatagattttggatggggtcggccaaagaaggtggttttcgtatctatagagaatggagctatttcaatggcggaatgtggagatggaagcggaggaattgaggttggtttggttttgaagaagcatcaaatagatctttttgcttccatttttatcaatggtctcaattagaataataatgttgtttgattttgtttagttaagtgtttttcttttttaaaattgtattgtattaaattatgtaattatattgggttttttttttttttatttttttttatttttaact

SEQ ID NO: 328681 - DNA, 887 bp, Cannabis indica
atgttctggacttaacagattttgtacacattgaaccataaacatgaaaactacatgtgaacataaatgacttctaatcttctattgataacaaatcaaattgtattctaatgtgttttatttaggggataagatcccaacaattaacccataatataaatataaatcctaattatttaccattaagcttatcaagatattacaaaaatgttgactcaaaatttagtcaacagacagtggagccttattgattgttgattatcactacgtataagcaataacaataaatattaaaaaatgacataggaatttataaaggtttggccccttgatgaacgggtaatgacctattcccccttttgttgtatttactctaaagataataccatgtagattacaagcttagagcttgtaatttctagctatggctctctttagtattacagtagtgaaaataaagtgttacagaccaagaacttatgagatcttgtgaagaactttatgaagaaaattgacttgtttaggaagcataagtgacgtgtaggacttagagagtgagaggctatagacgtgtgagacatgagattgaggtcccttttcatgtagtctaatgccctttatatagtgtagggcttacagaagatcctaattcaaatagataaatatctcttctaaaatagggaaaataacatctttttttatcatatatttaaattacaaaaaaataataataataattaaattcctagaatataggactaatattttgagaaaatatctctatctttatgggctgttgaatctgccctgtaactatagtttagcttgtgaatcttctagaaggctcgttgtggatgttgggttttatgccctaaataaaactcttt

SEQ ID NO: 328682 - DNA, 860 bp, Cannabis indica
acaggtatgaacattaattctaagtcataacaattcaaaataagatccaaaattcgaaatagatacaaagtaaatccttaaaaaaaccaaaaaaacttccaatcaatttttgtcatcaaacaccgaaggcccaacccccgccaaccaagattcgaacccagaactccctttcaaataccaaatccgtcaaacgcaaaacaaccaagacccacttgctttaacgtcgccacttgcataaatgagagagagagagagagagaggtataaagaaacagagaaatacaacaaaacaaaagaagaaaaaataacgtggccgccccttagaactatcgagagagaacaagagaaatagaagaggatcgcgggaggtggagatggccaaaagtcgtcgaaagtgtcttattgtgatggagtcgagagcaacgggcgagagagagagagagagagataaattaggggagagggacgagaaagagaaagcaacctcaaggtttttcttgggcatggacggctggataacgtctaatgaaggctgtcgccggtgagggaatagagaacagagagctcgtgacttagaagatgaaaagtgactttgggctttaaggtttcatccttttccttttataccaaacctaaataaataaaattaaaaaaaataaattaaaaatttgctaggtaataaattaaaaatttggtctgccttttaaaaaaaaaaatatggtctacctttttttttacatatggtgacatgcctggcgtgactgcatacacatgtcccaacacgcttagcgcgtcactttatcataattaaatttatttaaaataatttaaatttttttaacatatagtgacacgcttgg

SEQ ID NO: 328683 - DNA, 1332 bp, Cannabis indica
tttttaatatttaattaatgattataaatatcaatcattagatatttcatccaatggtcaagaataaaatacccatacatgagtaatacccattaagagtatacccatatatatatagtgaacttagatattatatataagataaaatatataattatttattagagtggttaaggaaatttgttatatttttaaagaaaaaaagagtataggtttgaactaaagacgtgtagattattagtaaataaatggtactattatgcttcactaaaaaaatattgataatacttttaaaattacggcaaaatatttaatggtgtcactcgctagcaattaatccttttaaactaaatttttgcagtaaaatcctcaaaactcgtactatattagcagtttgccatttaatatcaatatttggttattaagtgtcatgttgaatagggctgagcatgggttaggttggcagagttgagggtattttaatgacccaacccaatgacatcggcctagagattttttaacccattgacatcttaaattttttctaacccaacctactttttcattaatgggttgggttggttcgggttggattgggttataacccattgacccctatgtcatataacaaaaaaatattcagatttcaatatcaccaagttctgaaaaatgttcaaacataaatctgaacatacattgttatataatattaagtaaatatacaatatcgaaaagatttacaaccacagagatgtcagagatgtcaaaaaaaattcccaatttctaaactttcacatatcaaaatctttaattgattaacaaatatcacaagattaaaaccaaaaattcacaaagagatgtccaccaaatggattacgacaagagaactccataggtgacaaatttccaaggaaaaaaaaataatgagatctatccggagaaaaaagaaatttatactaagtttatgaaattaatctttcctaattcctacaaacttttacttccatccagcaaagacaaaaaaaattaaaaaaatttcttacaagttgaagttagtaggtgcggctggtatgtttggagagctggacggtggtggctggctggcgcagctgagagctcaacaatggtatggtgcctagtgcagctggctggcgcgacgcgggtgggagaagactgctagatgggaggcacaaccacgggcatggcaaggggcatagctaactggctaagaagattgatcttccattcctcctcctaactaagctgagagtgagagcactgacagagttttttttttttcaaaacaaaaaagagtggttgttagggtttgga

SEQ ID NO: 328684 - DNA, 1261 bp, Cannabis indica
aaacaactctaattaatagttactaaaaatctcgatcaacatttttagtactttcattaagagctgtaggaagcttacgaaaagagaaaatcacaaatagtctaatgatataatagtgttaacaaggaacacttcacgtatacaacaacctaacgacccaaaagatctagaagaagagaagacaacttttagggtggatgctgaaggagaaggagacaccaaattattcggagtatttagaccatgaggagtacgaagaatatgatgaagacaactatgcaaaactagttgagttaaggcaaaaagttgctgaccatgaggctgagttggcagaataaaaagagaaaaataagagaatgcaagaaatgttgatcaccatgaaaaaggcaatggaaaacacaaacattcatgtagacctaactacagtcacgtctgtataagagaagatgggagaagaaccttctcaggccgcaaggggccaaaattagaaggataggtagcccgaccccatcaggtagtctcttaaaaaacctaccccaaaagggaaccctatggccatacctaaaaataatagaacaacataggatccaaggaaagttcattctgatctcccaaaagggaaaggtccgtagggggtggatttcccaaagggaaaattggcccctagaactacagagatctaaggagcgacaccgtgcaccaagagccagaggaaaagagagaggccaccaggaaagaccctcgctcaacttacgataaaagcttaacgccaaacacgaagatctcaaggcgcatcttaaccagaaaaagaaagttgcttcagcctccaagagtgtcctaaatgaaggaattttagctgaacttgctatcctctgaaaggacatagcaatggtctcccgaagataaaagggagatgaatcagagtcaaactgtgaagatcgagagccctgtgttgggattttataccctaaataaaatccaattcaatataatcatatttactttcaataaagattagaaatcatactatgacctagtcataagctttgttcacatgtttacacatgattataggtttaacatataagttttattaaattatgagcatatagttattcacaattacagtgatgtcatcacaatggaaagtaattgtgattatatgcttcaaattatttggttccatgatttattaatatactggatttacattgacatgataatcatcgatgaggtttacttacacttggataagtggaat

SEQ ID NO: 328685 - DNA, 711 bp, Cannabis indica
gcaccaatgtactgagcaaacttaagaactgctctttgaccataaggccttgcagactagacaatcatatgttgcatatttctaagttgttatccttatcaattgtaatgtggaaaatacactaagtgttgatgaatgattcgtctcgtcaagtttcttatgaatagcaaggtggatgcctctctatatattgactgaggttgctttgagtaactttgcttattcctttcaaataaacgaatcttgtctttggatccatatattccgaggtaggctggtgtctcgtcaatataagtattaatagttttgtatccttgtctcgattaaaactatacaatcagcgagttatggatatactctctattaattttatgtttaatgagttattcatctttgcattaaatgatataactttattatagcaagtggttcatattccactaactgacacgtgtcatcttctgaagtgtagctgaatttcgggtataacaattatatatcggtccagtcatgtatcattgaattatacacagtacatttactacatgtctatccacatatgagatctgaatcaaaatcacacacactaaaagtatagtgtatagtaaaccatacttagcaattccatattaaagattcacattactttaatacactactgtaatatcccagaaaataaataatattaaatggacatattttattaaatat

SEQ ID NO: 328686 - DNA, 1673 bp, Cannabis indica
tataaaaaaatacagtaaaaaaataaaaaataccacctggcagtatttttataaaaaaatagtaaaaattagtatatcatgtaaatttttctacaaatttatggtctataatgaccttaaactcatcacaaggaacgaatgcattattaagacaacatatatattttgctgaaactttcttatctcgtgacaatattttgttgatgcaaaatgtattaaaaataaattgatttgaaaatagacacataacttatttatgaattcaattgcatctagctatatgttacctaaaaatttagggttgtttatatgattaagagtctgttgctccaatagctataccttaattacatgctgtcaataaactaattaagtcaatatttgatttcacttagagtgtcactcacggttagttttttcttccaatagataatttctcaaattccagctaattaactatatagcttctcacaatttgaagtttagtccatgctcaagttgttttctactattactggagtagttgtcaatacaagaagctcaatattggtgactctcctatatatgtcatggaaatcaaagaagcaacccacagtctactgaagtcgaatatcgagcacacaccattgtcgcatgtaaagttatatggattctatttattttacaagactttacccttacccctgcatcaccagtcatattgtactctgataatgttgtcattcatatttctaaaaattaggtgttgctttgccacattaattaaggtgctaaatactacactaatgtggggtctcaatattgttagcgattttttgtattatttattaaattaaaatgtaatccaatattaaaatacactatataataacgatttgtcacctcttatactacttgacactttaagatgaccctaacatttttcttttaagaataacacatagaaatcgattgtcacgtcgtgaaggagaaaacgagcaaggcatactcaagattattcatagggttgtacataaatttttgtaccgcccaatccgaacaacccgtccaaaccaaaaccgagataacccgacgaaaatgcaaaccgaaaaacccgacgaaaaatataacctgcccaatctttatattggacaggttgaaaaataatatcaatccgcctaatcaacccgaactaacccgaccaacccgattaacagagtttttattatatataatctatatattatataattatgtacatatttataaaagatagaaagtttaaactactatatttttttatgacgtataatttgaattttaaattcaatctttatatttatttcattatcacaataactaaaatataacaattgaatgtgaaaaaaaataaacattagtcctcagtttggacgggtgaacccgattaaactgacgaattcattaggcgggttgaaatttttttcttaattgggcgggttgcacttaaatttttgtaacctgatctttacattggattaaataaaatataacgtaaattgaccaaaccgaccgacgtacacccctaattattcatgtcccatccgagaacaatattgtagaagatgtttttactaaagctttaaccttgtttcattcattactacaaatatcagaatttcccctgaactatttagattgttagatttaaggac

SEQ ID NO: 328687 - DNA, 755 bp, Cannabis indica
aaataattccaagatggataattcatatttcagtaaatgctgttcttgattcagatacatatcttctacatcttgaggtaataatcacttttatccttgcttatatatatactagaaaagtacttacataactaatgaaaaattaaatttattaacaaattttatgcagtttttattcatgttctagtaacttcttgccatgatccatatattatgtatgcaagggtgaaaaattaaagaaaatatatatttagaggggtataaatgtcaacatatatttaaaacgtacttagttataaaattttagaggaacatatataaatatcaaaatacacatatgatggaatgtattgtaattatatatattaaaatattgaaaatgaggtggtcataggtataacttaagggattatttcacaaatacacaaaatcaacaaaaaaaaattataaaaatacggttgaacggaattttgaatatttttataattttttaatatatttacagaaaatacgtttttttatattgtacttttgctaatttgttgttaattttttattatctgtatatgttattttttattgttattttgatattatttaaatgttatttttatgtagttttcttgttgtttttgtgttgtttatgtaaaaaattgtaaaaatgtaaaaaaaaaattaaaaataataatttttaaactaaaaaatgataccttacgtaattatcccactgagattatttcacaaatacacaaaaa

SEQ ID NO: 328688 - DNA, 1880 bp, Cannabis indica
ctcttatgtgtttattttcattgttttagagaattcatagttaggatgttaattcaacatacttgttagtaaatctagatcctagtaaaatattccatacaatgttgtcttctcacacattttgaccttgttttgtttttcaagcatttatgaagttgagcctttcacgtgacaactcttgggggtccttgagctctctttgtgagcagataaagaccttggaggctgccctcttgtcgaaggaccaggctttatctgagatggaggctcttagcctgtagaccaaagtatgattttttgtttggaggccatgcttggcacaaggtatcaagagaacaccatgcaagttgctaacatttccaagttggagtctgacctcacaagttgtgaggagaagctgaaggcagcccttgatgaccaacagtctataagggacgagtacattagcttgtcttcagaactcatctatgagttcaagctgcgcaactccaatgccaatctttcatacatgagcaatgtggttttcctggagagcatgtggcccaagggaaagtgtgtttgagagcatgttgaaagcataccagacccccgtctagctagaggggtcatcgttggggcaccatgatgaggagagggtcgaaccacctgctgaggaggtggccggcccacactctagggatccaaactttgcagctttagttcagccccatctgcccctcacacatgtagatttagcttattagttttcagcattatggttttatagtatagaaaatgttttcatgttttgtatggccaatgaccttttaattttgaacactatttatttttagccctagggccttcatgttcgtactcttgacctatacgcactctatttttgaacattactattatttagccccgttgctttttatcaaggattgtgcgaccgaccagatggtctttaatccttgttgtcttcttttggccttgacatgtaagtatccagatttacttttctttatgtcaagccaaagtattcttgcatctgacttagaggcaggtttagtagcttattttaagcattaaaatttctctagataagttctctgtcctagtttgatgcattgtacggtgtgggtgccccccaagtgagcatgcagacttatggtctcttagtcacttgaaattcaccaagtttcatagaccttgtttgggaattttcttgtggaactacctgttgtactcatgtggaactgaaaaaagaataattttaagaagttaatcttgttagcaagttgtttagacacaataatttgagcataaacattgttttttattcattaattggtttttgttgctgtgaaacttacataaattgaatctacaagcttacataacaaagttttgcttctagatatcaaaagctacccctgcttcgcttgcatagcagaggccgccgttgaagacgaggggaggcgacgccaaaagaggccgtgggtactagcttttttacactctaatgttgagttcgtagaactgctactttagagtagtgtttagtaagctggcaactgatagtttttgcaaaggtgctctccattccaatatcttggtaggagaacgagctccatactctcattgtaccttctacaacttctatctacaaaattgcttaaggatgggccacacagtgaagcttttgatgatgccatgtctattacagaaatcagtgaacatgttactatcaaacaactttccattgcttgacacaatattctatggaagttcgaatcaacatatgatgttcttgaaaacaatgtcaaggaatttttggtacgtgattgtttccaggggttcagcttctgcccacttggtgaagtagtctactgcgacta

SEQ ID NO: 328689 - DNA, 842 bp, Cannabis indica
caaaaatacattaacatagagaaatttttatttttacggttttgaacttttttatttaaaaaaataaagaattcaatgaactgttggatatttttgttgttgttatagtttatttatagttgtcatgagattagtttctcactatttttagttatttaataatttattaatatttttttttttgtaaatattatttatacttattaatttatagttgttgtgagattaattttttattgtttttttagttgatttcttactttttactaaaaaaaaaaattaatatttttataattatgatactttaaaatcatatttttaaataaaattaaatttatgtcgcgtaaaattatatataaaacataaaaaatatttttgaaaaaactttattttttccttcttgtaaaattcaaaaaccaactatgtgttttaagtaggtcatgagatatattattaaaatattatatttgaattttccaattgcacatataaaaatatttatttaaatacattaatgtaaacaaatatatatttatatagacggtcaaattaatggtaaatatgtataccttattggtgtttcactttctgaccctacatccaatcgtcgatatagaacagcagctggaacggaagcatacatagaattcttcaaaggcctgagctccaaagaagaaataaaaggtgtgccatgcccagtgtttaccagacacacaaatatataatctgaagttggaatatatatgatctccttggtcgcagttatagatgcattgtcaaatttgacagttccccatttgttaggtccaagatacaaatcgaactctggcacaatcattttt

SEQ ID NO: 328690 - DNA, 392 bp, Cannabis indica
attaaataaaactaacactacgtggcttggcacgtaacaatcacctagtatatatatatattggtgtattattatttaagtttgattaaaataaactaattattttagtaattgtaaattattcactattaaagtgtcatcagctaattaaatgcgtagatactttaagagatatttttaatttattaatagactaaattagaaatattaaaatcaataagagcaactttattcttatcttctcctattaagagagaaaactagtagaactttaagtcttgtattcttaaaagattaattacccaaaaattacgtaccaaaaatcaaactctatcagttgattaatttacactttcgctattcatgtttttttttcttctctttcaatcaac

SEQ ID NO: 328691 - DNA, 821 bp, Cannabis indica
tttaagagaagaactaggaaaatttagcgagtgtttgtgtgatgactttggcggggtctattctcttcatggatggatcatacttgtaaaattgtataacaagaatatgaaagcgaaggccttcttggtcgtctatgtcagaaagtaatttgagctctttgggtgtgggtttagccggagccaccagttggggttctaacctttagacattgaacactaaggccatctataattatttaatattgggtatgtaaaaagttcaaatacaacttaattagtatttttaaactatgtatatgtatatatagaagaagtgagaagagcagagaagagagaagattgcataataattatataatcgttatagtgaaaatactcacgcgtaatttcatgaaaattgataaaaattgtaaaaaaaaatgttataattagcactcgtaatagaagaacaatcacttaaaggattttagaaaagactggtgctctctctatagattttctctggccatcttttcctctcttttaatttgtctctgttttttcggggctgctgtttatccctgtcacaactcagtccttttttttctctatttttttggtcttttaaatcaattaatggctcaagtaagcgtcttcttcttcttttaattactttttcttttttaaaatttcatcattcaaaaatatttcaattgatttgggctttgggccgctgcactcctttagggaaatttacatggtatactaacttttaccatttttttacaaaatactgtcagcggtatttttacttttttactgtgtttttttataagtttcat

SEQ ID NO: 328692 - DNA, 718 bp, Cannabis indica
tattttttgttttcatttctaaaaacaattttttaaaaacaaaaaacagaaaacaataccaaggtactcttgtaagaaaaaggaaaattagagttgaagtccacccaagagattgaaaataagtatagtttatcaatagtctatttttcatttctaaataaaatgttatgccacaaaaatttgcaggtactataattgtaatcatgtgtccatattaccataactttgtatctaatcatcttgttgattgtttgattatgaggatgatgatcaccacgatcctaacaaaaaccctcatatggatattagaaagtttcatgttgttaatgtgttaatacttggaaagaaaataccatgtataagattgattattgacaattaattttgagataaaatttgacccgttttatcaaaattttaaaattagaaatgagatagtctaggaacttttggtttaaaaaaatttatatttactacaaaaaatcttacttttagtcacaacaaaacttgtgactaaaagttaaaaagttgtgactaatgattaattatcattctaatgttgtgactaataagtccgtgactaaatgttgttttagtcataatacttgttgtgactaaaagtaaattagtaacaatttgtgtctaaatactatgttttaatcacaagtagttttttattgtgactaaaaattatatttagtgacaaaaaaatttatat

SEQ ID NO: 328693 - DNA, 525 bp, Cannabis indica
gatgttaatgaaacatacttggtagtaaatctagatccttgtaaaagattttcaacaccttgaataatgaatcacttagaggagcccccacacacacatacacacaagtttgaagcaaccgcgtaggtgcaatggtatagtgtgtaacatacgactgggaaccatttggagtacacccaacgcctctaaaagcctacaacaccagttgttgtacaaatggtagtagagacgtaatgcacatgtgtcagcacggcttggaacccaacaactactaccttaactacccttctgcaatgctgactttggatgtacagtcaaagtgtgtttgattccctttaggaccacttgtaacatagagccattagagctcaagtataaatagccccctctaagacttgtaaggaagttggaaaatcatattttgtaagctccatatttagaatcaatacaatgttagcttaccttcattttcttttgttatcctaaattttgtccacctgacatggcatgtgttggaaattattt

SEQ ID NO: 328694 - DNA, 656 bp, Cannabis indica
taaaaaaatactaccacatctagaatcaaatccttatcctaagttatgaatgatataaaagaaaatcaaacactttttcttatccatacgatctacaaattaggccaaaataacaggtggattttgaaaaactctaataataataaaatttcttgttttatctatcatcctctttttctttctctccttattctcagttgttgacctgcacccaagactcttctctgttcgtcgacaccaaatggcaaaaataaatatatgagatccaagaaaaggacatcgagattgactgccacgttgtcagagaaaagatccaagaagacacactaaagttcattcatgtcaccaccaaaaacaacattgctgacattcttaccaagcctcttttaccaagctattttcaatctattgtaaccaagatgaacttaaaaaacatatatagttcatcttgaaggggtattagaattaatggcccaatgggccttatttttcggccttttttcctctagggctactgcaccccttttactataaatagtattcttcattttattcttttgggcactacagccgagtaaaacaatgtgttcagtaataaagagtttttctcttctctcatgctctagagagtcccacattgccaatgtgtggaaaga

SEQ ID NO: 328695 - DNA, 1478 bp, Cannabis indica
aaaattattctaaatttaagttgttatgaaatgaaaaaatttcaacttaaatataattttctatctaattaaatttttgaaaaatatctaattgttatcctaatttttgtcttcctgacgtgctagtacttacgtggacaaaatcagtgtcacgtgacagtactgctcaccaacaagaaggctaagtcagtacctcaacaaacaaagaccccgacacttaaacattaatcaagtgatagacaagcttcctcatagaagctggccagccacctctggacattaccatggtcgtccagcctgctccctacaggggtctgatcggccaagagaagctttgcagggtccactgtgcactcctacacgtggacaacatcatttgggttgcgaattgggccctaaaaggcaaataaaatagatgaataatatctatgttcgagggcatttttgtcttctgtaattaattaattaataaacaaatatgtagggtttcaagtgtaaatttggattccaggcatcctatataaaggccttaactctaacctaaaaacctaagttcagtttaagcctaatactagcctccaagctctaaacctaagtctgacgacccttctccattctctctcacacccatacaagctatctctacacttgagattttccaaatgttgattcttactttgtatcctcaaggatgctatatcatatcccacctggagcgatctgaatagtattaacccccggtattaatacaactgaaagtggagaaggtcattattcgctatcaaatggggttgaacatctataacaaatatgtgtgctctttacattttcattctatttgtgtaccacatggcaagcattagatccatacgaccctattgttagttgatcacttttcgaggtcaacactaatattttattgtcttaaataaaatccacttaaatatgaattttctacttaattaaatgtatttaaaattagaaataaataactaagtgtcttcaataaaatcaacttaattattaattctaattttatatgtatgaaaaatattctaatttaagttggcctaaaattaattgaaattaattttcaacttaaatatactattctatttaattaaataatagaaactataaattagttacaagaaattacaatccagaatatattttattaaactatttgtgtttttcgaaattaattttaaaataaactaatgaaaaagtaatttcatttattttaaaattaactatgttactaatcaattttaattaggctaaaaataatataattagcctaatacaattatttaaataaggtaaatggaccttcatagttcgggtggtttatgtgagggatggttggattcagtatgtcgtacccactactatggccccctaactcccacacaaggcccaaaggagaggaatttaatcttaattaaataattgttattaattgaataagcttaata

SEQ ID NO: 328696 - DNA, 2066 bp, Cannabis indica
cgatttttgcctgattggatggttaatcaggttatatgttaattttatattccttcctcccttttctagagaagaagtggttgtagtttagtcttttaacaatactttcatattcattatttttttcaagtcataacaaacttagtttaattcaaggctattttgatgttacagatcataagcacgaacaattatttctttgatcacacttagctttggcgtactatttttaaaaatcaatttcgatgctttcatttatagtacttgcaaaaatattttgcaagcagttagtttttctactcgcattagtcttgtgttgttttcaaggtcaggtttttcaacctcgttttgaataactgctaagttcttacatgtattcatcagtttagtcctttgtccatgtttaccatggttgtcatcaaagtttgaatttatattcatgatatggccactgagtaatttcaaagagatactttatgattacttgtaacaaaataattttattaaaatgaattatattttaaatggaatggtagatgaaatacaatagaatcagctactggcaatataggcttaagtactcattgtaccaagtgttattatcagggagttgttaagatgccaatttataaacccttgttcctacaacaactttaaagatataagaaccttcacagttcgggttaaatactcttgctataggatcttgtatattagcaaacacgaatgaaaacactaaagttctcactttaaaaagtctttttcgaacacttttgttgaagtgtctctttatttgatgttggtatgcatcatttataatttgtgaatcagtgcatttttcattgagcgaatccaaggctactctgagtagttcttggttttgttcttggttttagaattcttgcctgtgtgtcacaatgttaacttctactgaaaacatggcttccaagtcgaatgctaatgaaaaaggagtatgtcctattgctatcttttttgttgtccgatgagcctagagtacttgaggtagcccgtctacccattttcccttagttgcatcaagtttcttttttatagtgtcttttaagattttattaacagccttaacttgaccattagcctatgtccttgatactaacgagaagcttttaataatcttattcctctcacaaaattcagtgaacaaatctccatcaaattgagttatgtttctcacactatctttatgggtatttcaaacctaagataatattcttaatcacaaaatccacgaagtttttgaggtgattcaaactaatggtttggcttcagtccatttaataaagaagtcgactgcgacaatcgcatgcttcgcacatccttgccaagtaggtaaagatccaattaaatcaatcccccatattcaaatgggtaaggtgaggtcaccatgcgaagtttagtcggtagtatcctaagtatatgtgaaaaccattagtgtaacaccctattgcctaggcaggctacagtgatttttaaattaatgtgcactcttttattatttatctcataacattattaattactcaactaaaaataaatcaaggaaaaatcctacaaaacactaaaagacaaaacttaaatcctttaagaaaagtctaaattttccttttccttcacacttaaataactattgagtttaggggtaaaatggtccaacactataacttttcccgatcctaatatttcaaatatcacttatgattgacctgttggaattattttaccaggatcttagatttactaacaagtatgttgtttaacatcctaaatatgaacttctaaaacgataataaacacatttaaagtttaggaaaccttacattgggttgcagcggaataatatgtctccttccactcagatctctaacccttgtatcctttctgtcgcagagtatcaccaagatctgagtccgaatgtccttctcttcagtttggattcttcacaatcttccagactatgatttagataccacttgatgtgtgtgggcactactctatcactcaaggttttcgaaaattagaagaagaaa

SEQ ID NO: 328697 - DNA, 962 bp, Cannabis indica
gcagccatacaagtaaaagtcatttagtttaagaaaaagatagtaatcatccaaggaacatgtgttgaataagtaagatattacatatgtgatgtgattacttataatcataacaaagtaagactactacaacaaaatataagcactattaatgttgaaaacacagatacttacatatgtaatatcaaaaagttccaaatcagcatctttgggcctcacaagaccaagagctcgatgaaacaaaattgtatgtagtatgcctgcagtcgatttgaagacaatgtaatgagttaaaaagggaacacaaatgagaaggtattgattcaaaggtggacaattcaaaggtggacatctgaataactttaaagactaagaagacctcatcaacaaagaaaggccactatgcattgtcatatcatctaaacacgatggccaagtttctagaaggtatccaaaatatttgggatgaaaagatcaactaccaaaatgaccccctttttggtttcttatttagatgatagtggtagaaaaatcatttcaagtaaaaataaaatcttggcagttacattcaaatatttctcatcataggacagcacttcccaccatattgatcttaaaagctgttccacttacagaaacttgatgtccttggctaaaggccaatacaataattttaaagccaaataatgtttgagcaagcattatgattaatgattcgaagaaacatttcacagttgaatgaatacataatttaatcccaaatacagagcccgttcctagcacaagtcagttaaaccataccaaagtccaaaaccactctgccttaattaagctctattttgttctaaaccttacaactaagctatgatcaaggatcaaacagcttatgttctaaaagctttgcataaggttttactcctaggatgaattatcaaaagcaattgacctatctaaacaaagca

SEQ ID NO: 328698 - DNA, 667 bp, Cannabis indica
tgggacttggggctgtgctatctgatgctatcggatccgttttgttctcggcagctactcttttggtttgtcattttgaactccttgttgctgaagtgactactttactcgatggtttccgactttgtcttcaaataggttatcatcatgtgaagatattctcggattgttttcgtcttgtagaaagtgtgggttgtaaagaacaagtttttttttagtttggtattgtgctttatgatatttttcgcatgtgggattctttttcttctataatactatcttattgtaagcgaactaacaatgctaatgctcattcacttgcacaactagctatttttcttgagtcattacgtgtttggtagccgaatttgtctaactgtttagcgtgatgtgcgttttttgtttgagtgatttttttagcgatgtgctttataatattgatgatttttttaaaaaaaaaaatatttaaatattgataggggataattcataattaaataaattttttgtaaactaatttatttttgttttaaaaattttttctattcttattttttctaaattcgaaaaataaaaataagttttaggaaagatgttttttgtaaaatattttatttaaaaaggctaattaggatttttacctgaatttttgactatgtactaaatc

SEQ ID NO: 328699 - DNA, 649 bp, Cannabis indica
gaattaaagctaccatttctcaaaaaaaaaaaaaaaatctaccaaatttttcaaagaaaattaaaagtagttgacaccaccaagatatttatcttgtggatgatatagattatgaagctttaaatgaattatgaatataatatgtctatatttaattaatggtattattattagttaatggacatgcaattaataagctataacaataatagcaattagaagtatatatggtggaatgtatatggaggttattcatagccattgacattattattattataagttataaataaatgccatttttatgtgaattttctccatgatgatgatgattatgtagtgttcttttaggaagccccatatgtcattttcatatatgggtggagtcacacacacatcaatgggggggcctcactagccttaattatgtccttcacttaaattcaccttttatatatttttgtagtcatctcatatttatatttatatatatctttattatttatttttatttcaaaaaaatatttatgtgtatatataatgtacgataaatactattttagtactctatattttactaaaaattgctaattaaaccatctattttattaaaggaccaaattaaccctatatttttcaaaatagtaaa

SEQ ID NO: 328700 - DNA, 1096 bp, Cannabis indica
tgtaaccctatctcctcaccctaggcagtactgagtctagaatgttcatacgacaatactatcggccataatattagcctatactcgatactctagtcatactctagtcgtaccgattaacctatactcggtactctagtcatactctagtcgtactgatgtgataacgttaatcagtatatgagtcaaacatacatctatcggtatccaataccactctacgtatattgataccgctatcgatgtaatctaacatgcttaataaacatgtaacaaaacatgtaaacacatatgcatatcattatactaatcttactcatttcaaaatttaggtgtgctggtcaacctgagtggaacaactgctcgacgatttataggcccctaaatcaaaatattcgtaaactgatgagtgactcgctaattcactttttgaggacttaaaatcaaaactaaaagttttcctattaatggataacatggcaatatcctaaataacattaaaataggaaaatctagggtaccctaaaatgcctcaaccagtagatcggatccccaaccacaagaccagttctgtggggtttgcctagggaccaactgaaattttggttcctacaggtcctactgaaccgatcgaccaattcagtgcaggaaccactaaaaccttaactaaccaaattgaccctaaatgattccaaaccttccggagtacctatttacaccacagtaagtaaaatccatgcaataaaaccaaataataccctctgtagcaaaattcaccatgagagagcaaagtttgagctataaagtttaaactttgttcaaacacaataacaacacccaaaactaacttcaatcagctcatataacatcaatttaacttaagaatacccaagcaatacccaacaatatctacagcaacataaaactcaaaatcaagcataaaatctagctttgaacttaagaaaacaaagaagaaggaagctatgatgtttaccttgggttgattaccaaaatcttgctagaataccctgaatcaagctgaagaaatcctaactcctgcaagtttcttgagaacttgagagagagagagagagag

SEQ ID NO: 328701 - DNA, 1165 bp, Cannabis indica
atggtaaattgtcctcctataatttccattacaggaaaccaaaaaaaatatttgagcacattaaaaaatagagttagaatattgcttactgatgctactggagtcaaaatttgaggtacttcgtaggacactattaactgaaagggaaatattaagagataagaggaagagacgagaaagaaatatgagaacggtatcatatactgtattaatagaaaacaataatttttttatgggaattgtataaaccaaccttacttctactatgcacgatgagggatccttcgagaaaaatcgaacaacacctctgcattgaaagaaatcagtttatcaagattttaagcatataattatagacagtaaaatgaacaatcaattaggaatctactacatttgatggcagctcaatttatttgaaatataactttagattaaagcaaaatggtttccattataataactgagataagaaaataaagcaataaaaaaaatctcccacacaaatacaaatgcaggaaagatatggttactgataattcgtacaaacaaacatttattgaatacaaatcatattccaaatcttaatataacctagtttacaaaccatattttcggattaaagggagattgagagagagagagagagagagagattagttgagagaaagcaagagagaaagagaggtaaagagagagacctaaggaggtgggagaggagacctacgccgatgaacgaaatcgcgagcccttcaaagctgaggacgcgcgagcccttcagagtaaaattgcatccactactgtgagctgaggacacctctgttcgaaaatgaagtcggattgggggtaagtgaataataggagaatttgcgtcgttttcccacacttgcaatctttttaccgtcggtttaaaaacgccacacaaagcattcgtgaggccttaaaaacgtcgcgaaatatttgcattttttttaattttttggcttttaccgtcggttgggtaattagtgagagatatggaaccgacgcaatttatttattttttgtgtcatttttcaaatgacgaatataatgaatatggtactattcacgtcggtcaacacgatgaacagtcgcgttgaccgacgtgaatagtgaattttgtagtagtgctctcattgaactcagt

SEQ ID NO: 328702 - DNA, 838 bp, Cannabis indica
aaactttttaaatgtagaatagatatgtgtttgcacttatagataaaattggatgccatgagtatgtcacaacattttaaactttaataattaagtaaataaagaaatgaaatataaacactatattatatatatcaactacgtacttttatcttaagtgggaattatttttttaatcggtaaaaatactaataaaaaacaataacatagaattaatcggttaaatttaaatatttgttattgatttgatatttttatctatatatatttatagtcaattagcatgatttttgttcccaattttatcatgtattaaattatattctttaaatttttaagactgttaaaagtaacatggatgaaagtttaaaagacatgatgtggtatactgaaagttttaggggcataattttataaatatcaaagtctgatgagcataatttaatacatggacaattactaaattaaaaaaattaaatgaatttagacaaaaattcttcaagaatctattgagttgaataaaaatttttaaaaatttttaacaatcaagaaaaattaaggggacataatatatatatatatataaataacttaatatataaagatatatatattattaaatattcagttatattctactatacgttgtcatgagtactatatatatatatagtcttacaacaatgaatatttatatgatatatagcgagcttattttgaaatttagaataaatatatataataacaatgaattcagaaggatatcatttcagtcatccacatcatagattttatctatataattggtcatatacatattattggcgttgttgcttgt

SEQ ID NO: 328703 - DNA, 549 bp, Cannabis indica
tatctccaaatggtattttttgttgctacagtgttagtggatatatgcttcgaaagtcaacattgagtgtataatgttgaggtaatatttgctacaaaagttatatatagcatcaaatgttgcatttgattccgataaataagaatgccaataagaatataatagtaatataaataaaatggaacaaaatataaagtccattaaaaaatgataaaaaaattatcaaattttcttatctataacttgaaatatataaaaaaacttttaatggtaagaacatcaaggaaaagtaaggctagagttcagtttttattatcaccatattcaaaacaagaaacaatataaagagcttacattggaaataaacatatactaatgtatatgatattattattggaattgagataatgaaatgacaacgtgtaataaattattaaagtatttaaattattatattttttagttattcaagtatttaaattattattttagtggagaaagtatttaaattattatatttatagtatttaaatatttaaattatttttt

SEQ ID NO: 328704 - DNA, 786 bp, Cannabis indica
atttaggtgagaaaaattgagaagataaaattgatatttaagagtatagtgtgggagaaaatatggattttttgtattttctaagtgattttaggatgtcaataattcaactaacaactcattttttccttcttttttcttcagcaggtgccacatggcgacggttggatggctggagcgctaacagttggcgacctgtcatcgtctggttcgttggtggagttaatgaggcgggcctgcattgcacgtatggcggaaggaggagggggaccagctgcttcgttggtcccgtgcggaaggaggttggcaggcttcagttgctggtgtcgaggtgaaggacacgcactatcctccgccgcacgatcagtagacggatggtccagatgggctattgactttgaccgagagttggatttgcataaaggctcatcatattttctttttgaaattgtattttagtcccatttcttcaatatttctccaatttaatcctaaccttcaccaccaattacacctaaaaatatataaaataaattagaaactaaaataaaaattttaaataaataacacataacatattatcacaaaataattataaaaacatataataaactataaaataaacataaagctaataaattcaaaacttactaaattaattaaaaacttaaaaactaagtaaactttagttaaagaaatgtgaaaataactctaattcctagagttatcacaactccaaacttaaaattttgctagtcctcaagcaaaagaaaaattaaaacacac

SEQ ID NO: 328705 - DNA, 1354 bp, Cannabis indica
ctacagaaataacttatgttaacatcttgattgatatataccactcacatatatctaagaataattacataagctcagccactattatttgtaaaaaaattacatttttacgtttacagaatattttttttatatatttttacagtttttcatagaaacaataacgaaaacaacaaaaaaatcacataaaaataacataaaaataacatacaaaacaacaacaaaaaataacataacaaataaacaaaaattaacaagtgtacaacaaaaaaagaccttattttctgtaaataaaataaaaaaaaaaatcgtaaaaatatttaaaattccgtgaaattgtatttttgtgtatttgtgaaataatgtttaatttttttttaaccaaatacaacttttacatatatggagagcgataagacattttgaatagtcaatagtagcaatttgttgatctattttaatttaatttttgtgaattgagtacatttatagtttgtctataaaaaggaggaagatgtgtaggagctaataacatacatacatataccaaaataacaagatgaagtcttttcttataatactaattacaattttgctgtcatctgttctcttcttcccatctccattggtccatgctcgacaattagtagagaaaggtgagaaaataataacttcttcacttacttattagttatacttatatatatacatcgattttaattaattaatatctatatcccttccttatattaaattaataatggtacaggttcagtaggtggaggagcgaaagatcctagcaaaccagcttgtaggatcggccccggcggccgctacgtatgcaacccagcgccgccttgtaataacccttacaagcgaaattgcataaagaactaatgaatatcccaacgtggtcgagtcgagacacttaattatatgcttggactttttttatttatatgttcaataattattaagttataaacctatatataataagaggaacatatatatatatatatatatgtaagggcttgaaattgtggggaatatgtatatgtttcggcgggtctcgatcgtctatataatatgatcatgattattggtaagtgtacgttattgatgtgttaattaagatcatcaattatatagtaagttttcttttgatatatataatatatattttctgatttgttaaaggagattgtgtataaaatatagttttcaaagtaaaaatgtagtttataccttagaacttttatccaagaatatatttggaaccaaataaattatattctaattgagaggttataactaaatagagttacaccagaaaaaaattaaaaaaccaaaa

SEQ ID NO: 328706 - DNA, 783 bp, Cannabis indica
aaaaaagctggtcaggtgctttatgtgaatgctgatgaaggtttttctgcaccccggagtaaggcactcaaagttttgattagattaaatgttaatcaacctttgtttgctggatgctatatcggtctggaatcgggctcccaaaggtggattcagttcaaatatgagaagatgggcatcttttgttataactgcggtgtaatgggacatcaaagaagagggtgcactctttcttctccgatcacggtggcgagcattagcggggttcctttcccgatgtatgggccgtggatatcgctggagtcgacttatctagacgtcttctcgggagctttcaccttcaatccgtcgtcgactccagtgaaccgtgcgaaatcgactgctcgattgtcgaaccaggccgtgaaatcgatctctgctactcctggaagccagccgttggccgtgaccactggttcgaagggccttgggaggaagacgtctgctcgaatgtcgaaccaggctgtgaaggtgacggctcgtggaggactggttcgtggtcagatgcgcagaaaggtctgggtgcctaaagcaacctctgcttcacgcacgccaggtttttccttaaatggtaaccaaaaacgctttggaaatcaagagggtggaaaggaggttgtaccttttcctgggtttaattcaaaatttgaaaaccgtgaaatgaacattgggaaaggcaaagggcttcggtttgggtgtagcaaagttaatgttgggccagctttttcttgttctgggccggtttcc

SEQ ID NO: 328707 - DNA, 653 bp, Cannabis indica
aaaaatcatattgtaaaaaattgacagtagtatataatacgatacggtttgaaccacaattattaagttcaaaattgcaaactgcattacaccgcgtggtttgaaaaaattacaaatcgtaactgcactgtaaaggattttaaaccgtattttttatgcagtatagtgcagtgcgggcggtttatgcaatttgataaacacccttattctgttctcttcataattcaaagacaaatgctaaaagacattgatttttctcaacattatactgttataagtataactaaatatcatatctcacgtagcttaagaaaatgatttttaagtaatatcaccgatcaatagagtatcacttataaaaaaaaatactaaatactactgttaccaataacaactcttattcatatgatatcacttttctttgtcttgaataattaatgaccacaaaaccataatagtaccaagaagttgcgaggaaatttttcagttgcgtctttcgtctacggtggcactcatatcaaattaatatgaaaaatgttaagaggcatgttaaggtgttcaatactacaagaagttgtgtatcgttattagtaccctttaacattgaatttcacacaaattgatttaataaaaaatatagaaaatcgttaact

SEQ ID NO: 328708 - DNA, 1074 bp, Cannabis indica
ccacccccagagtaaccaccatctcaaatatgttatgaattggtgtagatataaggattctaacactacaagaaaaggtacttttgtcggcgcttaaactcgccaacaaaagtaagagtaactcaccggcgaagctttaccggtgacatttctcgccgacaaaagttaccggcaatggctcgtcggcgtatgaccttttgccagcgacatgacgaattgcatcggcaaaagtacttacgccggtgcatttgtttggtggtataagggcttcgccggcaatagctccgtcggctgatgtgtccctgacgacgttttgccgtcgagttaagtcgctggcaaaacttttggcggggattaggcgccaaattggcatttggctcctaatttttgttagcgagtttagtcgccggcaaaactaaattaagaaaataacaaaaataaaaaaaattatctatgccgggggcagcaaaagaatagattaaaattaattattaataaaataatacttttgtcagcgcgtaacaaaagttttttttttaaaaaaaataaatttataaattaattttgaaattaagtttaaattaaaaatcgaaataatactaaatataatatcaaatatattataaaaccaacatttctaatgttattacaaaactatattaaacgtcataaactaagtaaaagtattatgaattcataaacagtaatattatctacactgtaaactaaaaaagacctacaaatcaacagcatcatcgtcgtcatcaccgggaggggcagtctatgaggaggaaccagctgcatggccagaaggctgaaatggtggaatcggaggcagatccggcatgttaaatcctggaacagcgttggccaattggatcatttgttgttggaacgcactcatgatctgattctgagtcatcatcatctgttgttgccactcgttccgtgcctcttgttcttccacccttcgcttcagtacctcatattccttttgagtgacactgggctgcctagatgcacctggcttaggagttgatctttttgcccccgtcttaagtcttggcaacgggc

SEQ ID NO: 328709 - DNA, 364 bp, Cannabis indica
cacccgtagttatattttttttccttcaaaatttataacaaaaggtattttccttccaattgaagtagtgaattattattattattgattacaacttatcacgacactagactaattataatttaattaaagttgttcacttattttgtatattttaatttgatttcattatacataaccaaaaagatataatttggagttcttaccttgctttttaataaattcattatttaattcttattaattaattcattttagtttttcaaatttaattaaaacaaaactttctttgaactgatattattaaaataaatttagttaaaagttggagattttctaccattaaaaggtggattggtttgtg

SEQ ID NO: 328710 - DNA, 785 bp, Cannabis indica
taataataataataatatacaattaacataattatatttaattatgtagtctcacttttagtaattattaattgtagagtaagaaattaaattaatttgattatcgattaggttatgtttggttttcttaaatgagtttgggttaaaaatatatacttttatatttattacatacacattgtattctgttagttaaatagaatatagatacgttaaattgctcttatatttgttataaatacatgttaataagttaataaattaaacatcaagcataattttttatataaacatggtaaagtagttagatcatatcaacctatttataaaggggttgaatttaaattttagtttttgacacgattaatacattaatagttatgtttgagtttgagagttgttcgtaacagctaatcttgacacgataataatacgaattgctactcctatctactaaaaggtctaattttgagctaaagcgggctaggtccgtgcttagaaatcatccaataatactcacactccaccttagatatatatcactcaaaagaattttttttttgtgcccgttattactcaaggtcggacctatctattaacacctaatataaaataggatttttacactatatactgaaatttttaatttttgtttactttcaaattgtggggtagaatttttttcaaaaatattgtgtaagttttatattatactgtgtacacagttattttttagttattccactgtagttttaattgttttattttgttattttacggttgtt

SEQ ID NO: 328711 - DNA, 1119 bp, Cannabis indica
gctcacggtctctccctttgcctacactaggttataagtctgtcactaattttttgaatttgcttgttcttgcagttaatagtcatgacactcatttcaataagtttagtattatacttaatgatattgctcaagtttggaagtctttactagtatttctttatctcattgtaaaaggtgtaagaatcttattgctcattctttagctaagagccaatgactcttggtctagatgaatcacgtgtctggtggtcgggccttcttacggatatagttgttcaagtttttaagttttttgtactcgacttttatttggctttgtgactcttaatggaattatttcatttcaaaaataaaattaatatcaaatttattatttttgtttctttattaaaaattaataattatattgattattatatgataactctgatgattaaatttatgcgataagtggtcatatgcatagcgtatcataggctaataatgcatgccaaattcttgttgatcacgatgcttttacatcgattaagttgctctttgatgtacttatttttttcaattcgatagagttaaccaaactctatcgaactctctcaatttgatagagttaattaagagaattctcacatttgtatccatcaaaaaaatattaattgttttaagcaaacaaatcaattttcttaagaaaaaattattcaaaaaattgactatatatatgataaaaatattgaagatgatgatctagtatatcttttggtatttaagccaaataataattaggaagaaagaaaaccatagtactagtccttgtactctagctagtagctactacgagtaattcgtccttaattaaactccaatcatttacataattaaaaggttttttttagggtttcttgtttgtcttttaaaaaaaaatggaagaatagaaatcaacaaaatcataagaaaatggtaaaagaaatcacatctgttcagtattttttaccctttaacctatttaccaattaccttaaccattacaccaaggttactattatgtctataaatatcatcttttaatacaaatatatgttgtaactaattaaaatacatatacatttttttctcgatttt

SEQ ID NO: 328712 - DNA, 564 bp, Cannabis indica
cacttacttacacgggaacttaatatgctcctatatatcaatatgctaaaatacttcctatcgtgtttttctaatcatgtataataattaaaattactaaaacacgtaaaagtttactgaaccatgagtcgagcttaactttaatattgataatcttcggagaacaacttggtagctctaacaccaaattgtaatgccctactagtttaggcacgctacaacgttttcctaactactgtgcactcttttactaatcaaagggtttattgaaaaatatatttaattatattttcttaaataaacttaacctttaataattaaacataatttatataatttggagatcccattaaaagcttacaattattttcaaagtatgctttatagaaaatttgttgcccaactactaacaaaatgttagcctaaattgtcccaaagactctaacactccaggtataacagttttgatttgtacaatcttcatgcagctctaaactcattttcagttcagttctgactcttaccagcacatgcaaggcggacgtcgtccccctataaagacgt

SEQ ID NO: 328713 - DNA, 843 bp, Cannabis indica
cgttttttgttcgtttctataaacataaaaagtaaaaaataaaaaaaaaaaaaaaaaaaaacttttgtttttgtcttttgtgttgatttttccattgaaaaagtgtatttcggattttggactttttcaaacatatgtaagtgaaattaggcagaaataagggatcatgtcttgtcttgctttcttaaggatttgggtccttttaaaccttttttaagtgatcactaatttactatattaggagtttttacaccatgtactaaatttttaatactttttactttttttttagtgtaggatagattttttttcaaaaatactgtatttgttatacagtatactgtgttaagtttttacggttgttccacagttatttgttgttctactgttatttcaattattttagtttgttgttttacggatgttttataaaaagagtatttttgtaaaaaaattcgtgtaacagtaaaattgtaaacttttacttgaaatttaatatttttgtaaaagccctataatataggccttgaagaaaaaaaattgagaaattccttttttgtttacttattcatttatttatagttaatttaattattaaaaaaaattacaataataattataatcaagggtcgtcttaggttttcaattagacttatcccttcaaatagcgagattttttgtatgcaaataatttacttcttactaattaaatttagcgtatgttcttctttagattttttatttcatttcaatagtataagagtattcattattttttggggtatttacataaatataaaaaaaataaaactaatttacaaaaatatggtaaggaaacttaat

SEQ ID NO: 328714 - DNA, 723 bp, Cannabis indica
ctcccaaatggcctcagtttccatctaagcctctatcccgggagcaatgggtgcctcttctcagaccatgaacacagcctatgtcgagacattgtagcaattccttggactttttgatcacttttaactgtgccaatacatccattatcgcagaggaacttcatgcatagaagcttgatggaagtaactgccctaaaatctactaggggtggtcgtcctagtattgttttgtatgttgttaggtaatccaccaacacaaaagtagagtgcttaaaagcacttgtattgttttctcctttaagagtgatcaacaactaaatgtttcccataggcaaccttacaactaaatggggcaaggagtcaaggcaactttcgtgagccctattgtctagaatgaaaatttcaaaatgatgtttactgagatcccattgtccaccaggactctagaaacccgtttattggtgatctaagcttcgattactaagggattgttgttgtggaaacatacatttctggcatcatcctccgtgaaggtgatgggcaggcttatcattctaggacgttgtgctagagactgcaccaacgcacacatttccccttattctacttctcttaaatacctttttcgtgagttccttgtacttcctgcaagatgcggtccacctaagattctggcaacatgtccatccactacagtcagagtgatgttgggttttatgccct

SEQ ID NO: 328715 - DNA, 775 bp, Cannabis indica
aagttgagttttgcattgagctttaccacgaagtatgcagaatcggtcttgttccaaatatcaatacttacaagctattaattccggctgtttcaaaatttggtaaaattgatgatgctttaagcttcttcataatttgattgaagatgggcataggccatttccaagcttgtatgctcccataattaaaggaatgtgcaggagtggatagtgagagagagagagagagagtatttaggttaaaaaattgattttctagttaattcctaaggtatatgtatatgtgataagttatataaagcttaactattaatttggcaaattattaatttacccctactcacatacccacataaacttaaacttaaaggtaaatgaatcaatttcctaaataactcacataacacataatttttaactatctataatattctcagtacctctaaaatattaatttatacaaatgttatattttagccaattcattgagtctccactgttgccaaacataaaagtactaattcacatataatgcatatatggctgttaactcaaaaaaaatttcctggtgacgtggacatcaatgtttgatacgtgacaagaaggatgacatcacggagttgagtagactcgagtcatagcagtcgaccaaggaggggaccctagcgctacgctcaggttgactttaggagctccaaaatgaaagttcagacttcaatagcttgaatctaactcactatcttttagtattatgtaccatgaggacatggagcaa

SEQ ID NO: 328716 - DNA, 1903 bp, Cannabis indica
cggcatttttatagtctttatcactccaacatggagagttttgactagcataacaaagcaacaatcattctaaaggactacttagagctgtcaattatttcaatacgaacttacgaaacaccaacacagaaattctgataatttgctctatctaaaaattaacattcaaagtttgggtagatagcttctcactctataaaggaggcaatagtatgatacatttcaagctaccatcaaggtgtgactaatatcaaggaaaagggaaagtaccaaggcaacataaaattttcaaatgttcagctctttgcaacattgctctccaactctttctttagctgttgtgaaaagtcatcattgacatcatcatcatcccagtcatcttcccattgctgtgtggtttcttttccttcttctttcacatcccactctgtcaacatatacataaataggtaaagaatataatgaagacataagaatgaaccatgaagaaacaccaagaaagcaaacaggggaagcacattgataacaatatgtaaaaactacatacaaaaatttgattggtaggtatctctaatcaatatgtttagaattaatatctactgggaaagaagccaatgcagtcttcaagcttaaatctcattaaaacctaattacccagtctaagcatttgtcaaaacttgatttcaaattctcgcaatagtgtagttgttcgaagagaaaagttaatgaattagtagatctgtagatgaatttggggtatgttagtttttggtaggaacgactttaatagggtgaaatggaattcaaatcagtagttttgagtcaaaagtttatcaatccaaatcgtagagttcaggagagaaacattatactcaagtaatagaaatgtcactctccaaacaaaaaacccgtttttcctctttattttcttacattatcagctaatttcaagccttctactaccatacaacaaaagaaaagttcgattgttcctctcccttttccatccccaactaatgcagatgtacctcctttcatccagtctttcttcccacagaacaaacatcaacaaatactatccttttccctgccacagagtatctacacctaaatgattaaacatcgaaacaccttaaaagaatccctcaaaaccttcatgttccactgggacacttccacataaaatactctctttctaccttagaaagattaaacctgataccataaccaatctccataaacagattctttctagaaatacagtaatctgatatgaaaaacctcacacgaaaaaaacccaattagcccatgccatgaagaacccattcctaaaatcaacttagggaataaaaaatccctaaaatcatcaataataaaattccatatccatttttaggctaccgacgatagcaatttctaggtcacctgacttatacaactagaagcacaaaagttttagtacgattctaacatgatcagaaaagaaaaagcacataagaatcaaagaataccttcgttgatctcaaattcttcaaactcgtcatcatcttcaaacaaatcgaccttggggtcttccgatgctacctttggatccttctccattgttcacgaaccctgcgattgttaaccgagtaaacactgaagcaaacgaaatacaaatagtgtcaaactgtaggcagtattttggggaagatttcaaattaaaaaccctaacctgtgtgtgttgagagtagtctctggtgaaaagtgctctgattcttttctttctctctttttctctttttattatttgagattcgttgcttgttcgcgaagacaccaaagttgttgtcgttgccctttatgtcgtttacctcatataatgcacatcttaactgtcgttggttttttattttattttatt

SEQ ID NO: 328717 - DNA, 756 bp, Cannabis indica
atttgaattagttataaatttttgaaaatcgggaaaaatcaaggaggtgatcacccttccacgcgcgcggaaaggctactggcagcctcccagcaccgtggaaacacagcaaatcacctcccttccgcgcgggacccgctagacatcaaaaattagccatctagacatcaaaaattagccatcaccactaaaagctaattttcaccattagatcatcatcaatggtgggaagtactttatttataatttttctcctatatttttaggcctccttcacctataaaacgaaagctcccttagctcatctttcgcattcaaaaaattatccataagattagagcttctctctctagaattcgaagcttctgatacttaaacacttgctgtaattaccatttcgtgagaaataaaaactcggagtagacatagccctattactatcgcgatatagggggtgaagtattataaatcttatgtgtctctctcgttgattacttaacaacttattaatcatctcgagaatttagtgagttgatgttggccatttttcaacgtcaacactacccattaagtgtgcaccaatctctctatatatcaattctaatctattaaaattgtgcttttcgttgatatagctattataaaacactttggctctatatactatgtgaaatctactagtaatttttttggccaatataatgttaaatgtgcgtgttcatatgaatgaatgtatatatggaagaggtttcaatg

SEQ ID NO: 328718 - DNA, 1462 bp, Cannabis indica
tccacacattagcaatgtaggactctctaacagttactattgaagtagagatactttattccatagcaatgatagggttaaatgtgcccgaatattgtagggccagtataggtccgagttatgtatgtaatggtcatgatatgataaataatatgatatgattgtgatatgcttatttcatagtatcatagttattctacgagtatgatataagagttacgatctttacatatgaaattatgattttggattagtattaatgcatgtgatataattttccatgtataaaattatttatttattgttatcaattaaagtatgatgttgatgaaatacttaataaattaagaatattgtatatagtttgtgttgttataaatttaaaacatgtatatggtgtattgaatgttaatgtgtgttaaaatattttcttagtgtgtttttagctcacttctcttaccttttccttatagacaataaacagaaaacattgaatataagcttgataagacaaaaacatcaaaggtaccacttacgtactaatataatattctttcaaaaaaaagtgtgttgcatgacaagggtagcaaagtcaaggtgagcccactaaatttgatctatgaagtggactcaaaacaaattgtgacagttgaaatttgaaaagaaattgtctctaattgtttaagtcagtccgactctttgtatatattctttattggatactcactaataagttgattattctctaaggtgtgattgttttgtgacccataaagaagagtaactactaaattacacctagtaagaattcatatcttacagttttctaatgctgcaacacatgcaataagagtttagtactacagaaacactttagctaattaattaattatttggtcactctaaaatgttctatatattataatcagcaaaacttggcatagaagacttttaatgcttaatatcataactcataatactcctggcgctatagcataagtaattatgatgttgagacccactctaaaaaaacaaagaaataatcaacatcactattgcctcaacaaataaagtttaaacaaaaaccgagatacaacaaattttgaacttagaaacaacaaaatcatatctgttacttaaaatatacaatgggtcataagaaaagaaaatgtataattttaaaaaaagattttttttagcccttaagctaaatgggtcttaagaacacacttaacctgctattgaaggtcgggttacttaactaacttgtaacgtctccgcttcaagctttcattgggcccttacacctacggaatgaataactcttatacacgagtacgtcactctgactgcttcatgtaatgaagattgaccctacagaccaacacgagaggaggtcacccattttgaaatcactccaagtcaagcatgcttaactgtggagttctttcgtgatgggcta

SEQ ID NO: 328719 - DNA, 764 bp, Cannabis indica
tatatatatatatattactataagacattacccttttttctattaatttttttttaaaatatttagtcatgatttcacaatttattattggattatatgtggtgtggatcttaaggtatgtgaatcgatctaccataatatttagctaaggtgtaggcaacaacattaaaaaatctaggacagtgcttaaaacaaacatcatttaagctataattaatatgactaatgtagataagacaagccccaatgaagaatttaaaagcaacttattgtgaagcttctgaacaatactcaaacagtccagctcaaaaatgatgtgatcatacccaaaaagatggcattgaaccatagcttgtcgaagagctaaagcctctgccacttctgggtcaaaataaccttccagacgccaaacagctaaagcaagaatagttccacaatggtcacgaacaaccataccaagaccagaacaagatctagatgcatctatggctacatcaatgtcaactttcagacaactttttcgggggaatgcccatttactaatcatcgacccaagaaaagaggtaactgccgtgcccaataaatttttgttcccaggtgattgtcgaccattctggaagctccaaaaataatcacaagtccaattgacaaccaaatcagtagtcaaagaccattttgatacttaaatgcaaggaaagggactccaaattggaaggtgtctagcatattttatgttaggttttatgccctaaataaaactcttt

SEQ ID NO: 328720 - DNA, 968 bp, Cannabis indica
caaatatatttgtatgatttagaaactacccaaacaaagaaaaaattaccaaagatacaaccttcttaaatttagtaattttgaaaaatatttgatagaaaaagatgatggtatgtgttggaatgtagaagtatggttgagaaaataagatatggcgaggtgtatggtaagtacagtcggcccaagcaatttgagggtcttgggcgaaaaaattaaaattaagtcttttattaaaaaaattatcaatcaatacttcataaatttaatgtttttttttttaaaaagattacttcataaattctaaattagataaaaaatttaaaatctgtattgagaccacaagattttatcaggtttgtttttgtttttgttttttgtaagtgcttagtgcatattttttcttatgaatatttactatgtaactgaacattatcaaaaaaaaatatatatttattatattatatacttatatataaaggaatgataaaagattggctttttaatataggaggctttgtgcaacagcccaagttgtgatcatatgcttgggtcaatcctgatggtaagatatatgacgattatatctaatcacatctcgggttttgtaatattaaatttggcacttttgactctattttctttgtattacgatcgaatactagtgaggtacatcgtaagataaggttcaatctcgaaaccagttgacaataaatatgaaataactcgtacatattacatatacactacaaaaaaatgttaattttagtaatcattttttagtcacaacaaaatttttttgtgattaatgctgtacttatagctatacacacttactgggctcagattatgattctacctaagaaattgctcaaggatattgaggccatttgcagatcatacttatggaagggtactcacacaatgatgggggctggtttggtggcatgggagcatgtatgcacatccaa

SEQ ID NO: 328721 - DNA, 1012 bp, Cannabis indica
aaaattaagcataaaaacttaaattttctaaatattacctattcatgggtaatacccaattaagagtgcacccaactataaatatactataaaacaactaagaacacaatttattgttttattgaagagatagttttgtaaataaaaagttcaaaaataaaaatatttctgtactgacgtatttttgtatttttttcttaaattttggtctcttatgtaaatttttcaaaattttattgtggactactaagagtaatgcaccacacttgtctgtttaggcatcagaaagaatttcttagtctatgttttctatgatcgacgttataattatttaagacattctgaaaagttttgagaaatttagaataacttacaatatagcaagtacggttcaaatcgtctatttcacatatgtataaaataaaatagacacgagtgttacaaaccgttagaactttgttttcaatgcattaaattattttaaatttttcaaaaaatttacaaaatatcttaactacaatttatattatcatataaaaaaataaaattaaaacttcttatattaaaaactcaaaaaaatgcatcagtacatcataaaattttccaataaaatttgtacccaaaactatggcttttggaaagatttgtatatatcgtatagttttcttattgcaagaatttattatgaactataaaaatcatataaaataaatctcctttcaaaattacaattatactaatttctttaatcaatttgttaatgtattcttaacttaacattaatctactatagtttcaggagtgcagactgttagggtttataaaacactcaagaaatatataaatcacagatctaaatatattcctaaaagtgctttaatatagaaaaccctaaatcataaatccataaagtctttgctaaattaaagaagaagaagataaaagatgagcggaagcactaacctaaagccattgttggagattgcagagaaggttttgatcttccaagaat

SEQ ID NO: 328722 - DNA, 959 bp, Cannabis indica
taaaaaatcacccatgaatttctcataaaccaagaattcaattatatataaaccaagaattttagttatataggcacactttatatagaatagatattggtgaaaaataatgttgattataaaatgataaagaaataattaaaccaaaattttgtaattaaaaaaaaattaaattaaaattcagcatttcttttgacagagcattatccgcttttgttgggcatcttaaagtcccccttagcactaatctattttgtaactttattaattattgtatttataatattgctaaaagagttctctcaattagaaaaataataataatcaaaaaaaagaagaatgagatgaagaagaagaatatcgctaagagagtggtgtacaacacctttcgattttaaatatttttattttagataaaatatttagaacaatgacttgtatttataatttgttaacaataatattttacaatattatgtctttatcatcacacatatatttttatacacataatgatctggaaaaagaataaactatggagagaaaaataatcaccgagaatatattagaaaaagatccttcaaatttccccacatagtacctgaaaaaatgtcgaaagtcagaagattataaatttatgacgaattatggtctacaaatgttcaaaaataaagtggagtcagtcactttaaacttagctgatcataattaaaagttagaagtcaaaaggaaaattcaatgttaataagtgtacctaataaataatatataaatatatatttgtaagtgtacctaagaatatgattgtacataatttcatatatatatatactaactactagcgaggcacgtatactaaattttatgttagttcttttttatgttatttgaaagtgatacaattaaaaattaaagaaaaaatattattagttattaggtgagattattattatgtgtat

SEQ ID NO: 328723 - DNA, 2027 bp, Cannabis indica
taaaaatgattaatctgattaaaacttttctctcgaatattatagaattgttcttgctcatgtgttgagaatctaacaagaatttcatatacattttatcctactagcccacactagtcattgtgtgcggtggaagatttgaaagatcaaggtgtgagtttgacgtcaccattccaaggatacaacatacgaaaatactcaaggataccctgataggcttcgagaggtaaattattttttcatctattttactttcaaatttaatgtatgtacatatggtgatctttgggatatggtatgatgataatcaaaaaaatttattttactgcgtacctgatttagtaccataaaactaacagatcttccttagaaccttatctccaaaaattcaatatgatcgcattgtgagcctttgcaagaatctttttcttgtcattctcaaacatacaattaggaagagaattttctccaaatagaacctcatacaatcattggtgaaacaacatggccttcatcttcattctccacaatccaaatcatttgaactattaaacttttccatatcgtatttggcggcaaccatgattatgaaccttgctctgataccagtttgttgtgaaccaatcaatgacttacgatgcaagtatactggatcaacaaacacgtaattaagaacaatactatcaaagaattacaataaccaaatagcgaattaaagcagtaaatcaaagtgaagataacaccaaggtttaacgagttcgagccatgtgcaatgctctacatctcagttggaacaacaacaaccatatctttattgatatctgtttacaaggctacaagaatcctctcatactgttatagagattacaagacgaactttctctctctagtaaggactttctctctaaccttacacaatcatgattttttactcaacctttcaatgatctgatatacatggattacaaaggcgataactatatttaggtttgtgtagttgctaaaattagcttcgattctattgtagctaattaatgatgctttaaagtctcaaagtcagctccagttagggctgttcgcggtgcgggtggtgcaggttctgaccttttttcaaactaacatgcacatgcagttttccaattttctaaaccgcacccacatcgcgaaactaaaaaattgtcaaatctacaccgtaaaaaataatacgatgcggtgcggtttctgcgatttggactatcaccaaataattaactatcacaaatataacaaagcttgagcaatacctacaaaaataaataccataaggcttgaaaataaatatgatttttttaagtttcaacattacaataattagtgggctttggactgggccttcacatattggacctaaataaatataaaaattgatatttttataatatgcggtgcggtacggtttgaatcgcatattaacaattcaaaaccgtaccacaccatgcagtttaagaaaaattctaactgtgatcgcaccgtaaaaaatttcaaattacatttttttgcaatgcggtgcggtacgggcagttagagcagtttgatgaacaacccttgttccagcaacatattccacgtcagcttcagtaacgcgctttcaagagtcaattcggacgagactatctgaatgaatacagtactccagatggacgttgaagacaacaagctatctggaagtacgtctccgagctcataataagctatccgacaagactttctttatggaggacaagctatctgaaaggaccatcgagactggccacaacttttcgaacaaagctttctagatggacaccaaatttcccctaacttctttccaaaataataactaccatcccgaatgacaaaatttataactataatcaacaagagccatataaaatatgcaatggtacttttctatatatagagaagcaatattattcttttgaaaatattttaataatatataaatagtattttattcttgttttgttatgtgttatatatatatatat

SEQ ID NO: 328724 - DNA, 919 bp, Cannabis indica
aataattaaattaagttatatatatttttagtatttcataatagtatattgtaacaaaaataaataaataaattaaatcattaaatataaacaacaatatttgatatattgtatcactaaaaattaatataccgtagtaataaaattatataccgcaaaaaaattataacaatactaaattaatactcaaaaagtctatatatcatgctaacaaaattctatatacaactattaaaatatgtatacataccaaaaaatttatacataatcattatatataataaaatagaaactaaatattatcttaaataaattatatactatacacaacaaaaactatatatcatacaacaaaatatgtatacgtacaataaaaaataatataatattattaaaaaattgtatataccatattttaaaaattaaatagaaccataaaataattataccatacttacaaaattatatatcacctttagatatgttattctatttttactcacttgatgaccaacttttggacatcatatggccggtcagcctttggcctggcaggctttggttcgcagctatcatccgtggacatcatgtcaaactgtaacgtcctatcccataggaacgccacgtgtgtgattttgtaaactagtttaatactaattgttatccaagtttttcttaattagacacgtggcacgactagagtggggactcagtttctacataaggcatctgagggaatcaaaagaaatgactctcggatccaaagggtagtaagaggaaatggcttccgggagcagcatccttcactaaggaacccgaaaagcggtacaagttccagatacgttagatacgtcagctccttacaaaatagcgctccatggacggttatacctttttctgacacaagatcagatattgt

SEQ ID NO: 328725 - DNA, 499 bp, Cannabis indica
agtgattctaatcactttgtcaaaaaaaaaaaaatatcttcaacatttccttaaatttatactatctatatttctaacaatatcaatattttacactcaaaaaaaatatatatcaatattttcttccttaagcgctacaaagtggtgcctaacaaatggttagtagtattttataaaaaatttattacattaaattataaaatttaaaatttaattacactaaatagtaataaaatatgtcctttttagcatttcttttctcattttgaattctttttagtgagatttatgtatggcaactgttttgaaaatatatgtacgctctcaaaaacacaacataattatcaaaattttatagggtccatttagtacgccgcattataccatattataatgtatagtattatattgaatcgtattttatacaatatttttatataaaactatatattttattaacagcacttaaatatataatattttagtataaattaaagtt

SEQ ID NO: 328726 - DNA, 601 bp, Cannabis indica
agagagagagagagagataaaacgtgtattattatattacaatgtcatgtctgcaaagattctaattctcaggaaaatgatgaaaatcattattagacttgaatttcacatgtttaatgcaatgaaacttaacactatctctattgacaggagaccaatggaatcaacagcacacttgctcaacaatttcaaagtatttgaaaacataaccagctctatcatgagatatccacatatcttgtctcatttgaaactatgctgatctctgaataaaatgctcattgcttgtctctcgaaaaggatgcattaaaaaaatattaaatgctaattgtaaggtatttaaagcctcttccataacaagatccggaaatggtggttgggagacacagcatcagcagcatccccaatatataatatgtttacatcaaaaccactatcaagttagccttactgtacatgtgcgtggggaggatgagattccttctgtctcccttatggcttatagattatataaatagagggtagatgccaatgaatatcaatcaaattttagatcaacattcaacaactctcaagtttcaatctcttctccatcttttta

SEQ ID NO: 328727 - DNA, 726 bp, Cannabis indica
aatttttatgtagtagcaggtttactacagtaacttatattcaaactaggatatatcagtctcaatctacatgtaaattttataatcttgtgataaatttaaacatataagaggcattaaataaaaaaatcgtaaatgttatccaaaccacataggtacccgcgtcctatgtctaaatttgtccatatttaactatagcataatagacacttcttagattttgtatcaaaatcataaataattaattagtgatcaagaaattaaaagaaattaagaacgaatgaaaaaaaatacacaaagaaaattggggggaaaattaaataatattaaaaccataataagatgtcaaataatctctattaataccctaaataaaagtctagctactcctatttgctgtggtattttaacacgcaagtatacatatcgttaacaagttatagacttgtagttaaatactttaaaattaaatttttacttctatttggttatattgaaattaagagaaaattaaaattagaaaaaaaataaaataaagaaacaatgaaaataagaagcgagtaaatcaataaggaaattaacgatgattaaaataagttagggctttcgattttaattgcatctattgattatggtttaacatgattctattcatattactaaattctatgcaatagtaggtttacttaggtaatttacagtcttctcagatatataaatctcaat

SEQ ID NO: 328728 - DNA, 804 bp, Cannabis indica
attattatctatatattatgttatgtaatattaagtgacaaatatgaagaaggaatgaaaaaacacttttcaatttcttttctttttgatttgatttctgagtcataatccaaaatgtcactactacttgacaaatcatacatgactcatataccaaatctaacacaattggttaacaattatatttacttattatttatttatttttatgttatatgaattacaatacactttttttttaacatgaaaatgagtacacttttgaaggaagtaaaatacgtttccgctttttttttttaaaaaaacaagtatatagttttcttcttaatataaggaaatcatgtagtgtaaatcttttttctatttcttcagtagcttagacgattttggggattacgttacgtgccaattataggatttttatacctttttttttctattaattgagttattggtatgtacttcgaaaatttatatcccattaaaaatagtaccgctacatcaaattagtctcctaaatgaccaagtataattatttttataaaagactgtggtgagattcgaactttgacctaaacaataaaaaaaaatgttagtgaaaatatcctatcactaaacttcccaagacaatatttatttgtactttttttcaacaagtattttttatatataatttactacatttgttaatttctttttgaaacagactacatttgttaatcaataaatcttatttattaatttctaatattattcttagcttaattagcaatttttccccccgaattttgacatatatcaaat

SEQ ID NO: 328729 - DNA, 1257 bp, Cannabis indica
ataaaataaaaaatattatttaaaaattgaagagaaaatatgttaatataaactaaactctaccttcacttttatatacttcactctcttatcattattaaattcttaatctagttacaataaaatatctcagagacaaaacaaggtcccttataaagtgtcttatatatattaaatataagtaaaatatatttgtacaactaaatatgacaaagtgtcaaaattctaattagttagatattttttaacacacattatttaatttgaattatttttattttttaaaattgttttgatatttatattttcaagattctttagaatagtataattaattgtatgtattcgttaatgtgtatcattaaaagtcatcactatgtatgattaaaaagtcatcacgatttggaaggcgcgcaacgacaaggttcatatgaatgggttgggtagtatttctaattatattgactctatctcttgctgttacgcagattatggctctagtttacttaatcatttgaaggtagctgggtctcctgtttgggttcctcctcctgaagaatggatcaagatcaactgtgatgttagagttggttctgaatccatgtgcgcggtggccattgctagggatcatagggagaccattttgtgggtggctacttctgtgctatgtttttcggaccccttgttggggaagctgcatctgccttgctggccgtggagacagctgtctctcagcaacaccgttgcgtgttagtagaaagtgattcagagacggtaatcaagaccttgacgggcactcatacctgttgggaatttgataactatacacaacaatgtaaaaagctttctacttttatgttaagttgtaatttttattcctagaacttgtaactatttggcccataatgtggccaggtgggcttttgttaactctatttccgaaagggtaaatgtacaatccatacctgttcctatcctttgtaatgaccgagaggtctaactctttattttataaaacgcgtttttcaaaaaaaaaaaaaagatatccttatactatagggacaaaacaagtgttcctactagaaattatatatctatatatataggatttatctaaccactcatttttacctcatgctatgggaaagttttgtggcccaattagaataaatttacttgatgctacatgttatgattgtgcatatgtatgcatgtgattttttattttttttttaaataaaaatttatagctgttgg

SEQ ID NO: 328730 - DNA, 1077 bp, Cannabis indica
gtacatatccatgattaacactcacactcaatcatacaaccgagttcacaagatgtaaaaatgggatacaccttagggtaggctagccataacgaacaagtcaaagagcttgaatagcacaattagcttaaagcttaaccatgtcacaattcatatcaaattaatctagatcaactaagtgatattgactaagaatagatataacgataagattataatatatgttctatctttaatatcagcccagtccaatgtaaacatatagattcgatacaagtatactttactaatgtcctagaaagccatagtgtaagtagaccatatcgtcgattatcacgtcagtataaatttagtgcactaataaatctcaagacttttaaatatttgaatcatataatcataattatttttcactttgatggcaccactataattatgaataattctatgatcttgatttaatagaatttatatagtaaatatataatcacgtaaataaacatgcgaaccaagcaattgataaagtcaaaatatgatgtctgaactttattgatttaaaataatattaaattaaattcaagttttatttagggcataatactcaacatgtatatagtatctgactctatttaaagtgagactttcatgatgaaaatagtagcaatgatctttgcctgggctttttctgggagtgttagaaaaaactcgatttgtagatggttataatcatagtatagtgaagaagagtccagaacacgagaaaaaaaataacaaaaaagaatatgatatggtacctttttattagggtttataccttaaaaaatttataaagacatttttgcttataaatataagttggacatttttatatatgatgttaaattattaataattaatattaaataattcatatataaatttaaaaaaaaaatccttattcatacataaggttgtgatttgtattgtatggagagttaaaatcacttatccatgaataaaacaatcaacaatatgttaaagttatggaatctttaatcaatagttctcagtatggttcactaatgcccgttattcagt

SEQ ID NO: 328731 - DNA, 670 bp, Cannabis indica
agagagagagaggggttggaccaagctagaaaccagaaaataaaatagaactctaatttctaaaattacttttgttgagatttccttaagtggccaaatgaccaaaatgccctcaaggcataaaaatgatatgcacacataatgagggtaatattgtccaaactaacacatataatttcagattatctcacttatcttataaatgccaaaataaaatctcaaaaatgtattttcggccctgaacccgattaggctcaaaatacctggatgtgactattccgctccgacttgttaaaaaacacctgagatagacagaataaacatactatttaataatatagctcataagtacaacatatcatcaaattacgattttacacttctcggatcaaaattaaaaaaatgcccgtggtacactaacggggtcttaaaatacaatttatcaatataattccatatattaaaatataataatataattccacattagtacataattaaactagttagggttgctaatccagtttccaaaaccttagggtattacatctttttacatccatttggtacaagataaaattcatgtggcatgcaaaagctaacaacattcttatgagctcaagtcctgctattcgggcaaaggtttcctcataatcaattccttcttctt

SEQ ID NO: 328732 - DNA, 820 bp, Cannabis indica
tttgaataaaaaatcaattcagggttctatatgtactattttagaaagtacagggtccattttgtcatttaacaaaacacagggtccaattggtaatttttgtaaaacagagggtccaaaatagtatttttaattaatatgtttttttgagtttatatttttttcgggttagttcttactgttaaatcgattatgagacatataaatgaatatgataagatgtacaataattcaacgtactaagtgttagtgtatttataaaatccctcaaaaaaaaaaagtgtatttataaaactctaactacttcttaaacatcaatttcaatacattaaacaaaaataggtatgagttaatttgtcatataaaatattataactacaaatttcatttaggcaatgctattacctttattattatttaaatgtcatttcgtttactctcatttctaatttcgaatacttttgattagaaattataatatatttccttaccaaaaaaaatagtatatatattgactttattttttaatacatgtcaacgttagtgaatgattttttaataataacataccctcataatttatagtatagtctagtgctttgctaattgtttttgaacatagaggagattgaaagttaaatctccatctttacctagactatatatgacacatttatgatacatttatattgatctatgtcctttttttttaattagaaaagagattttttaatttattacagctaaatttgtccattacaatatattgaaggatagtcaaagcacgactctcagcaaaattaataatctgaataagaac

SEQ ID NO: 328733 - DNA, 559 bp, Cannabis indica
ctcaaaccgtaaaatttttttaaaaaaaaagttaaaaaaatagtatatagggtaatttccttaaagattatgtttaaaaaacaactatttgatgaaaaaaaattgatataataatggtacatgtgccaaccatgtgttgtgcagagtattgataagggttcgaatcctagcatagactatcttaagggagattatgcttagtttttttggaagacttgcttgttgtgatagtatctcattcgattttttttcattaaaaatgtatataatcgtacatgtgccaaaaattaatagtggacgggtagatttattttgaagggattgccaaacaattttttttaatgagaaatgttaaaggcacatacagtgtttaatactattgtaaagtgtaatattattattggtataatttttaataaaaattataaataaattactaactaatatcagaaggccgtagttttcctacaatgagagtaaaagacccttttttttagtatgtaagattgagtaaagaaaaaaatgaaatttacatggtatactaacttttgctaatttt

SEQ ID NO: 328734 - DNA, 695 bp, Cannabis indica
gttaaataaaaacagaaaaagttattatcttttaaattgtgatgaaagagtcatctatactaaagaagaaatttgttacttttgactgaagtaatgtaattataattaccctacttgtagagcaagtctagtgcttaaaatgatttaaagaaaaaaaataattattaataatgataattttattggaaccaattaattgactctaatatgactttacaataaaatgtgttaacttcttaaatttaaataatttcattattgaattggatttatgataaatataaagttttgtacaaagtctaagttaaacatatattaagcaattagtagtgtgcttcattatgacactgaattcttattattattattgttattgtggaaatatatgatagtataagactagactaatctacttcaatagtgagataattatatcgatattgcatataaaagaaagaaagtgcttccatattgtataataagtattagtaccaatcaatttttattttattttatttttaaaatatcaatttatattagttcaacatggacatatctagatatatatatatatatatactagaaaaaaactaacgtgcgaggcacgtatactaaattttatgcttagttttttctatgttatttgaaagttatataattaaaaattaaagaaaaactattattagttattaggt

SEQ ID NO: 328735 - DNA, 555 bp, Cannabis indica
ttgataatgctttgcgatagaaagtaaatcaaggactagagatctgaacagaaggagttattatattccactgcaatcaatgtaaggtttacttaaacccttctgtgtttaattttattgttttgaagatattcatatttaggatgttaattcagcatacttattagtaaatctagatcttggtaaaatattttcaacagacctaactagtaaaagtaatcatttttttttatatctaaccctatgtttgaaatttggatttcaatgggaaaagaaaaatgtgaagaaaatgtacaaaaagaaaaagtacaaactatatataaaaaaaaagtttttatatttggtatggaaagaaaggttatatgaaaaataacttattcaataattccatactaaatatgaaaaactaatttttttttatctccactgttaggctaaaattagtctaagttttgggtcatattttcggttagttttcactctttgtttctagttttagggctatattacgcttgattcttttgtttcaggtcctcgggtgtttaaagaaagtat

SEQ ID NO: 328736 - DNA, 1063 bp, Cannabis indica
taaaatatatttaaaaataacaaatttaaaaatctgatatggttagcaaatttaaagttctaactagattttttgtaagttttattagtatattaatatcaaaataagatcatttcaaattttaataataaaataagtaatatttgatcttataactaaaataaataaaacaaacaaaactaatcaaaaattttaaaattaaccataaggctagtttgtgaaaaaatcaatattttaaattcaaaggctactaataccagtttaattaataaaaactaaaaaaaaataattttattccgataattggatttttatttagaaatttgaattctacataaaattctactaaaatttaaatttcactgaaaaatgattttggaatcaaaaaatatcataaaaagaagtttgggcacaaggagtatgtcgtgcatactcatgcacgcgcatacgagggcatcaggacgagacacgaggctgcatgtagcctccattgccgacgatcctcggtaaggtggggccaagcttcgaacacgcccttgtctgaaggggttttgttcgagcgagctgcacgagacactgggttgtctcctccttgcgcgcgcgtacgtgtgcaacaaacttgggatagtttcactcaaattcaaaaaatcataactaattcataaaaaatcaaaattgagttctttaaaggcctaaatttattaatatttaatctaatttccagaaaaaaaaaatactttcagaacataactaaaaatatttatcatcgtaaaatagcaatttccatacaatcatcaaatatgctgataaactaacatgaacacatccaatcaacacaatcattgttttaaatccatttttcatgagagtaaatcattaccatagctctgaggccagttgttggggattttcttacctggatctagatttactaccatgtatgttgtttaacatcctaaatatgaatttataaaataatagaatttaaacacatataaagttaataaaacttacattggttgcaacagaattaaatgactccttccactcagatctctaatcc

SEQ ID NO: 328737 - DNA, 583 bp, Cannabis indica
agttgttagaattaattttactaagatctagatttattaacatgtatgtatgattatattttataatctaacattctaaacatgaatttcctaaaacaatgaaataaacacatataaagttgtagaaaaccttacattggtggcagcaaaatattatagctccttttgttttgatcactaactcctgtttcttttcgtctaagagtattaacaagttctgaactttgatcttgttaggtcatggaattattcacaatcttccacgctatgattgagtactgacttgaattgtgtgggcattcgaattatgaagagagaagagagagagaatttcaaaatatgagaggctctttatcttcagttatgtgacagaatagtttgaggagcttatatatatcaaaataggagcctatcattatctatttataggattactaaggtcagggtttaaattatatggaattaaaaaagataaaataatagcttaaaattgacctcaagtagtcggtcatactattgaaccccacaagttttaattttgccatttatttaagggtaaatgccattttggaccctgtgtttt

SEQ ID NO: 328738 - DNA, 562 bp, Cannabis indica
ctctctctctctctctctttaacgaaacatctactcaatgtcattgatcgttttggaaaaaattgtggaaaaaaactgaatagtgtgttagtttttttttagataatgagaattatgttatttgcagaggactgagcattcttgagaaaacttgctttcataagaaattttgatgagatactggtaacacttaagtaacacacacaatcctttaaaaaaaaaaagtaacacacaaaaaaaattaaatataaattattaaatttatgttgtcacttattttaagtataaagcacgattttaaaccatcgcatataagcgacgattttaaaccatacattatagtacatgttacgtttctttattttaaatagttcttttcaacgatgattttttttcaatctttacattggaaaaataaagagaaaatgcaaatttttaggtatttttttcctgcattaattttaattttttttttacaaatatgtatagtcacaataactaaactaacactaatatgattttgtcccgtgatgtactttcacggaatgtattccgtggtaca

SEQ ID NO: 328739 - DNA, 658 bp, Cannabis indica
aaaaaagataagggggttaagtgtataaaaattaaaacataaaggggttttgccaccaaaaataaagataagggggttaagtgtataaaaatcaaaacataagggggtttcgccgcaaattgctctttaatttatttattgctactagccaaagggtaatacctttggctagttatttttaagtttttctattagtttatgttttagttgattgaatcaagcggtagagtctaagaatttagttttttgataaatttatttttctttgaagatagatattctaatacaatttattttttggttgttgttttgagacctttcaggtagtttttcagtacaagctaaatctccagctcttctgatatgttgtttgaggacgttatagctttattgtctaaattatggggacagttttgccctatatttttgttcgcttacttaagcagttcatggtttggcaaagcatgcctttcattaacacaatgagatatcttggttcaaggagattcctgcacacaatttgcgaatatttacatcgtaaattcgcgatttgggttgatccgatagtttctatgtgggggtgccaaggtgaattttagttgcgatttaggttgctccgttagttgttatgtgggttgctatgtgaatttccataaaa

SEQ ID NO: 328740 - DNA, 1898 bp, Cannabis indica
acatcagaagtaaatttcattttaccaatgcaataccaaacttttaccagtacaaaaatgtgctggcaaaagtgtcattttttgtagtactagctaaaatgagactttagcatccctagctacatgcatacatacgtatattacaaaaaaaatttacttttagtcacaacaaaatttgtgactaagagtaaaaaaaaaaaatgtgagtaattataaagcatgattcctatgttgtgaccatggctaaaagtattagtcccaaaaattacaatttgttgtgactaaatgtatttttagtcacaataattgttgacttaataaactaaattagtgataacttgtaactaaatactatatttagtcacaagtacatttgttgtgactaaaatcactttagtgacaaaaaattatattgttactaaaaattgtcactaaagtatttgtagctagtgatatacaattaatggattatagatcatgttgattagagttgttaatatggccaaaaaagagctatagcaaagtttctaataataaggtcaaatttatatacatacataaatatataattatatatttttagcaaaacaacaaatatataattatatatatgggtctactttctagttcagagctgagaaatatatatacatgtacgttcgtatttgggcctgctttatataaaaagtgagaagtgataatagcaatagagatttttcttaatatatgatatatgatatatagttaagaaaaatctccaccatttatcacttttaactattaaaaacggaaaaaaaaaaacacaaaaaatgtactatattttaattcaagcgagccccatatataaatatatattacaaaatttacctaataatattataaagctgagatgaatgaccatcaacggccagctgcaccactgatctgagatcttcccagctttcgttcatagaaaaatcttcttcttctgagttagggtttttcggataataagaattattagccgaaaatggaggtacaccaacaatatttttattattattaatattattactattacgatattgcccgacattatcaaaccagcttccacgagcagctgcagtagtactagtgggagtagtttcatcgccgccataagtggcggcggggttggcttgtcgatgatattggtggtgggataatggtgtgtctagttccaagcttaaatgatcatgatgagtttctaagctgcatgatttagagcttgaataatcactgttgttgttgttgtagttattattaatataatattctaaaggatataataatgaagaagatgatgatgataatgattttttggttgttgtcgtctctttcgatttgttgttgttattatctgcagctggtacgtactttttgtatgatgggattcgtttgaatattcggcatagtgtccaaacttcctgcaaaaacacaaatatttcacagtatatatataattaaatatactagctatatatataatgtatatatacaagttcctaaatagataagtattttaccaaactatatttataatctcaaatttatattttcaattgtataaggtataccgccctagtagtgacatattagtgactataattttaatcacaatagaaatattttgaaaataaatgatcatattaatttagtcatatgattatgaaatcaaatttagtcacaaattaattgttacgtgtagctatttattatgttgatgaaatttgtaaaatgagactataattaaaaactgttttcagttttaaaagggaaatttgattttctatatttaaaaaatcttaaatttttttcgctaaatgcatacttaataatattggtcatatatgactacattcttaatatcccacaaatac

SEQ ID NO: 328741 - DNA, 845 bp, Cannabis indica
attttttaaaagttgtgacatatggatgatatataagatggattaacttaaattgggtgaattaatacttgtggtataaattattgattactatattttgccaactcattactatataacctaaaattaccctaaaattgggtaataatttttttttttttagaaaatttttatcaataaattttgacacgtaaatttgcttaaaaatataatcacaatttgtagtattaacaatttcacattactgggattattgctagagattctactggccgaatcatggaaggaatttcaaagagctgctgtggtcgagtgtctcctgagtatgctgagatcttcggcataaaggaagcactcagttggattaaaaccaagggctggcaggatgttacgttggaaacagactgccttgttgcagtccaagcaatcaaaagtactgtcaatatgccttcaacattcggccttctggtttcggattgcagagtgactttggatgagttgaattttcttaattttaattttgtaaaacgttctgctaacaatgctgcgcactttcttgcacgcagcgcttgttatatgacagatcgtattgttctttctaacaactgcccttcggagttgttaagtattgtattggctgattcactagtttaataaaatgccaatctttaattcaaaaaaaaaaaacaaatttcacattactatatttacttatttaaacttttgttttctaatataattgtactatctttctctaatatcactaaatgtattaatgattattatttttttaaataaagttatttgactaaattattcaatttttaaaattgattttatttata

SEQ ID NO: 328742 - DNA, 568 bp, Cannabis indica
attataattaaataattctaaaaaaggaatgtttatttaattaattattttaagaaaatagttaattataattaattaaatctagaaaaggaaagtctacctattagtaacctgctattacagattaaagaaaaatgtaaccatatggttacaataaaaatgtaaccattgaatagtcaccctttactaaatattagaaaactttcaaatttatttatatggttttcaatatcataattgctattagaggatcgttatatattgagataataaacttaaagaaaatgaaattatcaaatcttcaaattatttactcttagtagagtccaatgtagctagcagtaattagctaccaacatttaattagtagtaataataaatattattttgctaccaaattttagtagccaaatattttagtagcaaattctaaataaattagaccaaatatttctactatcaaatattttggtagacaaattgcttttttagcttactaataatttttgatagccaaatatcactacaaaaaaaattaatttttaacttagtcacaataaaatttgtg

SEQ ID NO: 328743 - DNA, 1938 bp, Cannabis indica
tttttgtttttttccctttaaatcaaaaaaatcattcaaatacagcaatagtgtattcatttttttaagatgtatataaaatttttgctagctttaagtttgaactgtattaggtcttgatttacatagtgtggatagggggttttttttttagaaaaattatttagccattgatgatacaggtcttgagcgaacatctttgtattaggttttgatgtgttattctttacattatttttgtttttttgagaaaaatatttagttttgaattttatggtttcgtcactaatcaaagggtaaccctttcggctagttttctctattttattttatttacgtctttagtttggttttattttacctgagtccagtttttagtttttagcatacgagtgtgaacacttatatcttgtctttgtgatgtttttttggtttggtttgtttttaggtagtattttagttttacaagccaagaccttagcatttttggttagatttaattggattcattcgtgcggaattccaattaaagaggattattcagattcgttgtctctggtcagtggtcacaactattaacaaaggaattgtattttttaatgagttggatgtgttgtttgaggatgtcatagctttattgtctaaattttcggggacagttttgtcccatgtggctcgggatgaattatggagcgcatggtttgacaaagcatgccctccagttagacgatgagctatcttggttcgaggaaatttcgccaccgattgtgaattgctgctttgttaatcttgtgtaattttgatcaccgcgtcaaaaaaaaaaatagattgagtgaatcaatatgaaaccaattaggtcgattctttaaattaaaatgtcgatagaaaataataatgatattgggttacaaataatttaatataataagtattatgctttattgctaactatttataagatgtcacttctacatcctctaaataatgctagacacactttatagtttatatataattagaacacttatttaagaatattgttattaggcactagtaatacttaacatatttaataggtgacgttctacaattagtgagcgatattctctaaaaattatttgttttaaagttatataaaactcaatactaataataatataacacgaatattgcgttaggtactagtaatacttttaacaatcttccttctctaatgatgatgtaaaaaatattgtccattttgttagcattgggttgttggcacatcatcaaattagtgttaatatgagtatattatgagaggggagggattattttgtattagagcctttcagtttattttattcttaatttgacagattaattttcccttattttaagggaaaataatattgaaagtttgacaagaaaaattcaatattcatgaactagagctggtcattattactatttaagatataaaatatacgagcatataggttcggcagttcttgggatatgattttcttttaagaaaatttggattaaaaatttaaaggcaagttagaaaaagtctatcccaccccatctcaacaagaactcatttcaaatgatgacgtggcaattttattggacttaaacatccctaactataagcttttttaagcactcgtaaatgaaaaaatttcacaaaatattacacttatcacatctgatcgattaagataaattatacagtttcaaaaagtattattggatcagtagacatactaattttctttcaatattattattagagttaatactaatttaaattttatattttataaaaattaaccattacattctctattttataaaatattaaattgaatccctctattattcaaatagtacaaaatattatctcaattttttaataattttttttaatataactaatttaaaaaataattttta

SEQ ID NO: 328744 - DNA, 714 bp, Cannabis indica
tttatttaattaattaaaatacataaaatttaatattacattatattaatgatatatacaaaaccgcctaagtttatgtctagagcccatttaattagttgacttaaaatattttattcttctaaaattacatattttttttactgtattttttttaatctatattttttttttctcttaaacaaaagctctaaaaaatataatttttttctataactcattaaatttgaggatagagctggatatattaaggtacccataggacatttctggtttctaaagggttctgagatctgatctgccacacgtccaatcctttggaccagcggggtattataattaacacagctttaccattccactatactctattctaacaaaattttggaccatataattataaaatattactatatatctatagagttcggcaatagggcaccctttatatatatatttatatatgttaacgtctcatgtatatagatatattcaagtggttgtgatacttagatataatcatagtgtctccaccttgaggcaatgaagaaaaaaagaatacatatatatttatatatatataaagcactatatatatagttctgtagatctgtatgtatcatagaaatagaataaagtagagtacacaatgtgacgcatatcattgttgatgatgatgatcgataggcacacacatgatcatgcatattggcg

SEQ ID NO: 328745 - DNA, 574 bp, Cannabis indica
atttagttatatttttgacaaataataatatcttatctttgtacgtattaaattctttcaaataattcatttttataaatataaggcttcacatttaataatagtttcatataccttacaaaaaaaattaatatttttaaataaggtgcccttatttttttgctataaaaaggggacctataataatggatataccaattcaaagttttaaaatatataaatatttatataaataaaatactctaaatttttgaaaacaaagattctaacttctactaccccaaaagcttttatttcctttctttaacaaaatttcgaaaaaataattatattttaagataacatatttgtttttccccagaagataatatttttaaatatttttttcagagttattttcttcaattaattcacattcctaatagaaaaaattaatctctataaatacatctcttctttaattggtgttattccattttgagacacaagagacaattcacatgttcacatgcacacaaaataacaaaacacacaaatatatttatctataaaatataacatatttatatttata

SEQ ID NO: 328746 - DNA, 917 bp, Cannabis indica
aaagtttagttatatgatttatcttttcaaaaaatctaataaaagtgagtggtgcccatgttatcctttcttttgtctaaaaaaaatggaaagaatatgtagtccatccatgttatttaaaatcctgaccatactactagtactgtactaaccctattgaattatatatttgtattttgtacaattctaattctaccataagaaaatatatataagatactcttacaccagacacttgtcatcaatttgaaacgcatgttacatgttcctcatttctgggcctaagattcagatgggattccttctcagacccatcaaaattaaattaactagtcatactagttagtacacactacacacaaatttacactgcaatttcagcaaccacaacataatacttataactagtagttattcaaaaaaaaaaaaaaaaaaaacaatatattataagtataagttgcttctaacatacatctatattggtaatttaaaaaaattatttagtttaaatttttttataatttataatactaaatataattttcaaatagtttttacttcacacgtgtataaaataaaaaagtttatgtacaatgaaccatgttttaaacgtgttaaattattttaaattttttaaaattttacaaaatcttttaaataactacaacagtacatgactttgaaaaaaatgtatttttttttcaaaataccaaaacatatatagagatatatttatacatcattttttaagaagtgctgtaaaatttttttagttatgtaatatgaaaaagtaatgtgcatcatggagatcgaatatcctaataataataaaacttattatttaaaatgtatcttcttctagtatttattttaatcaatttattttaaatataaatatatttatttaattaaaattt

SEQ ID NO: 328747 - DNA, 1274 bp, Cannabis indica
tgactgagattgaatctcaataaaagataaattcaattagtttcctattatatcatatagtattaaataaaatattattattattattattatataattatattatattatatataatcaaatttcgatccttacattcgaattcaacaaacttggtttgattatatatatatatataatatataattataattataatcttagtgaataataaattatatatattatatttaaatttttaatcaattttcaataatataaattaaaatttaaatataacaatttattaatttgacaataatttgtcataattaacaattgagtttatatttctcttattttctcaatttgacccaatttaataaaaattttgaaatttgacatagtcaatttttgaattctaattgatttaaataattaattaattgagtctacaagatgatattatctttgacaatttgaaaaccacgagcctatataaccaagctctcaataggtaaattttctcaattattaacacatcctgactctactatagattttgaattgcactcttatttacatagaatgttcgatataccaaatataaatatgctataactatctattatttcaatcacaataatcattgatcctctataaactgtttacattgagtagggacaaaaactattgttttatccttcaatatattttatccttaaaatatatagctccttttaaatgatatttcaagaaactaacactactaaaaaactgggttttcctaacaattttaaacaatcggctaatgtattgtcgtcggtctctaaaactgtcacctattcgactgttacaaaacagatagaataggcaatattggaaaactttcagcaaaaactataagttgcagtgtaaaatcatcgcctagactataggctatggtttaaaaccgtctcatatagcataagggacaattttaaaccgtcccctatagttttacaattacaccatccaatttctcaaacttctcttgtggaacaatcaaaaatattatcaataactttaatattaccaaacccgaaatcaaactccatgtttttattctaaaatacatcttcatcgtcactacaaatccaagttcacattaagcaacaatgtatttcttaaacttacagcatatattaatgtaacgccttgtcccacacaaggacaccacgtgtgtggttttacaattttttttttctaattatataaatatacaaaaagtctgattattaaaatttaggtcaatc

SEQ ID NO: 328748 - DNA, 1031 bp, Cannabis indica
aacttttgccagtgcaaaaatgtgttgaaaaaagcgcatgacatttcttgtagtgactggtttgagccaaatttgcctgcattgaggcagatttgtaggtggaacagatcctgtgaaacttttgttaaatcggtaaaaacagtcgatgacagtgtggccaagcttgtgacaaagctaacattgaggtatgctctgatgttgaggtaattttcctcctctggctccagtattagaacctcttctatggttataggaagaagatgcttctcaagaaaaaattcaaggatataaggaacttgattagaatgaaaattagagaagttaaaaggagaaaaatttggatagggaggatagtactgacctctctgtgtaccaggatatttgaaattcttgttgaattgagtaagatttgcttcaagttgtagcaaattatcagatgatcttggtgttgaatttgcaactacaagattgacactctgtctatctctttttcagatttttcgatcctcgattctaaagctaagagcttcaattttagccacagaatactctttaattcgagtattggaggagataataaaggtgtcatactcgcttggtaatcccttgaagattgctgcaatgtgatctcgagctgacagagattcaccaacaaaggccagtaaattaacgtgttgctttacttttagtaagtactcatccaatgatagggagccttttttgagattataaagttaagttctaaattcaaggatcttggattaaacttgatgtgtatagtatttttcttaggcttgccatatctgcctagcagtgttacagccaaccattcggataaggagactctcatttatgatgatagaatccatgagacgagtaattgatcttgaatctcccagttcaagaattttggattgtagatctgagttgcttgatcaacatttgagataaactgagatagatgagtaacatcttagatgaacttctggagttgatgtcctcgaattgcagtaagtgttgggttttatgcc

SEQ ID NO: 328749 - DNA, 929 bp, Cannabis indica
ttagggcacaaaacccaataacttggtcctcttactcacaagctgtactccacgtgacattaattttgtctatatggacatgccacgtcacgtggaaaaaaattgagataacaattattataaaaatattttaattttctactcaaatttgaaaaggataaccttagtatattaaattatccaaaaataaattaaatctataaatataatacaatacaatcgaattaaaaaaacatacaatataacacatataacatatgccataaaataaaaaatataaacattaacttaaaaaaattactaatgattgtaaaattatatatttttattttacaaaaatatttcaagttttttattactaagcaactcttttcatcactaactattattattaactttattataaatattataaatttttacaaaaaattaagagaatattacaattttacattaacatatttaaaagtttttaatttatactatcacaattgaaataacatacaccatataaaaaatatacaaactcatatataacatcaaacagtttgtaaattaaacatatatttttactaattaataccagtaacatatattttataagtaaataaataaaaattcaaatttaataaaaaatacgtttcacaaatataaattggtgaaacactttctccaagcttcaaatcaaaattgtggccaaaagtactttaaattccaattttattaaaattaacaaatcaatattaaaattctaatataaaaacatatatatatatatatatatttataccataacatcataaaaaatactctaaatactaaaaatagcgatctaccattacaaaaaaaggcttatctcggcaggctcgcgtgaacgtgtcaagataggcctaaattttttttaaaaaaattctgagcatagcaataac

SEQ ID NO: 328750 - DNA, 1372 bp, Cannabis indica
ttttcacacccttagcttccctttttataaatagggttgaaaaaactacctctaaaggctaatattgtagtagtggtacaagtaatatttatttataaatagctattattagagcagaatctagggtatgtagtttgctaattggaattgtttctctctttgagggggctccattttcaccctatgtatatacattaattgcatatttatagtatacaataattacactaacatcatcttcatcatcgatcctaaccactaataaattttctatagggttacatatatatataaatatataaaaatttttatatatatatatatatatattgacaaaacgatttggatggtccaaacgtttcacaattatagctacccaagctagctagcaacatattcagtatttttgatcattacttaaaaaattaggattaattgcagggaaagacataaattgtattttatttacagatatatgaccacttattaaatttaggcatataccgaatatcatccatcttaaattcataatccgtatactctatacattcaaataacaattatttttctttttcttaatggttgtctctctcctctcttttaacatatgttgcttttggtattggtgttgatattgttattatttattttttttaagatattcacttttttttttattagtttattattttattagttttgctatttattatcaatctctcccctttttataatttgaaaaatctttttcagcttacaataattattcaagctttaaaattgtattatagtctttttttttttttatctttctttattttttttttaaagtttaaaaatatttttagtcacaccatttattatttagactcaaaatttacactattacaatctatttttcaaggtgatcattttaacatgtgagaagcatatatttttttgcctccacaaaaaaaaaattacttaaattaaaaataacaataaagtatcttaaataataaaatcattatatttagttaacataattaacttaaaaatttaaaaagtaaaattataattttaaagttaaaaattaattttttactgtcttcgaacgaccaatattaaaagtaacttttttgtttctttcttatattttgtaacaaaaattattaaaatcttagagttaataaaatttaacatatcaagtaacatcataaattgctaaaatttttttgttatgttgtatttaaaagttacgatatagtaatagtatactgataacaaatttatttaataaattttttttgatatgttaatatgaaaatttataaagttaccaaatagtatcttaaacataatagaattagttacattattaaaattattatat

SEQ ID NO: 328751 - DNA, 942 bp, Cannabis indica
accatagtcttaccctatatattgatatgtatatatttttggattgagtttgttctttcttcttttttgaatttgatagttattgttatttttttttctttcaacatatttgttgtaaagaccgcttagctttaatttgaaaattagcagataattagagtttaatcatgaaacttattaattattcttaaattatttatttatgatggtttatttgaatttagaatgcattttatatgtcatatatgaaatttcataaattttgcatgttttgtgcccgcaatattagaacacggtgtatggcttttagaattacatctgagtaattttttagtatagcggggaagtatagttagtcattaggaatgtcgagaatagtcaagattttagaattgaacaaaatacccctaagtgatgtttatgacttttagtgtgggcaaggacaaaaaagtctttttgccctatatttattttgtcctttagtgagaattgtgttgttttattaaatctaattttatgtgttttaagctgatattaattgagtaaaatcaattttattttatttaattttacaaaatatcaaaagataagcaaaaaatcaacttttctctcaagttctctctctccttcgaacccacctagaaccagctagggtttgggttatttttctacatttcaagcttgttccggcaagtgttgggtgatcttaagctctaggtaagtttctagtatcattctctttagtttcttgggttttaaggaaatagatttatgcatgatttgtgaaattagttgctgttgtttgcagtatgtttctgaagtttaaatatgttagatatgttgattcaaacatgttttgatggctggtttgttgattgagcaagctttgagttttagaactcaagcttggctctttaatggtgatttttgatattgagcatg

SEQ ID NO: 328752 - DNA, 709 bp, Cannabis indica
agagagagagagataatatagtattttgtcatcatattgtaactttttcataatcgtttagtcaaagatctttgtaataaaaaattatttaaatttttatggattttattagcaaatcataagtgaaacttgatgcataacgtttatttttttaataattatgtaaagtgatacactttggtttgtatttaatataaaagatgagaatttatacaaacatagtcaaatattaattattataaacacactaatggcatcccatttccaatcgaataattaatttataaataaaatggttccactttaaaaaaataaaatatgataataaaaacataatggtgctacatgcaaactttgagtgttactaacaataatagaagaataataaaaaaataagtaaaaaaaaaaacaaaaacatattttagcaccgttctagtgtgttagtagtgttgcaacaactttctctaatgacatttatttttcctaaaatattttcactgtgcattaatgcaaggatacgattgattccaccaaccaaacatatcattacgtttcatatatttttaaattatggcccaaaaacagataaatatacatatggagaaatgcaccactcaaatatgatcattttctctatgacaacacatatacatggagagagagagagagagagagagagagagagagagagagtgtcgttttagggttg

SEQ ID NO: 328753 - DNA, 1419 bp, Cannabis indica
taaaccattttatttttaataataaactattttatttttaatataaataataaatcacccatgaatttctcataaaccaagaattaggttatataggcacactttatatagaatagatagatataatttaaaaattatatatatatattatttgtgaagttatcccatcccatatgataggagtaaaattgaatattctattatctcttttacttttttaaaaaatattatttgaacaagatcatttttggattggggttttagaattttaagatctattttataagtggaattaattgaagaaaaaggggtccatgtgattataccgataatcaagaaaataaataaaaaaagactaaaaacatgtgaaaaagaataaacaaagaatcactcaagtatatataaataagtatttcgtcatcaacgacgtggccgatggatttaacggtctacactctatgcaatcgatttaaggccggacagacaacacgaaggtaatcattgacaaataacatttctccaaaacctatttagcgaaaaaatgttggacaaaataaaaaatcttacttatattcaacattatcgataaataaattagtaataatatttttatttttacggtcaatttgcataacaacataattttttttctgataaataaaagcagaattattttatatgtaaattaagagtagtaaaaataaaaaaaaaaaaatacccaaaaaaaaattacatacccatattttaataaaaaaattataggaaataataaaatatcattgaaaataaaattaaaattacctattttcaataaaaagaagacgcttttttaaacagttacttttgtcgtattacaaaaactcactactttctttgacttttataactggttttgttgaccagccatgaatttttgacatactcgattataggacttactttaccatcctataataaaattatgtacaattattataagtggctaaacgagtaaagactttttcaacaaatgtacctcaattatatgtttttttaggttaatatactaaatttggacaaaagatgattaagttagtgggttgttggggaaagaagttgatgatacaatttttttttttattattttatattttagtttatcttgaataaactatataaatacaattttaaactaatgataaagaccatttcaaccaaaaaaaaaaaattaaaacctaatgatagaaatattatttcttatgttgtatacatattgcaactagcaatgttattttgtttcccatcaaattacatactcatggattttgaggcattcaaacttataggaacttttgccaaacattgtttatctttaaaattgctcttgtgactttgtaatcgtctaccatcagttttttctttgttttttccttgtttttc

SEQ ID NO: 328754 - DNA, 605 bp, Cannabis indica
aaaaaccgcctctaaagggtgtttttgtagtagtgtaccggcatggcacatggtcggccaagagaaaaacttgcattgcatgcatggtaggaccataatgtaataattaagcaaaggccacatcaacaaatttatatatatcatcaataataagaaggattaattaattaatatcaattttctaaccttaatttcttttatttttaatatagaatcttaatttttgctaaggcatttgaaccttttgtgttttgagaatttaggggtattcgatcttttgaatccaattattgacatgtaatatctttgtagtgttataatcaaagatattatgaccaatctatcaatttaatacactaatatactattttaaaaaaattggatccaaataaaattattttattaaaagagaggaaccaaaatcatatatcttaacaagaatatatagctcatgagttgagttgtaaataagagtcggaatttttgacacgatatgagtatgaaagcatgagcacgacccaacacaaagagagagagaagagcaaaaaaggaaaaaaaatgtttttttttcaaatttataattttatgttaaattaatttatttt

SEQ ID NO: 328755 - DNA, 1188 bp, Cannabis indica
tttgattttttttgttgttaattaaaccaaaagaaagtaagtatgtttgttttggtgtaatcaagattaaaatggaatggagattacaattacaatgtttggttggagcttttaacttttataatcattttacattgtaatgagtattacactacttgatgaataattacatgagtatgactcatgaatgatgagtatgactcgaattataattaccaatatactacaaaaaggcttttttatatttctttcttatctctttaccaaatgtaatcgataagaaataaaagggaattttttctattttttacacttttaaaacaattttttttttgttcatttttacagaattttacattgaaaccccataacaactaacggaataacttaataattggaatcaaaattcacgtagcaattcacataaaaactatcagaacaacataaattgtaaattaaaaaaaaactgaaaaaataatatataaaataattttcctaaaaaaaataaaaatgataaaagtctcaatttcggggagatttattctagtgcttggaacatccaattttgtagatacattttattgttgaattaatttttggcaccaacactaacaataactaacaagataaagtcaactttaatttctaaaaaaagaaataataatattaaaaaactaatagcatgcagttccactaactcttgagtattcatatttttctttcactatgtttccacctccgaacttgtataaataaactctccatttttcttatccaaaaatcaacctaacctcttctaccttcttgcttttgcattttatttttaccatttatagtttctttttttggctgataatggctatgtttggtagccaaaaaggagggaagagcggacaacaagaacctaatttacccgttgtctctgctaaatggaagaaatggtccaatttcgtcccccttgttgttgcccttgctgttatgtcagacatggccttcgtgggtcgtctcaacttgttctttagggctccacctgcaaatcgagtagacggttgtaaagcctggctccaaagttcaaccaattttttaagacttcaacaggtattattacttgcttctccaaagttcatttgaatatgttagggtttgattggtttgagatttaaaaaaaaaaaaatatatatttgaaaa

SEQ ID NO: 328756 - DNA, 726 bp, Cannabis indica
tttttttttttttttgtaaaatgctaaaaggcacttgtggtgcttaacatcttcagggtcatactgttattgatgcattaagtatcagatccatataatttaagggagaaatgcttaaagacatcattggtgcttaacgcactactacgtatcaatattcctatttggtgtgtatcggatctcatgcatatatgcaataacttttagagagtcgttaatgatcaattacaagataacacatctagaaggtgctaagctcaactaatacccaatagcaatgctctaacttaagtagtatttttagtaaatattactaaccaattatattactggtgctcgatagtattattttttgaaggtttcttcttatataattttttccaatagtctctctttttgggcataacaatcataaagttgacatatattaaggatgaaaatgagaaataaattatactatacaccaaaataatcatattatctcacaccaaaatatttgtataatatcatgaatattttgtgtgtccttaatcttacttataatttagacagcaagtagcaaccatgtttatgtagacactctacattaattaattaacggtgattataagtttcctttcaaaaatgagcatgttggcatttaaattgctatattatgctctatcattaatatgatttatgatgccctccactactcagtgagtacgtacttatagcgtgccactg

SEQ ID NO: 328757 - DNA, 915 bp, Cannabis indica
tacttctactgttaattttttttataaagtcatatgtgtaacaattataaatatgaaggagattttattacaaatatctcatattattatttgtgcaattaagtgtcaggtttcatataatttaatgtaataacttttaagaaaaatcactaactaattacaatatgaaacgtctaaaacattctaaatactactgatatctaataacaatactctttatttttggtatttatgttggctttgaaacattaatttttgttatttagttacttttgaaagagtatattaaaataaaaaataggactagaagaagtactactagtcagattcattgtatgaaaaatattatatttcatttaagttcaaaaaggaaaagaaaaaacagttgaaaagtagttagttgagcattattttaccaaatttattagtgaaaaaagtttttaaaaaaaatgctattaatttatacattaagtaattgcatggtttataaatttcataaactatttgatcttgattgtacataataaattaatatatttaatattcatattgtacttttcatgaagctttttctttatttatttgaaacttttttatttttttgcttaatttttatttgaaattttcatgaagtgaaaataaaacttatgaaatattctgtcggtttcatatgtatagatatattttttttattaaagcatatgaaaccatctttaattattaattttttttatataaattaatcaattcagaatattaaggtacaaatataatcaatattttttatataacaagacaaaagtcacacatcataacaatatacatttataaatttatagtatctttatatattaaaagtgcctatctaactacatttcttggtttaacagaatatacttaaaaataaaagaatat

SEQ ID NO: 328758 - DNA, 760 bp, Cannabis indica
aagatcatgaatatgatattaaattaaaaataatgcctgaattataaatataattgctgatttattaagtaaaatttgatatggatacaataacatgtctggattcgatccatataagttaattaagtcttccttttttttaaaaaaatagaataataattaaatctaatattaacggtgaatatacgtttttttagggttcccaatcgtattaaatgtaattttttttgaagagagaatattaaatgcaatattagattttgtagttaaaaaaaaaatcaattttactaacgcaatgtaactttagaatggtaaatgcaattaaaaacaaaaaattaattgtactaatgcaaaagtagtgttgtaagttggtgcgtgttgtgttggttcggtctgtatttattcgtatttttttaaaaataggtcgtgtcgtgtcgtgtcgtgctacataaaaatataggtcgtgtcgtgtcgtgtcgtgctaatatttttaaagggtaggcttggcacagcccgaaggcccggtatttttcgtgtcgtgctttgctcgtgttggtctgtatttcttaaacaggtcagtccatttttatatccgagtttaaattcgtgctttactttttcatattattttttacaattactaaattatatatatttaaaagctatagttctatttatataactttcgaataatattttacagataattatataaaaaaaattgataatatcattagaatttgaatgtttacttataaat

SEQ ID NO: 328759 - DNA, 1000 bp, Cannabis indica
gtttaactcccagttgcagataaatacttaagtttaatttttgacggtaataatatctaagttatatttctaaaacttccgtaggtaccttgtcgtgaagtagtcaagtcaatcacacgtggcgattcctaattagtaccacgtcatcaaattttatttaataattaatttaaatatactaataagaaaatgacgcttggataataacttgaaacttaacgatcaagtacctacggaagtttcagaaatataacttttggattattatcgtcaaaaattaaacttaagtatttatctccaaccgagagttaacttcacgtatttacgctgcaaattactcaacattgcaacacctaaaggttgtaccttgtgaatggttagcgatattctatataagttattatattaaattataggagaattgatatttaattacaaaattagcgatatgacatcataaagggtgctagactattgggattcgtaccctaaaagtaagtaatagtaagtaattaatagataatatattacagaatatatgaaatataattataagataaatgatacattaattataaaagtataattattaaatatctgaaaattccttattcacacggagaaagtataatcttttaagggcgtacaagagaatcaagattataagatatgaataaaataagtcagtagtgtattaaattattaggaatctttaatatggaaatactaagtattgtttactatacactatacttctagtgtgtgtgattttgattcagatcacatatgtgaatacacatgttgcaaaggtgttgtgtatagttcgattatgcatgactggaccgatatgtaatgaacatctttcattaacgtatcatttaccatgaaagagtacttattcatatcacaacgatgatcattagtagatcagtctgaatcttgattatacatgaactcatgtttgtgttcattaagtttttaattcactcgttaaagtttc

SEQ ID NO: 328760 - DNA, 733 bp, Cannabis indica
tagaaagttcttatttaggatgttaataaacatacttgtgagtaaatctaagatcctggtaaaataatttccaataatactgccataaaactaaagcaacaaaagtatgtttgaaaaaaaataaatcatttcttctgaaggtttggaggtgagtcgaattcactttcaatgttttcaagttgcttctttatgccataatgataaaacgacacaaccaatcgatcgcggtgaactttcacgtcaaaatcagtagatggaatgggtttgctgttaataaagtactcaacaaaaaatgctacaaacaaccgacagttattgaataacaacaacaggacaacaccaaaaaaaataagaaaataaaagaaaaaccaataaagtaaattataaaataaaaataaaaaaaaataatataacataatacatgagaaagaacttacgttgtgacctgcccaggtaacccatcaacaggaacaatggaaaacagttccatagtgctaaactttgattcattgcagaggcctcgaaagtctaacaaagagaaataatatggtaagatcacagaaaaaggcttgcaagcctctttggcagctgatgtaaacctgtcaaacctcaaggaattgtacaagtatatctgccactcataaatgtttaatcgaccacatatccaatgatcttgcaatttcacattaataggcataataatgtgattagggctggccgtgagtttgatggg

SEQ ID NO: 328761 - DNA, 1754 bp, Cannabis indica
gatattaataaaattcatttctaatgtacattttcttaaaaaaaaaaattaaaaatttaagcttttattaaaattattttatatatgctaatagtttccaataagttgattactttcaccatactttagtgtttttggcatcatttgctttagctcaataatattgtaaatattaatgtgtggtcattagttaataatatatatatggtccacttgtatggcaaaatgaagccatatttttattatatagagataaaacatagtatatagatgacagtttagtaaataagtagttgagtgttagcctggcaattaggcttgcctacccttttgtcaacagcaatgcatacgtttgcttaatcagtttcccataattgaatacgcaaatatatataatactcccaacacttccccatccgtacgtgcggtcaaaatactcaaacacaaatcgtttctttattatattttttatatatccatacattattaaacaagtcctaaagaaggatatatatatatttatatatataatatatgaatttgaatttgcttttgcgatatttaggctgaaggaatgtgttttatattagtgactgttacctaaactagaggcattggagctatacttaatgttgttaaataaaccaattataaagagagcagatcagataatatttcaaaggaaaggagaagaaaaaaaaatggtcaatgatgaaatcttacgagctatttttcattaattattaattataaatatatatatatagttttatatttaaacttgcgaaaagaaaaatataattatgtatatacaacattactaggttttaatttatagggtatatattataatacatttgactggtaaatttgctgtctagatcttcctgatgatcaatgatcttaagatttatttacgtagaatattatgtaataatgcaataaagttgtatgttatacgtttttggaaaatggatcgttattatattacatgcagcaaaattgtcgtagtggggaaaataatattggttactaacttaattattaatatttagtaatgtatctatgcttgataatgttattatagtcctgctaaatgataattaataattaataatattaagcatgtttgaatgcctctccaaaaataaataaataaataaataatgcatgttaagtaatttgtaattaaatctgcgtctaaatatatgaattaatattatatttttatagtagtgagggcatgacctattggcactaaaaaaaacttatttaaaagtaaaaaaaattatgactaattattataaattgtcactcttacgttactaaaaagttcgtggctaaaagtattagttacaaatcaaattttgttgtgactaaatgtgtttttaatcacacattatcacattaaaaaatattgacacaccaagtagttcataacatgtaaatttcatataagtgtaatctcaaatgatagaataaaaaactctcactaacccaaaggagcaaaagattataaaatatccatatcaacaacatgtttattaaacaacaagacacttaatcctttggttagaaaatctgcaaacatcgacttggtcttacaatattctatcacaaggtctctttttttgactaattaagtctctaagagtgagatactttattttcatatgtttggaagcattgctaatctcattatcacaatagattagtataggaaagaaaataaaatcaactagtcgtatctctaa

SEQ ID NO: 328762 - DNA, 690 bp, Cannabis indica
tttttgtttttatttttttggcaaatagatatatatatatatatatatatatattataaggaagtgtttcgtggtacatacattttttaatatgtaaaaaaattattgtagccgctgctgtcatcttctctgaccaaggctcatttttagcttatggcgtggctttggttgagcttttattttagacaccctgacctttgtgatgtgctttttcttttcttttcgagttttctcaattttttgtgagttttctatttggttgcttggttctgaggcctcaatgccacgaatttgcttttgttttcgtccgagggccacactgggtatggatctggtggtgttgaaccgtgtattggatcttgagctggagcctttgggcctgattcaattaccgtagggattagagtgtcatgccggatctgggttgctgttggtgatttggcagagtttgttggttgttgatgggggcttaggctgggttgagatggtggttttattttaaaatttattgaataatcgggttgtcattacccaattttttattagaagatctttggataattgtcattgataggtgtgattgtcatatgttcattcatattagaggtctatcattcttcgcatttctttaaggctaattaggattttctcctcttgaactttgacatgtaccaaatcataccccttgaa

SEQ ID NO: 328763 - DNA, 567 bp, Cannabis indica
tttattttttattttattttgtcaggtctgggtctaaggccatggtcgtggttcgagtctggggtgggatcggggtccggaccagagtctgggtccaaggtctaagttgaggtcgaggtctaaaatatttattaagaaaaaaaaaatgtttaaaaaaattgtgaaagtaatttttttgttttgaatcttttttaaattttgattctcaattaaaaaattaaaatatgaaaatagttttatagaaaatatttttggacaatatttttattgttctaattaaaaaaaaataaaaaaactgattaaaaaaatattaccaaaaataccctaaatgtattagcgtgttcgaaaatgacacaaactcatttaagaaaaaaatcgaaccccaattttgaattatgttattgtgtctaacttattttgtcttatattatttaggataatacttgagtagaggtattaaaaacaattttatgtagagtctttttttttaatatgtatcattatttattatctcatatactattttttaattttttttttcaaatttatggtttgagtttctaaagt

SEQ ID NO: 328764 - DNA, 542 bp, Cannabis indica
gaagataagagtgtggtttagtttgatagccaaggatgacttgcctgcattatattgttttcctttcaatggcttttgacacgtggaaggtattgattggatgaataatgttcaggcagtctccttggctattctcactccctcttctctctcatgttaggcctttttctcttatcgttaattactctcattacaatttgcatgcataataaggttatgggcccatgcatggggccttcactaacgggctatgcagaagattgaatgaagcccggccaagaaatgatatgggctaatgttctgggcccacctgctttccaccattatcatcatttttttaagaaaactttcaattgtagtattttgtttttgtgaaggataattttccaccatttctttactacatacttaattttgattatttttcaataaaattggtcattgttccaaatatatatatataaatgaatatttaactcaaatattcttattaataaaatataggaaaattatcatatatactattttttaacatttttttt

SEQ ID NO: 328765 - DNA, 1214 bp, Cannabis indica
taaataaatttatttattaattcatctaaataagatattattaattaagttatggaaaccttatacaagaacatatatacatgcaccatgaattagaacaatttactcttgtcccaaacaaacacaataagcaatttggattaggttgacttgtctgaacccaatttctaaacaataaggctttattaatttgctggtgtttatttacagttgtttatacaaatgaattgcaaggtatatatagacatatctaatgccacttaacgctttaaccaacttaacgactcaagctataagaataagttagacccggacaaaattaactaaagtaatagtctcagagttaaggacgcatctaacaattttccatctagaatgctactttacaaagttagaaatagatcaaattagtgtttaattgatcactatgactaggacttagctagtgatctgtagcaaagtgagataatgacttatctatgttgagcaacattggttagcatatcagttggattgtcttcaattgtaatcttggtcagcttcacagatccttcagcaatgatgtctctcataaaatacaacctgatgtcaatgtacttggttcatcatgaaagagctaactcttactgagatacagagaactttgactatcacaaaagatggttacaaatcttaatttgttgatgcctaactctcttatgataccttttagccatatgaattctttaacggtaccttccacacatgctatatgtactctgcttcaatagtagatagagcccctatagcttgcagattggttttccagcttttagtacaaccactaagatgaaatcctatttgtgatcttcttctgtgtgtccgaatttccaacgtaatttgaatctatataaactcttttgttgacctcaaaaagtaatcaaccgacagcagaatttttatggatctgatgcttgttgcgtgttacacaaacataataaaaagttactaaacacacaaaattgttatagaggttcggcctcctatgatagcgggtaatgaactactcctatttttacactactagaaaattaagttttagtaacacacatagagtaaactctaaaagtgtaatagtgacacttcaacgcgcgtcactaatgagagtgactggaaagacaatttttagtgacactaaaaccttttgcatttatttttagcgtgtcactataggc

SEQ ID NO: 328766 - DNA, 771 bp, Cannabis indica
aaaattaacctaactctttttagatcttttaggccctaaatcatatgttatctaatcatctctgagttagactaacacataatcagtattaagcaataatctcaacgtcactaaggctatgcaaatacttttgtttcacatcaaagcctagtttatctaattttagcattctcaattctcacttttcatattttgaattggatcataaagtatgcagaaggtgatcaatcttaaacatgtaattaatacaaatatggataaatttacaatcaagaaaggagaaataacaattatcattaaccaaaaataatgtcgatcaacattcatcatctccccaaataggagtttagttcataatctccatagtcaaatccataattaaaattgaaatagaaattaacataaaaaaattaagagagaagaaaagaactagttgaagaaatcgatctgggtcgccacaagccgctcttgaagtcctattctttgtttatagggctccccttctgaataatcatccaaaatcatgaactcctttctaattgaggcaagttttctctttaaaattcgtaaaattgcaaaattacccataaactcgtcaggaaggcttcgttgcgaggaagcattttgcccgtcgcgatggcgaaagcatcaacaaaatgggaaactttctaccaactcctgtcacaacgaaggattctgcctgttacaacaagcttcggctagaaaatttctttgtacatttttctcaactttttcatttcttgtcctcta

SEQ ID NO: 328767 - DNA, 871 bp, Cannabis indica
catgttagtaaatctagatcatagtaaaataagttccaataaaatctcctaaaatggttcgaagtttcttcttggctagacctgataatatggcttttgatttttgcatcattaatctgaagtaaggtttaggatttctgggtctgaggtttataaactaaggttggaaataaaggacattcggattctgaggattcaaggagtgtgaaatctaggttaaattgggacatgacttcaaagaaaaaaatgccctatttcctggaaaaaaaatagagcaaaaactaaactcaaagtctgcgaatcgcgtaaccttaaaaatttctaagccctagactacccaaatattcacacaaagcttatataatcagattgaatatgcaacatactacactcatagagaaatcaagattgaaaacctaaaagtcaaaagaaagcagaattcacttactagtttttcgaaaatttgaagaactttgcaataaaaactctgaacactgaaattctgagtcttgaaaattttaaagtcacggggagcactctgatgaaacacagaggaagaaggtgagagacaaagagggcgtgcaaattcagagaagaggttggttgagagatttttgaattctgaaggttttgtgggcagtaatggcaaaaataaagggaaaatttgaaatttatacccaattatggtggtaaccgttcgatcaagagaaaaatagattgaaccgatgggaactaaatgagaaaggaacagtcagagcattaaatggtaaaatgatttgtctttaagttttgaaccacgaaaataaaagcatgtaaaatttaaatggaaaaatatgatcgtaccctttaggcatttaaaaagtcattttct

SEQ ID NO: 328768 - DNA, 724 bp, Cannabis indica
  modified_base (20)..(20): a, c, t, g, unknown or other
aaaaatttttttttttttanaaaaatatttatgttttttttttaaatagaaatatttttttaaaagttcctaggttgggtagatattaagcaaaagtctaaactcgttgtaaatctataggtttataatagaacaatttatataccactgcaacttcaacattgtttggttaaagctcaaatgtaacttcacttgttaagttgttacatcctttaattaatgaagtccaatatttcaagatgtatgtacacatatcattaattttcaacacataatttattatttattgagacctaaagaatcatcattttctaataaagatcgagcacctcatacttacaaattaaaagtaccgatctcaaatatacatattattaattaattatcataaatatgatcctattgatttttgaatatagtttaaaagagaggttgcacaactattttagtagttagtatattatagtctgtctaataatatatttaagagttatttaggtatctcctattatattatataatattaaattaaattatgttacatattatatttttatataattatatattgaattttaaattatattaaatattatgtatttcctttttaagtaaaaatattatatatctttatatattaaaagtgcatatcaattcttggtttaacgattcttggtttaacgattaacttaacagactgttaacgttaaacgttaacaaataa

SEQ ID NO: 328769 - DNA, 768 bp, Cannabis indica
ttttgtcttttttttttttttggaaaagatacttattagttatttattttttgagataacattgtatacaaaatacatcattctctttgtaaatcaacttctttagtttaatcccttttagctaaaaaaaaaatctgcaaaaaaacttttttggtttaatcccttaataatggaatttaactatacaatgaaataaaatttagtatttaatgaagtgtgttatactccatatgccagagagaaatttattttatttcttgtgtcatagtagtcaatattaatattgaaattaaggttgaacgtgaagaaaattttaatgatagtggttgattttatttttgagattgagagttgttatggtaagttaaaagaagatatataaaattagaatatgagtggagaatgacaagagtaaaagagagagtactgtatctatatatatttatttttttcttaaacatagtcttgtgaacatctctaattgaaatcattaaatctaatatcaatttttgtttaaatgaaaataaataagatattaatatttttgaaattggaattatattttgcaggaagaagaagttgaagtaagtaataatacttcttcagagtttgattctagtgatattttctcaacaaatttggtactacaacatatgtattttttatattttgctcacaagttttaagatatacttatgttttaattatttccatttaatacttttatgtagatttttcattcgagaaaatctcttgttgaatggacca

SEQ ID NO: 328770 - DNA, 996 bp, Cannabis indica
agataagattaattttatcaactaaattgctttattcaattataaatgtaaaagcaaaaatatcattaatattatggctgtattggaaatttatgtgttagactttttaaaaagtattttggtagattttttattgttattgtattttgaaaaaaaaaatttgtttttttataattgcattagtttgttgtagtaattttagatcatttgtatatttttagaaaattttaaataatttataatgcggaaaataagattaaaagaattacttattatgagtataaaaaaataaatttgcgtataataaaatatatatataaatttttttttaatattgtaaattatttgaaattttaaaaagtttatatataatcttaaattattataatatgtacaattataaaaaaaaagttaattaatttttttaaaatacaaaaataaataagagatttattgaaatacctttttagatagtgtagtactgttgtcactgaataatataagttgtacagccaataatccttattaggtgtcaaatgttgaaaaagtacccaacaaaagccaaaacataatctgatcaataattaattatcccatcaatttaaataatttattttcaaaacaaattatatcttcacaatattagggactcattgggaagattgtgcccgagacaaagcatacataatatttaattgtttcatcaaaatatcgagaaaaacattatgaaatactaaaaaaaataaatataaatataaatttatcttccttaaaaacaatataaaaaatatattttatttttctatcattagggcactcctaatagctaaaaactgtaacttcgcggcccataatgtggctaaatgggcgtaggcgtttgccaacaatgtcatgggcatggtagacatatctactatacctgttaatatcttttgtgatgaccatgagatctaacttcaattttatttataaacacatttttcaaaaaaaaaaaaa

SEQ ID NO: 328771 - DNA, 826 bp, Cannabis indica
catatattattgaacaattttacaatcacatacgatatctatttcagtattcgaaaaaaaaaatttggttacaattcagaaaaatgtaggctcgttgaacatggggttcagacagtctatttcatatgcgtaataaaaaaaagagtcttgtgtgtaacaaagtgtttggactctattttcagcatttttattaattttttttattcttttaaaattttataagatgttttaaataactataatgtagacaactataaaaaaattaaactaaacagataaagagtacataaatttaaaaatgcattgtagaatcttttataattactcatatccgtactaattaaatttatgaaaacatatgcaggttttaatgatgcttgcttgttgggatgaagatccaaatggagaatattttaagaaacatattcctagaattgatgattatatatggattgcagaagatggaatttgtttgcaagtaagtaaatatatatccaaaaattactataaataatattattacttttagcaacaccatcaatttttatttagagataagttatgtatatatatatatatattaattttataaatatgtatatatttgtagttattagagacaatatttgtttattagacacaacaaattgtttattacatataaaaacaaacaagtgcatggtaaaaactattttggtgtgaacatacttatgaatacatatttattttcaataaaacaaaagataacaaaggttacatttggtaatatttttatatttagattttttaattacaaaaataaagtaaaatttttgttttaaatttt

SEQ ID NO: 328772 - DNA, 705 bp, Cannabis indica
aaattttcaatgcacatctttaaagtggtgcactgatgtactcctacctgtttcggcattcgagagacaaaaacaattcaataatgtggtagattatttcttagtgtaatgagataatcataatatggactataatcttgtgagatattattgagttttattgattttacagtattttaatttttaacaagtgattttattaaattaataatttctaatattattaaaacattaatatgataacactgattatttttttagtgtaattttttatgttgtggttgaagtagaaatagtttttgacattaaattttttttgaatggaaaatgcatccttattaaccattaaaattcgttaccaaagaaggtaataagtcgattggaacggattccatatcgaaagtacaaccaggaaaatataaaagatctagcacagttgtgagctactatatttgttgatcgtttaatgaacaattttttacattaaatttagtgatagtgtgacattaaatttagtgcactccttagagatgctctaaatctcttttcaaatcacgtgtcattagatttatttccttcgtccaaccactttttttctttcttttttgtctttctcactctttgttatctaaacactaaccatttattttagtttttttttatcattttattattatttattttaattacatctctctctctctc

SEQ ID NO: 328773 - DNA, 788 bp, Cannabis indica
agagagctaagcagcagcaagccccgtcaaaacccgggttgccaaagggttcttctacctatctaagaccaaagaggcttgggttgtaaagtgtaaaagattatttaattttagttccttgaaccaaaaacctgttatattcgcaagagcataaattttgttcctgatttaaccaaaagttgatgaagaaaaggaaaataaaattctttatttgtcacatgggcatatacattgtcttctgttctgtcaagcaaagcagagcttggaaggaagttgtaatcaccaaaaataattataactgagaccagagaaattattgctaaagatgtctgtaaatgactttattttcttttcatttgtaagctgtaatcacccaacaatagtcattttcttcaagcctaatctattggtaaactggtgttcccaacataccatttattaagatataaaaaactgcattacatacattatggatcctgcctaataagaaggcaatgaattaaattttgtctaaataggaaaaaagtactcacacatatatacaatcatattttaagtatgattctttaaatctcacacacaaagtataaactgctgttcatgatttacatatcttagaaaaacttctttctcatccataaataaatacaataaacctggaaaaaaaaagtaataactaatgaaaaaccaatttaactccacttatgacgttgtaataatccaattgagaacttttttatagaaaaaaaaaactttgtcaggtttcaatccacaccactaattctaag

SEQ ID NO: 328774 - DNA, 724 bp, Cannabis indica
tttaggatttttagttttttttttgcttggagaattttctaatctttgccgccatttacaattgttttctgctcattctctagccaggctgaccgacttattttggattagggccaattttaaagtatatgaaatctaaaataaaattaaattttaaaattcatatataaatatgttaattattatttaatattttagtttagaagtaggtcaggaattaatcttttgacctttttgtttaaaatcactctctactactacactaaacattgttatatttttttattatttaatattttatatttttcatcacaatttcgaggtcctgagcgtgcgggcccgtggcgcatacccgactcacctcacctcatgtcaaccatgctctagaaatgctttttaatggtcgtttatctcctcttcttattgcttttgcggatcttggagcttgcttaccaatttaatttcctttctattttggttcatagtggcctttgtgtgttttgaatcctgccgaatttctggctcaacgttgtttgttagagatcgtcgcttcctgtttgggaaggtttagatctatcactattggtggtttgatgggggttcatggtggtagaggtggcttgtttctgtgtcgagttgttaagttcattgttattgagttgtttgtatttaatcagggatagcggttttctaactaactcttcttctttgattggataattct

SEQ ID NO: 328775 - DNA, 1296 bp, Cannabis indica
agcccatacgtaagtaatagcaaatatgttggttagcaaaatatcataatggatgagtaataatttgactaatgtgtctttttattttgtcaattttccactttatatatatagttttaaaaatttatgtggtatggtagaattctagggttgttttagtagatttttttatctgcctttggtatttaaaaaaataatttaatttttatatgatcgcatgtatatattatagttatttaaaattatttataattattttagaaaactctaaataaatatcaatactgaaaattaaatttaaaaaattatttaccacaaatattagaaaatagtcgtgtaataaaatatataaattttatttttcgatattataaattattcaaaaaaatttaaaaatttatcagtggtcttaaataaccataacgcatacaattataaaaacataaattttacttaaaaactctttcataagtcataagtcgaagcagataaatactctactaaaacatctatttaaaaagtataatgtaaactcttctcataatttaaattaataaatatggtccaaaaaatccatgtcatattttgagatggaaatatgattttatgactagatgcttcaccaaattttccgcataaattcaaaacattaaagctattaatgacccattttgaaagtgacttatttagaaagtgtgtttccattaccaaacatctctatgtttgttttttgcatacaacacaaaaatatgtataatttacaattattggaatggaccaataaattaattagtttaataatagtgtaagaattttgaatatagtgaaaaaattggggaggctattatagagtcctttgcgtgtaattatgaaactcttcatcaaatctataaactcttttaagtgttcatacttacttcatactataaattcatgcaactcgattacatatataaattttttttaattattaaatgtagttatttaataaaaattattagtttaaatatttaaatttaatttaaaagtattaaaattatagtaatttatattgtaaatatttaaatttaattctcagttataaataaatactttaatttaatgtttgacgtcaataataattaaattatatttttacaactttagtaggttttttattagtaagtgtcaaattaatatcatatataaataattattacataatttatatatatttcatatataaaattactgtattttgtttttcttttattttattttattgtctatgtgtgtgattggtatgagtacactaag

SEQ ID NO: 328776 - DNA, 1369 bp, Cannabis indica
gaatgatacccttctgacgaaatttcaatggaaagaatagcgttagctcctctgcatatggacggctgcatctatatgctgcatataaaagttaggggaaacagcttgacaaccaaatactataagccattcctacagtgtcaacatcttccaaaagaacgattgaccataatcacagttttcgaatcccaaagtcgatggttgggaatgagtctagaacatcactttcagaaagtatccaacaatcgttcatctagtgcagccaggggatcaaacgtcgaagaagggctctattttttcttcatctctgggtagtctttaaaccaagtaggggtatttctcttcctcttaccaaactcgacccctctaggtggtgcttctaaagccgaaatgtcaccctgtgactagttgtcacctatagagataatagctgtatcgatagaggtagctggagcatcctcatagggatcatacccatcaagaaagacctcatcatcaccacccataacagatggtgagagtgatgcagctgctgatggccccggtgctacatctaccgttagcgtacgatgcataaagctcaatatagttctgagctgctccataatgaggttttgaccacccttcagctctatatgtctatcctaatatgcctcctttagttcgacatgacaagcgtaaagacactttcgctcaacctcgatcatgtctaacctctccattaattctctatactcgacaccaccaaggcctgaagatgatgcagtgggctgagggtctgaagtagtgacctgataaaatatatactaaaagaatacaataagcatacggtaatataacaaattatttagataattaccgacatatgtcgataacatgtcgacatactatcgacaatatcttaaaaaataaaaaatcaaataattatcgataaccaatcgacaacatgtaataccatcgaaaaaacctttaaaaataaaaaaccaaataaatgtcaacaacttatcgacaacatgtcgacataccattgagcaaaaaaacaatgtcaataaacaatcgacaacatatcgacatacaatcgacaatatctttaaaagtaaaaacacaaacaaatgtcgacgacctatcaacaaactattgatatcatatcgacaatatgtggaaaaaaaaacacaataaattaataggtaaatagtgctataagtacctaaagttttgagtttgtaagcggcataaacccaatgattttttttagtggcataagtactcaatgtttgtaaaactgtaatttttctttatttttcgtcagtaagggctccgttttaaatttgttaaaaaaagatttggaagtaactgatactacatattt

SEQ ID NO: 328777 - DNA, 504 bp, Cannabis indica
aaatttaatgtaagcccaaataaaaagtctaacacatataacttaataaaataaattttaagtaatatcactaactaattgtcagacgtcacttataaaaagtattagacaccactaatacctaataaaaactcagtaattaataaaacttatttaatttcctaataactaactaatattaatgataagttatagtagaattttgatgattgaataaatgtttatgtttagtgttatttaaaaataacaaacaaacaaataatatcatgtatatgtgtatatggcctatagggcatcaacttgttcattctttctctatcgaaatacagagagaataaagtttcattttttgcaaaaaaaaaaataattatttacacactttatttgattaatgaaactagaaaacagactaaccacttgaggttaactcaagtggccatagcaaggtgcgtgtgtgttggaggtcctgggttcgagtcccaagttatgcattgtgtaatatat

SEQ ID NO: 328778 - DNA, 781 bp, Cannabis indica
gcataaaacccaacagtttggacttatgcacagatagttgagttggccatacctactgagggtgcagaatatcagattcgaaagaaaaatattactagaagagattcatggaagcagacatctggtgcgtgttctggtaggggtaatgaccctaatgatcataagaaaagggctagtgaaccatcagctacaggctcaaacaaaagattccaaggtaaccaatgttttgtcgtggtggaaacaaaaactggcaaacttttcatgaatgtctaaggtgcaagaggcgccaccagggcgagtgtcagaccagggcctatttttagtgtggggtagtgggtcacttaaagaggaattgcccacagcttctacgactagaacagaagaaggatgataaacctgcacatgctcggtgtttgccctgacttaggctgaggctgatgccggcccttccactgtgacaggtcagctttctgttgctggtactttgttgactattttgattgactatggagcgacgtattcttatatttcaagtagattaattgaaaacttaagtagacctagtgatacgctttcaataggcttcggaactttactacctactggagacctggttatctctagcaggtgggtttgatcccttccagtatttatggaaggaagggagttgaaagttgatcagataaaattaaatttggatgattttgatgttattttgggcatggattggcttgctaactataacgcaaccattgattgtaaaagaaagatgataactttt

SEQ ID NO: 328779 - DNA, 2259 bp, Cannabis indica
tgttttttttagtataaattatttttgtttcaagtataaattttagttaacgtgtaattattttttgacaatattatttatcttgtttttaatacttcatgaaattttaaaacgaaccaaataataagttatctaattctagatcatttaacacaaaaattaaataaaaacatatgaaaaatattacaacatcataaaaactgttgcagtaggttcaatctcgtagtttgagcacttaattattatgtaaggtaagtaattgcactactaacaatcttttcagtcgcaaaaaacttactattcccaactactgacaacgatttaatagcagttatttatttttatcaaacgttgtaaataaataaaacctgagatttgatcacgtttcatgagcggttactaagataagaacaaaaggaataactgacattccaaaactcctacaaattgagaggggtgatgacaaattgagaggggtgatcacttaaagagagaattcttctttaaataatgtttcttactctataataaaaacctaaaaaataagatggactcgtggactatatagatttaactacaaaaccacgaaaaaaaatcctttgtcaatatataatatataattctgtatttagttttttacaatatatatttaatacacaaaaatacatcatttattgttaacaaaaatttaaattaacaagcttacatttaaacaggacgattgtaatatcttaataagcataatggtaaataattagggtttatatttttattatgagctaattaggcaataagtgggattatgatcctactaatctatttcaacataaattttaaatctgttacaagtggataaatacgcgtaatttattaattactgagaattatatagcatgtgtgaatgtaatatgagttatttgtggaataaaaatattttcagatttggtgaccttggagactcgatcgggggccaaaaatattatagcatgtttaattaatagattttttggcaatattatgataagttgatagtataagtattggggtaattaggagaatgtgaaatttaatctaatgccttaaaagtagaaatttcttaatgaataactattaataataaagttttattattattattattattattattattattattattattattattattattattattaaagtttattaaaaacatgtatttgatatatacatgttatgttttaaaacataaacagttacgaacgaaaccatccttcatcggtgcgacaaaaccctcctctctattaatctattttctttgattttcaatccaaaacctagtaattcaagctctggtagtagcgggacaataaatcatcaaagagggaaagcttgagataaagattggtttcgagttaaaaacaattagttttatatagtgactttgtcatttagagtagttatgaagatctgacttcatagaattgttctttggtagctatgggactagttttgatgtttacttattgaatttgaggtgattgtgagttaaaaatcgagtttggaactttttaaagctcaagtctgagctttaatatcgttctccgtttatgggctcgattttaatttttgttacgtaaggattgttgtatatatagtatacatgtgtcttgtgaaagtttagaatgatttggataggtttcgatagtgtttttaagagtgcaaaatttaggatttttgtaggagatcagaaatcgtatttttgtcataatttttcactcagttgtccgttttgaacattctacatactatttcgaagcttatgacgagctctacaatatggtgtctattttagagccaaaatttaagttttattttattgtatttatactgcagagtttggtagaaaactctagattgtcttatgtgaatattaagtagtgctttgggatagacacttgttggtttactgttattatgacataaggcctgtgattgtcgatcgttctccaagtaggttggccaacatacctgatccaaaacatgaggtaagaaaaatataatgtacaaaatggcatgacaagttttgaaattatcgattatctgattaggcaatgacaatgtgaatatgatatacaagctcacctaattaagtgatgtgatatataggtgtcaggttatggtacatgcttacttgattgggaaatgtgatatacaagtgttgggttttgtgccctaaataaaactcatttaaatataatcaaatttactaat

SEQ ID NO: 328780 - DNA, 1058 bp, Cannabis indica
gattcaaatttacatgttttttttttccataaaagatttctcttttttttttttctaaatgtttttacgaatatgctttttgatattttttttttggaacttccattaaaaaattaaaatttaatgtttaattcataaattttaatatatttcataacataattaagatataagaattgcaatacttaccgaaatagtaaaacattataactacgagtgattgaaaaaagtaattaattaaaagcctcgaatataattttaataataaaaataataatagtatgagagggttaaaaaaaaaaaggagaacaaaaataaaaaataacaacaaaaaattaaagtaaataacacaaaaagaagatggtcacacgtgcaatatactatttgaactcttgtttttggtgtattaaatgtttctgtaattttttaaaattttgcaggatattttaaataactataacgtatatgactacaagaaaaaatttaacaaaaaattattacagatactaaaactgatttggtgcatcagtgaagtacactgtaaaagttttcaataaatattatcattttgcaacgaatatttttaataaatatctattaataatattttaaataaataaaattatattcataaaataaactcaagttttatttttattatataacccaatttaattttttattttataagttagattataactaggggtattcatcaaaccgcgtacaactgtacaaattgcccgcaccacactacactgtccaaaaaatgtactttgaaatatttttcggtgcagttgtggtttgtgttgcccctaattttgcccaatatatgtggaccaatcagacagggacacgtggatcaagcaattcacaatatttgctaagtctttaggccataaggtaacgtcccggacgtaagtcccggagaaggcacatggaactcaatatgctcctggaagctcacatagcgctaaggcatctccgcgaggtgccaggtttctcctgagcaatcaagtcgcattaaatgccgcatgggaggaaacgtgttgggactg

SEQ ID NO: 328781 - DNA, 636 bp, Cannabis indica
agagaatatcattttctcatctgatacaactaaagcacacatatattatatatttagtttgtaaacttcaaaaccaatagtggtttggattgaagttagatttaaatctctttcttctactctgtaaacatattttcatttatttcttaaaaaccatacttaacacaactatgatcttgatgtttaattcacattaatacatggtgttctttgtttgggatttaaaaaatgacgcaataccccatatattagtttgatcgactgcaatgaatatattactcgaaattactatatgggttcaatctagatgatttggagtttggcaactaaatttatcataaacaatttaaacaaaaaaaaatgtaagattactcacaacaaaattataaactctcaaaattttcatttaatatagtaattaccccataattaaaaatttattgaaaattctttttcactttattatcttgtaaaagagtatcaatgaatatattattgtatagctttaaaattaattttttttattaatcgcaaaaattgcattgtgaaggattggaatttacataaatattaaattaagagaaaatccataattacagtataacctctatttaagaatacttattcaagaataac

SEQ ID NO: 328782 - DNA, 1011 bp, Cannabis indica
ttgacgaggtttcgttgcttgttctccaactcttacgccttcgagaacaacaagacaagacccatgcattgaacatgagacaattattcaaggaggtaaacctaaacactttgatgagaatgattgctggaaatattagacttttatctgagcttacattaatattataaatgttttattaaaatatgggttgatgtggatagttttttgtcgttttggcccatattgtttgtgatatctagttaatgggcttagtagacgtttttaattaacttaagcttttaatgcggaggctcagttcaactagggttttatttctagctcccctgcctagttcaatagttacatattgtctcatcacaattctatgttttagagacctaaagaagatgacttattaggtttgtattacactaccaatctcggttgtttattagtcatttctatagagcgatcaggtatgttttctacatcattaaattattcattgtgttctaaattttctacaatcttgtattctaatgtgatataaattttctaacatgtggtacaaattgtcaattgtatatgatttatggcttatattttgtttaataattgattaatatagattaattctaaaattacatattagtttcgttattattttatgttaaattttttatgtattgatcttgaaacattacaattattattcttactcttgtattaagagttagtcccacattgctaatgtgtggaaataaattgtaatatataagatgaatgagctactcctcccattgctaattagttttaaaatgaaacctcattcatcttatctccaaattctaacatggtatcagagccacttgtgatccgttgaagacaacctcttgggatgaagcccactcgtggctgtcagagactgaaggagagtgcaatagtttgtggattccgtttttgaagattttttttctaatattattataatttaatttttgaatttttggtgatttttaatttattttt

SEQ ID NO: 328783 - DNA, 1114 bp, Cannabis indica
atcacttatatatagtgaaaaatatgggatttaaacaaatataataatgtattcaatttaaaatttagatattttaagagagaaaaaagattttttctctaatattatcatttaaattataactctctataaatatctttcttatcttttataaatatataacataattttttttttaatattacaattcaaaataaattttttacagatatttaaacaaaagcatttttctattattttttttaacttgcgatgaaatcttttttttattattttttctgtacatttatatacacgtgtagtcgtatatcatattcatatttcttttctttctaaataaaaaaaaaaacaaattaaaaataagtaaatagttgatgttgtacataaaaaatgtaaaaaaatttaagaacaaaaaggcttacattaaaatatagaattacacattaaatagcaaactattctgccttctgttttcctttttccatatccaaatggatggttttacagacacgaaatcttgattcaaagaataataaattaaaaaatatgtaaatggtatggatttctttcaagatacaacaacaatcaccattttccctaaggagtgaatcaccccttaagagtggaagaattgtctggccctagctaggattatcacagagctccaataaacatatgcattcgatatgaggagtgtgtgggaacatgtctacaggctgtacgctctttagcttgtagcacccttttatatttttctccatctgcgcacaaatttttttgatctaataaatatcgctacgcattaaagaagtgagaactggtaaatatgtgaaacttaccactccatgacagaggtaatcaagatcacgagcacaagttgcaggattgcatgatacataaattatttgtggtgccttgagctttaagaggaatttaaatcaacttcatgtgcatttccggggtcgatttggatctaaaatttttatcatataattccaaaagtagaagaagaagaagatatgttagcaatggagaacagagaatccactacatctgttctgtttgtttcgaaatgcaagatcatttctctctattttagtagaaactgaaaaaa

SEQ ID NO: 328784 - DNA, 2065 bp, Cannabis indica
acttctgtttctttattgatgttgaataaaatagattacattgaaatggagttttatttagggcataaaacctaacacaggtgtgagtctgggttcgagtcctggtctgggtcttggtccgtgtttgggttcaggtcaaagtcttggtcccaaatccaaacaccaaccacatgtcgagtctagttctagttttggtatgagttcgggttcaagtttgagtctgggtccaagtccatgtccaaatcccaaatttagacaccgactataggtcgggtcgaagcctcgagtcttgggtcctgggtccctgttccgaatcaagatccatgtccagtgctacctcatgtgtttggtcctggtttgggtctcaggtgcaggtatgggtctagatttgggtcttgggtcctgagtcatgggttcaggtccccaattcaggtcagggtcctaggtccagtcttgctagggtcccagttctagtgaaggtcccagtccatgttcggtactggtccttatctcaggtcttggcctagtctaagtctgggtcacgatttggttctcagatcccaagtccgagtatcaggtcccgggttctagcccgagtctaggttcaggtctcaaacgtagtctgggtttgggtcccagtcttgatctcggtctgggtttgagtcccgagttcgagtccgacttctggcatgagtccaggtttgggttcgagtttcagtccgtgtcttggtccaggtcttggtctgggttcgacttcttttactgtttaggttctagtccaggtctcgagtcatgtgtcttgggttctaggttctgggtcgcaggccctggtgcaagtctgggttcgggttggggtctgggttagggtatcgatcctagtctgggtctaggttcgtgttcggttctccatctagattcggttttgggtccatgtcaaattcatgttcctgggtcctaattttagttcttgttccgattttgggtctcgcgtccgagtctgggtttgggttctggtctagaaaatgttccaagttggggtctttgtgcgattctaagacctagacactgactacgggttgggtccaagccccgggtcgtgggtcaagatccgtacccaatcttgggtccgtgtctcgtttcgattcagatcgtgggtcgcgatccatgtccatatctgggtttgggtcttggactgagaccagggttgggtcttgggtcccagtcccagtccagggtcctaattcaggttctaattttgagtttgggtccccaatctaggtctcggtcttgggtctaggtctgagtttccaatctcagtctaggtctaggtctaagtctatgtgaaggtttgggtttgtgtcctgtgtcttgattttagttttgattcttgtctgtatccttttccgggtctaggtcaaggtctgggtcagggtctaggtccgagtttgggtctgggtttgagtccgggtatgggtcctagatccaaacactgactacgggtcaggtccaagccctaggtctagatttggatcacggcctctagtcccagactagttgcacttcgggtcccaggtcctggtccactttgggaacaaggaccttggtctaggtctaggtcagggtctcagttcagatctaggtcctgagtttcgatcccggtttgggtctggatctaggttcgagtccaggtttgtatctggatccctatctaggtctgggtctaggttcgggtccgggtctcagtcttgttctgggtacacaaccgtgtttgggccctagtttcggtctgggtttggggctaggtctgagttggcttctaggtctaggtccgggtcttggtcacggcctagttttgggtcccgagtcttggtcagggtccgggttcgggtcctgatccaagtttggatcctggtctttgcccaagatctggatccctatcacatgtctggcctagttcttgtgcgtttctagttcccaatcccagttttgtgtcccgagtctggttccatgtttgggtctgagttcgggtccgtgttcggatcccgagtccaggtttgggttggga

SEQ ID NO: 328785 - DNA, 1097 bp, Cannabis indica
ttatttttatttttttaaacattttaaatatatatttttatttttaaatgatttttaaatcagttttaataaattttaaaatgaaaaataaaaattaatgatgtggactaataaaaggatgacatgtggacacttacctagaagaaaacggagaggtacctacggaagttccagaagtgtgacggaaggtatttttaccgccaaaaatatgacttaggtatttatcagctactcgggataaaacttaggtatttttgccgcaaattactcttatgaatatcacctattattttttcaatttcccttgggctatatagtagtagttttggatagaagaagatgatgtaactataataaaaacaaaacagaattctacgtacctgaaataaattaaaataaattttattttatttaaacatgtcattacatcacatgttcatatcacaaaaaaaacatcatataaatactcaaaatcaattcctcatcttctatgacattaatttcattttttttattagatttcttacgatgcctagctacaatttcttgggtagtgtctagacttttcacacacaaagtaatagtctttaagttggatgttttttgtttgaccttaaatatttttttactatttttattattgttgttgcttttgtgatgcttatttatctggccttgaaaacttcgtctttaggctctttcacatttttcttattttttaatctcgatttctcttcaatttggatatatttttggatttcttcctaaagcccttctaagttagtggtaactttgccacaattgcaccaacttaaaatactttgagaaactcaatcttaagaatctttaacttgttcacaataatttgtaactcatggatttgaggaagaaaatctttagcatcactaaaataaaattcaaaatattcaaaaattaaaaaatttcttgttcccccgccttgtattttgcttccaaattaggcatcccaaatctccttcgtaaatttggtatcagtgtagatatcatttaacctatcagacaatattgtggatattgtcccatatagaataaatggtagaaaattgagccatatataa

SEQ ID NO: 328786 - DNA, 583 bp, Cannabis indica
aatatcattattatattcattgagttgattcacattccttctgtaggacacatgtcagcttttggtacatagccaaatctcgggtataacaggatgtttttcccccaatattttaatccaaggccatcaagatagatccaaacgaggatagatttgattaaattcaatgaatcaagatcagacgtccaaggtctaataaccaccaacttcttatcaaaatgtattacccccgtttccaagacaatatctttagtaacttcatctctaaaactaaaaagggtaaagcctgaatgcatcctcacaatatgatctatgtctgaattcccccaaatccatttaacaaaagggtaaatggcgccaaaaccctcaaaactttcattttggcttcacttaaccctaaaccccaaattttggcggtaaaaccctcaatactcctattccgttagcaatttaatatttccgtccattttaggtgttaagtgccatgttagactggatacagtgtacacgtgacacaattttattggtccacgtaaaaaaattatttaaaaaaattaaaaaattaaaataaaattaatttaaa

SEQ ID NO: 328787 - DNA, 1568 bp, Cannabis indica
gtaaggtttactaaactttataggtgtttatttcattgttttagaattcatattaggttgttaataaaacatacatggtagtaaatctagatcctggtaaaatatttccaacataattttcagtcaaattcttcttcgaaatccttaaaatattacattgataggagtgtttgtacaagtgtataaagcaatactccaatagtaaatctcagcaacaatatcatctaattcaatcttattagaaaatattccaatttctccctctaattcttttttaaagtgaagaattagaaaataatgttaattttcattaactagcctaaattgacaaatttttttattaaaaatttgagattattgttgaataaaatattttctagatagagattttacaagtgcaatgaagataggaaagggttctagattttatttgggcaacatgtcactgtattaatattaatagtcctaataagggtttaaggatattatgtggacttgtaggggagggtgacaaatgtcactgtagtaccttttgtttgctgagcctgaacattaaattttaacctttgaaaaacttggtgtagtgaatcaatatatttcatcgtacaagactaagtattagtgaaataccatcccaagtataacacttggacaaatgtttactcttaagttaaacattcgactataatagactcaccattaagtgacgtacaaagtttctaagggaaccatgtatgagactaaggttgtacatgcgtacaaggccttaatgagatgcttgtcgaggtcaaaagaggacagaaaactggccatccgcttggaacctaagcctaggctggccaaggtttccaagctatgagaggtccgaccttggtcccatgacccacccaagaacttgccaaggtcctaggcctaggcatggccgactaaccctctagggcgaacacctatggccggccaactcccatgaaaagaccctatggatggccaggtcttaaacaagacatctatggtcggccagggtttttgatgaatcaaaatgtgtgtttttcaaaaattcaaacgtgttctttgtgacttaaagagtcaagaatcataacgaatgtcaaaattgaatctttttgatcaggaaatgacatagtaagctttctaaaactatcatgccgatccaaataccagaaagactacaatctaacgtgagaattaaagaatgttcaaagtgaagaaaagcttcaaagaaatcatggaaaatccaaataaacaactgaagaatcaaatttgaaagcttacccactagtagaaactattgatggaaagcttggatcatcaaaataacatgaaaatctcgagagttggaagacaaagggaagtcggcctctaggaaagtgaagaggttttctaacttgctttcttgaagagagcaaatgaaatgtgggaaataagaagtgagttactctcataagcttatatagcttgtatgggaccctctctcacttgcgatgtagtatacatcaataaacatgtaaaaatataatgtaacacgtggcaaacatcagtaataaatacga

SEQ ID NO: 328788 - DNA, 1137 bp, Cannabis indica
taattttaatcttttcttaatttttgtttaaccaaatagaagtagaagtttaattttaacgtatttaactacaatccttatgggatcgacctcactcctggtgagtttactacttgtagcgatacgtgcacttgcgtgtgaaaaatatcacaacagttggcctcaaactgttgatgttgctttggaggctcttttatcttctgcgtcgatcaacgacattgatcgatctgggacttgtagttttttcctagtcatgtggccttgctagcaactgcaatgagttatctcctatgatgatagagtcgtctctcaagcgtttgctccgtgaggggctgctcgtggtactctactgactattttctttgaaatagtcttccttagagcgacatgtgcagagggaattgcactgattgctcaaattcaacacttctccatgcacccatgggcattattcaaactgctggccattaagacctcgagcgaagtacctatgcaataccccgttcatcacaaaaatattttcaagtgtggattattttgttggtcttcaccttctatttcatactcttcacttccgtggtagagcttttgggtccctctcccaaggttaactgtgtccttccctttacagggtcacagggtagcctagagtcattagacctatgaaaagaatcccacagaggatattggtttctcgcattgttaaaattgctttaagtagaattgtggttggtcctataagctacatgtggtggacttgtaggtctacaatcttaagtctgagtccttttagatgctcgcttatagcttgtttccctaatagttgaccactccatatcagagggagaacccatagatccacgttcttgagtttgagtcctttcggatgctcgctcgtagtttgctttcctatgggtaatctcagtacctattgcttgctgagtattggcatggctactaggagtggtagtgttttttttttcatgttcatgggtgattgcgtgcttgaacttatgaattcctatcagaaaaaagctcctagcaaagaaatcaaactataatcgggaaattgatttgtgcctctcaatgaaagcaccaaaatattgacgctaaaaaattataacgccctgaataaat

SEQ ID NO: 328789 - DNA, 805 bp, Cannabis indica
atttgtgaaattatcccttaaaaaatatatatatatggtttacttaacaaaaaaatatacagtagtgtgtcaaaaagttatacaaatttaacacaaaaatgcattattttaagatttatatttatgttatttttattattttattagtatatttagctatattgttaaattatgaaagtatttatatatttttatagttttaataaaaatattaattatacattaaattttgtatcaagtcttataattgtgtattggggtacaatattaaaaattaatacatatatatcacaaagttattttctgtgataaatattatacaatttttacatttcccatcgaagataatccaacaactattctgacacaaatagatgaccccttcaaacaataaataaataaattaaatggtagctctaaattataataattttattaatacaattaaattcagtcctaaaacattgttaaattctactcttactatttcaaaatatatatacataaaaaaaaaattataccataaatacttaaatttaactcctagttgtacataaatacttaatttataactctgaaacttctgcaggtatctggcttgtaacgtccccgcttcaagcctccattggatcttccccacagactaatgactcttatacacgagtacgtcaatttagcagcttcttggactaacgactgaccctaccgaccaacacaagtattcctagcttactttgtcctcactcgcacgctcacccatcttgaaattaccctaggtcaagcacgcttaactgtggagtttttt

SEQ ID NO: 328790 - DNA, 1235 bp, Cannabis indica
aaatcgtaaaaatattctaaatttcgtacaatcgtatttgtgtaatttttttattatttttatgtatttataaaataatcactatattcatagattagatcttctatattttttttatatcatataaatatattttaattaattttcaaacaaaaacaaaaataaagacaagacatttgagtaaataaattattaaaatataatttgaatgaatggttttctctaaaaggtaggtaagagtatatttctttaaaatacatatagaataaatgagtttatatagtatttttttccttattttctttatattttagagaaaaatgtatttcacattgttgtgagtgcagacccagttatgagcataagcgagttaggcttgtacttagggtccatttagttcaagagcccaaaaaaatattagaagcaattataccacatacattttttaacttgatgtctttaatgtacttaccatcttttttaatatctcttatgtttactttttttttcaatcattcatactaattttacctctatcacttcacaatagtttttattcttctctaatcgaaattttaccctaacttttctacaaacctacacattcatctacaatgaatacaaatctattatgcttgaaattatgtcttagttatgtgagtatgtgaggataatttgggtacaatactcataaaaagaagtatatttgaatttaattttatttagaggtaaatttaattaatgtataaaaaattcttcaacttctcctaaaatattatcccctttaaaaatgcataattttttattgattatgaaaaatacaaatttttgttttttaaaaaaagaagggtttaaaagtttttttttctgtagtctactaaatctcatagcacatcctggaggggagaaaattacattgtataactactttatttttacatgttttaatttttaccttcatttctatatattttttaaaatatactcacttttatagatgatgttcccattatactcttaaattaattcaaattatgtgttcgacttaagtagagggtgatggtatcactacaagaaatgtcacttttaccagcgcattttgtcaaactgcactggcaaagagatctaaaattttaccagcgtacatttgcagtggctaaaatctaactttcaccagcacatttacgcgctgggaaaagtcttttttgcccacgcttttcattttatgctggcga

SEQ ID NO: 328791 - DNA, 959 bp, Cannabis indica
ttttttttttttttgcataatttttataattatgttgtttttgttgtacatttatgaaaaaagccctaataataataacaatagaatcttatgaaagatgaaacttttcctataaaaattacttaatttaggtgattagtcaattgcttttggttttatgaaactttcctaaattaacgatacaaatttccatgtgcgaaatgagttaaagaatggtcttgatctaattaatttgaaaactatataaatataggctagtctttctcctgggccctaacaccagtattcatttattaccctaaataataaatgagtttgggtgatatatttcatttctgtaataaaattgagttgacattcgtacacatttatttaaagtcatttatagctagagcattgctattggacattactcgtgtcttttagcatttctctttttagctattataacttatttcaaattttaaaaaaaaaatcgatctctacatttagtttaatgaatagtgaataggtaaaatatattttatattttattttctttactcttttcatttctttaattaattttttcatttattctttttcctcatttttgtatattttttttttgttaattaataaaaaaaatatataaaaagatataaaattcaaataatatagagaagttgatgtatgatatgtaatataaatatataaggtaaaataataaaaaaaaaaaaaaaaagtaaattactggtgagatattttaaaaaataaagtaagaaaattattgagtagtgctcttaacccaaaaatagacacaattatatatggttttactttgtcattaacgccagtattgtaagtggtaatacttaggggtccgattaatgtgacttttttgtagaaaattgtctaattttgggtaaacttcactttcccttttctaattgtatgatttcgatttttcgtttattagt

SEQ ID NO: 328792 - DNA, 1015 bp, Cannabis indica
tatgtgacaatgacacacaagtctcattactattttattagccacattggataaaacttattagaagtcttatatttcagcattgtgacatagttcaaagggaatagtaaataaattcaaaagacgatttgataatcgtattaatttgagggacaaatcctacacatagcctttaaattaatataagaaatagaatacacctatacaacccgtatataataatacacatctatttatgtacattgaggtaaactaaactaactatatttctttaataactaaatttaatttttataaattatatatatattaaaaataattccccaaaatattagggggggccatggccaccccataccataacatagttccgccactgtgttgaatgtgatgttggtgctactactactactagtttgtttgagaatgattgccttcttaagtacaaaattgagttaaaacctctgttttcgggtttcgagtttaagctactggcaatgacctctttgaggtcatttttagtattctgtttacctgtgttatgtttagcagttttggctacagatgaagatgagttcttagagaagactcagggtgtaaatcctttcaaaatgtcactcaaacgaatctgtcgtgaggtaattaacttgttattttcattttaaacaatgtaacatgtaatgtaactaattaattattgtttttcatagactagtattgttaccactagaagatttttggaaagaatggttgtcaagcatttttctccacgaatgtcatggaaacttttaaaaggtaaatatattatacatattatatttttgttttattttaattgttgggttatattttaataattcaatatgtgggcttataaattaagataattcattaaggtttttacattatatattaaaatttcttgtttttttatttttttattttggggctagaattttttttcaaaaataatgtatttttttcaaaaatactgtatatttttttatactgtgta

SEQ ID NO: 328793 - DNA, 1619 bp, Cannabis indica
actaaattagtgtagattcaaaacccaacgccattaatagtatatagaatttgatacataattaatttggtgtaaatagaattgagtttaaagcttaacattgatgctactatggattcagctacaaaaatgctaggtgtgggtgccattgttcgtgacagtcaaggtcacgtgatagctgctctctcaaagccagttcaaggttgttttcgttcatgaaatggaagctaagaccctttttcatagccttaattgggtgatgcaagaatagctacatattactcatattgaaaccatgcccttagagtctctaatgctttaaattctagttgacaaatttatcgtgtttctcaaatttaaatatggatatgttcgttgtcttttatcttttttcactgaagctattatttctcatgttacgagaaatgctaaccaagttgctcatagtttaacaaaacatgctttagagttggatcaagactcgtgttggataggagaaactccttatcctatttgtactattgttgtaactaactcttgattttataataatagcgatattttcacaaaaaaaaaaaaaataacctacaaaattttgaggaattcggaataatttacaatatagaaaataatatttaactagtctagtttacacgagtataaaataaaaaatagtcacgcgtccaacacactatttgaacgtaatttttggcgtgttaaacttttctgaatttcttaaaattttgcaggatgtcttaaataactataatttacttgtccacgagaaaaaatttgactaaaaaattattttggatactaaaatagatagagatgtatcgatgtatccctttaagaaggtgcattacaaattttttcaaaaataattgagaacaacaaaaagttatttcatagagtttgcatcatttttttttcaattcaaattactttatcttgttatttatcataaacttttaaaatatttatctttctacaaatatgtttttttaatttttttattgtatccaaccaaatattttttaatttttgaattacaaaaaatattttatgctctcatttttaattaaaatataatttaaaaaaataaacacacacaaaataatgttaaacatgccctaaatttaagggcaatttttacttatatacaagtaaatattctatattacaaaaatgtgtaaaaatataattacataattctatacaattttataaatatttacaaataaacatatatgtttacgattttagcatgttgtttagttttaatcatttttcttaaaaaaataaaatatataataaacgcataaagctaaatatataaatacataagttaatatttatatttttatatatcactaatataatatatttactaaaaatttaatatgaaactagaaaaaaaatacaaatatatttacaaattttatttatgtttttacaaataatgtatatctttatatattaaaagtgcctatctaacggcaattcttggtttaacgattctttttttatttagccttacacgattaacttaacagactgttaacgttaaacgttaacaaataaataaacccaataattaaacccaaaaattaaacaat

SEQ ID NO: 328794 - DNA, 530 bp, Cannabis indica
ttttttttttttttttttcagtcaatttatcaaatttgtcgtttctctgttttcaaaaatattgaaaaatactacaaattggaacggattattaatacttgcttcacgagcccctctgttgcatggtacacaatcataaaatccttatttggatttctgtttctcatataggttagtttttttttttaaatagatttttcaaagtatctatggttttcttataaaaatgttgtgataccaagttgcaatgcattatgaataattaaagacttgtttaatgctgcccccaactagttatggtattttaaaaacatttataataaattaaaaatagcaatttttacataaaataccatttttttttctgtatttcaacatttatacggtaccataatttcagttttcaattttaccatttttttaaaacttttatacggttacttattaaaaaattacatcatgtacggttttggtttttatcatttaactgcttacatgtttccctctaatatgtcaaatttcaatcactt

SEQ ID NO: 328795 - DNA, 1440 bp, Cannabis indica
aaaaaagaaagaaaatttttattctatcaaccactaacacaaacaggctgccaagtagctacacaacaattcaaaggctattaataacaaccattgcatagttatttctcaactaactaaagattcaaataataacagtaatgaattctagccttaaagggatatttaacgtggttgctaatcgtcttcactgaatagcaagcgtcttcgaaaacacatttgttgcggttacaccaaattaaataaacaacagcagcaataatagttgaagccaccacagtcagcacattctctttcttttccgagtccttaaaccatttgttgagacaagctgtccaaccaataccactaaactaggtggaaatctcagccaacaccctttacgaataaacgcagctaaacaaaagatgatgatgataatgatgagattcgggaactagttcaaaaaccaagaaaagactagaatctatagtgatgaatctagctaactgatcttgggttaaaagattctcattgacagattgccaaagagtaaatcggtgttttagaaccttcaatttgtgctaagctatcttgtggtaagtcactatctcagttgaaatgagcgagagataaaaaaaactttagcttttaattcccaaaacaaccagctgccattaattcaactttatcaaccgtatttcccaatttcatgagttttctaaaataccaacttgtgtcagctcctgaattaaatgtccataagtcgcggttctttatatagatgcaattaatccatttgacccaaagacagtcttgttaagtagctatggcctagatgtacttagccatgagagcaatattctacttttttaccttccataaaaccaatacctccatagtccttaggcaagcaaacttgactccacgagataaagtgcaacttacttctattacccgtcttgccccacaaaaaatcccgacataacttgtcaatttcagaagtaaccttttgtgggagaataaagatgttcacccagtaattcctaattcccaagaagaccgattggaccaacagagctctaccagcaaaaaagaggtggcgactcatccaaccatgtaacttcttatggatcttctccacaatacctccacaatcagagtctttcgatttagtaggtctcaagttaacttctaggtatttcagcggaaaagaaccttcaatcaacttagaggaatttaacatttgcttcttacatctcatgtcaacaccaccaaagtaaatagatgactttgataaattagctgttaagctagtagagaaacaaaaatcctcgaaagctttttgaataatgtccaaaaaaggaagggttacctttgcaaaagataacaagatcatcagtgaagcaaagattgacaaggttcaaggacttacataaggggtgatgtaacaccctaact

SEQ ID NO: 328796 - DNA, 782 bp, Cannabis indica
gcacccttgaccacatgagctagatggttctgaaaatagcatctactatgagtaggtctttcaaaaaaaaaatttcctactacgtagggcattgattgacacaatctttttctagtcattactttgttcttacactctctcaattatcaatttacttggaaggagttcaattgagaataatgaaatagaatagaaagaatacaattttattttattctcttatttattgtaacgttttttttttttttaaagaagcaataattttatttaaaaaaaaggcacaaggccaaaagagtcgcatacaatacaaaaagatagtcttaaagatcgaaaagtaaaccaggccaccaaacttgagaaacatcaaaagataaagcaatacgagctaaaaaatgagccataacattatgagtttgaatacaatgagaatgaaatatctaaaaaagacagagaggtctttttaatgtcatacacaattgtaccaaactcagtaggtctcttataaatacttgagatcacattttgactcctgtgttttgcaaaagttgccaactagaattctattttgttaaatgacaaaatgaacattatattttccaaaatggtaagaataaaaccctaaactcaattttcaacaattttattttttaatataacaagctttataatttttaacatgaacagatacaaaaacatgtaaccagatttttcataacatttctagatcgaattattattaagtttattttggacaaaaaaatcaattcagggtcctatttgta

SEQ ID NO: 328797 - DNA, 572 bp, Cannabis indica
gaaccaaaaagtgctgattggatcgaatgaaccaacctaatatgtatgaattaagatttttttgaccttgtgtttgagtgagccttaattagagacctaacctgccttaactcaagttaattttagttatattctatttatattatactatctatatttatatatagaataattctactaaaagtactcttattttgtccttatacagtagtagtataggacaatttgtcaacccttagtataggaaattttgttaacccttagtgtatacacaggtcttgggtttgagtcccaattaaaacatgattgtaatatataaacgcgtgaataagaaaaaaaaataataggacattttgttaacccttagtgtatatatcgttttttttttttttgaataagttagtgtatatatcttttaagtgtacactctatctaatatatacttgatttgattgaatagaatttaaaaaaattttgacatgacgtataaaaagtgacaaatctgaaaaaagaaaaaaaaaaaaaagcagctattatatatactaggtgattgttacgtgccaagccacgta

SEQ ID NO: 328798 - DNA, 1639 bp, Cannabis indica
actaagtatcagaagctctaatttctagagagagaaactagagagagaagctctgaccttgtgggtagttttctgaaagtaaaaatgagctaagggagctctccttttataagtgaaggatgcccaacaaaaatagagaaaaaataaaattagatattttgaccgttgatgattttctaacagtgaaaattagctcttggtagtgatggccatttttcggagcccggcgggtcctactgcaggtaacctggagcttattttcgtaactccattgtaggtaaaatttaatgatgatatcttcaaaattacgattaatgtgtaagacatgacttgatagagaattaaattagtttcgaaatgcaagttgaattgcgtcaaacagatcgatattgtgagttatgaatgttttacttaaggcagttcatgacctagcgcccatgttgacatcacagtgcctaggttgacatatgacgtcaatttggatgctgggtaattgtaaaaatgtccaagggatgtactttaagatgcctaagtgatattttgacatcacttaatttgtttctctgttctggaaaagttggtcaccatttctcgaagatgttgttctacggaaatgagaaactcaaaactcttcatttttgagttttgagtgagtttcccatgttggaaatgagaaatgcaaagttgtgaatttgacttctctgatttcatggatcttagttattgtggaaaactagacgtatgatcgaaacaaaatcagaatcagataagtagaacgcaacgcaccaggccatttgtcaacctgggcactgggtaccctattcccaagctctctggatcttgttttgatacttccaaggttcttgagcttggggacgaggtctccaatcccatttttgactattttggattcattggttgaatcatatttgtcatttgagcaattgaaggtagagtcccacgttgatgcggttgacttaacactaggttaacctgaacgctgggccccgttactaggggcttgggtttgtggttttctcctcaagttttcttatatcttaattatttctgatgacgaaataaatacccgaaacactttttggttaacataattggaaatagcccaggttgacaatatgtcaatctaggcgttgggcccacccccaagtgtcaacctcggcgttaggtgccagttctggccttccaaaaattccgtttggtcgtcgaaaaatagttgaatctttatattttttgaaaacaaagaagattctttgagagttcttggaaaaattcattgaaagtggccaaagctgataaaatttcaacttgggcgctgggccagccccaagtgtcaacctgggcgctgtgccttgcttctagcatccatgaagtgttgtttcttctctaaaaggacctatttccctattttttttatgaagacgaagaagatgcaaaagttggatctctgatttgatacttggaaggtgcccagattgatagattatcaacctgggcactgggtgctcaaggcgccccgaggcccgggtgtcaaaaataaacttgcttcgattttgattctgatgcctaaaaaggtcgtggtatgtctagttgatgtgtcaatgcaagttttgaccctttt

SEQ ID NO: 328799 - DNA, 1338 bp, Cannabis indica
attgagaaaaagcagtccaacacactcaagctcacttcgtcaaaactgccacgtggcagcgacagaatcactgtcgcatttctgacgctatagttatgcgtgcgtcagccaatgactttgctccccacttgcgtcccacttgcgtgtgagtctcactcgcctatattgtccatatatgtatctcactctctccttttgcacatgggattcacatctctacagtatttttgtagtaaaaaactttataaatagtatttttgaaattagtagaaagtataaatgtttatttttgattggaatagtataaatgtttatttttagttattttagtttaaaatagaaaaaatccttgtaaataatatttaattactactacataaaatacaaatctttatacatataaagataattaaatctcccacattgttaaatgaatgaaaattattcccatttcattccatatatatcaccccatcccaaataacatcaacatctttcaaacaatctataacactcttacactttataacattctagaaaagtttagtgtgtactaattataacattagaaaagtttactttaatataaatgtggttgttaattaggaaaggatcgtagagccaactaaaaacatggctgtaattgtaaaataggttgctctaaagaatactgtatattgttttttttttggatgaagagtattgtatatgtttgaaggtagctattatatatgatcactttgattatagttattaaatatatgataaaatttaattatcttatgtattacttactaattaagaataaggttatgtaaatgaattattacatagaaaatataaattgatattttatttacaaaaatacttctataaggtatgtataacatttatatcttttgtgtaattttaattaccaaaatacctcttatactactacttacacaatcagatgatggttgcagagtgattgttgtgtggttgcacggtggttgcatcagacgaaggcttcaatcagacgatagttgtagggtggttgctgggtggttggccgaaagttacatcagacaaaagtttctgggtggttgctgggtggttggcggaaggttgcatcagacgaaggtttcaatcagatgaaataactgttagcaaaatgtttatgcaactgtaatgcaactgttatgaaacattaaaaatcagaatagtgttttcacgtatgtaactctatctacatgtctctttatgatttaatattaacaaattcaccattagaaatttggaaaacaacgaaaatgcaccaggataaatattttactatattatggatgtaattttttt

SEQ ID NO: 328800 - DNA, 1086 bp, Cannabis indica
ccaatgacagttattctttttctgatacataattagatcttgtcccttcttgcagaacatggtagtgcacgcacctcacacaccttttttctagacggttattctaggcatctacttttaaagattaaaccttttggcagcacatgttcatggcatattgtggcccctattgtccacctgctttaatgcatgagcataatttcctcgtagggacccaacagttagctcttttttgcatgtattttaccccattagtgggtttttacgcaaaaaccctaggcgggtcatgggcaagtccatagccgcccttagcttataaatatgattccattcccaaacgaagggggatcacaacctaagagctgaaatgctgctcctattattctaagcttttcttttcttcaagagaaactaagaagatagagttatggtttcttgctgaaatactgtaaaaatatcaaatacaccctttgaggctaatagaatgactcatggactaaggttaattaacacctaaactacgtaaaaatctccatcttatttatttttggattttacaatttctttagctcctaaatatttagttttttggaaatctcaataaacagaaaggaatatacatttgatctcctatattttgaaatatattttatatcatacgtataatctattaaattattaattgtatatataattgttaacacagattttcgttaaccaaatttgagcctaaccatgacaatcttgcacagaaaaataaaggctataaaatagaaagtatgaacacacaagattttttacatgattttgtagttaaaattatgcatagtccacgagtaaatgttattcagatttctgatggttttctcagggccttttttgtatgaattttttcacccctttattgatcttacttgccactatttataattacatagtgggcaattaattacaaagttgactgtaatcattttacaacgatcatcccctaaaatcatggggtttgattacatatcacgtagtgtaaatgtggttattatttggaaatcatatagctgtgatttccccgcttttactgggtcaaaa

SEQ ID NO: 328801 - DNA, 1454 bp, Cannabis indica
taaatttgatattacctacataacagaatgatgctaattttggagctgattcaattataacgttcatttcaacatcataagagttattcaaattgaaacttttcaaggattgactagagattttaatctgcttcaatcccaagtattgacagttgcttaaagtcaaattctcaaggagaggaaggcttgagatgagatattctatcgatgacttttccattcgccaatcgcaagttaaagagagatttctaattgccttgcttacagatagatttttgctaaaggaaacacagtatagatccaaagattcaagatttacagcttcgatttgctccactatattagcaagtctaattttcaagaacttgaggcttaaactacttatgtggagctgatgatcattactcaaactacaagaaatcaaccacaatttctcaagggaaggggaacccaacaacaatccatctaccacatccttatctgcaaaccgaacaagggtcaatgacaaagacttcaaagatggaaaactaaacgagtaacgagaatccaactcgaccatactcaactccaaaacagtcaaacaacttgcattgactactactgttttaggtaagcaatagtagtaaagctgaccatcatcatcatcattagctctagacaagaaaagatttatttcctcaacactattctcaacaacaaaagctaaccatttatcaatgtgggcagccttacttcttttatagcaatccatgtgaagctcaaaacgagtaatgactgaattggggatagagtgcataaatctcttgcggtgctccaaacaattgtccacataattgcagaacgttttctgtccccctctcaatctaaaacgagtagttttattagagaaagagagtttggggactttataccacatgagtttccaacgcttcgaaatgagacaagttgaaacaacatcctcaatgggaagaaacgacagtatgtgtagaatgactgaatcaggtagttttgaaattctgtccaccattgatgatgttgttctaggttttttattatccataattcagctgtaacaagtaacaaaaaaggattcaaaccaaaaaacagagaagtaatcattaatttcctttgatccatagaatgctagatattaaaattttcaaggatttaagttatttttagaattgatagcagaaatggtttcagtggctgcaaatacaccaaccaaaaatcccatctttctgtcagttcaacaagaatcgttcataacatatattagaaatttttctcttggttcaaccaaatgcagggattatggactgttacagcaaatgagaattgaaaagaaaaacctagagaaagagatcatcaatcaatttccttttgattcagataatatataatactagagttgaaattttccaaggaattgcgctgttctgtttatatatata

SEQ ID NO: 328802 - DNA, 711 bp, Cannabis indica
tcataaataagtaaataaataaggacaaagaacacaagagaaggcgttgatgaaacggattgaggaaattcacatgatccaactaaggatctggtcactaaaagatgctttgtgtttcgggttgtgtttcttgtcggtgctgaccctatacccttatcaataattatcatactcatctaaatatatatatacacacacactagtgaatgagcaaaatataaatgaccatatatataaatattgagaaaaaaaatactatttatgttgaaatttatattcaacattagtataagatattatatcggtattactataattaagtattaactctcacttttaattatttgtaaggtcaaaattattcctactaaaaaatatacatataaatataaaacaattaagaatgaaccttaaaaattaattgtacaatatacatctctataatatttttagcacataaataattatgattttattatttttataagataatctacactttaattatttagtttctatatatatttcattataaataattttagcgccaaaaatatagtattgttacagttatacttgttgtttttaatatttctgtaaaacaagttatttaaatcttattttaaaaatataaattactctaaattctttttcaaaaaatagttacatgatattttaaatgagtatacaatataaatcaaaatttataaa

SEQ ID NO: 328803 - DNA, 995 bp, Cannabis indica
tctctctctctctctcatcttaacagagttctccaactcctaaatttctagtcgtccttaaaatgataagccaaggtggtatatatatagccttaggatcaagatcctaaagccagtatttgcaagcaatgaggttgcctcctctttgagtgaagtctccacgtcagcataagtaccagagcctcccggaacatgaatgagcttccagactcgagggccacagaccctagctgaagacgcttcgagataggatatatgcctaccgaacttgactatctgaaactaccaatccaggagggataactagccacgtggaactcctttccagggtagggcttgctatcctaaagactgatcctagtgagagaatgatagtcatccgggaatacccttttagacttgactatcattccacagacaccttctgggatcgataacaatgagtgaagaacatcctagaaatgatgattgtagagaccttttcatttagtggaactataccacacctccatttaggataactattagaccattatatcgagcttaaaacatttaaatgaatgaacaaaaaataaatattatacatatagagatgaagcacaggagagaagaaaaataatcaattgggattgtttgacgtaaaaaaaaatgaccaacttgatcctagataaatgttaaaataataggaaacaaacaatagaaaaaaattgagatattaatagaagagcatgagtaaattgctaaatcggcgattaactataaacaataacaaaagatagtagagaaagaaagaaagaataaaaaaaatcataaaatagaatagtaaaaaaaactattctgttccataggcctcatgtgtcatctattaagttatccaccaatgtaactcttcaaaagagtttgccacatgaattatctatttttttaagggttaatatggatatagtgagattatgaatgaatatatgtgaagacataaattaaaaaaaattgac

SEQ ID NO: 328804 - DNA, 579 bp, Cannabis indica
cctcctttagatttggaacaatttgtaatacataagaaagcataaattttaagacactgtaaacgtaattaaataagttcataaaaaccattttcacaatcaaacaattaaatagtatgtactgctacgaaaaaaaaacctataaaaaatagtagaaaaaacaccattttaatccaaccaaattaaacattcttaaccatttgaacaccattgccatcaccaccgttagggtaatcttcattggagacaaacctagaccagtaccagtggcttctccaaatctggttcatctcttcaatgggaataccttttgtttcaggcaagaagaagtagacgaagatggacatgatcaccacaaagaatgcaaagaagatgaagagtccaaacttcaaatggcagagcattgtcaagaaaatttgagccacaatgaaagtgaagatcatgtttacagaaacattgatactctgtgcagctgaccgaatttccaacgggaaaatctcagatggtaccagccatcctagtggaccccatgaccaagcaaaaccagccacataactacagatgaacactaccacaaca

SEQ ID NO: 328805 - DNA, 925 bp, Cannabis indica
acgacaatatcgctcctaatatccctaaaagtcgaccctaaaaagacgtgtgataaattaatttttaactttttaggggttaacatagtagcccttaaagatttttacattaagaaataatttttttaataatattaaaaataattgatattttttttttaggtaaaatatattgatatttaatttattaaaaaatagttataataataaaaaatctcattagcacgtatacatacactatacataattacacaaataaacatatattcctatacatactcacacacataaatatagatacatatacatttacatactcacacatatatactccaataaaaaatatacatatacatatatacctactcatacacatataaatatataacattgttaaaaataacatacccaaaataagtacagattattacatatgtgtgagtaaataacataccactaaatacatatatcaaattctaacataaaagattattatctactttctatttaaatagctttcttatataaattaaggtgttgtttggtaacaattttttaatcagttttctgtttttaaaattgaaaaagtgaaaatattttttaaaaacatgttctgtaaaactgtttttacttttcaattttttaattgagaatcaaaattttaaaaaacaaaaaaaaaatcacttttaatatttttttaaacagttttttttttcttaatcaatatcttggacttcgatcagacccgaacccaaatccccccacgaccctggcgctaaacccgacttctgacttgaacccaaatccgacctcggacctagacccgacgtaaataaaatcaaaaaataaaaataaaaatgaactttacagaacacacttttattttctgtttttaaaattgaaaaacaaaagtagttacaaaacg

SEQ ID NO: 328806 - DNA, 816 bp, Cannabis indica
tgctatcataaaaaattatgttaatatcattacataatattgatgctattttttttaaaaaaaaattaaaataaataaagttagttatagttaataaaaaaaagtttatatatataaatattttcttttttgagtgtagcgtaatggtattttacaatcatttaatagcttaatagcttcaaggtcctaagttcgaacccttgacttctccctttttcccatccctcccttaccactaagctaaccttagtggcttatatatataaatattaagtctttataccactttttttagtgaataatatatattcaatcaaatacctaaatcaaactaagaaagatcatgcatgcatattgcctaattattttcatatgatatgtcctatctatttgttttcttcactaaaattgaggtatctacatgtcccagccgacatccatagagcaaactagatcattcatagttttggaccacttttattaattcctcccataccaatgtcatattttatattcaataattagtatatttaccttgaattttttatatactactaagttatatcttataagatataggacttgttaataatatccatcgaaatataattttacatcaacatgattcttccatcacactctattcaatttttttcataaaatgagtgacataataaataatagttgacaaataaatacaaattatatacttttcatatttaaatataccttaatggttgaaaaactaaaaataaagatattaatatgtatatatcaaaaaaaaaaaattattctattattcattaacgtataaaa

SEQ ID NO: 328807 - DNA, 645 bp, Cannabis indica
attagagtataagcttctagattgagcattaataatattaattataacctttttttgtggaggaaacgggtatgcatgcactataaacttcacatcaaaattaagttgcacgcttcacccatactatttatatatatatatctatatttatatatatttggatagtgttaattataatcttttattataatattttagataattttttacgttaacgttcgttatgatgataattataatataattcttgtaattttttaaatttttttaaataatttacaatatcaaaattaaaatttttggtattccaatctattttgtgtgttaaaaaatttcatacatatattcaacattatataaactatttcaaaattttcaaaaatttataaaaaaatgtattgtaacagagaataaacacccatgcatgtgtttcgggtatacatattgattaagaatttgtaataaaaaattagcagtgtcactcttcgtatgtatataaaagtcatacatattatataatattgaaacctcctaaaaatccataaacgaaccaaccaaagaaaaccgagttaagtagggaaaaaggatatacatggtcggctgatggagcttagggaagtcctatatatatacatatgtatatat

SEQ ID NO: 328808 - DNA, 574 bp, Cannabis indica
tttttttagtgtaataacgtatatgtaaaatgatcgatcttccataatagtctataaaaaacatgcacaaattacaatcttgtatagaaagtattttgaggctaattataaaatctctttagtttgtaaaaaataattttggtgtaataaaatattccagttcatcaaaaaataaaatatgattatacagatatactagtatttttcatacatagtaattagaataaataaaaatttttcagtactcctaaattccgtgtaacgccccgatttcccgagacgtcacactagctagtccgtttaaaaccatttaagataaagacaataaaagacttctttaatgaaaaataactaagcatgagatctcattatttttaaaacaaaacatttatttattcataaccttaaaatataaagctttacaaaaactatttgaatcataatcttaaatgaaatatttttaaaccaaaacatcgtgacaatcccctaacatgtaatccacgcctcgagctcgccaccctcactgtatagttttgcctttacctgcacacagagtacccgtgagctaacgccc

SEQ ID NO: 328809 - DNA, 1104 bp, Cannabis indica
agaactttatatcctccatttgaaacttctcaacacattcttgcaataaaacagaaggttgttgtttttattacctttgatccattcttccatactcaagatctcattaaagtcacccaaaattatccaaggaagatttgtattcctagtaataccaatcaaattctcacataattgccttcttcgaatttcatcatttacaacattgttatcccaatttttgtcctcatcatgtgacatgcttacgtggacagaacctgtgccacgtggtagtacagatcactaaatggaaggctaagtcagcattcaagcaaacgaagaccccgacactcagataggaatcaagtgacagaccagctcactctcaggagctggctggaggagctggctggcagccggccagcccagggatagcatcatggccgaccagcttggctagcacaagggccttgtcggccaaaggattacactacaggccccataggacactcctacacgtggataacaaagatggcatgcaaattcgaccccaaaagcccaacacaatagttgaataatatctagcatcaagggcattttggtcttttgtaaatatctaactaactatacgatttccaagggatttgaattgcaaacctaaaatttatataaaggccttaatctctggctaaaaatctaagtgtcctaagttgcctctaagctagaaacctgatctcaagagtctgataaactctccctcttcctcattctctcccacacgccaccttaaggctgtctaacaccataaggttgtccaacacttgagttttgccatgcattgattgtaatcctaagggtactatagcagatcccacctatagtgatctggatagtaattctctagtataatacaagtaaaaggggagtaggtcattacccgctatcacaagggtgtcgaacctctataacaaatcctattgtctattgcttttcttcttatttgttcacacacgtggcaagcatcagatctgcacgaccccgctatcggttgatcacttttcaaggtcaatagtttggtgctttcattaagagcgtggatatagtgatctgatcaaacgccatggt

SEQ ID NO: 328810 - DNA, 1466 bp, Cannabis indica
cataattatagtatttttaaagagtcttatacattagagtatttctagaagtaagagtgtcaaacataatgtggaagagagataaaataaaatattggagatgttctaaaaagattttgagtccaactggttttgttccaagtattttcctccgctaaagatgcgaagagaatagctcgaagtggtgggtttgatggggagggtgttttattgaagtatattattcattaaattttagtacataaattccaacaatttccctcttgcagcataatctaccacccttatagatgttatttattattcgactattcatgctaagtactgtgacgagactctccagatgatgtagtttcatattctggagactaccatattatcattggacaaatatacataatttaattctcgtatattttgcttatttattcttttatttcctccaagttcataattaatcatttaatattcttaaatattaaatatttatttattcaaattttattattttaaaatgattaattatgatttttggcccaagaattttgacatgtaccaaatcatgtcccatgaatctttttagtagttaaaaatccccttaaactattgagattgttagatttaaggacttttatctaattttagtaaagaaaatctaacatggttaagaagttcatggtgcatgatttggcacatgtcaaagttcgagaggcgtgatttggtagatattaaagtctgaggagcataatttaggatataaacaatcattaaattagtaaaattgaatgaaattggacaaaaatccttaaattcgataatctcaatagttcaggaggaatttttaacggtcagaaaagtttagggggcatgattggtatatgtcaaagtttagtgggcaaaaatcctaattagccttttaaaattgattaatctaaaaccttctattagtcacatctaattaattttattaattattataattaaaaaatttattaaaacccatgactaatcacgttaaatgttggaataaatgattccagtccacatcttatgatatttaaattactaacaattttacgtgattatgatatttaagattacttaattaatgagaatatttatttctcgtttcgtaaacaatactgtagtatatatattaattaactccttaatcttaaattctaataatggggggagaatgtatttttttgatgcctaagtaatattttgatatcacttagcttgtttttgtattttggtgaaggtggtcaccaattctcagagatggaaaactcgaaactacccaatttttgagtaaatcatcttgtaagaaaagtgaaaatataaagttgtgaatttgactcttctgacttcatagctcttagttcctttgaaaaactagatgaacggttgagacaaaatcagaatcggataagcataatccaatactgttggaaattatttta

SEQ ID NO: 328811 - DNA, 1108 bp, Cannabis indica
taatatttttttaattaattttctgttattaaaattagaaaaataaaaatatttttcaaaaatatattctataaaaatatttttactttttaatcttttaattgagaatcatttttttttttaaaaaaaaaaataacttttaattatttttttaaatagttttttttcttaatcaatattttagattccgaccagacctgaattcaaatcctctccacggccctggcgttgaacccagtctcttacccgaacccgaatccacccctggacttagacccgacttatataaaaataaaaatgaactttacagaacacacttttgttttttatatttaaaattgaaaaacaaaagtggttaaaaaatacatttttattttttaaaaacaaattttttaatttatttagttatatgtttaatttatttatttttattattttaaaagctatataattatatgtatattatataaaatatggactttttcattttttacattttaaatcagattttttttgtatttttacagaattctacgtaggcaacagaaaattgtacagaaatccctattacaattagcgctgcaactactttaaaaacctaaaccgtaaattttaaaaaaaaaaattttaaaaaaaataatatatagagtaattcccctataaaatattatatatatgtaaaatattattaattaattattttataatttaatttgtagattcgacattattctaatgttgaaagtagatactcacaaaaatactagaataaattacattacatacctcttttaatttgatgcctttaatttatactttttttttttttattaatttcttatgtttatctctttttcaatcattctaccaattttatcctatcactttacgatagtttttattcttctctaattaaaattttctcacaactttcccacaaacctacacatccatctacaaagaacataaatcttttatatttgaaattatgtgagtgtgtgaggataatttgggtacagtactcataaaaatatatttttgaattaaattttatttaaaggtaaatttagttaatgtataaaaaaagagagtattcttcaacttctcc

SEQ ID NO: 328812 - DNA, 639 bp, Cannabis indica
atcttatttttctcacttaatttattgatctactatagacttgatcatatatatcaaaatgcgatatgtgacaccatgcttattttcacctctttatatagacaactcaaagtcaacatatataattaaactgtttaataattcatatataagacacttcaactacatatatatatattatataggtgtatatttaaggctacccataatattataataatcgtttttgtgggagtacgtaaatgagaggtgtggggagctaggtgtcaaatataattattgaaacccttacatatcaaagcgtgtggatcttccatgtctcttgggatttttttcttttttttttctcaaaataacccatttcaaattatcaaaagccaaactatcttaacgtagtacccattaataaattttcctttttctagtaataataataagggtaaatactattttggaccctgtgttttgcaaaagttacagattggaccctgtgttttgttaaatgacaaaatggaccctgtattttctaaaatagtaaaaataagaccatgagcttaatttttgacaactttttttttaatacaactaacttgaagacaatgcttaatgcgaaaagatacaaaaaatgtaaacagtttt

SEQ ID NO: 328813 - DNA, 634 bp, Cannabis indica
agcttctcaacaagctccaccaccttattgtgttcataatctatggtgcaggcataaccaacacaagaataaagataaaagaaataatgtacgacgatgatacaataaaagaaaggtaaagctagaaggagacaagaaaaagcacttaccccgaagatattggtgaagcatctttgagaaattatatgtggaggcttggtgttaaccaattgctgcagtggaatgttctcagacctagcaccaatgaaggcctcattattcgtaaggagctaggagcctcgtgtcagaaataatttaccaggatcttagatttactaataagtatgttgtttaacaccctaaatatgaacttcaaaaatgataataaataaacacatataaagtatgagaaacctcacagtggttgcatcggaatatgatgtctccttccactcagatctctaacccttgtatcctttctgtcacagagtatcacaaagatctgagcccgaatgtccttctgttgaatcttgattcttcacgatcttccacactatgattgaggtaccacatgatgtgtgtcggcactcactctatcactcaaggggttcggtttcaattgtgaagaagagagaagagaggtggtggctaggtt

SEQ ID NO: 328814 - DNA, 1048 bp, Cannabis indica
tgaaacattatcataattataataatgactaattagaatttgtacccctagaactttgacatgtaccaaagtcatcgtcctctgaatttttaagaccattgaaaataccccctgaactatattgagattgttggattaaggatttttgtctaattttattcaattttactatttcaatgaactatatctaccaaatcatgctttcgaactttgacatgcactaaattatgtctcctgaacttttatccatgttagacttttttactaaaattagaaaaaaaatccttaaatccaacaatctcaatagttcagggggcattttcaatgaccttaaaagttcagggagcataatttggtacatgtcaaaattcaggggcaaaaatcttaattagcctataataatttagagaaaaagaaaagaagacaatatagaaatagctcaattaaaaccgtgcccccatcataaaatatttttttgcacatacgttaccaaattataattttgtttacttcaaaatatattttttttattcttctatatatataaaaaaaataaaataatcacaaagtcaccaagtaatctagtattaaagtgcttactccgaattaatttcttaaaatggaagtcatgagttcgaatctagatgactcctatgggaatttcaaatatgagaacaatctctactagccatgccacccatgacatttatcgatcttaggggtattcatgcacctcctcagttagggctcatgtgacgcaccttattgtaacctggcccgcctcaaagggctcgttttgtgagcgggtttggtgctctcatagttccacttataaattagaggagcctctcctttctttattccaataaatttaaaaataaacaataataatattaaaattatataacactcactaacatgtacagtgcatgataaataaaattaagtattttattattattattattattattattattattgggatatgattttgttccgtgatgtactttcacggtaatgtattccgtggtacattagattggtc

SEQ ID NO: 328815 - DNA, 601 bp, Cannabis indica
aatttagttatataggcacactttatatagaatagatacattttgaaatttaagaatcatttatagtttttagttttatggtggtgttgaacattttaatagcaatattctattaatataaatgatagtaaattttatcaatatttattagtgtattaattatttttagtaaattttattttagattttgttatattttttaataaagctaatttgaagtcatcttctagcataatagatataaaataatataattaatctcgttataatatttttaattcagatattattaaatcttaattcaataaaaaattaatttaggtactattttaaaaattttaggataaaaaattttcatttaataaacaaaagttcataatttttgtaaaacaaataatgtgaaataatatttaccctatttttaaatttattttaacatcataaattattaaaaaatatattaaaagttagtgaaaagtttgctataacaactatacaccattgcaaaaaaagaaaaaaaaaactaacaatatacttgtcaattgaaaaaaaggaattaaaatttactttcaaatattaataacaaaaaaaataattttcc

SEQ ID NO: 328816 - DNA, 2084 bp, Cannabis indica
tttttttttatttgttttttcataatttttttttatagtttcaacaccttgctatgtgtgtttgtattgaaatagttgttatctagttggtttgctgtccaaatatatatcatcaatgggtaaaaattagaactatcatggatgttgatattgaaggagtttttttatgttcgttggtttgtttatagttgttttgtagttgtattataattttgcaacttgcatatgcccattcattatatttactttctttgtaaaatgcaggattgagttaacaaattcagtcccagtgatttctatagatccaagtgcgtatgtactagcaatttctttgttattgctaatattaagaatactttatctgtgaatttgttaaaaatgttatgagacatgcagtttgggcatttcttagatatccctgattttgtttttcatccccaactagttcacaacttcttttgagggaggtttaccagcccaatcccaaagaattaggctaatgttgttggtcgttgtatacggttcagtgccgaagaattttacttgatagctggtctggattgttttgaagataacaataaactattcgcttcctaggaatcaaacgagttaattaaagtctgtttccctggcctaaaaatgattgatcataagtctatagaggacgctttcttgggcagtaggaggggacaggaggaatccctaggattgaaactcactgtgttgtatttcatccaatgtttccttcttagcaatactcgtggtaaggaagtttttaggtttgatttagatgtcattgacaacggtcgatgagatgagtattgttggggtatggagtcatttgagttgactattgattctttcaaaggcagaatagaggatggtattaaaatgaaaaataaaaaagagaaaaagggaggtcagtcctacgatggttggtataaagcgttgggctgtccttgggtgttcatagtttggttttatgaatgttgtcctgcgatggtaaacactttttgcaaaagaattgcatccaggattccaagaattctgaattggatcaatgaggttaggaccaaaaatccaacttttcgggacttgaaaggcaatattttttatttgccgttgaacaaggtgattcacagtttctttactattttatctttgttttgtgcatgattattaatctttgttattttttttatttcatattttctatttttgtttctgtttttcagttaagggttaagaacattcgtccatctgatgaagagaggcaaaagttgcaattgtatggcttatttttagatgaatatatagatgatcatggtacaactaagcaaaaattcgagagtggttcatcttctagaaaatctgattcagatgacatagaaatgttaaaatctaagttggaattggtcatttccagtcaacaatccttgtccgaagattttatatctttgatgtgttttgttgaccttaatttcacgtttgtcatgactgtaattaaggatatacaagaaaaagttaatgtcatttatgatccaccttatgttaaggtatttattttcacaatttttgtttcattatttttttcctgttttgttggttgttttcttgttttatttcagttgccatactgttttcaaccaagttaagtattctgatgaatttgttagccaagattctgatgatgatgatgattatgaggatgatgataaagatgatgacaaaggattaccggatccaaagaatattaaaactgattttgatgatggtgatgagttgggtaaagatggtggtgatggttctagtggttataaggttggtggagattttcctgctgttgatgtgattcaaactgaggttgttgcaggtagtgaagagaggtccaaggatgttgaaaatgttaagggcaaagaatttggtgtaaagggagatgatttcttcaatggtttaagccagcttgagattgatgatgaccaagttgtgttggctggtttagaggctattgctaaaatcaatgtaagtgaattttttattctttttttgtaaagaccgctagtttaatttggaaattagaagtt

SEQ ID NO: 328817 - DNA, 876 bp, Cannabis indica
agaaattctcattcactttctctttctctcttaatcttcttcttctttttttcttcttacttattttatattattctatattattttataatataaagtacatttttccaaaataaataaataaataatgttatatagtcattgttcattttggataatgattttaatgaaattggtttgaaatgttaaccccatttcatagagccctatgcactaatgaaattctttattttaaagatttaagtattcttgctgttattttttaaatttaggtacttattaattagtaacaaattcataaatttcaatatttatgtcgtaattttttttttaattataatatgtattttaaaagtttggttgtaccaaatttaatttttagctatatctctctctatatatatatttgaattatctcataaattatacaataaactaattttaaattatttatcgaacactttatacatagaggctgtttggaatgagttaatactagtaagtgaatggtaatgtgaaacattatcttgtttgtcttgagagtttagccttgaaatgttattctcttattagtaatataactatggtaatgttgacacattaaaaaaagatagcattgaattattaccttttgttatattaatttgaatagaatttttgaattaataaataaatttaattactagtaatattatattttttataaacaaaatattatgatatatatatagtttgtgaaatcagtttttcttttactgaattaattttatatcattaacaataatatatatattcattctatataattttttatgcgaatagtgtacataaatgatatagcaaacaaaaataaataacataatgataaaatatata

SEQ ID NO: 328818 - DNA, 693 bp, Cannabis indica
ttttgacctagcaattttaaattagaatgtatagatttgtgcatcattgtcaaattaagtaagtgtcatatatatattagataaacatatttttaatatttctaattattgacacgtaaaaaaatattaagatgtactttaaagtattaaacacctgcaatatagtattttaaaatatattttaatttaataaattataaaaaccactaattaattataaaaatgtgtgaccaaataataatactcatataatgtataaatattatacatcatatagttatgatatatccttttacgtagcaatattatgtactattaagttttacgtagtatgtatatgtgtttagtgtataggatatggtactataggttctccctcactaaatattaatatatgtatgaattaatataattgacatacaaaggctatagagtatagaatatatataattatgagaaatgctaataataatttcctatacaacctcttagttaatctctacgtctgaaatcatatgccgaaatattttttttatagcagtattcgttatagttgtagtatcattcctgtaaatttttgaaaaattctgaatagtttgtacagtaccaaaaatagagttcctaatattctaatttaccactcgtgttcaaaaaacttcaaacgtattttcagcactataaactattcaaaaa

SEQ ID NO: 328819 - DNA, 656 bp, Cannabis indica
tcacacctgttctactactttattgattaattataattttttgttgtattttttatttatgaagttaattgtggcattgggtgtgatattctgttttacccaatcaatagttttaatttttataattattttttattatttaaaatttttaatgaatttttaaaattattaaaatatcacacgtgtatgtacatatagaaaaatctactttagcacttatgaaaatggaaaggtaattggtacaacaaaaatgatgtttggagggttttatctccaaaaattcaatttatgaggttaaaatattagagaatgtacgtattttaagtaattttgccgtcaatatttgttactcgtaatatttgtttttactgcaaaaaggccaagtaaaaacaaaaaaaaaacttaatttttctttttgaactttacattttttaatacttaactacaaaaattgattttttttgggcaaaactacataaatctcacttctactatgttatttatccctctgtcaaaaaatctcagttaagtatcatggtggacagctaatgtgaggtttgggtaaatagcattacagagtgagatttaggtgaatttgcccccaaaaaatcgacttttgtagttaagttttaaaaatataaagttcgggtagtttt

SEQ ID NO: 328820 - DNA, 607 bp, Cannabis indica
aatatatatataaaattctattaggactaaatttctaaattttattaactattttatcaaaatagcaccactaattaacacatcattgttgtcaacattataaattataatgagtgtaactgttaaccttaagttacctctcaaaaaattaacttgaagaaaattctttaacacaaacaaatacaataaaggtaatcagttttgttataacaattctaaatcagattaatattaagttttattttgatttaaaattaatttagagtattattttgaaaaatacaaagtctaatttatcatttattaaaataaaagatcaaatcaataatttttacaaaaatatataatctaaaatatacttatgtaataacaaagcaaccagttaccctagtatattagcgaaaaaattttgagtaatcatttacaatgctatatcattttaaaaaaaaataaaagaagacaaacttaacttaaatcataaaaataaataaataaataaaataaaataaaacttttgaaaaaatcacaaaaagaatatgaaataaaaaaagtaatcaattataataatgttaaaaaaaatctttaccagagcattggttaaagtaaa

SEQ ID NO: 328821 - DNA, 1376 bp, Cannabis indica
tttatttattttttgtaaaaaaagccccgtttcaaatttcgccctaggccgctcaacaccttgagacgggcctggattaatatggatgttagtttattaattttctatgttagttgtaataatcttgggtcttaattcttattttcttgacccttttactttgtaactttttctctataaataagacttcatattacttagttaagcaacttttgcatagctctaatcaattctttcttactttgcataaataagctcaacttatcttcttcctctccttctttaagtttctcatagtatcagagctccattaacgataatttcctatggatcatgttgttataaataacccttccaaccctaattcttcttcttcaaacaattcttctcagtcaccttttatggccacggccattacttcagtttctcttctcccaattcaaaactcctttgccaactttctcagttcctctctcaccgtcaagcttgaccgcctgaactatcttgcgtggaaatctcaaattatgcccagtgtgattggccacagtcttgacgatattttactctgcgatgttcatctgccttacactatggtagatggaacctattgggacttatgccttaaaagtaagtaattgacggataatctattatagactacataaaatacaatattaagataaattaatatattaaatatagatgtataattgataaatatatattaagataaattaatatattaaatatagatgtataattaataaatatattaaaatttctattcatatagagatggtataatcttgtaaagtcatacaagagaaataagattatacacaatataaataaaacaagtcgatagtgtattaaagtaaataatctttaatatgaaattaccaagtacgttttattatgcactatactctggtgcgtgtgattttgattcggatcacatatgtggtggatagacatgtagtaaaggtattatgtataatttgattatacatgactggattgatatataataacatctttcatcaacatgtcatttatcatgaaagagttattcatatcacaacaatgatcattagtagatcagtctgaatcctgagtatacatgaatacctatttgtattcattgagttctttaattcattcgttaaagttttctcagagaagatgaatctaaaaactttaatttgtgagcttaataacatgagttaatgggaacatgttatacaataatggaatctaaactttccgaaaggatcgaatattaattcttttatagtgttaattttgagagtgctaagattatatatcaactgttcatattgaattaatggtacataaggaatcaagagataattaga

SEQ ID NO: 328822 - DNA, 543 bp, Cannabis indica
aaattaaaaagaaattttaaatattaaaatagagataagaatggatgaatgagggttttattgtaaaactttcttaaaacttattacgtactgtatctttcaaaaatagatctggttctgttttttgtgcttggggcctaaaaagaaagaatattgaatattcaatttttggtccaaaagagtgctcgaagagaaaaaaacaattgggtagtttcttatattagatttttttttgtagtcccaagcacgtgtttgttgctcttttatcattattttaatttgaatttttaacattaatggaatatggttttatagcacaccactgtcttttattttaaaatattaattagaataatttgttgtataaatatttaaattttacttgtaattataaaatatagtaataaaataataataggagatgatgacttgatatgatatgtactattaaaattttaaaaatatgacttagtattattttcgttaaatattaaacttaaataattataaggtgattttacaatgcacccttttaaaagggat

SEQ ID NO: 328823 - DNA, 858 bp, Cannabis indica
aaagagttttatttagggcataaaacccaacaaaggagtcatttaattctgctacaaccaatgtaaggtttctcataccttttatgtatttatttgatatagttttagaggttcatgtttaggatattaaaaacatacttgttagtaaatctaggtcctagtaaaataaattccaacatcgggaccgagactggacttgcccgggatccaaacccggacccgggaccagaccaagacccactcccgaactcgggacccaggcctgggattcaggctcagacccaggactcagaccaagacccagacccgaacccaggaaccaagcctaagactcgacccgacccaggacccagacccagacccagacccgaacccgagattagaccaagacctaggttttgggactcaaacctgaagctgaacactcagacctgcacccaaatccaaaccggacccagacctaaacacgagacctagggccaggacttagactcgagactcgagacctggacccgcacccagacccgagactcgaagctaggcccgagactcgaaccaaagacccgagacctaaagcagggaccggacctgacccaaacctgggacctagaacccaaactagactcggatcttggacccaaacccaaacccaaacctagactcggacccaaaactaagaccctgacatagacctgaacccaaacccggactcaaaactggatccgaatctagacacgggacctgagaccatgaccttggacctaggggtgttcgcggtgcgggtggtgcggtttgtgactattttttcaagccaaccagcacttgcggtttttcaaattttccaaaccgcacctgcac

SEQ ID NO: 328824 - DNA, 555 bp, Cannabis indica
aacataacagaagaacgaacgaacaaaaatccctgtcgctgtaatgaaaccctcacctccactatcaaattttctttaaatttcaactcgaaacctactaattcaagctctagtagtagtgggaaagtaaatcattgaagatgaagagcttaaggtaaggattagttttgttttaagttaaatacgattagttttatatggtgcctttttgatttacactggttatggagattctgacttcgtagaattattttttggtagctatgtaactagtttcgatgtttacttgttgaatttgaggtgagtttaaaactttttaaagcttactctgaacgttaatggtattttccgtttaagggctaggttttaattttagttacgtcgggactgtaatatttatggtatatatgtgtctgtgaagtttggaatgatttgcctagatgtcggaggtgtatcaatgagtttgaaatttgggattttcatgtttcactgtttttggaaattcctaggagattagaaatcatatttttgtcataactttttactcaggtgtcc

SEQ ID NO: 328825 - DNA, 1510 bp, Cannabis indica
ggtggaggaggcggaaggacgcaggtgatggcacaggaggcggagcttgtgtgcatgggtttaggttaggatagggacaatctgttaggatatgtaaagtaagggtatatttggtataaaacttataaaagtggttagatttgattgaattttaatatgcagttatttttgattagttgatgaaaaatagaggtatccatcaatttatccctaatatttaattttttgtgaaataatctctcttttttattatttaattttaacttcattctaaaactattaattgttcatttaatagtttacaacactttccattaatctttataacaagcagtcataattaacaacatatatacgtacaataattctatcaaaaaaaaacatatatacattttaatacattaaatttaatgaacactgtttatttaattaattagtgcatgaactaagaatcaagatacatttaaaagttttaatggaaaataatttattagtttaatgataaactaaaaagattaaagttcagtcaaaaaagtataacaactttcccaaataattaaatagaatctcaaaaataatattacatatagaaaaaagttcaatgataagctataaagcatcaaaaaatcaaaattaaataaattaaacattcccattctctcacttccaactcttcaaaaattcataaaaattacaaaattgtgttgcaattattgaattaaattgcatatataattacatgatagaaaatacttcaaaaattaatgaattaaattattttgaagtcttcaccaccacaaatgctatgaggaggatcactgatatgaatactccataatcaccagaacataataatatgttgggatttttttacatcaataattataataatagtaaaaaaaaaattaaaaaaaaaacattgaaatagaataatgtaccccagggagtggaatttaacacaaaacaaaaaataaaagaaatcccataagaacatacaatgactattcgactcaattaaagaagcataatgcatctatatatataaatatatcaatatagagcattatcaaacacaggactggtcatttatttatatgtacaaaaaaccaaactcagttctctgcttcaaaagtgttatatagtatatcaatagtagtagtcaccctggtcctctccaaaataacacatacctgtttaagaacaagagtcaataatcatgtcatgaaaaataagatagtttaagattaacgaaaactcgaactcacatttcgatcgtgttcgtgttcgtcgctggtttgttttcgtcttccgggtaatttctagtagtgagtgcatataataggagcactcccaataaagaaagttaccatttttttttgttctttttttgtttaactaatacaaaatattttgaaaggagataaaaccatggaataatatgtattattagagccttccatatacatagaaacagtggtggctttttaagctgagagagttctatgcttct

SEQ ID NO: 328826 - DNA, 1501 bp, Cannabis indica
attagaccatctgttttgttaaatgacaaactggatcatgtattttctaaaactgtacaaataggaccctgaactgatcttttgtcaaaataaaacttaatataataatccgatatagagatgttagcacaaaactggttatattttctgtatctattcgtattagaaattgtcttaaagttggttatattaaaaaaattaaattgttaaaaattaaactcagagtcctatttttaccatttaaaaaaatatagggtccattttgtcatttaacaaaacaaaatgtcaaattaataacttttgcaaaacacaagatccaaaataatatttacccttacatttattagcttccaaattttaacaattttcaagccaatagatcaagcaaatacacaacatttacatgctaatcacgagtttccctttttttttaacttaggaatttagcttattttagggtttaattaatgagaattgctaaaaactattattggtacttagtaatctctttaatatcatactgttattagtgtaattaagtaacgaatctcatataacttaagaaaatagagcactactatgaggcacccatggtgcctaacaccacaatgaaatattgtcctataattagttagtgattttctataatatgtattgaagtaaaacaagtgtgactagatatgagaatcgctaaaagacactattggtgcctaacaccctctttggtgtcataccgctattggtgtaattatgtatcgggtctcatataacttaagaaaatagcttttaagcaatatcgctaaccaatcatggagcgtcatctatgaaaggtgatgggagtagcaatgctcacccgatattaagttataccaactgcgatattacacctaacaaagatactagacaccatgtgtgccctttagcatttgtcaataaaataatttttagaaaatatatcaataattaatcgtaaggtatcacctagaaggtgttagacactactaatactcaataacaacgttataaattaatacttcatttgactcttatagttataatttgataacacaattttttacaaagattccactaattaatagtgagtcattcaaaattatgaattgaaaatatatatacatctattttgcaataatgagttattatacaaaaaattaatataaaataagatgatagattcttgaattgattcaggttatggagtagaaaggaggagcatattgcaattgttacccactttatattcttgtttgagaatttaaaggcctttacttccaatcatcactgccatcctttagtcacaaccgaaacatgtgcaaggtatacttctttaaattactcttaataacctcttaaaaaaacttattctaattaatgtaaaaacaatatacttttcaatatccaaatcataattctataaacaattacaactccaaattaattgtgaatataactttatacatgaatatgttgaatatttgcc

SEQ ID NO: 328827 - DNA, 585 bp, Cannabis indica
tataatacgaaatgaaagatatataaaaaaactaataaatgaggcagttagaagacgaagatggcgaaggttatggctaggaggtgattttcgtgagttttgaacgtgggtttcaaaagggaaatgactgaaatgtggtttgggctgacatgaataaatatgtgtaagtgatattttagtaaataaaaactcattaaagacaaaattattaaacacatcttatgaaagtatttttataaataaagtatcaatgtatatttttcatataaaatttcatattaaacaggaaaaagaagatgaaaaaattgtctaaaacttgctcccttatagtacataactcttttaaatattcctaaaattaattatatttatttaattcaaatatgaattttaaaaaaattaatatctcacaaaactcttttattttgattaattattaaaaataataaaattattttaacatttattaattaataattagcataattattatttagatttaaaattcaaataataaccataatatttatttaatatctcaaaataaattaattatttacattaaataattaatagataatttat

SEQ ID NO: 328828 - DNA, 1570 bp, Cannabis indica
gtgggagttgaaactgtaagatagaaagtttatgatggcatggaaaaggtataggatgtcagattggtaccacatctcaaaagaaatttgatctctgttagaatgctagatgatcaaggatttttagtcaaagttgagaatggaatcatgaaagtttatagaggttccatggtggtgatgagaggtaggatttaatgacgacatacttaaatcataagaattagtagatatttatgagatttattaatggttatgtggactctgattatgcaggatgtatcaatactcagaagtcactaactggatatgtgtttaatatgttcaaaacaactattaattggaaagcaaaccttcaaaaggttgtagcactgttgacaatagaagctgagtacatgaccttgacggaagctatcaatgaggcactttggttgactgaattaatggaagagttaaaactcaactagaaggttattatagtgcattgtgataatcaaagtgaaatttaattaactaagaattttgtgcaccatgaacatactaagcacatagatataaagcttcatttcataagagaagttatggagaaggaagctgtgaaaattgccaaagttacgtctaaagataatccttctaatatgattactaaggtagcgccgatgtgtaagtttgagcattgcctaaagctgattggagtcagctgagcttgaaaggggctagggaacaatagtatatggaacaaaaatttgtcaagcgacttcaacttggaaccaaggtggacatttgttgattatggttacaagtttcatctttcggaaagctagatattacttcagaaagaagttaaggaaagcttggtgttcattcaaaaagctttgttaataaagttgtggctagtctagatggttcttcctaatagcttgtcttccataactagagtctgccagatagattgtcatacattcagagacatccttccagatagcttatgtcagccttgaacgcctatccaaaacatgtgattgtctttcggcttgtccatattaaaagcacatttctgaagctgatgtggaatatattattggtgctaacttggagaatttaagaccaaattaattagctacaatagaatcagagctaatttttggcaactatagaaaatctatatatagttatcacctttgtaatttagagagaatcaaaccattgaaagattgagagaaaatcgtgattgtgtaaggttagagagagagagagagtctaaactagagagagaaacttcaacttgtaatctctgtaaaagtttgaaaagaatcttgtaactttgaaaacactgatatcaattaatatatgactactactgttctgaccaagacatagagcattgcacaagactcaaactcgttaaacctattattatattttttctgtcttactgctttaatttgtttccttgttctttgtgtattcttttgagtattgacttaaatgcgtgtttgtttggtcaagtataattacatcgtatgtacaatcccacatcgtttggggaaggtcatgtgtgatgattatgaga

SEQ ID NO: 328829 - DNA, 675 bp, Cannabis indica
aaattttacttttttttttatttggttgtctattaatttggcatattatatattaaattttaagtttatggactaaattgcgcataaatagagtaatattttttatctaatatgctttaaaaactaaataagcatatgtaatttcatttttttttttatataattcaaaatcatggtaaaaggaaaaatgaaagcataaaaactcgtaatattatttgggtagcaaggttatggacagccaaattcaaaaaccgaaacaagaaaacaaataaaaaaaaatactcgtcttaacaaggaggcgaccgatgtacaatacttcattgactaaaacttaacaataaaagcaataagtgaaggctattgaattagaggtggagccctaagatgtctccctcaaattttaatttattaaattttatatacaaaattgtaaagtatttttattattttattctcatgtattgttatttatttggagaattactttatttattatttttttaaatttacggtttaagtttctaaagtggttgcagcgctaattgtaataagaatttttatatgattttttgttacaacttaagctcagggacggagggactttagcccatgtgtgggctaaagccctcactcaaatatatacatcaaattttttatatgtagatatatatatat

SEQ ID NO: 328830 - DNA, 777 bp, Cannabis indica
tatactggcgatccaatatttcaaggtatgtaaaatagaatacaatatagtatatagcaggtcgctatatgtttaccctagaaaattctttcaataatttattttaatttccaaatttccaattatactcttttttatttgaaataacaaattttatggctaatctatatgtcaaccaataaattttgacaggatatgatataactattaaattaaaatgttaagagccacttaaggagtcaaatagcaggtgaactacattttaatatcggttatattaatatattttaatttaataaataatttaaaaaactgttaataaattacattcatatagttggactggacatattacaaatttcttttctatattttgtatgtacatatagcgtccgatattacaatctaaaatatcatttattatttataattagttttttgtacataaaattatgtactaattctctagtactcttttgtataattttagaaatttttttacatgtgtgtctcgtttattataacttagtcaaattaatttttttatgtaatataatattttatatgttttgaattgtataataagataaaatattgcatgtatgtatcataacaaaattaataataagatataagttctacaaatgttattttcatccattcttattttgctagagttaatagtgcaattattaaaataatatctttatatattaaaagtgcctatctaacggcaattcttggtttaacagaatatacttaaaaataaaagaatat

SEQ ID NO: 328831 - DNA, 682 bp, Cannabis indica
ttagactgctaaatatttatatttattgaatgtgatatagggattaaccctattttatataaatttaagattttgactaggaatgctgacacttgcaaaattctcctcataaattagaactcagggtaaaacagtgaactaaacgtacatataatatagcacaatagcgtttgtttgttttatagttattttaatagaaatgtgagttagggtcaataccctaagttttctatgattaagcatgtatttataatatttgtgagtaaattaaaatagttatgcgattatggcataactaggttagaatcagtgactagaatcgaggtaaatcctattatgacattatacatataaaatagatgtgtgagcataacatgtgaaatctatgctaggtaaatattagatgcagaggtatcattataaatgaaataatgtaatacaatagtgtaatggcatgtttatctatgtagggacgtattgtatgatatgtatactatatgctcatgttatatttattttacaatcttgctaggccttgactcacagatgctctattttgtaggcaaatgtaaagaaatatcgagtcaaccatgagttcgaaggttttgaagatgaattatacatgttccagccaagctagaccacgagggttaggtccaataggaagattgtatagaaatct

SEQ ID NO: 328832 - DNA, 649 bp, Cannabis indica
attaaaaaaaataacctaaacactacaacaatacgagacttttctgtcgatcaacacgtctatcaaatttattgaccgatgaaatagacaactatgtttaggaggtggatattttgaattgacactattgaaactcaatcgcatcgatttacaccgacaatacaaaatatcatcagttatcaaccaacacaatataattcatttataaaataaaaaaaaaaaaagcaacccaaaaactgcatagcaacagttgagcaagtggggaatgttggggtgaaccaaaaacatttgtgtagagtcgaatctaaacattggctaggtaagcgtcctatagtaagaggagtactagttaggaaccctgtagaccattctcatgggggtggtgaagagaagaccccaattggtagaaaaagaaccctcaaccccttatggttattctgcacttggcagaagaagtagaaaaagaaaaaatataacgataatttaatttttcgttgctgtagtaaataggagggaaagttgaatttatttatttgtctttataatataaaaaataatagaataaataaaaaaaaatcattcaaagaataagagtgttgattagaaattgttgttacttgtagacaaaattaaagtagcattttacaaa

SEQ ID NO: 328833 - DNA, 836 bp, Cannabis indica
attctgacggcaactaccatgtaagctaaaaaaagtatacatagatgcaaccattatactaatcttaccccgtttctgaatttaggtgtgacggccaacctgagtggagcaactgctcgacaaattacaggaacctaaatcacattattcgtaaaactggtgagcgacatgctaaatcacaatctggggacttaaacttgaaactaaatgtttctctatttatatcgataagaaacatggaaataccctaaaaatcaaggaatcaacgaaccaaagctctgaaaataacacgaatcgacaacacgaaaaattcaagaaactggtttcagattcggttaaccagttttatagggcctatggaaccggttaactggtttgcaccaggtaatccaaaataattcgaaaccttgaccaattcgtatccaaaccaaaccaaacattctagacctgcttaatataccccaaggaatatatttcaagtagcaaaacaacctaacatgctcagaatcaaaaattgccattaaagatcaaagtttgagttttaaaactcaaactttgtctaacaacctaatccagcaataacctagtctcaaatcatctcaattaacattactttaacttcagaatactcatacaaaatcaaaacataacaacaacagccctatgtccaaaatcttgtatagaactttaacttagaacttaataaatcatacaaagagaggattaagggttttaccttggattaaaacactagaatcatgctggaaatccctgaattgagcagaaaaactcccaaatcctagatggttcaaggaaaatcgagagagagagagaga

SEQ ID NO: 328834 - DNA, 749 bp, Cannabis indica
agctggaacttgtgcaataatagttgtattaattactgagttttatcgtatttcttctcaataagcattcagtctgccggccgacacacagtaaatgattcaaataatcataccaccttagttatcataatttaaataaaaaaatacttaaataaaactaacatttacgtggctcggcacgtaacatcaccctagtatatatatatatatatatataaatgtaggttttgaacatagtatgtagtgttttattgtagactaatttatagaactgttaaattaatcaaaaattaagaatatttcctagctacttaaagttttgagtttgtaattgatatagatttatgattttttagcaagtaaagtactcaatgttataaaattgtaatttcgtctcgttcttccagtacaggttttgttggtgttttaaaatttgtaattagattttggtttttgaatttgtcgaaagaaaatttggaagtaactgatcttacacgttttcgtcaagtctcaataatttaaaatttgagtcttacatgtgacttgtttaaaacactaaggaggcgtttggttgggaggaatgaaaatataggaatggaaatgggaatgggaataggaataggaatggaatggaataaaattaaaatacataaaagaaattgataaaaaaatcattaaatttttttcttgttacattggagtggtcattcctttcttttaaaatggaatagccattccaccaaaatggt

SEQ ID NO: 328835 - DNA, 816 bp, Cannabis indica
aaacaaaacaaaacaaagcaaacttttccatgccaatatttttttgttgagttggaatcatgtttagttgagttttattaagcaatctgctaataaagtcgcgcattttcttacatgtagttcttacttttcatcaattctctttagtagtaactttttatctatactgtaattgcattcttaattttggatgatttgagttaatgaagtatccattattatttaaaaaataatgccatctttccattcaaaaaaacttgtgaccccaacaaagcattaaaaatttctaccaaaggtaacaaatttgattatgaatgatgtaattcatctaaacatactcaataatatattaggatccatgttttagatccaaactttcaaaagaaaaaaaaaattaacaataaaatttttggatttttttttctttctaaaactctaaattaatgactaaatttactcccttgaaaaataatttctataaatataattaataaaatattttttttttaaattaagtttaaatttattttttagacttttgctaaatgtggagaaattatagactactgatgaaaattagttggggagtttttgtatcaagaaagattaatctgagcatgctgttatttattgagaaggatatgaatgaaaaatttgattataaaaatggggtttttataaaaaatactgaattttggaaaaaaatttacaattttaatgtcataccatttatttttacaaaaatactatctttttataaaataatcataaaacaacaaaatagaacaattaaaacaacagtagaataactaaaaa

SEQ ID NO: 328836 - DNA, 562 bp, Cannabis indica
aatattattaaaaatataaaataaaatattaaattagtccctgtcgagagtgaggagtgtgattcccgttctcgacttgtttaacattcggggacaaaaaataatatttgtccttatcatatttcctatttagacagaaaatttccattctattatcctatggacgaaatgtatattcttagttttttttagaaaattaaatctataaatttataatagtttttaagaaaaaatttgtccatttcaaaaaaaaaaaaggcaaatagagtacaaaatttataaaataatcactttatgaatgaggttacgtattgaattctcactctttcaatataaactctctaacatatttcatgatttgtgtgactaaatgaaattattttactaatattttttttatatatatatttagtaggacttgtttggaaagtaatgtaaacttgatttcattgtttgctcatgtaatacaagactctaaagctttgcttttccttttgccaagtgtgtttatgatatttttgttaaacgatcaactaatttgatagctcataattttattaga

SEQ ID NO: 328837 - DNA, 960 bp, Cannabis indica
attaaattatttgttatatctttatttttttgtaaggatttttttatcattattagctaatatttttcataatataacaatgacaaattttgtcattttttttctattggtgatagttttttattatgtttgccaaatattttaatatgtaagcattttttattttaatacaactcattgattcatgttttatttttattttttgaactgatcactcgtactgattcatgtttcaaagattattttaaagaaaagtactaattaataaaataatgttagaaagtaaaaataatgaagaatataacatgaatcgatgaacaatttcgatccaacattattttaaatatataattataattttaaaaatcttattgctattaattaatttaattattataatcaaaagaaaagatggaagaggcattcatcagccttgccagttaaaaataattaatttatttttaaaattaataaataatttattattaactgaggcatgacaacacacgaataattaaatagtaaatataattattttatagcaatttggctgatgatgtcattatgtcaaaattatatgacatcataataatgacgtcataaattcatgtcaacatctatttcgaggctctaaatatagctatcttgtctgtacaagtttgtttttgctatttatttatttattatttttttgggacgaatgatctaagaatcaaaattacaaaaatatcattttattaattgtaattggtatttttaaaaaatgaaaattaaagaatgagaatgagattttgatatgacatggtaggcactaaagatatttctttttgttttacaaattttagatcaataaaaaaatacttgaattaattgaactagatttttttttaatgggaatggataatttattagcaaaccaaattcgcaattacaaaagatttaagagtactaggaagagta

SEQ ID NO: 328838 - DNA, 681 bp, Cannabis indica
attaatgtgtgtgttaatatgggttagtagtataatataattaatactagagctcaccatcaccactagttgccagaagagactgacctgttttagtactttttttaattattaattattttaagacttaatcatggttcatcaaactaagttattactattattataattatttttagtatttatttatagttaatattattattattattattattattctctatccgcgttcacaaaatgagagacaatataatcttaattaataattaattttaattgtagtgtcttacgtgtggaatgatgttataatctaatcattacctcatgtgtataacatgaggaggggtattttggtctttttacagataaagtcaaagtcaaactcctccacaaaacactaactaaaatccctcccatttcctagaaactcccaacaaaacaaaagctcatcatgttataaattcccaacgtgtgtgcttacttactcctcttactaattagacaaatatgcatgcatgtctaacacttttctagatattatattattattagtgtatttaattattgaattatatataattttaataataaatttaaaaaaatatcaacaactagaatgtcacctttaattggtgttaaattttattggtgtccaataataatatatataaaaatata

SEQ ID NO: 328839 - DNA, 828 bp, Cannabis indica
taataaaattaaattaaaaaaaaatcatccagtcatacgtaccaaacgggccctaaataaatattgtctctacaaaaattgagtaaaaattaatatcaaacaatttggaacagaccaatgataatattttggttgatcttaaaaatcatacaagaaaataaataaaataaacaaaagaacatgagaacaagaaaataaagatgagctagtataattaatttctcctaatatgtaaaactgacgtcaatgttgcggtaatgccatggcaaagtgagttatcttaatctagaatttaaatttagatcacaggcttcagttgatggtattatgtattagttcactaattaataatattattcacgttaattaactttaaaaaaaatattgaatcatatataaaaaatataaattattttactaatcactaattaattttaaaataaatacatttttataaatttacaaactatatttttgtattttatctagaggtgtacatttttttcatggagatgaggctccatagagacctgcccctaatagggcagagacggggattattttttatccctaacggtaaacggaatgggaatgacactccttgcctcgatagagacccgcttaatatgttagttatcgttttattaatattttatattttataatatgtgtttatatttttttgttatattagtgtcatttttatttttatattttttaagttatgttttgtataataagtagtatattgaataataaataatgtataatattttaattttaaaaaattacttcatatactattttaaattttttttttctaaattt

SEQ ID NO: 328840 - DNA, 762 bp, Cannabis indica
tctctctctctctctccaaagttgaatgatgagaaaaaacattatagccaatccataaatcaggccggttctttatacaaactgaatatgtctaaatttagcaaaaacaagactaaccagaactagaacaacctctttttccgtataatacaaaatggtatatactattttagctttttactattaaattataaagcatactgttttaaacacattaattttgatcaaaattattgttaagaaagtaatatataatatcactctttattcaataaaatgatttagttaaataaatattttatgaataaaaaattattttgcattgtaatatgtttatgaggaaatgtattttacgtaaattatttaattaagaagtaatcattaaaaaaaacatattgagaaatctattttatttaattttatttattaaatttttaaaactatttaaaaaaaatgtgaaatatatagtattattttttttattagtataaattcaatccctgctaaaaaaaagaatttgatcacacaaaatatataattaatttcacacataaggtatttaagaaatatatgtgaaaaagttgaatagtaaatataggtggcgtttagtatcaatttttaatcagtttttgtttttaaaattagaaaagtgaaaatattttcaaaaacatgttctataaaactgtttttgtttttcaatttttaattgagaatcaaaattttaaaaacaaaaaaaattactttcaatattttttaaacaat

SEQ ID NO: 328841 - DNA, 530 bp, Cannabis indica
ctgggactcgaacctaagacctctgagacacacacacccatttatggccacttgaactagcctcaagtggttaaatttgaaagaagctaatattggagatgttcgatatcaatctaacagttaacattgatgtaaaaacatgacattgatgtcgtagtctctctcttttttatttttttaataaaattaaaacaaataatatttaaaaaataggatttgtgcttgtgaaaattactgagtaattagaaaaaattaaatattaatactttttttttaaaataaaatttaaatattaaatactaatacatgaaattgttagagcaagtattgttagaagtaagtatcaaatataatttaaaagagagaaaattaaaatataatatttttaaattatataaagagttttaataatttgaaagaatactactgttaaagatgctctaaataagattagtcttccaatccaaaaaggtataatttttttgaacaatatctttagcatttttctaaggaaaaaataatattgttat

SEQ ID NO: 328842 - DNA, 563 bp, Cannabis indica
aaataaatattaagtttatgctaattacaaacttgaaactttagttacttatgccgctatttactctaattaaaaacgtgaatacatatgattttttaccttatgaattattatcatatctatcacaatttaattatttttatgttgttttaaattctatatcaattattacaacttctgaattttgctcctatgtagcgtaattgatttaatagtggtaatttgaaggaacacaatttgtcaattcaataataatttaagggtataattttgtaattttgtaatgttgatactttgaaatagttgcaagtaattttattttggacactaaagtacgatttgtcaaagggcatttggaataatatgttcaaaataatttaattatatagaatattataaaaaagaatataatcatagagaaatgtgtaaattatatttggtcgtataagataatatataatcatattcccattaattgaattacatcgtttagtatatttttttgacgtattgtttaatgttaattataataaaaataaaataattattcattaaagaaatat

SEQ ID NO: 328843 - DNA, 1064 bp, Cannabis indica
ctttctttacattttgttgaatttgattgtttagcagttgtgaatacgctttttaatgcttttctttctttaataatttttgttccttattagaagatttagttagtttcagggacggacacaagcccccactaaaaaaaaattagtgtgaaaaaaaattaaatattttctatttagttaaataattatacaacaaaatagtaaaaagcccccacaaaatagttataattttaatgtaaagtaaataataaatatttttataataattaagcccccacagatcaaaaattctgagtccgtcactagctagtttgatgtctaattttcttgaagtgtctctaatttatgtacgtttgacagttaatagaactgtacatgaattagcttggcatactcttcgggtggatagagaattagtataattttatgagatctcttttttttattaggatttcttaattctttgtatgacaatttgatttctttgaagttattcatttttcaaaaaaaaaaatcaattttaaccaagctatggtatctcttccttcctcgcagccactgcaacctatctctctcacctcctttcggctattcaccaccgtctttctcaaacgtctacgcctatgctaccctcttctcactttcttccttctaatcgtaagttacttaccactcttgattctgaatcgattgttgtatggtatacttttaatttgatgttcctaaaagagtgtctgcattgattaaacttgtattctgctgtattgattttaccgaatttcaggaatcttgaaaatctattggagatataattcaacatggctctttaattcttctgagaactgcctttgggattttgtcattatctgatggtactgcgagaccaggtcttaatttcatctcatcactcaaaataggaagagggtttaacttgacatttttctaggtcttttaattttgagtctttaacctattttttgtttcaagtaaatttgagttcttgtgagttgagatttggtattggcattattttgtcttgttgaaacgccatgtgtataaggtgg

SEQ ID NO: 328844 - DNA, 845 bp, Cannabis indica
cattcccaatgtctaataatccgtcccacactactaacatattaagttgtgattttactgagccaaacaccgagttccatgttaccgggcgccggaaatacaaaattatgaaaactactaactgacataaaatgcatctcagaattcaataataacagtacaaataattatttaaataggtataaataatttcataattaaacgtgattaactgctaatttccaaattaaactaagcggtctttacaatagcgaattacgcttataaaagtgacattttttgtagtgtctagtttatattttagaaaaaagaaaaataaatttatctatttcgattatatttcgtatagatctatgatttttgatgtattttttcatttattttggtggtcatttctaggttattgtggctgatagagtgaattttggatggccactgtatatatatatatatatatggtgtctttgtttcaaatctcgatttgggatggctataccagattcttttagtttttttttttttttattttttatttcaatttattttacctatgtgagttataaatagacgaataaaatcttatttgtctttttataatcggcataaataaattagtatttgcgtctatagttattatgtaaattttagaactggtaaaattaaattaaatgtcattttttaaacaatccaaattacacattttgtagtagtgatcaaaataataataattaataatttcatatgtatacttatgttagttatgattatcctacgtaagaaattacattgtatatctaatttacttaatttattttaatttttatctttatttttatattctttaa

SEQ ID NO: 328845 - DNA, 850 bp, Cannabis indica
cctaaattgctcccagaggtcctgtggtcacacacaactcttgagaagaaagccactaggcaaaccccattccctttagcttatgtatatgaagcaatgttgcctgtagatctggtgccatcgtctcacaagagaacaacctatgaccaacaaataaacaatatcctactggcagaatcccttggcgaagtagaagaaagaagagatcaagccaacctaaagttggaggcctaccagcaaaaggtagcaaggcacttcaacaagtaagtcaaggacatgaaattcttcataggagacctggtgctctgaagagtgttcctgagcactaaagatccagcagtaggagtgtttagacctaactgggaaggcccctatcaagttatagaaataactagtaagggagcctacaagctaggaaggcacaacaagaacttggagctcgtactcctaccaagatactagaatggagagaacccttgcaaatactactagtaaccaacttacagaaccatggcctttttggtgtggtctcacaccgttcttcaactatgacttctactatgtaagtcaagcaggggtagccacttgatatctagaagtaaaattatgttatataagcttgtagatacaatttatgtaaattacatagcaacaaagaccaattaatgaataaaatacaatgtttatgttcaatttattatgtctaaacgacttgctaacaagattaactttccaaagttaatcttttttcatttccacatgcatacaataggaagcaccccaagaaaagtcccaggcaaggtttatgaaacttggtgaattgcaaatgaccaagagactgtaagtctac

SEQ ID NO: 328846 - DNA, 1257 bp, Cannabis indica
cactaattcatacggattattgtgggttaggacgtgtgaaacgatactttgtttttgttttttttgctaaggaatcagtagaaactttattaaaattcaaaagtgcaaatattgtttttgaaatgatgatcagcttcccaaaaagatataaatccattacaactataggaatgactccattttgctaaggcatcagctggtttgttaaaagctctaggaatccaaattcacaattggacttgtgtaacatattcaagagctggaaaaattcagctgatgccatattatttaggttggcgttaaggttaaattgtataacaaaaaatcgacactaattaatttgcatatatttaatatactattaaaattattgatatatagttaaattattatttgttttcataaaaaattataaatcataaaaaaaaattcttataaaaatataaggtagcttatttacatttgatattaaaattttattcattattttgataatttatgataacttatttaattagtatttacaacattatatatttttagtacattgtttgaatgagtcaaaaaaaaattttataattaaaaaatattttataaaaattaaatatgtaaaataaatatagtctacacgctaatatcatgaattgagttagggttaagatttctggaatgaaatacatacagatgttaaagttgaccaattagacatattaaccagtttaacatgtacacaaaagcaatactctctcctacctgactcttttgtcctaattttttcattttagtggatatgtactcccgtgtaaacaaactcttcattcacacatcaaattttcaattaatcaaaataaaaaaaataattaaaatttgggtacagtatatgaggtgcattttgtaataatttgttatacatataatttgccatcggaaaaaaatgacaattgataataatatatctttatatatataaaagtgcttatctaacgctaattcttggtttaacgatgttgttttgtttcctccgttaacttttacaaatattcccaattaattacattatttttttaacaaaaatttattcaaaaaaaaacacacacacattccgttaacataacattatttattaaaaaaaaaaacatcgttaacatcccaaaataccaattatgctaaaattaggagtagagaatgaaacaaattgttagcttatgttaaagataaagatgagattgtacgcagtcggtacaaagaggtgagcca

SEQ ID NO: 328847 - DNA, 793 bp, Cannabis indica
cagctacaagccataacctcatacatgaaataattttctaatatttacatataaattattcaataataaatattaataatttaatatttatatatatatatcaaattatttaactttttattaataatcagaaatgtctttataggttttcaaggcataaactctaatagctcgcactactctcaattcgttgcattcatgtacacccaagatgtatcaagatttgaaactctattattggtagtgcagtataaaaaaggatgtggtggattacatatccgagtgtttaacctgacagtagattaaggttgaacatcagagacatgcaggtttgttgcaacctttgacacttcccgagtggaagtgaaaagatgtcactatagattttatggttgatttacctaggaccacatgtttgtacgatttaatctgggtgatagtggatcgatttaccaagtcagcacatttcctacctatgaaaacaacatatacggtggatcagtatgcaaaattgtacacggaggagatagtacatctccatggggctccaaagtccattgtttctgatagggagctaaagtttatttctatgttctgggagagtctccaaaaggccatgggtacaaatctgaattttagcacagcttttcatgtaacgcctgatttcttgagatattacacacgataatccatataaaataaattaagataaagacaataaaagacttttttattgaaaaataactaagcatgagatctcattattttaaaataaaatattaatttattcata

SEQ ID NO: 328848 - DNA, 627 bp, Cannabis indica
agctattgacctttgtaggactttaagttttttttttctttttttctttttctataattaccctttgaaaagttacctaattgggcgaaagtaggtctcgccccaactgactgcttggagttgaagaaaagtagctttgtgtaatctattttgaatttaaagaaaaaaaaaaagaaagagttgagaattaatttattgtatgtttaaaactctagagtaaatcccggctaaaatattaaatattttcaaaatgttgtacttatatgtctaattattttatttttttaagttttttagaagctaaaatattgtaattttataaccaatttctttttatttgttagtaaatatacttaattttttagctgtataatcttttaatataaatatattttcaaatttaaatattaataaagacactatttataatcaaaaaaaacaattaaaaaaagaataattacataagacactattttttataaaagaaattatatttttacatttatatattttttttatatatttttactgttttctatgaaaacaatacaaaaacaacaaaaaaattacataaaattaacaggaaaataacatcaaaacaacaacaaaaaaataacatacagataa

SEQ ID NO: 328849 - DNA, 1106 bp, Cannabis indica
ttagtgtttgtttcttttttaggttgagtatttttcaaagtttttttttttgcctaacgcggtcccatagtgaatgctaacctgataaggttaatttattttaaattaaacacatgtaaataaattatttaaaatcttttatattatttattaaattaaaatataacaaatataaattaaattgtatcaataataatattataattttttttttacccaaataacaatgttatttaatgagtgagctcattttgaaaaaactgtaaaattactcctaaaataatattttaactattttagctagaatacaagataaggaatttcttaaaaattgttgtacttgtattattactttaagcatttcactttggattatttaaagtagtagtgaggataagataacaatgaatatgggaagcttcataataattgtgttttggtgtgggagaagaagaatctttataattagtagctactagctagggtacaagtaagaaattacaggaccatacgtacataagatattggagttagattatttattgcgtccttattgggaaacagctacgtatacctatctatatatatcttaataataataatttgtgtaatttattgattggttggttgtgttgcattttgcatatatatgaccctcttaggaaggttcccaaaggcaacaaaggatatgaaagtgactaggtttagaatcacactactctttaatttgtagtgttataatgttaaaaagatgtagagttaataagatttttattatgttcatgttggacgtatttgaatttacgaaaggactgggccggtgtatttgtattgtacttctacaagaacccaatagttttattttagcactactagtactagtgctactggtaccatttttcttttcttttgtagtaggttttagaaaaggccatgtcccaatgtgattgagttacgtaaatgattttgaaaattgtaatcttagatctatgtagctactttgttatatttttttagtattttaagtgaattaatcaattaatagaattctatagcgtttggttgagaggaatgaaaacattaaaaatatgaacgtgaatgagaat

SEQ ID NO: 328850 - DNA, 697 bp, Cannabis indica
atataagactaaaatcaattctacaatatgagatctcattttttgtattgtatctcacatgtaattgtcactatagatattcaaagttgttgtcatcgtcgtatcttacttgtagtcactaatatattaaaagctattatcatcatcatatatcgcttatacttgttactacattcaaaattgttttcaatatctatctcacttatatcactactaaattttgaaagtaaaaaaaaatataattaaataataggcagcaattttaaatatattggaaggcggcaaaaacaatgaaaatagtaaaactagagtaaaatattcttcttgagagaaaccagagcatgaatgtatttattgaatcacacttaactaaataataaataacactatgtttgggttaagcaatgtattgcattaattattacgaccaatttttaaatacaatgtatgttgtattatttaatacataataaatggtccgtattagcttgtattataatatttacaaagaatttggagtcaacaccaatctccgacctaaacccggacctgggacccgagaccccgacccagacccagacccaaacccggacccggacttgaaactcgaactcggacccggaccagtagttgttgttgggatcaagtgtattaaaaatatattataattttaaacaatcaatcaatacaagtcaat

SEQ ID NO: 328851 - DNA, 1147 bp, Cannabis indica
tttttttttttcttttactactaattaatcacatttcactagtgacactattcattgcacataagtaaaacacagtgtttaatttatttttaagaaaaaaagggatgcttctgtctaatccaaaagaccccacttttataaaagcaaactcttttgatttatttatctcatcattcttcttgcctatgataatttaagctagagaacatctaatttaagctcacatgaggtttttcatacacatatatatatatatatattataagtatataacatctccttttccttttgagaaagaaaaataaaaacaaaaataagtataattaataatgtctctcattatcaatacttactttagatagagaataatgtcttctcattctcaatctcatgggaacaaaatctttattattattattattattattattattattattaagctttgtccttagtccccaaaatcacaaatctgcctttatcatatgatacataaatgagagcaataataataatataaaattttctatttttgatttattttcaacttaatctcaagtctcatccaaaaataatgaaaaaaagaaaaaaagggtcactaagaaaactgagtgatgagctttttattttatggcacatggatctaaaacactttattcatttaatgataataataataataataataaagtaaagtataaaatgaaaagtaaaagagagtatagaagagaggagagaagagggtgaagaggggtatctcatatatctgtctgtgtgtgctttgggatctgctcacattgtttgtacggtcatgctcatcatcctaaatcatactaaatcatcttaaatcatcaaatcaaaccataacattatattttcacaaatctttatttggtgtgtcatccatcctcctaacaccacgtgagatcacatatatttattttagcatgctatttagtcataaagagcatatatagagctccaagggatcaagagctaaaaatacgtttgaatgtagataactagaccactattatatttttatagggacacgattttgtcccgtgatgtactttcacggaatgtattccgtagtacattagataggtctcagggtacattaaatgagtgtcagggtacgtttcta

SEQ ID NO: 328852 - DNA, 1230 bp, Cannabis indica
atcatgatgaaaatcaacttaatatttaattttcaattataatgattaatcaagaataatattaagatagagaaactatcgagaacctgccttgggcgacgtgggataagaaggtggacctacaaaaaaaaatgcatatgaatcttgtgggttcttgatagaaatgttcaaaaataaagaaaagaagaaggacactaatcgagagactgaaggtaagactcctctcgagcatctcggttgggcaaccattgttgaccaaatcccagtcgccagactgaaaggatcagaaatggcactagcaagatgcagcgaactgcgcacaatactgtgaaccaatgctcctagcctcgatgggcaaagtctcaggtgccttgctcgaagaagcggtggcctagtgaacttctggaactgactcctcgacaggtggaatggctggagtgtgaacctgaattcggacttcaggagtcttgaggtctatagtttgcgaggcatgcttcttatttgcaatcatcttcctggacctcttgaggggttccacgttgacatcagaagaatttttcgaggcagcagtcctctttttccccttctttcttaaagaatggagaagatcctctaaatctatatctgcgagacaaagagatgcatcaatacatatgtaaaaaatagataaaggggaaaaaggggaaataaattcccacttaaggttagttaccataatcattagatgatgaagagggaggactatagtattcactaaagtccctagatcctatgatcatgaatatgtcataggagttaattgcatctaaatcccaatcttaatctagatggctcgctctatccaagttaatcctatactgctcgcaatcccatagtaagaactagtgcaactaagttgaacatggaaaggtggataccaactatcaaacctatgggtaatacaatctataaggaaggggttccaaatgtataagttatattgactatcgttgaaagttactaacaaagtgcgtcttgccgtaagagcagtgggagacgatccacattgattacctcgagatgcatcttcttcaacttcctaatgggttgcattttggagataatgcacccgagccacataatcttgactttcctcgtcagctagacctggaacctgttggattttatgccctaaataaaactatttacaatctgattagttatcaatataagaaatttgaagtgatttat

SEQ ID NO: 328853 - DNA, 925 bp, Cannabis indica
acaaaactaataaaattattggactaggagctgtattgcgagactcttctggttttattaaagctgcattttccaagtccattcacgggtcctacaaagcagaggagatggaggctactgctcttgtttatgctctgcaatggctcctcagcattggtttaactactaactacattgaaactgattctttgttggtagttcagggattaaaagttgcttctcattgtaattctgcttttcatgctgtattaaacgatgttaactatcttgtatcctatttcccacgagcacaggtctctcatgtcagacgatttgctaatacttatgcccatgttttggttatgtttgctcttacggtggatactgattgctcttggttggaagaatttcaacctccacttatgactattatgtaattttctacaaattaatataatagtccttttactacaaaaaaaaaaatactgtaattttttaagtttcatatcattcatttaactaccaaaacaaatatgaagatagaaatagatattttaccttagcaactttaaaaaatttgaggcggccttaaagaatcaacaattctctatttaagtttaatatatataatatacatcagaacaaaaagaagaactgttattattaatagtaatacaaataaagaatcaaagaatataaaaatagtatccattagaacaaaagccactcaatatataggtgctaatataagaaaataaaaaggaatgcttacatgaaaatggctttcaaagacatacagcatcatcctcattatttcttcatttgagtttagtatacatctgaaaagtgagaacaaaaaaaatgttaataataatagtaatacaaataaagaatcagagataggaaaataggaacatatatagaatataatacactcaaaatattt

SEQ ID NO: 328854 - DNA, 975 bp, Cannabis indica
ttttattttttttcagtttttcatttctattttttcataactcgatttttgatttttagttttatccaccattaataaaaaaccaaatcttattttcttccaaaaatttgatctcctcctccttctctacgttcttttttgcaactgctcacaatttttccctttcttttttttcttttataaacttctatatataatggcagtcactcggtgctcctcttcactttcgctattgttgaagaaatctcaaacaatgggtgttaaagctcgggccaacaaatgtaaaggtaaacgccctattgatgacggtgatgattttggttttcccctgctaagaaacttgttcgtcgtcctcctcagaagaaatcaaacaacattgaggctgagaagactccttttccagaggctaaaaaggggaacaatcaacttgatcatattatcaaggttattttttcatttctttttcgtttttccataatttttaaatatttcatctgttatgggccattgttccgaatccgggacttgatgttaaagctccacttagagtagtggagattgatagccttctcggccaggagaataagtgagttttttttttttgtgttattgtattttagttgttaatgtgttgcattatagttgttttaactgttaagttttttgttttgccacacaatgattgtgtgatgcatttgtttcaacttttgttgaatttttcattcatcgtaaagatgttccaatagattttaacattgaagtttacacctactacaaaataaccttttagaggttgtttttccacaagttttataaaaagaaaaactaaagggtttaaaaatacccggctattgaaaattgacatttagaagcagttattttataaaaaaccgtagttatagaattagtttacacccatttagagtcagttgcgataggccctatcatgttactaggtttacacagatgaaagaa

SEQ ID NO: 328855 - DNA, 1039 bp, Cannabis indica
acaaacttaaaatctaccccacctaaaaagtacatctatatattttggttggtccctactttctttcttactttttatttttttaatattgtttttaattttcttctagaaaaataatcacttatccaataaaaattaatcttaatatattgataaaagtacatacattaacacatatatttttaatatctaattcaagttattaatttatccaatattcaattatacatataattctctcaaaaaaaaattatacatataattaattactagtgtatagttttttttacaagttgtggctcaaaattgacagtaatatattcaaatattttgattagatagatttaataaaacatatttcttttatattaaatataataatataatagaaagtgttatattttaataatttaaatttaaacccactacacatatttaaaaaaaaaatctttgtattattattgtttatttaaaaaaataataaaataaaaaagtgtttataatatttttattattttgtattttatttaaaattgtaatcgaaaaagaagtgtgtgctcttgttcaattaattattaaaattaaagttagataggttatagcagacattgacattacacaatctacaatatagagatacctaacaatgatattgcaaatagtgaaaaagattacacataagaactgtaatatatatgagataaaaaaatatatgatatgtattatcattgaacaaatatagtaaattccactttatttttattttatttttaggttgcagatgattcattgaattaggatactaagttgatgttacgtgcaatgcatgtataatttaatttttttaattaggttcaataaggtgatattaagtgcaatacatgtatgttttatttttgttaattggtaatgttattttttttttaatatttttgaaattggagttttgagtattttgctctttaagaaatttttttttagctattgctacattggtgtgtcatttaaatgtgattatatatatgtttatttttttaaa

SEQ ID NO: 328856 - DNA, 534 bp, Cannabis indica
taagacgtgagaagtgaacataaaaagcaaaacaaaatggaatattaaaatgtgatgatttgtttgtgcagacaaaaaatataaaagatcagaatatgatggaaaccgcgttcttcacttttacccaatccaattgcaattagggcaatgggcagtcatatgccccctctaaagcattgcaacctaggggtattcgtagtacggttaatgcgtttttgactattttttaaattgttatgcttttgtttcgtagtgagtaatttagtaatttggggtcgtggggtcagggctgaagtgaggttagggctggccagagtaagcagtcgggatgtggttgtggttggggtcgtggtggtgctccggtttttttaaaattaaaataataacacccactaataatatttcgacacgtggtatttgaattgggtttaacggatctgttaacttggagaccaacggaaaaataaaaaacatgaccttgaggactattgccgctatttttggaagttggagacttatctgtatcaaactgaa

SEQ ID NO: 328857 - DNA, 781 bp, Cannabis indica
attttaacttttaatatttaaaatttactttttgttcttctaaaaaagaataaaagatacccttcaatttttttttttgaaccagaaaattaacttttattaaatcaaatcagctaccaaaatagctttcaaatcaacagggacataaccctcttgggacacagccagacatagaaccagaagaacaagctaaaaagttagccgcctggttcccggaccgtttaacaaaattaattgaaataggaaacaaatgagaggactgcgtaagagcaacacggtccgtgattaaaagccccactagagacagcaaccgcttcttctgttgcacggcttgcaccagcagcagtgacagtgagtctgactccataaccacactaccaggcacaccttcctctacccacctccccttcacccaactgagcacctccttcaacaccatagcttcagccataaacgggtcaggttgaccataacttttaaccgccaagggatcaatgaataaaccattatgatcccgagcaatccaacccaaaccaatactattgtcatcctcaatgacagcagcatcacaattaacttttatctcgctaaaacgagattcagcccattgctcacacccggttttattcagataagaaactggcaaaacaactctattttctagctgagcattctttcaagaatcaaggtaagtaattgcaacattcaccaccctctctaacgacaaagccttattactccacaccaagtcattacgagctccccaaactccccaaagaag

SEQ ID NO: 328858 - DNA, 1301 bp, Cannabis indica
aattgtcacacgcataaagaaaaacagtcatatgtgtaacaaaatatttaaatcttattttcggcattgtaaactatatattcagaattttttgaaaatttacaagtggttctaaataactataatgtacacaatcatgaaaaaaaaattagactaaaaaatctcttaaatgctaaaacagataagaggctaccagaatagccttttaaaggctttaaacatacccaatattatttatttattgttttgattaaaaattttatttttttttatttttgatataataataaaaatatattaaaataaatatagtatattagttattaacatcacttaagcttcattttcaaacaaaaaaaaaacaagaaaaaataaaaaaaatcagttaaactagcttttttgaaaaatagtcttatattttataatacataaaagtattttatcataatgtaaagtaataatacgaaaataatacaaaatattgtaataatctcatacacttctgtaaacaaaccctcatacactatatatatttctcacatttgttaacactgactatattttagggaaattttcaaaggatcatgtagtgcagcaagaaaccattgggatatcgaatattctttttggagaatggtcatctaccactctctcctagctaacttccttatcccttctttcttttcttcctctttcttctcagtgttggtggttgtgtaagtgtcatttggggtttggctgtgtcgttgatttcccatggtagagtgtgtttgtgtctattttgtgctttgggtcataggttctttgcccttttctttggtttatttttctttagttccttttgttgtcttggttgtggggtactcctggtttgtggggtagaggttggttgagggtgtgagggatttggggaggttggtttgtttggtagcttgtcctttcttgtttgctttcaatggctttagttaatgccaccaactcctctactaatggaaagtgttattcttatgaggaagcttcagtcaagatcagtccgtgtgcctcttcttagcaggcattatccactttttgtcttcttgggaaagttgtggccccaatggtagttaatgaggccactattattgactttgtggaaaaagtttagaagtttaatgtgactgtggtagctttgaatgatggtgctaacaaccataactgttttgagttgcgatttttaagcactgaaaaccgcacttgggctcttgaacatggtccttggtgtgtacgtggttacacttttatcttgaaagcatgggcgccaa

SEQ ID NO: 328859 - DNA, 610 bp, Cannabis indica
tatatatatatagcgctacatatagtactaaccacacaaaataaaggctttaatattaggtcattcttcttttctttataaacttatagttataccaatgaattaatgcaattgattatcatctctgagtttctttcttcaaatttctgtgaatattaaattagtctaattcgattttaatgaaaataatataatattattctgacacagttgttgatcctctaccatatataaatgtcattttggtatactgatctattttgttatttaattttaaaaaaaaataattgtcttttagttttttagtgcacaattttttttttctttggtaagtaacaattttattgctcacaaatcataatttcaaactgaaacaaaacaatgtactatttttatactaattttctctcttaaaaaattagaaaagataaataaatatctttttcaaatttttaaatgtaatttaaataaataaaataacaaaatttaaaaaattagcaaaatatcttatatctatttaaaattacatgattataaatatcttattttaaatttaaatatggtcaaaatatctaaaaagatttaattaaaaaatcttaaaagataagat

SEQ ID NO: 328860 - DNA, 719 bp, Cannabis indica
ttgtttttccttatcttcttcttccctgtattgtttttctttccgcactaataaattatgatgattaaatttattaaaacaaagttagagtgacaataaaattcatatattagggagacaaagccatcaaagttaatgaatcactattcaccaattgcggtacaggtaagataagctagtaaaccttcttaatatgatagtgtttaattaaataattgatctatatatttagtacattatcaattgaggaatgccatgtttaatgtgctgtcctagcaaaatggaatttattaaagcctatgaatttagtgttctttagtactcaaggtttagtagcctagtcttctcagagttacattgtcctactctatatactctgttgttttttcttcttataataagactttggacattgcctaccctatatacttaattataattttcccattactcttttttctgaaaagggttttcttgttgcaagcaatataggattcaatgatcataataatagcttgaggttcccttttgaaattcgaatgaatgagaatcagaatctcaacaatagtagggggaataaggtcatatatagcccatatactccagctaagcttagcattgtgagttaagcccaattgttagataaaggtataattacacaatacacaatttttttttttttaaaaaaaaattaaataattacgtttaaagaatttttt

SEQ ID NO: 328861 - DNA, 1123 bp, Cannabis indica
ctatgtacgtatgcagataaactttctctctctctctctctgcgcaacatcttttgggatgatagtgtcatcattcactaatgtgtccactattataattgtcctttctcatatttttctatacttttttgagaaatttgtcatatcactctatgttgaaaagcttattagaattctttttttttttaatttatttattggaaaaaacaattccgtgacaatcaaattattgttcattatgagagcttttctattatgcgagtgtgcgtgtaatgtcatatatataaatgtaaagcatttattgttgtttttatttgataatcatttaagctgcctagctcgagattattactgtgaaggtccaatattgatcatctataaataaatattacggtcccaatgattcataatcttttaaatataagtccaaaagattggtacaatgatattgacagacaatgttcataatatggcttatgggctcacacgctataaagagcattgttatatttgccatcatgaacatgatatctagagacacagcggccttgaatttaaatgagctataaggtaaaaaaaaaaaaaaaaacttaaactcttaaatagtagtatttgtaacgccttaaataattaggtacgctacccaaaatacttatgaaatcctaatcctaaatgggattactaatcaaaaataacgtagaatttaaacttttataataacaaacagaatgaaaataaaacttgtaataattttaaactttacaacagttaggatcccaaaaatatttacaaacttcattacaagtctctttcagttagccggcctaagcgcggcaaaatatttttagagtttctttaaaaatgaccttagaagtgtggcaccctaaaagaccaatttcaatgacagaggatctattattattttttttttggagggttttccaagcttaataacgtcactgataatatatattgagaaaataaaacagaaaaattaacggccataagtacaataaaatatttctattcatctataaaaaaaaatgacatacgttattcgatagatttattctttatttaaatataaaaaaataggtagaatatacacattttcatgttataa

SEQ ID NO: 328862 - DNA, 660 bp, Cannabis indica
aaattatatgttagacttaagtagagagtctggttatattgggcaacccacctaaaaaattgagtatattttaataaaatataacatgaaagtatttttaattaatgaatattaaaaaaaaaaagatattattcagcttatcccattaaaattgacggaccacgtatttaataaggagaatttatatgtcatactgtttttcccattttattttaattttattgttgtacgaaaaaaaaaatacgtttttactgtttctttttaatattgtatactattcttttattacttttgatcaacagcccacattttatatatataaaagtttgaaatttttatgtgcttatatatgtgtaaaaatttgaaatttttttatttgatggctgatgttacttttgtgacagttttacataaggtatcccattttgtaaaaagaattatatttgggaaatttgattttctatgcttagaaaatcaaaaaatttgatttataaaccaataattaaaaccctaaaaaactatacctttttttcaaaaccccaaaaatacccccaaactaaaactatctctctttctctctctatctagccggtcccaataatcccacaccccaggtccgatggtcggaccatggggtccgatggggtccgaccaatcgga

SEQ ID NO: 328863 - DNA, 557 bp, Cannabis indica
acagtaaaaaaataaaaaatacagcctggcagtatttttgtaaaaaaataacaaaagtcagtataccatgtaaatttccctaaaaaaaagagatcgagaggccttttgggctgagtggccttggacaacagcctcgcgacctaccctaaagacggccctgataatatgtcggtagattgaagtctttgaatgggccgtgatgaaagacaagcaactgcatttgctattctaattgcattgacaagcttcaaaacgtttttgtggttgctcatctgtgatgccactgcaacttcatttgcaatcattcccaaatctttttctttaattacttattggcaaaaacacaatggtgtgctctaacactgcagctccattctttacaaagaacccatttttctgtgtagtctttgttcttcttatcttttgtgtagcatgaaaacttcatggcagaatagaagatttggattttggatgaaatattcagttagctaagagaaaggggagtcgggagttttgggaaaaaaaaaaatttggaccatttctcgatttgtgcgtgt

SEQ ID NO: 328864 - DNA, 2109 bp, Cannabis indica
gaagtacacgtgtcaagtttctggttgatagacaaatttcggatataacacttctctgcatgtagagcaaagattttgctcagaaccatttgaaaatatattttatccatgattattatttattttttttatatataaaaaatgctctttttaaaagagctattgtgactgctttatacatttttataaattaattgtttaagatcattcataatagctaattgtaaaatagttaatgtaagatatagctaagagttaaaaaaaagtgattaaaatattcatagatgagctattattactaaaaaaatatacttaatgaatagtggttaactaaacgtagctataacgttcctaaattttagtgcatagtgataattatttattatttttataatgtgtttgttgattttaagtagaaaattatatatatatatatatataatataatggaagtatttttaatagttatatttgtaatgtaaccacggttgttacgattttgtcatgacttgttataatgggttgcagcaaattattatttaaacaaatttctgtatattagattattgttacgtgcattgcacgtgtatttaattatatatatatatatatttttgaattaatcaagagatttattaactaaaaaactcgctcaaaacaatagaacgcactttaaaggaacaatcctccaactaaagtacaaaacttgtagagaaacaagagtctcttgccaagcaatgagccaacttatttgcagatcgtttaacaaaacataactcaacaaaagataaagccaaaagtaaattcttaatatcttgaacaataagaccaaactgggaggccataaaaactttactttggactgcctggacacacaccagactatccgtttttctaacaccacaatgtcccaaggatgagtcgcaatccaactcaacgcttctttgatgcctatgatcacagcaatttcaggttggacgtacccaaccttacccttcttgaaagcttctaccaaaattctatgatgatcccgagctacacagtccactccaaaccggccatcttgttcaaatatagccccatcaacattaactttaatattgtttaacacaggtgcaattcaacgctcacagttccgccctccatcattcaaaggagacacgaaaggcgcttcctttcctgagcaaatttgtattgatcaagcatgtttctagctaataaaaatgtcatcgtaaatctcacttctcacctcactgaaggaaaaaaaaaacaaaaaaccaaaaatgtcatcttcgtcacttctacctttctatctaactctttattttcatatttttattgtcgaccttctcctcaccatcatcatcgatctccatttttagatttttactgtcaacatcctcaggttggccccgctgtcgacctcttcctctaaaggaacatgggcaaaatcgagatcttcgcaatggttagattgagtccatcgtcgaatatgtgttggttatgccagagatggcttcacgacatggagtagtgtttgagttcgtagtctcttttctttcacgagtcttagagatggtacttgagttctcaatggtagcaaactaatttttgggtttgtgtttagggaaaaaagtttgtattttatattgtttatcttaaattaatttaaaataaataatatttatgtttacatatatttataaaattaaacctattaacaccgttaaattgacatattaaaatattctattaaactaacaaaaatagtaagatatccacattttaaatataaaaatattctaaaagataaatttctatatttagaattgaagtagttataataaactatgcaattaaaataaattattttttttaattaaattattaaatagtattattttttttagaaattgatatgcatatatatatttttggggttttttcaataatatacctaaaattaattttatttgtaaaaatacattcaacaaaattatttccacaaataccgatatgccacatcagcataaataccgaaattcaaaattattaccgaaaaatggaaaaaaacttaaaaaattctcgcttccagaaatttcagtgttt

SEQ ID NO: 328865 - DNA, 525 bp, Cannabis indica
gagtccgagtctagctttgggtcccgaatctcggctatgggcctgggttcgagtccagatttgggtttggagtctgggtctgggttcaagtttggggtctgggttacgggtacgggtctagggttcgggtttgggtttgggtcctagtccaagtttggaatcgggcatgggttcgggtctaggtcccaggtccgggtctaagtttgggtcctgggtctgggtccaggtctaggtccagctctgggtctcaggtccaggtctcgggttcaggaatgggtcccgaactcgagtcggagattagggttgaccttgaatcctttgtaaatattataatacaagctaatacagatcctgaagtccttcacactacttcgatcaactccaaccacactgtaaaagcagagccgacccatcacaaatttaatgtaatgaaaaaaatgggctatataattaacaaataaaccttaaaacctcttttcttcacaatgaagtccttgcttagtgaaaattcataaataagacata

SEQ ID NO: 328866 - DNA, 1295 bp, Cannabis indica
tatatttttaatagcttttaattattataaataactttattattatttttattatattatgattaatatttatgctaattatgtaaaaataaaaattacataatatattatacaattttatattattcataaaaaaataattaaaagatattagacttaaaatttcattcataactaaaaattaattttttaatgtaaaattttagaaaattattaaaaccgcgcgaagcgcggatctattccctagttaataagtaaagctaggaaaataatcaataaggatggatcgatggaggtgagttggcaaagtcgaaagacgtacacttgtgaggcttctattttgtactacacattatattacaacaaaaacaaaatctcaattgacatttttttaattaagaattattattcaaaaaacaatgtcaatagcatttattttcttggtcatcttctttgtcttcactacgtgtcctttgacccttataaagaagtcaacagcgtgaggtggagagttgcttgacaaagggatctcgacagacctcacctccaacttcaataaggtccattacatagatattagtttgtaaaatgacttcgaaattgggattggcaacaccaacggccttagattaattgggcctaattaatctggtatagggagatttataaaactacagaaattttggataaattttataaaaatactaccgcatggtattttttacaaatatactgtcctagactttttttttatttcctttatattgtgtatacccaaaaaggaccaaaatacatacaaagcttccatcttcaacacctatggactgaactaccagaacaactatttttccagtaagagcgtatacataaaaaatttcaatcctaaaacaataacataaaaaattactaaaacaacagttaaaactacaaaataaaataatcaaataaaattacaaaaaataaaaaattgtacctcaataactcttttctcagtggggactaccacaacatcacgagagagaacctttaccttaaaaaaacaatctccttaccataaatacattaaaaaaaaaaacaattcagaataactaaaaacaaccgttaaataacataaaaatcaagtatacaatactaaacactgaatagcacatacagaacaacaaaccatatatttaacaaaatcaggagtgatgaacgaaattctaaattgatatctaagactgaacatgcacaaacaaaaaaaataaataaataaataaataaaaactagaagaaagaaagcttaaaaagactga

SEQ ID NO: 328867 - DNA, 836 bp, Cannabis indica
cattgtgctggaaagttattattaagtcagccattttagtaacaggataaataacttctcttcttaaattgtgtctactctattgagttttgctctcccaacattttatagtaattataacaaatttttctattttgttacattgtatacatttttttaaacggtttgctggtctggtcatggacatattagccagagacataattatagcataggccgtaggagagtaactgccacgtaaccatttacttattattgagcgagcattgttattgggcactaataaataagaacggagatatatatatacaagtctaaggtgactccggccccatccaaaacacacatgcgatttttcttgattttttgtagggaaatttacatagtaaattaatttttgctatttttttacaaaaatactaccagaaggtattttttactttattactgtattttttgtaagtttcatattccaatatactgtgttaagttttcactggtgttctactagtgttatttagttgttctactgttgttttgaattgttctgtttgtgttttactggtgttttataaatacataatattttttaaaacctttccgtagtattttagtaaaatttaactcaaattgtaatatttttgtaagtttccctatgttaatagtgaaaattacatgaaatatgagattttataaaaaagttagaaaaatatgtcatttataggtttgccactcttctatggcattttttcacattgaagattttttatggtatttgatgatatgccatatttttataaacttattatccaaacccatattttatgtttttgttt

SEQ ID NO: 328868 - DNA, 864 bp, Cannabis indica
tatgctataaggaagttattttatgagtcaccttaggctcagcagatagttcacacttacaatttacaaaaatactggaatttaagttaacttttacaaaaaatattgtcacacagaaatgttttctaaaatactgtgtttttatactgtgtttttataaaacaccaatagaacacagaacagaacaactcaaaacaacagtagaaaaactataaaacaccagtagaacactagtgaaaacttaacacagtatactgcagtatgaaacttataaaaaatacagtaaaaaagtaaaaaataacgcctgacagtatttttataaaaaaataacaaaagttaatataccatgtaaatttcccttaagatattggcagagggccattcaagtgggcctgatatttgcatttaggccttcttttgataagtagataagtaataatgttatggaaaacttacaaaagtattggatttagggtagatatttacaattttactatcacacggcaaaaattacttttatattatcctctattttgtaaaatttatttcaaaggacaaaattattatttaatattttatttttttcttttaaaaaataaaaataatgaaagttattatccacaatggcattttttaagaaaacataggagagattttaccctttcttttacccctaaattccttagaggtaagttgaaaaatactacttttattaatcaattgatcaaatttacctctaattttatatttaattgaaacatacctctttttatatgtattgtgcccaaaataccatgacataagagagtcacatggagagtatcttgaagtgacatgggtaaaattgatacaatatttaaaaaa

SEQ ID NO: 328869 - DNA, 696 bp, Cannabis indica
atgtagaactagaataatctagatgaaattaaatgtaggggtaaacaactataaataccccatcaagcttctaaattgtaaccaagcttgagtagccaaagtaagtcttttactactagcctactaccttgtctcctctcttactacacacataaaaattaaaacactacataactcttccttgtcccaccaatcatccaacttatcaacttatcaacatcatcatactacactacctaatatccatcccatacaaatctaaaccaatacaaatttattctcaaaccatcacaaagattgatcgtaaaaaaaaatgatatagtttcaatctgtgtcctatcaaacaaaatattttaaacaatatttgttttctgcataaagctcagtagtgtgtttaattgtagttgaagaattaaacactccaatttatttaacacttgcttgaaaccttacataattaatggagaacaaaatatataaatattgcaacacaagcaggcagctatatatagagttgcttaataaataaacaacataaatattattataattaattgaaaaacatttatatatatagcaacaagccatatataactgatgataccgttttgataatttttgtaattgaaatatttattaaaaaggataggcttcaataatagagggtatagctggaattttagtgattttataacg

SEQ ID NO: 328870 - DNA, 2828 bp, Cannabis indica
agagagagagagtgcactttttctaatttcttatttccattaaaataaaatgaaaaccaagtgttttatttcataaatatcagcataaaaaatcagattgataacttaaattaatccactaaagacaaaactccaattgggcgaaaacaccatttttccactcacttaaccaaaaagtcacaaaaccacctaggggtaatttggtccatctaaaatctcgactattcccaacattcccaatgtataactatatttctccgctacattaaaaatactaaaatataattctaatggcgaaacaccacgttccgacgttgtcgggcacaaaacaagtaaaaacataaaatttcatatatgacatatataatggactctgaattcaaataaatctccataaaatgataattcatatctaatattcaactttcataattaaacactatttaattgataatttacaaattaaagttaagcggtctttataattatcccgccgttgaaaagattttgtcctcaaaatttaacctgaacaactctggatactgaaccctcatgtcagattctatctcccaggtggcttcctccaccttgctatttctcaagagtaccttgaccaaagctatggtctttttccaaaggactttatcttttctgtctaaaatctaaactgggtgctctttgtaagataagtctggttgcagctcaagattctcataactcagcacatgagtagggtctaaactgtattttcgtaacatggaaacatgaaacacattatgaactgcgaatagagctggaggcaaagctaaacaatatgccactagtccaagcttctcgagaatctcaaaaggtcctctaaacctaggcataacttgcctcttttcccaaaatgtttgatccccttcattagagacacccataggaatacatgatcccctacctgaaactccacatttctgcactttgaatctgcataactcttttgcctactatgagaggcaagcattctggccttaatattttctatagcctcattagtctgttgcactgattcaggacctaagtatttcttttctcccgtttcatcccaatgaatgggagatctgtatttttggccatataataactcatagggagccatccctattgtactctgataactattattgaaagagaattctatcagtggcaggtacttgctctaggagcctggaaaatctataacacaggcttctaacatgtcttccaatatctgaattgtcctttcggactatccatcagtcttaggatggaaagctataataaattttagtttggtacccatagcctgctgaagactatgccagaacctagaagtaaacttcagatctctatctgagataatagattttggaatgccatgtaatcttactatctctttcacgtacaaatctgcatactgatccactgtaaaggttgtttttaccggtagaaattgtgcagacttcatgaatcgatctaccacaaccaaaattgaattgtacaatcctgtggttctaggtaatccaaccacaaagtccatggtgatatcctcccacttcaactcacgaagtgtcaatggctagaataaacctaccggtctccgatgttcagccttaatctattgacaagtaaggcatcaggatacaaattctacaacattcttcttcatcctgctccaccagaagtagggtttaagatcttggtacatcttgttagtgccaggatgcaatgaatatggagtggtatgagcctccttaagaatttcatttccaagttccacactacttggaacacaaaccctggtcttaaacaacaacatcccactatctaacattgtaaaatctttggcttgaccagaccaatccttttcttggatcttcacttatttcggatcaactaattgagcagctttaatttattccaatagatcagattgcagcgtcaagttatgaagtttgcctacaacaaacttgatgctttatctgaccatgtcttctactaactgaggtgaaatcttaatcatactagttatctgctcgggacccttcctgctcaacgcatcaaccactacattggctttcctaggatggtaaaagatttcacaatcataatcctcaaccaactctaaccaacgcctctgtctcatattcaaatatttctgagtaaagaaatatttgaggctcttatggtcagtataaatttcacatttctctccgtagagataatgctgccaaatcttcaaagtaaacaccaccgcgacaagttcaaaatcatgagtcaagtatcgctgttcatgttctttcagctgatgggaggcataggcgataacccgattgacctggattagtacacaccccagaccctgcctggatgcatcacagttaactatgaacttttctttatctgacgctagggctaatactggagcggcaatcaatctttgtttcagctcttgaatgcttgtttcacacttgtctgtccacacaaaccgcttattctttttagtagcttggttgaggacgtacaaatcttagagaacccttctacaaactgacattaataaccagctgacccaagaaaattcttacttctgtaactatcttcggtcttggccaatccctaacagattcaatctttcctggatcaaccttgattcgatttttactgaaaatgtgtccaagaaaggatagctgagatagccaaaactcgcacttcttgaatttttcatacagtttatgttctcgtagccgctatagaaccatccgaagatgttactcatgctcctcttctgattgagagtacacaag

SEQ ID NO: 328871 - DNA, 911 bp, Cannabis indica
atgtgatggaacttcatgcatgcaagtgggacgtgagtccctgtagatgcaagaaaaccagtcgagtccataaggacctgtgcaactgatgctcactgtgcatgaagaaggaacccgaaaggattcttggtcttcagtcccctcttgcagccacagtcggccatggacttgtccttctccttctccgccaggttcgaaaaagactcgactggatcattgcgggtccttcgtgacccgtaccatgcagttgtgtatgtggcttctcctcctcgtggccaaacatggccaccgtggccatggtggatgtagccgccaaccacggtgggtcatggtggtcggtcctcttaaactctaaaccccaccctattatatatatgtatgtatttttaggtatatatatgtgtacatgttgtatatataatatatattattatatattgtatataatatatatagttcatatataatatatatacactttaaattataaataattacttaatgtaaataattaattattgttctggatatttgttttttaaaatttaattttgaattcaaaataaatattaaggttactaatttgaaattcaaatttaagttagtaactattttaattattatttcaaataagtttattttagttttgaaattcaaattctaaacctataattatgttaagatagaagctctcttaatcccaattaaaataataaatgttattattttaagactaaactaatatgataataaagttgtcttaaataaagggttttgtttacactaaaagtatccacgatgacatggatatcaatgtttgatatgtgagaagaaagatgacatctcagagttgagtagtcctgagtcatagcaagtcgactgggaggggtccctagccttgcgcccaagtt

SEQ ID NO: 328872 - DNA, 768 bp, Cannabis indica
ccaactcttaatgggttggttatatggttctatgtttgaaggaattgcttccgaggttatgcggtgcagatctgcttctactctttggtctgcgttagaagagctatatggagctcattctaaagctaatatggatgatctacgcactaaacttcaaatagttcgaaagggaggacagtctatggtgattaccttagacaaaaaagagtgtgggctgattctcttactctggtaggagatctccacccagaaagacacttaatagccaatgtgttgtctggtctggacatggagtatttgtccatcgttctgttgttgggaaatcgtacagatctcacatggtaggagcttcaagattcattactcagctttgacagaaagatggaacggttgggagctgtcttaccaacaaacaaatctctaggaaatccatctgcaacactcgcacaaaaaccatctcaacccagcaacaggggcggttatcatggaagaggaggaggatacaacaataacttaggtcgtggttatagaaacaactctggttatcaaaatggtgcaggaagaagtggaaacaacagtagaggaagaggaagatatggtatacgtaattctcgacccacttgtcaagtttgtagaaaatatgggcattctgtagcattgtgttataatagatattaggggtgttcgcggtgcgggtggtgcggtttttaaccattttttcaaaccaacccgcacatgcggtttttccaattttccaaaccgcacccg

SEQ ID NO: 328873 - DNA, 941 bp, Cannabis indica
cagctaagcattctgggtacttgtatccaatgattaaaagtgaacttttaaaattgcctcgtaggtccaatattgtaatgttggtgcgtagccataaattagtgtaccccggttgatttagtgacttcattcttatttaacgtagccttcattttcatcatgtctttctgaacagaatacataagtcgactaaaagaagcacacctcaagaaatttgaaaaaagaagttaatatcctcaacaaaacttagtataccactcgtaatatttgtattcctctcacgacctatgaggactccctccatgaacaagcagaaccctagcttgtaaacatcctcgacaatctcacgttcccaaatttattgaaataaaggttcaacaatcggtcatttcccaagtgagcatccttctcctcaatggatggaccttgcacgaaattcaacctggttatgaaagcgaactcagccacgccaaatcttgcctcgtttctgccaatgtaaaaccatatacttcatccgccactccgccttctcaacttgaaccttcattttgtacataattaattggtgcaccaaaattgaagagaaagcgaaagttttaccctttcaaaattggtcgaaaggggttcgattcatcatatcaattaatcattcatgtttttaaacttttgaacgactgaagtgaatattccactctctctatatgtcacaaggcctgaaaagtggactgaagtgggaacaataagttctggagccatctttaaaagataaagaatacgataataaaaaaaacacgtaagagcaaactgataaaaaaaacactaaatcctatcgagaatctactgagaacccattgataatcacttacaatcaccaacatgaaaactaaaaaattaataacctatcgagaatatgtcgataatcaagcaacaataaccaacat

SEQ ID NO: 328874 - DNA, 1542 bp, Cannabis indica
gaaaaaactaaataagaaatatactagatacgtgtactttaatatacaaatcatactatgttaagtcaacaatttgaacaattaattcaacattttatattgttaaaattaatgtcaatatatttattattattatttttttctataaattatcactactattacactatacgttatatctctttctttcttcttaaatagctaatttaattatatataaattaagaaaaactaattaaattaatattactttgacttttcaaatattttgaaatctcactacaaaaaaaaaaagttttaacaagtttaattaataaaaaagaagaaagcttataaatacaccacttggcgtgccttcctcccactaacagaaagtgaggtccacgcgcgtcactctttattccttaagtagcttaaaccgtataaaagtaaaaaacaaaataagaaagaagtaaaaaagaaaaaaaaaaacgacctgacactataaaaatgtaaataaattattattttagtcaacttttgaaaatttctcaaaattaaatcaagctttttcttttaaatttagaaacaaaccaaaataaataactttaaatctctctctacgatttatctctctctctctctctctcattccgatctcttctctctacgatcaaaatctataaacaccgatcaatctcttcttcattgattaatctccacaaatcaatctcaaaacaccaaatgatgttcgtctccggcagcaataattgaagacctaaaaaaagagaaatagagaataaaacataagaagagaagattcaacagagcaaaagagaaatttacatcactattgttgacctcagaaatggaccaactgatagcggagtcgtattaaactgatgcttgccatgtgttacacaattagaactacaaagtaaagaacacaaggatttttatagaggtttgacccccttagttagcgggtcatgacttactccccttttagttgtattgataccgagagataacactattcaaatcactataggtagaatttgatatagcactcttaaggttacaaagtaggaatcaattgtggcaaatctcaagtgtagagagaagctatagtaggcgtgtgagagagagaaaaatgaagtgaattatcctacttagagctttatggctacaaatgagacttagggttttagggttgctttaaggctctttatataggagagcttaaaccctaattagcagacaaaataagagatatttatatattaaattggtaaaatacaaaagactaaaacggcccttaataataggtattttctatctactttcgtgggctattatggcctaattcacagtctaacttgtagtccacgtgtaaggttgtgcacgaaagtcctaccaagtccacttaggatgcaggctggccgaccttgtgttgtctagaagctaaccggccatatggtcggcaaggggtggccgaccagttgttgggatttattttaccaggatctagattactaacatgtatgtttcattaacatccta

SEQ ID NO: 328875 - DNA, 661 bp, Cannabis indica
ggagtgttggaaagtgctggtaggcgtttattccaaggctcaaaccaccacagactcaaaaaccttagggccagttggaggtctcctggttgaactgccaggaccaaaaattttaaatttaataaataataattatagtaataatattgcatctatgaagggtggctcaagtggtcagctcaggtttgctccatgaggtcaggaatttgatttgtctcggggcccttattcctagggtatctacctcctaaagattgtaggttcatttggagagacaagtgtaaaagtaatttaaatgttacattaatactgtaagtagagaagaattgtaacttgattttaatagcaatgaaaatttgagcatttcatgtcacaatcttttttcatagcagaagtgtttgtcagcaatgaaatgattgattgatcagtttgtttccttattgatatttaggtgactaattggtatgttcatgcaggtttttgtagtacttgcctatgaaggttagtttttgtttaacttgtgttttccacttttgcagtatccagattacgtagatgcttatctaaggcttgctgctattgcaaaaactcgaaacaatattcaattgagtattgaactggttgttatttgtgaaccctattacccactctctctctctct

SEQ ID NO: 328876 - DNA, 642 bp, Cannabis indica
tgtaaggctgtgaagaattcagaatcaagagaaggacattcaggctcagatcttggtgataccctgctacagacaggatacaagggttagagatctgagtggaaggagcgatcaatattccgctgcacccactttaaggtttcttaaactttttatgtgtttatttacattgttttagaaattcatatttaggatgttaaataacatacatgctagtaaatctagatcctggtaaaacatattccaacaagaacagtgattaagagagcttggaatggcgagagtttaaagtattattatcagtagtactcgcattgtatttatacatagtcaatttattttgataaatttactaagtatagggggatagcttaccattgtactattgcttattataatgaaattttcgaagttttagaaactcttcgcaagttttacattctaagttattacaccacgctgtaataataaaaatattgcgaatagaaatatcgtcaaaataacagtttagattatgcgagtatccatgtaccgcttaaaaataaatatgcaaaagtaaatatcctcgaaaggatatagtgttagataagtaattaaaatttgtctgcagtacaaaatgtgagtacccgtgtactgctaaaa

SEQ ID NO: 328877 - DNA, 872 bp, Cannabis indica
gcatgaagttattttaattgtagaagttatgattttaaaacttaaatatatacatatatcatatcggggcgggtttctattcccccgctcccgtcccatttccgactcgggtatgaatctttaaacccatacccggcccccgcccccgcccccaaaagtcaacccctgtacccgccccattaagggcgggtacctacgggtacccgaacccgctggtataattgccatccctagtcttaaaatgcaataattcataactgtttcacataataaatataataatataatttctcataaatacataattaacctagttaggattgttaatccgattattaaaccttaaggtattacaatctggtttaatgcctaattgctaaaatcccgcttttagatcgaattttgaaaaaaatgtgaactttggataaactagcaaacaataaattattatttggtaatgaaaatttatcatttgctaagaacttgtttaggggcttgtaattgatgaccaacttttgctatcctcgagcttactctgatcgattattgacataaaaggcatgacatgcccatagagaagaagttgagtctatgaaacactattgttgtaactctttgcattcagtgaatgccattttctaatgctctggattcatgcctgaatgactagcccttgtaagatttatatcttcattaaacttaaaaggaagacttatgaagaattgttgatttttccataaaagatggtcacatttctttaaaaactttctgcgtagttattggcacatgagtcttttataagctctttcttgatttaataaaagtaaaaattacccaaaatatgagaaaattttaagagtttacttttttat

SEQ ID NO: 328878 - DNA, 859 bp, Cannabis indica
ctaaaagtcacatttagccacaaatgttgtgactaaatagtttgtcacaattacaaaaaaatcttacttatagtcacaacaaaacttagtgactaaaagcaaaaaaaattgtgactaaaagcaaaaaaaattgtgactaattataaatcataattcttatgttctgactaaaaagcccgcaactaaaagtattagtcacaaaaattattatttgttgtgactagaagtatttttagtcacaatatttgttgtgaccaaaactaaatgttatgttttagtcacatgtaacattttgtcgtgactaaaaattacatttagtagcagtttttttagtgtaactaaagccataaaggaccttttcccttcaatttttttttttttttttaccgattgtaaattttatcaaaatcgaaattaaatcaaaaggctattttatagtggtgtatgaatatataatgaaacctaattaatgtataaattgtgatttaatacttatgtatatatttaaaaaggtgaaatttcggcataagtctcactaagagataaccaaattgtcaggtaaccacgctaaaaataagaagagcaaaaagctactcacaatggagtgcaaaacaccgataataatgcttaattatacatattaaacaactttaaaacataatcaaacaaatttttagtgccattaacattaatatttattacatttagcatctacttaaagatttttcatctatgtaattttgatggaaaaaagaaaacatttgtaatgtgatgcttaatttttttttcttttaaaatatatcagtgcagatgtttaagtagctactagtacgtaagcacacgtacagtgaatgactta

SEQ ID NO: 328879 - DNA, 774 bp, Cannabis indica
gcgccaacctgtcagaacacacctgaaaaagacaacacgggcatactatataacaatatagttcaataagcacgtaaataaattaattccactgttttacccttcccgagtataaattactaaaattctcctgactcaccaacgaggtcttaacatatcataaatcatataaattcacatataataaattatgtaataatataatttctcaataatacataattctctaattagtttttgctaatccaatctcgtaattctagggtattacaaaggataatccaactgacatgttcactaaaggggttcctattagcaagcttaggcatttcgtaaagctgctaagtgttgacaccagcaaataatacccttaggggctcttggaacagtctatccattattgatttcactaacttcagctaaaggtggatttgtgatgttagttaaagttagttaagtctatctggtattcagttacaaccagtaaatttctcaaagcttcaatctcggcagttaagttagttggggacaatactgtctctccaacactcttggacattgcccttaaataccaatcgcttctacagtcagagataaccttttttaacttcttcttcctcttcttttaaattctctatgtatagaaataaagctatatgtcaatgttggaaatatttaaccagggtctagatttactaccatgtatgttttattaacatcctaatatgaattctaaaacaaatgaaataaacacatataaagtttagaaacctt

SEQ ID NO: 328880 - DNA, 707 bp, Cannabis indica
ctataaataccactaacacttatcattttggggataacgatcaacctctttaaattcatatacctttatatcttatttttatcttaataatggtgtttctttaagtttataggactgactttaaacatgttctttataagttagatttatttttttttcttttttggttgtgttggacttaagctagaaaattaatagacaaaggcttggtaatttattattattattattattattatttgaatttattattgttaaatcacttgcttttatataaatatgttatctttagttgtttttgtattttatatgtgtttatttttattacttatgtaattttcaattatttaaataaggagttctacaattttaatttcttgctttttgttaaattagaacttacactatttgtttagaaaattaatgttctcattatatgactaaaaattgtattctatttcccagtgactaaaattgtattctcattaatttcttcaatcatctatttttgaagaaagttattctgagagtaatcaacaagcaatgttagaaatagatcaagaagaaagaattacttgatcatcaaagtatgagcatgaaaaaaagaaacttctaacgtaaataatgacttatatttttcaataatcatatatttgttaaataaattaacaattaacccaagatctatttgtatataacatagaaca

SEQ ID NO: 328881 - DNA, 776 bp, Cannabis indica
attgacagatggtgatcttgaggcaatatgaagaacaagaatccattaacttaaaatggatatgtaggaatataatgactaatatttgagagagatgaggatttattgaattttttgtatagagaaggagataaaatatatctgctttttggtttatattagtatgtataagaattattttttagcgatacttttttatacgtttctaagccgagagtataattaaaagttatttttattttttgaggaaattacgtagaatatgacattttttccttaaatttcataaatatggaaaaattagagatttacttaacttatggcttttttacaatttaagttagttgtatggaaaaagatttccatatttttaagtttttattaaataaagccacattttcattttattaacctatgtttagagatttctaatatttttttaaagcaaatcattaatatatatacatttatattatttttatattataattattttatttattttaactctacataatcattctttcttagcttaaatttctattttattttttctttaaaggaaatctatttattaatatatgtagaaggtttattttatttttgacttaattattactaaatatttttttttatttatttgaaatataaattaacattttgtatattatattttattaaaggaaatgacaatgatatttatttaaattcttaggttaccaagttactttaggaaagtcaggataaaagacaaaaaagacaaaataaaaaaaaca

SEQ ID NO: 328882 - DNA, 532 bp, Cannabis indica
taattaataattataattaatctaattttaaaatataattgttaaagtttaataaggaaataaagtgtgaagttactattaggttacaaccattcaataataatttataaagggctaaaaataaatgtaaacatcataattatatatatagtaggtaataaagtattgatacctatacaaataatttcatgtaaataaatttaaaatttaatttttcttattgaagagtattaatagagtttagttcatgtctcgaaagttttttttttttctttttgatatgttatttcattgtgctattatgttaatttataatttatttatttatttttctttcatttgtgagatagaaattttagtctaatataaactttagtatttttttttataaaaatgttaaattattgtactcttctattaatattaatgaagactttacacaatatggattttaactttgttttacttaaatatggcattggcagctttaagtttggcaattttttatggctatttttttttttattttttt

SEQ ID NO: 328883 - DNA, 1444 bp, Cannabis indica
caaaaagacgattttagacctacgataaaaatgacaatttagaccacgagaatagtatttatacaatgttttaaaactaaaaaaagtaaaaaaaaaaaactaaacgtgatttcgtataatggcgcatgggacaagcacgtgcatagttttttcaaatagattttggattttttgcataaatgaatctattttacaggaaatcacaccgaaaccgacatacgcgttaataaatttggaattttgcaaaagtgggtctatcattatgatacatagaatcatttacgtaaaatgttctactctataaaaggtttgatgatgaaatttgaacacaatgaatagccggttttccattttctaagagccaaaaggactttaagaagggcctaatggacattactgtagctgtgggcatgtggtcactgtctagtttttggtccctatatttgatccaataacgattccttttcttttatagagatactttgtatgcttacagaatgtgcttgtttgaattcaaacatacagatccataagatgctatttctctaacccaacttttacaatatggcatttttctaatcaaatttcgataatcaacatttatataattttgtttctgtactacggtattttcaacaattctaatacagatatagtccttgttgataattgtggtaagtaacacatgtaattatattattatgcgtcaacaattgacagaaatactagcatgactgaagtatagtaccataatagatgattgtaatttgtaactaactaccaatgacctttcaaaaccaagattccaaattagtaagtgcatgtaatcttgttcctttatgatttgaattataaatatatatctaacttacaattttaatttttctttttgttagaaaaaaaatattataattttaggtttttatgcattttttttagaaatatttgaatattataaattagaggtattcatttacaacaatagattaaattcgtgggagaacatttattgttggttatggttacaagttttgtctttcgggattggaagctgtgaatctagagaacagataccgaaagctttgtgtggatctaaaagtcctatgcggaaggtcttgttgagtccggaaggttcttctagataattagcttgtaccgtgtatggaatgtctctccctgagaacttgttactaatccaaaggtacctattgtcagtcttgaaagtccatctggggaaggaagccatgtacatattcaggaggcttgcgtgtttgcaatgcttctaaattgttcgtactaaaagtgcgcatttcaagatgacgtggattattgttgttggtgatgagttgaatcattaaagcagtataaatatgccacgatgattcaatattagtgttataaatattaataattatgtagatgtccaaatcttttatttattacc

SEQ ID NO: 328884 - DNA, 371 bp, Cannabis indica
aatttttttttttaatttctttagctttgtattaattaattagatttgtactaccttttatttattattattttaaatcaagaaaatgattgctctaaatgaacattaaattgattttttttattaaaaaattaatttatatttttttatctgtaaactttattcaactagatcaattcggtattaataatatcaataacattaaaataaaaattagactccgaaaaatacaatcatcgtataaacgaaacactttagccataaagtaagcaacacaacgattagtagattgttcgataaaatatataaaaaaaatgtaaatatataatttatatcaaaaagtgtttttaggtttttttttatttattttt

SEQ ID NO: 328885 - DNA, 637 bp, Cannabis indica
atttagagaccttgtcttcatagaatgagtccttatagatgcagtacccgtgaattgagtgtcagtatcaccactaggaggcacattatgtaaatgttgggtattagtcactgttccctgcaatggtacaataccatttgtagccgttgggacattggagtgtatagatgggttgaagttgctttcggtagggacagatggaaaggtggcagtatgtaaaagattatttaatgtataatgggatgtattaggtaaagggatagcattggtagtagtgtctatgctaggaataggaatagtgttggtaatagtggtcatgttgtcattttgtggggcagtaggaggtatggaccgtggggtagtgtttggttgagggcctgcagtaggttgtccttgttgtgttgtgttgtcaattccctcatgagccgtggtatcatgtgtggtgggagagtgaacaacaccaatattagtatatgaattattgttattagtttgaaaactaaaattaggaggtggagtcaaggacgatacctgattggaggaaacctttggtgagtttgacaaggcagggaaatgtcctcattgaaagtgacattgcgtgatatgtagaccttgccatttgggtgttcgtacacaa

SEQ ID NO: 328886 - DNA, 1206 bp, Cannabis indica
aaactacccaaatctttaagctttgggggtagtttcttttacaagatagcacaacactcctcagtaagtgatacagtctcatagtcttcttccaatctctttttttataagatttcctttataaactttacataacttggcatctgttcaagtgcttcggcaaaaggtatgttaatgtgaagcttccagaaaatattaagaaacttcaaaaactgcttgtcaagtttctcttttgaagtcgctaaggatatgaaatcttgatgtggtgctcataactcgatggctactttttcttaggttctcagtaaccttgtcttcctttaaatcatctttctcaatctcgatctttggtgtaggaataggcttcttaactggctcttctaactctttaccaatccttagagtgattgcactgcagttttccttaggatttacctcattagtacttggaaaatttctttgaggtttgttatgcagcatattagccaattgtcccacttgtattttaagatttctgatggatgctatagtctcagtcatgaactgagtttgtatattagctagagtaagcaaagcagcttgtagatcaattgctggagtaagtggagcttgagtattttgttgttgagaagtagaagcttggttctaaaattgaggttgttatccttgattatttgtccatccattattaaatgagttgaagaagggtttgttgaattgcctctgaaaattggctatggcttgcacttgagtaggagtcatcacaacatctttagttgattcacacttgtcaaaagtgtgtggtcctccacaaacctcacacccaattgagacttgaacaattttggcagcttcaattgtcttttgtaacagtttagtgagtgtagctacctgagttgtcaaagcaataatagcatccaactcatgaataccagctttcttcttcccaattgctctttcattaaaatattgatgattgttcatagacatgtcttcaagtaattcataaggtccagttgcacttttgctcatgaatgtgcctccacatgcagcgtaaaatgatggtcctagtagatttttgaaaccaccatccactatgcaatacccatggtgagggcatcttctcaaatgattttttaaacccgctcacagcttcatcagagattcaccatcattctagcaaaagttaatgatttctcccctcag

SEQ ID NO: 328887 - DNA, 945 bp, Cannabis indica
aaaatagtatagaaacccctattgtaactagcactgcaaccactttagaaaccaaaaccgtaaattcgaagaaaaaaagttttaaaaaataatatagggagtaaattctcctttttgttattattaatttcaaataccatattttattttttattgtattatttttcagtcaaaccctaattcttctaacttgtttctctctccgtcgatgcatcctttcttctctctccccgtcgactgatccaggttcggtatttaatgatgtgaccaaacaataatagagcaccctactccttctctttcggcggcatcgattcaacttcccctctcctttgtttggccatcgatgccttactccacactgccatgtccaatacatctggcttcagagcttcctagacctccgtcaagatcaacgccatcacaattgcactacgacactgaggcagaattttggtcaggagttagagaaatggtgcacaacgaagatccatgtgtttattcatgattttaagagacatataaagaggtttttcaatgaagagcttctctccaatgagaacttagttgagacaatcaattttttgggccatttcgtttttgggatgcaacctcaaaattagagttttaaaattttacattacattacattgattttaagaaaaactagttttacttctttgaaagacaagtggcttgattttgagattgactttgagttattcatttatctttctgaaactatttcatgcacttgttatcacccaagctcatgaagttttccaaccaaaacattagtatgtagttctttttctttatgtatctcccactaaggttcgtctggttagcgtattgtattgtattcaattgtaattaatatttttataagtgttattaacttttatgagtacctaaatatataatattttagtataaattaaagtt

SEQ ID NO: 328888 - DNA, 927 bp, Cannabis indica
taacatcacaaaaaactttctctttcttcaaaccctctctctttcggcctctcctagaactagcaggaatcaagcttttaattcataatttctgggtgttttagtaagagttctatagggattttatgattttaaccctaggtaagatcatttactttcatctctttgattttctcataaattaagctaggtttgttagttgtttttggaaattcagctattgttcgttgtattgatgttagagagtgatttttgatgttagtttaaagatttttgagctattttaagcatgaattgttgctagtggttgagttttgacaaagttagagctttagagctcaaacttggctctttaatagtgacttctattttagagggttatacctgtgtttattacttaaaatatgtcattgtggcttaattaggtatcctagaaggtttgatttgatttaggatagaatagagttgatggtggggtttttagggtttactgtagaactggttaatcgtttctccaagcagaaccctgagaatcagttttccattttgggaattcggtttaccagttctggcggttttagaatcctagtttttcatattttagcgatacttagggtattgtcatgctatccatcgatatgaaaacttttggttttgatttttagtccccaaaaagtgatttagcgtgccacttatcaactttatgaatgttgtgacttaggggcctgtaaatcgtcgagcagtagttccactcaggttgaccaacacacctaaatttgggatcaaggaaagattagtataatgatgtgcatatgtgattacatgcttagcgtgcatgtttatgaatgcctgtaatatattgaaatagtaatatcaatatacatagagttatattggataccgatgaatgtatgtttggtcataagt

SEQ ID NO: 328889 - DNA, 635 bp, Cannabis indica
ataaactaagttgaaatatttgcaacaatagattaagcaggtcaagctctgactgaaccactataattctcttgtgtttttattgttttctacttttattttgtttgtttaatgactaatagtttaagtactcgcgtagaggagcgagtactcacatgtgtttaattaagtattctttatatgtattaaatactcgtataaatttaatgttgtctaaattcctctgataatacatcatataaatatacaattggtcatgatatagatagatatgtacttcagatagaagttacttagttggaattatcaactatgtataatattttatactataattttcatcatcaatgattactcagtcttggtcaaaaaaaataaaaaataaaagttagagtatgttttttttattattagtatatcaatagtttaaaattaatgatataccaagtcactctttgtattttagcacacattttgtctaaatgccctgacttgctaatttacagtgcatattttatttatatattcaagggttcgtttggtacgtcgtattacaacgtattgtattgtattgtgttgtattatattcaattttattttatgtaatatttttatgtaaaactatacgtggtatt

SEQ ID NO: 328890 - DNA, 766 bp, Cannabis indica
aataagattaaagattcaacgtgctaaggtatataaaatatcgtggacatacatattacaaccaattgccttttaatatttaaggtgtctactcataagtctaattttaaggtgactattatagaattacccataaacttttattcgtataataattatagttacttttcaaattcaaattttaaaaaatatttatcttttagattaattaattcaaaaacaaatttagtgggcttatcattatgatagctgctatatcactgttattaaacagtgattgtcgctatcttgtaataatttttacaagataatgtttatcttgacaacatctttgtctcgcaaatttattcaaataataaattcaaaataaattatttattaaaaaataaataattactatttttctcaacatcattattccgcgtcatcccactactacaaaaacactatttctgtcggttcccaaattagtttcttttttggaccgtcgttactgtttaaaacattcagttatagtagagtattcccaacgatttttaatagtcgtttacaattttcgacgatttaaaactatcacgataccaaaattgaaaaatgggataatccacgacggtttaaaacagatgggaatagtatttttgatggtattaaatagtagagaatagtatacctgacggttcaaagccgtcaaggatttccatttaaatatatgaaacccaattatttcaaatttcatttttcatagctcaaatctctctctctctct

SEQ ID NO: 328891 - DNA, 1311 bp, Cannabis indica
attaccttgtttgttttgaaggtttagccttagaatattattcccttagtaatataactacccttgaggagggtaatgttgataccttaaaaaaagtagaatttaattattaccttcaattatattaatttgaataacatttttgaattaataaataaatttaaataccaataatattatcatttattataaataaaactttacgatatatattttatttgtgagatcaattttttttaactgagttatttttatattattagcaataacatatatatatttattatacataaataacatagcgaacaaaaataaataacatagtgataaaatatatagaaatgttcattttttttatcaagaaagaagaacttcattaatcaagaacaaaaccaaaacaaacaaacatacaagataagaacaagcagtccttatccgaaacaactcaacaagagtaattacatttgtagcagctgtaaaactctactctcaaatctatccaatcttctatactttatattttggactctatacttcactatgtttttaatatcagcaacaatatgagtatcaatatgcgagtatccctcaaaaacacatctattacgattcatctagaggtagtaacatgttgtagcagtagtagcaatattgattttttttttcacccggttatccatattcattgatagccagcctatccactctttaaaatctaaaggccacattcggttaccaagccacttaaacactaactcaataactctgcgagataagcaccaggagaaaaacaagtgctcatgtgattcattgaactcatcacacacagggcacttgttcgactccatgggaatgtgaaaccttgccataatgtcttttgttaaaagttgagagtttaccacttgccatagcacaaatctatactttggtaaagtaagagaactccaaatagttttatggtaaggaatctaagtttgatcaagcaagttgttatataaaagaccggttttgaatttacctaaaatctcagccgcctttatgtcttgctccgtgagcctcttcctcaagtgacaaagcttacactaataccaacttgtgtcaggctttaaatcacacggccagtaagaagtttggtttatgtaaatgatattgatccatttaacccaaatcaagtctttcttacttaaaagagcccaacagtaaaatacaataaaatatatttctttaatgaataattattctatttttatatataataaacattaaatagacataataaaaaaggaggctattatagtagggattgggtat

SEQ ID NO: 328892 - DNA, 829 bp, Cannabis indica
tagtttataccagagatttttcacaacccgatagaggaagaaggcatggttgaacttttcattggtgtgagagcatcttgagcatttgggatcatctactatatgtcggtgatgaaggttggcagcaaggggaagagcattgtggagagcaggccaagcaaaaatcttgatcttgcggggtagttttagttttcgaaaccgattccaccagccagcttgagattgagagtgaaagggagatctagcttctcttagtgaggatgccaaatgatacccactctttactgagtatatacctgaagctgagtgatgccaaatgagtttgtcttcaggtgcatgttggcataaaggtagttgcataatacgatctatgtcaatgctaagaaagtgtctcttgagggcagtgacattccaagtacgattcgaagtgaaaaaatcagatacatgcaaattgttatcaggattcatgatatgaatcggtttaaaattggtatgccccgggagccaggagtcattgatacaaacagaggagcatgtgccaattttccaaataagatcgtcaagaagaagctctttaccccaatggatacttcgccgtgtataggaggggttgttacccaacttggcctgtaagaatcctgttcgtctaaaataacggtgataaagtatgcgacaaagaagggaatcaggtttatcaaacaagcgctaagcttgtttagcaaggagagcttgattgaagtcaataaatgatatgaagccaagggctcccatttgtttgctacggcataggtagttccatcttttccaatgaatagaatgaccattagct

SEQ ID NO: 328893 - DNA, 791 bp, Cannabis indica
atatcaaaatttattgataatttgaaaaaaaaaaagtcttattcaattacatgaattttgaataagaaagactgaatattcactatgttcacaattgtatgaacgtttctctttaatttagtccccacagccattgccaatagtttgaggttttgtaactgaaattcactaattttaatattttataaaaaaaaaaagaaaaaaactaaaaaaaattataaatatcatatttaaataataatttattttaaatactacataattaattattagttcaattttataaatggacttttttttaataatgacttattacaacttgttatagcagttatagaaaaatataagttacatttttaatttaattattaaaatttcttccatataatgtagtatgtaacaaaatttttagtttaatgatattttttatttttttgttaactttaacagaatatttttaattaattttaaatattattatatataaaaataaaattatacagatattttatataagaatattttaatctaaatattttaaagaaaatatttaatctaaattcaaatacataaaatatcacatatatatttcaaaccacacaatatgaggatatattagtggactattcaataatactttaaatttattgcagttaaatcttatagaataaattcaataatgattcagtattagtttctatatagaatgaatcgataacgaacttcgtatttttaagttgaagtttattttattaaactgattatatattaggtaagaatttaagtttaca

SEQ ID NO: 328894 - DNA, 844 bp, Cannabis indica
agagagagagagagagagtgcaattccgtgtccgtacgcttactactactgataaaacaacacggttcatgcaagttgcagtagatttttccatatatattttttattttttaattaaaaaagaatataggtaagggtggtgatttcgtaatttcacatagaaagtggggcgtttctggctatttgcaaaaaaaaaaaaaaaaaattactgtcttcgcctccgccattattgcggcggtaatggcgtgcggtaatttttatttttgatttaattctttttcatttttaattgcactctggggtcttttcctttattaattatttacattttacacgctaatttgtgtcgggaaaaagcttaaggctatagattgtgtttaagggagacgatatagaaaaagaagagtatatatacagcatgaaaaaaaaaataaaaaattagactttctgttcgtcttttcgttatttaagtaatattgttttttttatagtatatacaaagtgcaaatattattgcttttctttgcaatgctttcttacattagattatcattaatatatttacagttcaatttgtgaggaaatgcaggtgaagcaagtataagtgtctctcacttatatatataagtgattctgcattagctagtatatgatatcatatattacagtgtctgcctctcattattattttactagttcactctattgcatcttttgttttatataaaacttgtcaatacattaggtcaaaaaaaaacagtacttgtcaatacataatctatgactatgattgtttttgttattttagtttttggtttttgtctatgtatatatgcatgtacag

SEQ ID NO: 328895 - DNA, 1000 bp, Cannabis indica
ataactaatcagattgtaaagggttttatttagggcacaaaacccaacatcttatcccaacgaataaatgccctctgaatgtgagtgagtatcaccctatttcctgttgcaatgctatttataaagtggcggaattgatttgctctaggctttgtgagataatccccttccttatctcagagaatcaaagtggttttgtgaaagggagatttattgctcataacattatggtctgtcaagatatggtgagaagttatggtagaaagaatgcaaggccttcttgcatgatcaagattgaccttatgatactccttattgggaattccttttatgaaatagtttgagacagaataacagtagcactcttagcatctttatctcactttgctcgagtggcatggtccaagactcgtcagagaatcctacatcagcatacactctctggcatgacatgatcaacctgaccttctgaatattttcaatactaaagagggtttgatcatctctctcccatgctgggatgtcaaacaacatggctttagctttcctcttcatgagatcaataagaggagcagtcttttgaaaaggccagctttttggaaggtaatgtgtctcagtggaagaacatgaatatagaaatactctaaaaagtaaaggccacagttactcttggtcatgtgttctatgaaggggccaaattggtagaagtggtaaaagcattgatctctaggagttggacttcttttcaagttgcagagaaagtttatctcatgaggggttggaataggcctgttcttaaggaggtaaaatatgaaaaaggtggttagaagcctatagccattgagatttatagggtaagggcatacactgaagaagtcagctatggatataaactatagatgcaagggcaagtaagcacccctattcatgtggcatcttgactaggcactacaacaagtattctgggaacccttgggagcaccatgtcgaggcttctgaa

SEQ ID NO: 328896 - DNA, 1358 bp, Cannabis indica
taaattattattcttaaactaaccaactaaattttgaaaatttagtcattagaagttgtatttttcccatggggatcaacgtatatccattgaagccttccagttgaatcaaacatggtagaaggttggcttctactagaccaatggcatggaaggctcctttgaaaatgatgttcacagagcttccattatctatgaagattatagaaactcttttatttgctatttgagcttctattaccaaagagtctttatgaggaaagtgcacacacctggcgtcatcttctgtgaaattcatgggcaaattcatcatccttggatgctaggaaggtgatttcaccaagtggcaacttttgccttgattcaactcattcaaatactgcttttgtgaattctgagtgcttctggcaatatgaggtccacctaaaataaatgctacatgaccatctaaggctggtaatacgactcctaaagggtaaaaatttctaggattgggggctacaactactgccgctgtaagagtgttctgtgccccctgaagggcttgtgcctttagagcttgtattctaggtacttgtggatggcctaatccctgaggaggatttatagctccttgctgtcttggaacgaagagctgtccatgtgcaactgcctatcccagataaatgattgggattcttacccaattagttaagtgtctgttccatactaacccttctatttcatcttttaagtagtcaaattcattggtggggtgaccaatatcaccatgatattcaaactttttgttcggatctcttctgtattttcctcccttgaaaattggtagaggcttcttgtagtgtaccatgttacaggttcacttgtatacattctcccgaatatctatgaaactactcaatgtatcttgattcttgggttttaccattcttctcgaacttactctaatttggaacctttgcactccttttactccttgagtaggttatattggactctggaacttctgcttttcagtttgttaacacaggagcagaactgtatcaagcctgtgaagcttcgaatccaaaaaaactagcctatacagctggctatatggaagtacttggtccatatactgtaggagtagtaaaagcagttggtagagggtaatagatgtagttttcatatgcgatggttgggcacttattatttcagtggaaggcactggagtactctatatgcttgggcataagcatcctctaggtttataaatccttgggatcttattaagaattcactcaatgtatctgcccttttgtgctggagatctctcccaagtaaagatctagttgtaagtcttgatgttagagccacca

SEQ ID NO: 328897 - DNA, 1064 bp, Cannabis indica
taatgacgggtatatatattatatatttcgttacatttaaaaaaaaaaattaaaaaaatccatacaaaactttcagttagacaattttcatttcacaaaaatataaaataaaactgtgaaaattgtaatccacacaaataaatcagccatgatatattaatgattgaaattaattaacttaaattacacatacattgctagtcatacaaacaattaataattaaaacagcattcatttcgacaaaaaataaaaaataaaactagtgaaaattataatctacaaataaatcggccatgatatattaatgatttaaattaattaacttaaattattacacatacattgctatatagtcatacaaagagaaatggggcttaacactttctataagtgacgcctcattattagtgaagatattttcttaagttatattaaacttgatattttttttaccaaattagccaatacgtacaattctaactcaataggaacatcactctttttgaaaactccatgtgaaaaaaaaaagatgacgctctaatgattaaaacaccaataaaagtatcactctgaaagaatgctaaacaccaacaatattttttaacatttcttttattaaaaatatctaatatatatctatctatgattaaaacactaataaaagtgtagtgcaacttttgtgtgttgggtattattcaatcttgtttgcagcaataaatgagccattattacatgtattccataagatggatttaaaaatgggctttttttgtctgatattgcgaagagggcaactaaaatgatttaagtacttggacgtaaacaatagtgagcccatttgatatatggatggcgaagtttatctttctttcttttttgtgaatggactcgatcgaagctgtttgggctgattgattgggagtgaaaggccgtgaatctcagagcaagttttagggtttgattggtatgtgattcaaaaattgtgttttttaaaaatgtattttggaaacaaaaatttaaattttgtaagtgaaaatttatttttaaatatgtgattggttgt

SEQ ID NO: 328898 - DNA, 1148 bp, Cannabis indica
tccatctgacaatcgcagttcttcaacgacgaggtgaacttcaacagtctacatcatttgaatgtcagcttctatttgagagaactgactcaacagagttgtggatgtcattgaaagatgtttggcgttgattagtgaaagaaccaggagtgtgccttcctatagcgagatagacgccttactattggttgcttgggttcatccaactgttatactcagtttgtatattgtatattatacactaagtattttcacagtcattatatctcgcttacatatactcatacgtaacgaggttgacgtctcgccttgcgcatctaatgtcgtatggtttctcgtcaatatacgaggcaacagtttgtatatcgttatctcgcataagaccttatagtcagcaatttataaatatactctgttactttcgcattcaatgagttattccattaaatatgattaccgttacacgcattgatccatatttttcccaatttgacacgtgtcttccattgaaatggtagccaagttttgcgtataataatttccataggggtagaagctggttttgtaccaagataccgtgtgtcggtgaggaattgtaatgttaaaggtctttgggagaggaaaattcccgccttagattgaccaatctcaaggccaaggaaaaaacgaaattttcccaagtctttcagtttaaattttttgtcaaaggagttggtgaaggttgttatgtcggatgcattgttgcttgcaacaatgatatcatccacataaatgagaatggctaagaaacatgttgagttatgtttgatgaacaacgaattatcagatttggtttgtttgaagccatattgaatgagagtggtgctgagttttgagtaccactgtcgggaggcttgtttaaggccatatatgctcttgtttaatttgcaaaccgagccaggtggggccttgtgactagggggtatggtcgtataagttgggattttatgccctaaataaaacccattttaatctaatctgatttattatcaataaaagattagaagtcatttatgtttacatgtagttttcatgtttatagtttaatagatacaaaatttgttaagtccaaaacatatagttattcaattacagtgatgtcaacacag

SEQ ID NO: 328899 - DNA, 1127 bp, Cannabis indica
acaaacaaaaatacaacttcaaaactaaggaagaattagatatccaactacttagaacaaaggattaaatagtcgtatcaccaaccaagcaaactaaaaagcatataaaccctcaaacaatagtaaaattacatatacacactaaaccttagaaacattacacacaacattactaacaaaaaaaaggcataattgagagatataggtgcaccataaagattagggcttttctcaacaaaaaaaaaaaaaaagaagatagagattaaataggcttaaaaataaatatcttaaattggaatcatatatttaaacaaaacatgtctcaacaattaacaatcatcatgaatcctaaaaaattttcatcaacaattatatatatgtaagtgatacaaaaataaaccagaaccaaaaagaaggagaataggaattgatcgatattcagtgtctatcaaaaacaaaagataaatggattcaaaataaaataccattcatgtattcttgatgataatcagtctctcgttcccattctttccaacctcgaatctgctgctgcgaccgctctcctattgtgtactgcctgagctgccagggacgtcggagaattcgaatagagcgagaacgagagggacttcggagaagtcgaacacagcgagaatgagaacgagagggagtgacagtgatttttaggtttagggtttcatgaatgagaaagagttaacgctagtgtcttatctgtcctaattttggcagctgttttattttatttattatttattattattattattattattattatcatttaatttgaacggatataataagactagtagtagaggcatctgcacgtgcttataataattagtgaaaaaaaggcacaaaatataaaatgcaatattatagattaaatagtgttttttctaatacaatataaagttaatatttcaaagcaaattattgacacaaaatttaaaatatctaaaaattaattaaaattataagagaagcgtccttaactttgagtcaatgagtacatattacaccccactgcttgcaaaatgacttgatcctaaaactaaaaataatattaaagtaaatgagattttacaaattgacttaccaagcta

SEQ ID NO: 328900 - DNA, 1249 bp, Cannabis indica
tttttcttatttattttgacttggtgattgtttttttgtttaatgataattatctcataacttaggttaataatacttaaaagtgagcttatttcctatgccaaagtctttgtttgtttgctttttttttaatgaaagaatatttattggctatatagacaaaaatgttacgagttagataaaaataaagccgcacagatctcacaaataagagaaactcttttcaattaaccaaaaaaatgacaaacttacaatatagaattgatcaaacataaaccaaaaaggaacaaattaatatttgcgtgataactattcactaactaaagtacataaaattataagagaacacactacaaaatagcatgaaattgccatccatgaaagaaaaaaaaagatattcaaaatcaataataattcaataaaatttcttacaatatcaaagaagaaactttgaaacaatcatagttttgattaacaaaaacaaaaaataacatattgcacttaaaggacaaattatatttcccatgaaaatataacaataataatgttgggattaaactcatttaatctttgtcaaatcagtagttttatcgtggcacttaaggatgttcatagaaaccatcaaaccgcgatttaaattcggaccgttgcaatttgaaccgctgtacaccataactgtggagactgttttgggtggtctaattaatctagatcgttcaccacttaatggttcaactgtggttcgtaatatataattaatggttaaatcagattggatcgtttataataaataattgatttatatatattatatatatagggatatgattttgtcctgttattgtactttcacggattgtaatcttgatgtacagcagccgttagatgagggggttatttgatttgacagctaagattgatctaggggtaattagggttaaaaagtataaacgtaccctgacaatcatttaatgtaccctgagatccatctaatgtaccacagaatatattccgtgaaagtacatcacaggacaaaatcatatctctatatatatatatgactacatgtatgaaataaaagaaagtttgcaattaattacccaatttcgctattaattatccaattggatcaaatggatttagaagattaaagattgaacttttttatgtgtcaagtttagggctatacaaaaaaattcgtaaaccgctcaaattaaaccgaaaaaactgataaaaattacaaaccgaa

SEQ ID NO: 328901 - DNA, 597 bp, Cannabis indica
tttaaagaataattatacatcatcagagcattcactgtaacgactcttggtctaagaagaataaaaggaagtaattctattttattattgaaatgattgagaattataaaatttatatacaatgatacatcaagctaatcaagaatcaaaataaaataagtaacagactcctaactaaccagaccatttaactaatttgacagcttagctatcttagcttcactaacagccctcctcaaacttagggtggttgagcaaaccacaccaagtttctctctagaaaatggaaacttggaactagagattgatttggtaaaagtatttgctaactaatgttctgcaggaatatgatgcaccaagatttcctttttgagtactttaccttggacaaaataaaaatcaatctctatacactttcttcaagcatgaaatattagattggaagcaagcatgataattttgatgttgtcccaccaaatgaaaggagtggtgactagaaatttaagctcaaacagttaaaagtgaatccaactgattttagagacaacaaacactagtataaaatttgacacactaacttgtgcgacaagttatttc

SEQ ID NO: 328902 - DNA, 694 bp, Cannabis indica
aagtaactccctacaaaaaaaaatagggaagacagttcgcctctacgtagtaatctgctttttaataaagtaatgttgattcttaaatcgggaataaatacttaaactagacaccaagaacaagaagtacaaaagagtgtgacatctgaagcagcattcaaacaccgtgggcactaggaatttggtcttaaattattcaatgcccagaggatggtgcgagtgttcaaaaattaggtggaagaattcgttgtcgaattgttgatgatgttttctcaatactccaacatgtggaaggatgttaatgatacctaaatatgaccccaaactaagtttagaagactcaagtgagctggaggattagaagatcaaaactattggttcaaacaactggctttcgaaaaatgcttattttttttatacagaccttgtggttaatcctacaagcatgatagtactcaagagcggttagcacataaagcctaagagagactgaaagattcctaggcctaatgtgtagtagcctacgtcttgacaaacctcaaggagagtatgaaacaaaggatatgaccataatttgtaattagaaaagcaactatgttagtgttgctgctcagaggcaaggagaaaatgtactgtaatggaaacttaagatcaagagaatgacgaaagcacaacctcgttgggttttatgccc

SEQ ID NO: 328903 - DNA, 971 bp, Cannabis indica
tataaccttattattattatttctaatatgtttttactaacatttgtagtttaatttaaactccattatactggacataaaagtttaatttaaatttattattcaaatctctctaaattaaatattatttatttttgattcatttatttccttccaaactcataatataatacttaatataaaacataacatatatactagttaactagaaaagcacataaaaacaaaactatatgtgagttcttagattttattttagtttaattaggtgtaataaggtttatcaaaaattaataaataataaataaaatgaagttaaaatatttttttattctatgtcaataaatataatatatttttaattaaaatataactacatacttctaatctaatccaaataaaattagatgtctaattttttgtaattggattgaatttaactggtttattataattgtatcggttcagtataattagataaatcagatcacaaccaattactttattacataatctacgtttactagtgaattaatataaaaaaaatggcaccccgacaaaagcccagggccagatggtatgaccccggctttctaccaaaaatgttggcacattgtcaaaacagatgttatcggtttagtgcaacatttctttgcttctgggtctttcgtaaatggttgtggtgatgcaaacgtggtcctactcccgaagaaaaagtctcctcaagctatgcaagacctgcgacccattgctctgtgcaatgtcttatacaaagtggttactaaggtcatgacaaacagaatgaagcctttcatagatacaataatttcggattctcagagtgcctttattctgggtcgtttgatctctgacaatgtgatggtttcctttgagattcttcattatctgagaaggaaaaggcaaggtaaattgggtttcatggcgataaagctggatatgagtaaagccta

SEQ ID NO: 328904 - DNA, 1547 bp, Cannabis indica
ataatatttaaagaataaataaggcttctctatgagctaaattttgagctaatttagctcacttgatggagtctattttttaacaattatttctttatattttttacatttttgagctattttagctcatacaatgtgagtgcatgtagaaataattttattggggtttgtgttggattaaaattagagtggactcatatgtatttgtatgtattgctatataaagtttgacccaaataaagagatcattttagtaattgtggatcattgggcattatagtatcataggctaggttgatgctgaaaagtggctaacactaactcgtttgattggtgagatgaataataagtttaagtaaatagtttagagagacacacatgtttgtttttatagtccatatcagagttagaaaagcggaagcggatttaataaaaaataattttgtccaatatgaaccataagctcaaggatctcaacataatgtatatagattaaatctagactaataaatagagagacaatacttcttgtagtctatcaggggatccttgctatctttttgtattattatcgaacatctaattcaagaactttgctgaagacttcacactacaatcttccaagcaaacctcaacactcagggtgagtataattatgcaatcacggtacattctgaactcatgagatactatgatgaaatagggttgatcacaaaactcgcaacacactataatgtgtgccgtgtttgatgaggagagaaagagagaggcgtgtgtgtgaggagaaagagagagtgagagtgaaaaatcaatcttatttcctttaaagcctaacacttttttctcttcttgttaactatcttgtttgttattctgatatacatcctatatataatgttattgtttaccgagttttcggtaaccagatattttttagagcttaaaaaagtaatgaaagcgtaaatactaaaataataaacaagagattattacgtagtttaggcgttaactatccttagtccacgagtctattttattgggcactttggccgatgattgtttatacaaatacaaaaacgatagacttttactcctttccacagtgtttctcttaagaagaggaagcttagtagaaatattctggagttaatagttaggtaacagtaatgtgttttcttgatgaagagtaagtcttcaatctgaaggtgaaggtccgaaagaaagatcggaatccaaaaaaggtccccttctttgcgctccctctagggtatttataggccaactccttgcatgggctgtcttggatggatcttcgtagggatgaattcccatcgctggattggtaggttgcatatttttcatgtggcttttatgggtgtcagatcataccggctgtacaggctgggcttcagatgcgtgtcacctcagggccattctcatttgaatttcccttatccctagtcgttggattattttctcagtacacaaggacacacatgcggataaccatttaccccccaagcttttgggacataccatggtctggg

SEQ ID NO: 328905 - DNA, 550 bp, Cannabis indica
atatatatatatatagtgtggtgttaatatatatgtataattaaagaaaaggtaattattaacatggttgtaatataaatattaaaagtacaacttggctttcatcaaatgaaatattagtaataattagtcactttaaaatgtatctttaatttatatgagtggcgtatctaataataactttgttgacctaatgatatacaaaaacaaaataaagagagagccattccctttttcttaaattcataacataattatatcttcttctttttctaaaaaaaaagtagaatttatacttaattccaaaatagatataacaaatatgtgtacgtactatttatcaaaaaaaaaaatatatgtgtacgtactacaaattacatccaaacatcataaacattagtaagtaccttgttaaaaccaaatcacatttaataaaattattagaaaaaattaatataaagtcatatttgcgttgaatgtaaattataatagaaacgataacacttaaaaatgagaatatataggaatggaatagaataaaatttaaaat

SEQ ID NO: 328906 - DNA, 953 bp, Cannabis indica
aaaatctcaaatctctttacaaatatgaaaaacttaaatagatctatctactattatttttgtcgttgcttagttgtttcttagttactgaattcttaaacaaaaatcactagaacttatataaaactaatatttacgtggctcgccacgtaactctcatctagttcttaaaaaatatacatatccaataaaaataaaatatattttaaatattataaaaaattaaaataaaaaattatataaatatattttaaaaagataaaaattatacatgattcaaaaatttataaaaattatattaaaattaacacaaattaatgtgaattttttttaaaaaaaatatataaaaagtaatttttaaaatttatttaaagcttaccatttttaaatattagggtggagttatcatttatacatttcattggagtaaaaatatgtaaaaacacaaatttgatatatatttctatagcaagtatttgcaagtaatcatactaatttgaaaggaaggttacttattaaaagtaacttaatacataaatatattttatatttatatataattttatacacatatcattattgatctcattttaatcttagaattgttttatcataaaccgtttcaaatttcaatttgttaagaaaattgattgttgtgttatacaataaaaggtgcgaaccattaattaataattatcttggacatttttagtctaatcacattttctttatatttttatctttaataaataagtattgttgtattatatgatagaagtaagaaacacgtccaaacatggtaattacataaataaaaaactatatttggtgtgattatataaactttgtgtgaattcgaatatttgtaaaatttatattacgacgagggacggagccatatattatacattggggcgatcttcactttctcaacttttttttatattgcttct

SEQ ID NO: 328907 - DNA, 866 bp, Cannabis indica
ctccttccccagcagcaaccttctgatcagggttccttcgcctccaccgtcccttggagctacttccggttttttgcaaagtcttccttgctaccagtagtgattttccctttgagtgcccttgctagtaaagcaattaccatgagctccatccacttttatccatggcccatacattatcacggccgtccccactgcaggtgtcacccacgccgtcggggaaagacattcccggttcaggtgggctaattttccacagttaaagcatagataaggcagcttttcgtacttgaattgcacccatgactatggatttgcaccagccttgagaaaaaaacccacagggaatggatgtatgatccatacgtcaatcctgcagcggaggaaacccctttgcacaaaatcttccttccgttttccatccgttttgatgaagtgacctattttcttagccacaataggagcatttatctccgataaacatctcgttggcaagccatgaatttccacccaaaaccgtgccacttcgaaatcggacagtcgcgcttcaccttcaataggccaaggctttaggtttagcagtactccattaacgagccagggacgcctattcatgatcagttcacagccctcctctgattcaaagaaaaaaaccaggacaccttcctcacatttcttcactcgccagccaagttgatgttggaattatatttatccaggatcttagatctactcacaagtatgttgatttaaacaaacctaaataattgaaacttctaaaaaacgatgaaactaaaacacataaaaaagttaaagaaataaacttacagtgattgcagcggaattaaatgtttccttccactcag

SEQ ID NO: 328908 - DNA, 629 bp, Cannabis indica
aagagaaataaaggactataaaacccaaactaacttctatcattaggcctcagctctatgttccgaatccaagctaatagtgttcccttcacactcaaccgacgatccacgcagcttaaagttactcatcttctttacttcctcgcttgaatatatgaagatctttttcaccatcttacagaagtctctgcaattggaaaatgatgatggaaaagttagattgcaatgccattagttttaaaatattggaatacagacagattagttcaagttactcacgtccataaatcgtcgcccacaagcatcatgtcattctcgtcatcagtaaacacaactgcccatttgcttggagggcgcagctctccattaatttcaaacattttctccagttcatcgataagatcatcgtagccattcaacgtggttaagtcaatggcacgaccaacagcaacaccttgcatttgcaccttctaaacagacaatgaaatgtgttgttgatacaattagacaagacctgcttggaaaaagctgtatgtgacaaatcaaagaagtttttaccttagtacgagatctcgaggaaagaaaactatgttttgcattgtgtgtcctttttggggggactcggacta

SEQ ID NO: 328909 - DNA, 1033 bp, Cannabis indica
aggggcaaaattggtacaatgtttaaaaaaagaggtaaaaatgatagactttaaaaaagagggtaaaaataaaagaggataatataaaaagggtatagagtgtaatttcctctagaaaatttggtcatttgtactttttttggtcttccaataggagattggaaattctcaatcctcctaccgaaattctttgggcaaattgttatttgtaatctctaccctttttacacgatacactcacataatatttttacattcttaccaactttttcttctatttaaatgtttacggtcttgtgttgtttcaatgttgttttcatgtcgttgcaatgtgtaaaaaacaattctttttagaacagtaagaaagaaaaaagtccttaaaaatgtaaaaaaaattagaattcagtaaaaatgtaaatttttattgtttttgggtattttgaaataatccctttcttttttcttattcttccttttcttcttaaaattgggcctataattgatgttaaaaaaattttaaaaattgggcctataatctggataatcctttatcatgtcttggacaagtaaatttcaaattgcaaaaatatgaaatacacagctgttaagaaaataatatttaacaacaaaccaattgctaattgatgaaaatcataagagtacaaatgtcataatacacagtaatttcttcaacaaagtagccccaacttctatctgaactttatttcttactaaaatatgggtattcgtattatcattgtgcaacataagtcatatatacatcttaagagtcagatatcaagatgacaacatccaatattgctaataatatagccatattgggacaaaaaattcatttttcgtcagttttaaagacaataaatcttttttatttttctagctgaggcccaaaaatgacgttcataaaatatgaggcccaaaagtgtaacccaagcccactgcttcaacagtttctccattggaataattatataaggtactattttttgtaaaatatttacattttcacgtt

SEQ ID NO: 328910 - DNA, 1002 bp, Cannabis indica
aaagtctacctattagtaacctgctattacaggttaaataaaaatataaccatatggttacaataaaaatgtaaccattgaatagtcaccctagagcataattataaaagtatgccaaatataatatttacttatttcttgtgaaatttaacacaattttatatgcattgaagatggtgttactattaaaaaaaaacgtaacataatggtgtaatattctatgactattttaccctcaattaaaaattaagtttccaaatttatcctttcggttttctctactgtatattggcttatgatgtaaaagtggaccataaaatttctcatttatacaatgctctaaaccccaaaaaattatttcacaaatacacaaaaacaacaaaaaagttacaaaaatacagtttcataaactttaaatatttttacaatttttttaattttatttacagaaaatacggtctttttatgtggtactcttattaatttgttgttgaaaattgtaaaaaaaaaaatcttaaaatataaaaatataacttttttttacaaaaaaaaaaaaatgtgttttatgtaattatcccaaactatagaatcaatgaaaactaaaaagcaaagggaatgttacaaaattatccaattttttggttaattttatattttcattatgatactctttttttttttttacatttttactttactgagttttcaaaaatattgtgttaaagttttaaaattataaaaatactgtgtttcaatgaaaaaaaatattaaaaatacaacttcacaaacaatatgaaaataactataaaataacgaaaaaataactacaaagtggcgaaaaataacaaaataatgacctagttgcaatatgcaaaacaatatcaactccttaacatatttttgtattataactttttttacttagctttgacaacttgatttattttttgtacgtattttaataaaatgtgtcaaaaatataaactaaatatatatatatat

SEQ ID NO: 328911 - DNA, 969 bp, Cannabis indica
tccttcttattggatatctaatctagataccacgcccaccgcctattcgaagaatgtcctcccagacgagcttcaacaaaaaatcatcaaataggtgtgttgaataatttttgttttctaataagctccatttggtgatttgctaattggattctgtttattttagttttatcctccatattagttttttcttcctaatgtgaatattatttcgttataggactgaggtttgtgatggaactatggatgttttgttaatagataccctctccactcaatctcgctcccctttgcccttttgttcaaaaaattgtagaccacaccctaccagcaccagccccgctacccaacgacgacagtgggttcttcttcttctttttctattttacattttttttatatgtgaaacatcttcttcttcttcaattattgttcaccaaggtttttttatgcatatttgggtttttcatgaatgacttatagatcttcataaatgaaattagaacattatgtgttttcattcatatattaatttccttgctttttttagcctaagaaatctaatctggtctgatctttgattagtattagcttattcattcatgtaaagagaaattggctaattaatttgttatgaatttttctaaattaggaataggagacatgtgatggagcatatattttgtatttttgtttcactgtaagatcattgttaagctatcagtatttttctagctataaacttaatattaaattttgtcattaactaatactaatagtgtcatctaacaaattttactgtaatatctcatgttgaaattctaagcaatggtatgaaatgagtcttgcaaacaaatcaatgtttactccaatatgatgagatttttctggaacatagttgaaattctcatgttgcacttttgctagctaattagttgcatgctttactatcatgcttctattaccatt

SEQ ID NO: 328912 - DNA, 1090 bp, Cannabis indica
catccacataattattaatatttataacacttccccttagatgtccataataactgcctaattaaaaatcttgccagaaaacttaataggacaaaaactcggaccaaggaaaaaagagtgtagcgtaaattaactccccttatttaggtattcatggagatcttctaatcaacgaattccaatcttgtgaaccatcttctcaattattgatgttggtaatgactttgtaaataaatatgcaagattgacacttgattgaatatgttggacaccaatatgtattgtcttgaaatatattaagaagaattttgtgaatgtgttttaatcctatctccttcaatgtaccttcattttagttgagcgatgtaagcaatattatcttcatagataactgctggtgttaatactattttattgagtgtaatccatatgtttcttgaatatgttatgtcatgatctcactcccacacattctctacttgccacataaagtgcaagtaggttagcatgatttaaagttgtatcattaaaaatattatcaagcaaacctagtgggacacaacctgagctaagaaaaaaagggtagtatatatatatatatattatatttataattatttgcaagttgcctcgttaaaaatcttgctaaaaaaatcaaataggacaaaacataaactaaaggaaaaatagtaaaacatgaatatgtctccctctcatgcacatacgatccacaattattttggtgataatatatcttgtaagattatggtcatacttttaaaatatcactgtatatgtatgaccgtatattatctataactcttccaaggtgtatgtgtggactctaaattatggatgaggggttcctgcaatatcaatatttatccaactaatcgaatcattcatgtgtgtatacaactttgttcatactaaagtttaaaattttaagtagacatgaacataataaattaatgataatataaatttctatttgtgagaatgatggtactccaagactatatatttgttccattcttgttgtatgatcttaattttcatatcaaatgatcatatatctataattcttgat

SEQ ID NO: 328913 - DNA, 1846 bp, Cannabis indica
tttttttttcatatttttaattttcctataaaataatttttttgaagaaaaatcccatatattttcacaaattgtataatctcccaaaatgtatagaattttcattttatgttttttttccaaaatatataaaaatataattttttttttcaaaaagattatttaatgggaatattagaaaaagaacttttttttttgaaaagtaacgttcatttattcataatacattaaatattcttaggaatagtattaatgtcaatacaaccatataaattaggggtaagttgaaaaatgcctcttttattaatcaattaactaaatttacctctaaatttgttttaactgaaacatacctctttttatatgcattatacccaaaatgccctaacataagtgagtcacatgaagagtatcttaaagtgtcaatggcaaaattggtataatatttaaaaagagaggtaaaagtaatagactttaaaaaatagggtaaaaataaaagagcacaatataaagagagtatagagtctaatttcctctatacattatgggtaaaagcccagttaaccacattatgggccataaaattacaggatattcagagagtatgaaatattcatttttatgttgttttagttttggcaaagtttacagaaatatgactttttttttataatatattattttatgggaaattaaaaaaataaagttaaaaatatgagagagaaatttggattactagttacccttcaataacaataggaataactaattactttactgtttctatatttttaactgtataattttcactgaaaaaaaaaatatatggatgtagattatagaattggctcatcgtaatgtttgcgtgcgctaaatggaacaagcagtatggatatagattacggaattggcacaaacataatgttcattccaaaaaaaaaatcatttgaaaaagtagaacaggacaaactaacattctagttttataattatgtttaaataaatgcctccaatatgattgttccatgtaagatttcaacacaaacacctaatgaaactgcatatatgcttgcttaataggttgcttaataggtaagccaatagtaagagtccaatcctaccgttaaaactacagcttctactttcatgactgcaaaagtcccttgcaaaactataaaaaaaatttaataagagcattatactacaagaataatttctttaaaataaactattaataccaagattatcatactattactggcaataaaattttatatggtggtagattaaggttgaaagaatcctagtaatactattatgaggaaatgatctttgtacaaaataaccttataagcttttacctcgacaactattaaaaatattgatactttaacattctgaacctagaattacttattcaatgaaagtaataaaataataataagattacatataaaagtttagaaacacaattaattccacaagaaaatagtactgaccgaataaagactgaatgacaagccactactccgcctgtgttgttgcgaattatagcaccaatacctatagtattagtatgcttatcaattgatgcatcaacattgagtttgaattgtcccataaaaggagtaacccaattagaggtagaagtgcacttattccctttctgaatgttaatattttttttttttgaattttactaaattcctcataaagcttatgaattcgtgtgacaacaaccgtgggtgaaaataactcttgaccatgaacaatcggtgtgcgctcactgttgggctttgtgtcctaaataaaattttatttcaatgtaatctttttcaattatcaa

SEQ ID NO: 328914 - DNA, 682 bp, Cannabis indica
attcacactttttgaattttgcataaagtttatgatctccgagtcgttgcagaatcatgcgaagatgttgttcgtgctctacttctgaccaagagtacacaatgatatcatcaataaacacaattacaaagttatcgaggaaatccttgaatactctgttcattagatccatgaaagttgctgaagcatttacaaaacttgtcgcctagcgactaatcaaaatgcagcccattgtcccgaaaattgaacactctaggtctaactgccccaatatgtataatcttcacctgatcgacctcactgctattcagccttagctttgctcttaactaaacatgaaaataataattgtaagtcgacaaactcagtaagaaaagcataatcgtatcataacataataaactgataatccatttcaatatatattgaagataataaaaaatagctagaaaataataaagtatttaaaatatatatttatataatcttaaggttcaacaagattaattacttaaagcaaattgtgttctggaatgatgtctaacatctttcgaacctaaacgtaatgttagcagcgtagtattcactacgagtgctagtggtcaaagtagtcaaatcactaaagatagactctgatcatcaaacgagatgcttatttgtgattgcatgaagcaataaggtt

SEQ ID NO: 328915 - DNA, 918 bp, Cannabis indica
gttgatttgtgaaggaacttgtactatgcttgctaatggtgaagacactaatatctggtggcaaccttggattccgtggctagattactcggaattcagggaaaccatggagatggctcggaccaaagctccatctttatgtagggtggcagaccttatgttcagaaggagcaagacctggaatcgtggcttcctgaacttcgtctttggaagggagatgggagatcgaattagttctatcgcgatggccaaagctctatggtttgggggacccttccctcttaaacctgatgtgatccctggtgcaacgcttcccgaagtgttttgttccttcttgcacttattagaagggtctttgaagctgccttttcttatctggatggcctcaatctttgaaactatttggttgtggagaaatagaattcgatatgggcggatagtgacgatttcagttgacgagatgctcaacaatgccttaaaccgttttgcggaaatgagtaatatttctaagtctctccctaaacaaaggcttactgtctctaacagtctcccagttccgggagttgtttcgaaggtgattttggcagatggttcgtttaaggatgggaactttggagcaactattgtggctattgatgatgttaacaagcagtggtttattcgaaccattgctggaagtgtggattccccgataacagcagaacttcaagctgttcacttagctctgctttgggctaaggaacagcagtgggaagatgtctgtattttctctgattctcaggtggtggtgaagtcgttaccgcaaggaatttctccaagctggaaatgttggactcttttctctagtgttctaaatctgaaaaatagtttagttaattgctcttgtgcttttgtttcccgtaatgttatttcctttgt

SEQ ID NO: 328916 - DNA, 539 bp, Cannabis indica
atcaaaaataagtgaaatttgatattaaattacactaataacttatgacagtttaaaaaacgtaatagaaaacatacatatcttatctttaatatttcactataaaaataaataatcgttctacttaaattttatttttaacttcattctattaatgataaacattagaccatagtaattcatgtttaccaaaaaaaaaaaaaatagttatctcgcaaatatatctgtataatatttttattaaaattagattgtaattaatatgtattatttgttctaattttttcttccattgttaaaaaaggggaaaaaatgtcatagtacaacaattctaccaactaggggtgtacgtcagttagtgttacgaaaattctgtttattacgcaagtgtacgtatcaagtagtatctcacgcaagtgaggtcgaaccacagggaattggattgagtactactaaattataattatgattctatttggtagaataataagttgcaattttaaaagtaaataactcagaaattaaagagaaaataaacg

SEQ ID NO: 328917 - DNA, 665 bp, Cannabis indica
ttttttatcattatatatttgtctcttaaataataataatagtttatttgtttaatgctagctaaggtttttcacattattatatcgtcatattggcaataccatgtaagctttattttatttatttatttattttagcaattatatgaaagaaaaaaaatacttattataaacatactcagatttaattattatattttatagttagatgattaatttgttaaaaattacaataattttaaaaaaatacacatcgaaaatttattcataaaagagagatcacgtggtatagattttatttcggaaaccacattttaggtcatgaattcattaattaagtataacttggtatttggttttatgataaggaaattaaaaagaattatgctgtaattgtagcataagcaatgtgaagcaacattgttttagggctttatttaagatgccaatgtattttttttcttagttttaggaaaatgaatcttattataatatattatatctttacaaaaagagtcatatccaacaaaaagaatatatggaaatatccaacaataattgcataataattagttatggataaaaatctgatcttcaaccattcccactcaactctacaaaaactaaaataatttatttgttatatacatatatcactactacaa

SEQ ID NO: 328918 - DNA, 1204 bp, Cannabis indica
cttcttctttatatatatatagattattttagtcactttacaataatatataatatactatttttttttgtttaatttacaataatagtaatattattattattgaaatatttaaataaatttgacatttttttttatctttttttcttgatttttttagtttaaattcctacattattaaaagtaactttttaattactaattgtaatgataaaaaaactaattagtcgcttttatataaaaaaaactttatttctatgttatataatttgagatatattttagttgcttctaaaacttattttgtatacatcttagtaattaattagttatttttaagttatattatggaaaattataatttaaaatacatttagataactttaaaaattattttcgaaactaatgagttgccatataatataattgttatccgtgtttctgaactagtgacacatggcataaaaaggaagcgaatctcataatctccatgttattctattttttgcactatgacgtggctgaatacacaagtgacacttgtcctgcattcttcgcttctggacagaaatggatgtccggaacagacttcatattatacatctgcttgaaccacgtaaaaatctccatctcatttatttatttttttttattatttctttagttctcaaatattttgtttctgaaaatctcaataaatattttggtactttcattgagagctgatgaaagacctaaacccatagtgttgttgtaaccatggtagaatcatgcagatggcctcgacgctgtcatagaggatgtaaaccctttgtctctaggcctcactcaatctagcaatgcgagaataggggatacatccaacccagacaactgagaggctgatcttgataagcagcacgacaacatcgatgataatcaagatgtttagaattaagaggaagacgattgtaacaccctaactattaaaggcgtgttagcgtgatttttaacgtactgtgcagctcgttgctaaccaacaagattattggaaatagtgaataattaaaatttttgcttaattatttaaaacatattatattacatttataaaattctgggatctcgtttacaaaatacaattacaaaagtttactatccatatacaaaatatttgtcgcctaacgactaaacaacaaaagccctgatgtcccgaggatcgtac

SEQ ID NO: 328919 - DNA, 1268 bp, Cannabis indica
ggtaaagtcattttatgcatttaaaggaggtcatgagttctaatcccaataaaagcatatttattttagtatttttattttactttttaaacctctaataataatacttatatttaatgtcttaattattgaacctaatatttttattgtttactttttttttttaacttttatacttattatttaatactaaaatataaatttgcattaatttttaactatgttatgcaatgtagaaaagaaaagatccaccccgtcacttaaaaaaagtagttccccccttaaccttaatttctgggtccgccactggctagcagacttgtccaaagaaaagaacaacctgaggtggctaaagatttaaaaaagaaaccttaaaaaataatataaaatttattgttttgattattaattaaaacttacatattcatatatggaattttaaaccagttattaataatttgcaacgcactattttttattttgtgaatggttaatgatactaaataaaaattattatattaaaatttatggaactcaatatttaactgaactaaaaaatcatgtttggaagagtgaatactaataaacatttatgagtaaataccatgcacacgcctctcgatttgttactacattatagttgtccaaaaatacattatgagtgaataattatatctttatatattaaaagtgtctatctaacagaaattcttagtttaacgaattccttttttttttttaacgccaagagaacaattcttattttttaaaacgtttcttttaacgctgttaactatattcttataaaaaaaaaagatttctctcatctcaatcgtttcattctcaggcagatggactattcactcttcccttccattctcactcccaatcgcagatctccatttcactctccccatcccaaaacgatgaatagctactttcaccgatttgggttcttaatagtgttttgccaactttgtttctatcgccaatggtcttttctatcgggattgaatctaaaaagaccattagaatcaagcttccctaatgcctcttctcttctccaactcaaggatgccattgctcaatcgatttcctcaacaacctcttcttcgtctctccgcctctccctcaacaggaacgatttcctcaacaacctcagtttaacccacgaagtgttcaaggcttaccaatgtctttatttgctttattattgtttcgcaacatataaattttaatcaacaataatatattaaattgttgcacat

SEQ ID NO: 328920 - DNA, 930 bp, Cannabis indica
acgaatactgctataaaaaaaaattaaaaaaaaatatttcattatgtgatttcagacgtaaagattgactaaaaaattataataggaggttataattagcatttctcttgtcatatatcccattataaaaattctaaataaataagtgattactcatcatcctcaaaagtcacaaccacaaaccttttgtcatcattttgaaacttgtccaaagtgagtgagtaataggtggagaaaaatggtgcttcaaactactattgatcttctgaagagtgagattcctcttcaccaagaaactattaatttatctgaagattctgtcactggccttgttcttgttgatataatcaatggattttgcactgttggtgctggaaatctggtaaatctcaaacacatctcttctcatttattttccaagattatattaaaatatgcttttcccatatatattttagctttttttttttctcaataataattagtgttataaatgaatagatctatgaacaattgaaagagtgctcaaaagggtttaagaattgtttatttatttattttaattattagaatttagcaattttgggaatattttcttggtactttttcaggcaccaagagagcccaatacacaaatatgtgagatgataaatgagtcaacaagagtagcaagacttttctgtgagaaaaaattgccaattatggtattcttggattctcaccatccaaacaaacctgaagacccttatccacctcactgtattattggaacagatgaatcaaatttggtacctggtgtgtatatacaataattaattatatatataaatagatatttttattttttttatttaaaataatatattgatattgtttggtatttgtttttttttttttatttttttgttagctttgtagatggttaggagg

SEQ ID NO: 328921 - DNA, 943 bp, Cannabis indica
attacctgattaattcataatatcaatataaaccttaattatttacctatttaacttatcgggatattacaaaaaatatagtcaatacaatgattaatgttacagatgtaattaatggtatgaatcttgacatttcgtgtttgccagatcgtatacctactataattgatgcatacaagaagacctttttgacctctactcttttgtcctttaggccccataagaatttgacccaatcccacatcctgcctctagactcgggcacaggcatcacaccccaggggatgacctccaaaagtgggaggcaaagttataatagaggaacatatgttccataatttcctcttcatctccacatagggggcaagaaacctcgtcaatgtgcattcttctagccagagtcgacctgattagtaaagcacttgataggatactccaccacaaaatcttatggcgctccaaaatcctagaattccaaagtttgttccaaagagtgggcgccaccgtaataggaggggctcttgataatgcccgaggaagacagacagatttcgtagaaagccaacaagttgaatcaatagaccaaatccatttatcaatgccttgtccccccagcctacctcctttaaggatattgttagtggttacttggtcaaacagggagttgagttaggaaacatcccaattcccatctttcgtaagtaaaactgccactttattccaaccctcaccattttttggaatgggataaaagttctgcccatgcaaaaagaaaagaaagaacgtggtactttgttgttgtccttaactttttaaggtaaaataaacctatatttgtcaaatttgggggaaatgtgtgaaagtcatatttagtgtgggtactgtagggtaaatactattttggaacttgtgttttgcaaaaattaccgattagactctctgt

SEQ ID NO: 328922 - DNA, 655 bp, Cannabis indica
attttaattccgtttataattaaagtttaatttccgcgctaattttattagtaatccaaatgaggggattagggtttcataagcatcttgggtagtgtgcctaattatttagggcgttacaataccgacatatatatatttggcaaagttcagattgacgctatcacatcagtacgactagagtattgaatataggctgatatggtcaatcgtactgttatatgaacattttagacttagtacacgttggacgcgagatatgattgtgattaggtgtatgagcgcatggtcataatccaatttatgtttatatatgttatgtttatgtttttcttactgagtctgtcgactcacagatattgtttatatgtgtaggtaaaggcaaagtaaaggctaaacaacagtgaacccgaactagatgaaggttgtatataacgagacagttaaatctggatgttcaatcttcgggacagtaaagcactactacaaaaatagtttttcccaacatttttaaatagtcgtttaaagtattcccgacagtttctataaccgttgcctatacgaccgtcgcaaaataggtgaaataggcgacggttaaaaaccgtcgctaatgtggacttcccggcggtttaaaactgtcacctataacagggta

SEQ ID NO: 328923 - DNA, 1011 bp, Cannabis indica
gtaaaataatttctaacaacttgaacatgaactgaaatcgaactcgggactcgatcctagacccagaccaagctcctgattgagactgggattcggacatggacatgaacacgaattaagactaaaaactgaatacaaacctaaacctagaacgagatcgaaacacgagacctagacttggacccatatgcagacccaaacccaaacctaggacccgaacttagacctggacccaaattgggatccaaaaaacccgtacccagactcagactaagactcagaccccgaccccaaccgggacccagaccctgacctggaaccaaaccttgaccgaaaataagaactggaactgtgactaggacccagacttgagactagaacctaatccaaaccataaccaaaactcggaccacaacctcgactgagaccttgactaggactgggacttgagacctgggacccgaacttggatcgggacctggacctgacctggtcctaaaccctcgccgggacccagaccaagatctaaaccctgatagtgacctagacccgaacacagaccaagacagggaatgagaccttgacctgaacctgaacagagacctggactcaaacaattactcgggacccaaacccgaaccctgacccaaaccaggagctaggaaccagacttggataggggacctaaaccagggacctaggcctcggaacctagacccaaattgaaatctgagacttgaacccaaaccaagacgtgacccacacctgggaatctgaagtcagacccagactcggacccaaaacttgcccctaaccacaactaggacaggaacttggacaaaaactaagacaaaacccgaacccagactcgaacccaatatcggacctgaacctaggatccaaactcagattaaaacctagacttagacccggacccaaattcgaacctagaccgggattgaaaacccaggacatagaccaggaactaaacccgtactcggatcgggatcg

SEQ ID NO: 328924 - DNA, 1607 bp, Cannabis indica
atatgtcaaaatatctcaaatttgactttaggtctctttcccatcaacacaaccaaattccaaatcatatgtaagtattgtcttttctcaaaagcttggttttgagttttaatccaatgaatattgatcatactttaataattttgttgatatgttatgttaacaacgattactaggagacctgttccaacacctgaaattgagaaaaggcataggattcttctcggccttcattttggattgcaagcggtagacttcttattgtatgagaacaacgtaaaggcttgcgctcttctcggcaaggatcagtctactggagactacaaggtcccaaaatgtttagactgacaaaaagttccagtttctgccgacgcgaaagacaaggactatgtggctcacgcccattatccgaataacacaacccctcaggaacgtgaagatgaggcctcctgaggtaataattttggtatttgtggatggtatcccattgttcttggagatgagtgaacacccttaattatgtttaaggatagtctgtacaacttctatatttggaactatacagatctcatcgttcataggtttgacagttgttaccccaagcatcatgttcaattaagctgtaatagttcttactttggaatggccaagcaatatggtactaattttgatagggctggtcatctagatttggatatgtatcctcttaacccctttgacctattcacgataactagttttagggaatttagtaactattgtagttcttcttcctcgtcaaatgattatggtaatttttttaagtgggagattatctcaccacatgtttcttgattatattacacaagtattgacgtttacccctttttctcgcagatatggattttgaaaatctattgtccaattcaagctccaagaaaggcaagaagcgagttgttgtgtcggaaacttcttctgggatgaacccaaaatcgctgaagagattgaaaaaatcgacaaccaataagaaacatgcctcgacccagattgttattgagctagaggtgcccccagtgacttcttcaattcctgctaccacaagcactgatgaaaaagctttacggtctattcatcaagctagattctcgagttcacagcccgagatggtactcttagagccttctttcccctgcctaattctattggcattaagggttggcaagttttctcacagtatgccaccacatactgtcatcattataaatcctttcagcaagacaattgggacctgataaatgatggtgatttttaaagtttacttccgacgagcaccgatcttactctctcggttagcatgctttttcttgtatttttaatttatacctctctttttagttaacctttcttgactttgttcttttgcatgcacctttttgtttcatgtagctaaagaaagaggccttcaaagaatcaaacagttggagactgagctttgaaagtacaatgaccaacgtgaagtcattgcaaggcaatgtgtagattcctaaattaagatttctattctaatgaaagaatctgaagagcaatggaaaacccacaaggctgagctcgagagtgcccaaaaagaa

SEQ ID NO: 328925 - DNA, 1729 bp, Cannabis indica
cctcttttgttctcaagggtctgcaagttaggatctgtcaccattgggtcgccctgatcagccaggcccctacgagtttgcaccaccaccaaaatgttgacctcgcttttagtcaatgacaatgagtcaattaataagtgattaagaatataattaaaatagagcaaaaaccataaagtaataaagaacactagattttaaagaggttcagtcccctgagtgtggtattagcctactccccttgaattgtattaactcaagagaaagaacaaagtgtcttcctctctaaaagctcttacaatgaatctttgagtaattctcttagatctctctctctgaagcatttctttcgatccctttcacagtgaggctacgtcactatttatagggccttcacgcatgagggaaggtttcccttttggttacaatgtataaaataggaaattacatttattacataattgtgatatacaaattaagaaactagaataggttaccatatttttttttgattcaatcccgcgattgtagggattgccttcgtagtgttggcatcataggattacactgaagtgattaactcattggaagtagttcggcaagccagacttatacttgctcggatgatctatctttcatcctgctcgggtaatcaaaggttatacatgctaaagtacaatatagagtttgttcgaggcattcacctccacccagaaataagaaatacaagacacgtgtcacatgattcttctgccatgtcattgtgcaaaaaattggataaaagacttcgaccaggtcttctagctacgatgctataagcctttaggacgagaactgtgtgtagaattcttgagaaaagtcgtttcaagaattgaatcttcttggggcaagcttgaagtaccattgttgagctatttgtgataaagttgctgggcatatgcaacaccgcacatcaccagtgatcttttggagatcatgttgcatctcaaagtacttgatgtgtgctagtgggtcttcttgctggatatacatctcccatactggcatcttgaatttaggcaagggcaaggcatttatgtatgccgagaatggtgatccccttgacctgtctagatcaaggtctgatggttttggaccagattgacccttgatcatgtcctttatgtgctccaactgtgcttacacataaggaactgttgttttagggacttggtggcctggccctcctttgatgggttgcagactcaaatgtactatggtctagccaaccatactctaagagagtgtatggttgaggtccaccagccttgtgctttgtttctagccttggtcggccactactaagtagggaggttggtcctagccagccaagcctatgctgggcagttatcgatggctgatcagccctgtactggtagtgccaggccgcctatgatccccagttggctgatgtatttagtgtgttgataagaggtacatcgcactagttgctggagctaggtggatctagatacttgaagtgattggtctcacttctcaaattataatttcaggtgtttccacctattcccggccctagccagatgaagattgacctttggttgactcgctcccaaattcctcgggaacggagttcactcacctggctggctagagatgcactcatagatggctagccggccaaaggttggccgatgggggctgttgttgagcctaagatccttggcca

SEQ ID NO: 328926 - DNA, 924 bp, Cannabis indica
aatacaactaaaaagggagtaggttgttacccgttaaccaaaggggccgaacttctataaaattgttatgtctattttatatgcttgctttaattatttacatatggtgattcatatcgtaaataaggctccgctatcagttgaccagatttgaggtcaacattttggtgctttcattgagagcattatttatcaattcggtcaatcaccatggttgtagcaaggagaactttagctacaacttctgcttcattgggtcttcctcaagaccccatgactactaattttaatgttcgtgttccagctaccactgaaacttccacgaaccctacagatttagccaatcctaccaacctggcaggcccaacaaactcgaccaacacaactcgtccagtcaacccagctaacccaactgatcccacccctgccgcccagggtatatccaacattggcacctcaaaagaaggttttgtcaatgtggagcaacccccactcaccacaactgactttgttccctggtattatttgggggaaatagggtcaggaattgacgaaccagcaattggtgagcctcatgtgggcttggaagaagacttttaattggctagacttagagaggttgtatgccaagtcggccagactaaagaaccacgtgttgttggttgcgatgtgttcgccaacagagacaagaggcagtgggtccgtaaacagttggagaaaattaagttctgggaagagccgaagttagagccaaaacttgaggtgtaaagctaggggaaatcgtggaaggaactagagctgaaaggactcgaaggcttgtatataagcgtcctcaaggttaataatgccttgggcctttgacataaactcaatcaatgtttcaactctctttctttgcatctctctattggaaattattttacc

SEQ ID NO: 328927 - DNA, 748 bp, Cannabis indica
tatatatagaatatgtcacttgtattatcataaataatattaaaatcctttcatatttttctaataaaactttagaaacaaataaaagtacattgatcgtcagaattgtcaccggcgattggaaagtcaacagtgagtgcaagaaaattcatcagagttattatcaatgtcgaaaagtcgttggagttgctgctaatatcgaaaaagtcaccgaaattgacattgtcactagaaaaattactaaaacactcattagagttatcgctgtcatcaaaaaattagtccttcttattaagaaaggcctcaacgttttcattagtttggtgcctcttccatagtgtgtgggttaagagtagtacactcacaataattactattccacatgttgttatattatttgttataatataatatagattaaaatatttaaatgtaacatattatgtattaatatgagattaatatatattatgtgctggaggttgtattatatcatatatagtataataatacacacaaaagttgtaacatatgaggagttacaaatctgaaaatagattgtaacttaaggattacatgtaattgagtgagttattacatatggaagttatggaatcaatgggataagtttctagctgttagaaactgttacaatactcaattatatcgtttaaatgagtattgggacgttggagaaagatttaattcggagaggagttacaaaaaccaaattttaattttttttttt

SEQ ID NO: 328928 - DNA, 525 bp, Cannabis indica
aggagttcattacttgtgcaatattaaattacttgactaaagaacaaggaaaacaaaatgataaatatagttcactgttaccttgagctctagaatccgctgaaattccataggtgttccctctggtaacaatgcccgatacgtatcagcaacagaatcaatgggggacagtatgacctgtatttcaaagaaatgaaatatgaactgccaaaaagaaaaaagaaaaatagttgacgaatgtcagaaatttactaagaaaatcaaaacccaaccttcaacagtgcttcagctttactcatctcgcggcttacaaactttgaatagctagccgcacctgatgtctgatgcaggtaaaaaaaatggataatggaatcaataataattgaaaaagaacatgttaacacatgttagatattaggtgtatattagctgtaagagagttagatatttagtagatatttagtagatatttagtagatatttagtctcctaactctgtatataaatatgtattattctatgaaa

SEQ ID NO: 328929 - DNA, 1159 bp, Cannabis indica
aaatcatccactcaaattatacgaaacatttagtttaattttacattctcattcacaaaaactcaaaccctacgccaaatagatttataagtattacaaaacttgtatggtgactatcacataacttgttaaaaagtgaggatgcatgtgtgttaatagggttcaaaaattatatctgaggacagtacgttaatggagtccaagaattacaataaaaatattataatgacgtgatactaaattttaataaagtagatgatcccaattttaataataaatatgattgttaaaaactctatcatatcattgtaatttttggtacatattttcagtacccttatcattcctcaaatatgaattcttcacactactataattttgttaaaaaaatcaaattaactaaacaaatatgaaaattctttttcaattattatatgaaaatatgcgtgcagcacatacatatttcctagtatatacattttaactatggaggtttaccttgtgtaatagtaataatgtacagattacttgagttgagaattaacaaaacaaattaaaaccgaaagcattttgaaaatgaaaaaaaaaaaataaaataattataggggctgaaatcaacatggccaccaaaactccaaacaacatttccagatgtgatcttaaatatatctctcaccaatggaaaaggttctgaaatcaaagttcaaaactatttagtaagcctcaaacaaattaagaaattttgggaaactaatggaatgtatttacttacaaacttcttcttcttcttcttatttttcttttcaatcctggagacaagctcgtcttgccgagcaagagcatcttcaagtgcctacaccaaccaaaaacaaacaaaaataaggattaagttattaggagctttgtaatgtgtaagattaattagtttacaaagaaaactaaattaactgagttataataacataattattggagagttctacatcaataatatatgttgaaactaaatatcatatttaagatcaagggcgaccttaagttaatttgggccttaagaaatttatttaggcccttttataagaataaatgatatttttaaaattattaaaatatatggaataaatggaggaaaacctctttttttgcatccattaatcaa

SEQ ID NO: 328930 - DNA, 675 bp, Cannabis indica
cttgcgccataccacttattcctcaagcttactgcctgctttcaggctttgtttattttttatgttgcccggagctggggctcgcccagtccggccgaaattttgtacttttatgaactcgtttccatccctaaaaagggagataaacttaagacagtttttacggcctccgggcccatcctttgaaccttactaaattcgatctgacgtagaatcgatatgaacaaagcgtctatatcaaagttaccgtttactataaagaactaattcatatcataatgatgatcaatagtagatcggcctaaatcttgagtaatcatgaattcttgttcatgttatagtttctttgattcactcgttaaattttcttagagaagatgattcttacaacttctgttttgggaatataataatgtggatggctatgaccatgttctacaattatgtaatcctgactttcctaacagaccaaatattggctccatttatgtgttaattctagatctaaaaatttgtgtgcaaatttaaattggatctgaattatgctttcactagtgaattaacgatactaaataataaagaagtaattagaagggtaaaatggtaatttaaacaaaactaattacgaactgacgcaaagagggcaaatcattgaaattgattatatcaatggac

SEQ ID NO: 328931 - DNA, 711 bp, Cannabis indica
tgtttggtttttttttcttcttttggttctttggcagtggtacaatgacaccagacatggctaaagctttagaggcgttaagttggatcaaggatcatgaatgacataatgttgaactcgagtccgattgtctctcaattgtccaagctattcgaagtaacatcatcatggtttcgcctcttgggggagtggtgatggattgtcgaaagcttctatctattttaaataatatttctttgttttttattaaacgatatgctaatatgactgcgcacagctttcttagagcatcatattcttttccagattgagttgtcagtgggagcgatgttcttactgaattacactcttgtctttaggttgatttagcaaattaataaaattccaatttgacatttaaaaaaaaatgttataaaaaatgtttatgtgtggtaggaaggagagttgggtagagggaaaggagaagagagagatagataaaatgagagaacaattacctttgtttggcatgagagattggaggagaaaagagataattggatgggaagtgaatcctcccaaatccccaatttacaatcttccattaataaaaggattcacactctccatcgttaattgtttaaaattataattatacccttttaaattatattaaaatattattggtaaggacaatatgataattttaaaaacaaatactttttatcctcc

SEQ ID NO: 328932 - DNA, 603 bp, Cannabis indica
tttcttttttcttaattgggcgggttgcacttagatttttataacccgatttttacattaggttgaataaaatgtaccataaaccgactaaatcgactgacgtacacccctagtgaatagggtattggggacaacatattttttagagagagaattgagtaaaatgaggctaacattaacaataattaattgaatctgttaaccatacttgagtgaggtggctttgagttattggtggcatagagtgggaataaggtattggggatagtagatttgttcttgtctatctatgctaagggtcgagtctgggaccaactaattatttgtaacatgagtgtgagagagttatatcttaagtacatttttcatacaattataaaatgaaattttaatacaaaattatgttagataattaaacgaaaaaaatacttacaaatttaataccataaacacaatgaatgataataataaatcgtaataaaaatatttttgattgagtacataataaaaatatcttaaaatcttaattcttgagtaccaaagccacaaactctaatatacatagtaacatagatgaagataataagatattttttttttctt

SEQ ID NO: 328933 - DNA, 1059 bp, Cannabis indica
ggtggttaaacaagagtatatattagataaaacttaaaagtattggtttgtgctattgagttgagacattatgattataaagacgtgccaaaggttaggttgatatgattgaagttgagatattcttccattaccaatcacaattcatgattatattttccaaatcatctactacttctaagttctaactacaaattatctcaaaaaagaaaagaaaagaaaattctaactacaaacatcccattcttaaaaaatacagaaagaaccccatagaaaatatactaaaattgaaagtttaagtgggaatctttatagcacttattctaagaattcccttttgtttttattattaattaagatgtgtaaaggaatttcttctaccaaattctacattcatgctatgtagtatgtaatgtggttgaagatgagagatgtaagtctaaaataaatctttaagactgaaatgaaatactaatggtgaggaatgtgagtatctagcttctgcccattttcctatgacaaagaagccattacttgtcaacttcaattatatcaaatctatataccactcaaataattactgtcatcatttatatatgtaactataagtgaattgatttgagttttcaacaattgaaaatacctcactcaaaaatttataacaaaaactagaaagaaatagttgactgaaaagaggtagaaactgagaaaacaagaaaatttatagaacactatcacttaattgagcctatttgttcattttttttttcaatgaaagaaattttattaattaagaaactttcgctactaaacagggtagcaaatcaattggaacatgttctaaaattaaaacgtcgatcaagaaataagatagcaatcttagcaaagttatgagctactaaattaacagatcgtttgacaaaagaaatagaatcattcgtaagagaagcaagcaaacttttacaatcttttacaatcaaaccaaagacagaattcatatttaaagagcttcaaatggcttggaccgcgcaaagacaatcaaattctaacataatatgt

SEQ ID NO: 328934 - DNA, 1635 bp, Cannabis indica
ctgtttaggggctggttgcatttcgaaacatctcgttccaacggctagtgtttcaaccttttcccttagccttggttgtctcctagttgcttcaggaactattttttatttggcccttcctttcccggggccgcaatttaatttggctcgcttcctggaaggttgcttgtttagaactagccaagaaatgacctttctttgtgaaataaggtcttccactgtccccttttgggtctgggctttccacaaagtcaagcttcaggagcattgtctacgattgccttaagcattttcttactttggtccttgtcagcttctcattttaatattttatgcaacttgctgggctaaactcttcgtgaagcccgtggagatgtgtaagaagggactcaattgtgtttttttgattttgattttttttttgccgaatgtgcttcttttctcttggttcgctttcgagcttagcttctaagggaagaactcaagcgtatttctctttgaggagactttggttgagtgcgttccccatttttgttgcatgttgggctgagtgattttggcaaatggaagtaggacgttgtagccgtcgacaatcgaatatatcgtaccaccaaatgagctgggaattctggggctcaaattctcggtcatttgctttgcgtctgacttgtgtctccttccaatttctgaagaggagtattgggcatatctttgcctcgtaccctccttccagggaggtttttgggaagtgcgcgattacccacaagccttcgggaagtaaaacatgagtttggggcgagaacctaattatatatccaacaaccctttctatggtgcaaatcctgcaagggagactctaggctgtttgtagcgtggggagccattggttttacgggaggaaacctaggcatgcacccttcagcaatcttccttgcgtaggaaagtgttttaatgaaaatcatgtcgagtctcgtgtcagcaagcttttggatttcactaagaaaggtggaaagcacgcatgagctgggacattaaagttgctagtaaacaccaaagggtgaagtatcgttggtttcgcgagagtcatgctaaacttttgtgaggcaggcttcgacttccaggaaggaaggctaaagtcacctaacagttcaagcctagactttgcttgaaaggatcaaggaagaaagcatcacaagtagtaggatagacttcaagcagttcttccaagttcggggaggaaggttgaagacgtattgtacccccagtgatctttcttgcatgagaaatgcgtgcatgcgagagtcatgttgaattttaatgtaacaagcttcggcttccgaaagaaaggctaaagttgtataaaaatttaagcttagactttgcttgaaaagatcaaagggaaaagcatcatgaggggtagataaacttcaagcaatccttccaatctgggaaggacgattgaagcgtatcgtaccccaagtgatctttcttccaagaaaaaacaacgtgcattcgagagtcatgttgaagttttatgtaacaagcttcgacttccgggaaggaaggctgaagttgtataaaaattcaagcttagacatcgcttgaaaagtgttggaatttattttaccaggatct

SEQ ID NO: 328935 - DNA, 1554 bp, Cannabis indica
tgtgtgaagtgtcctcatgtgagacaccaagaaactgatcaaggcatctcactcatctctcttaaaccaaagctgattattttgaacatgtgtcttttgaaaattataacgcacaacgactcttgccaactagttgcgggtttcacacttccatggagatgtagtcatcaccctatgaattttcctcaaagagttacaagaaaaaggagcaaacttttctagttacacaatggtacaagggtagctcttcccattgcatccatggaaggtagccttttcaactggggtaacacgcgattcatcattaaactaagaaatcaaatgacaaaatatatgtgatctatttatcaaaaagaccatcaattattgacaaaaaatcataggacttaaatacaattgtgaagatggtgagatgcaactttctcaaggttagatggtacacaccccaattgaatttcggagatcagcaaaggtgtgagcatctaatacatttgtgaacagatcaacaagttgagcacctatggacacatgagtaatagttaagagtttagattctactatatgcctaataaaatgataccgcatgtcaatatgttttgtacgagagtgttgtactggatttttgaaaattttaaaagtacttgtactatcacaaaagtaacattttgtttagccagataagattagtaaaacaactcccaggtccaatatactcagttttggcagtagaaagggatatggaattttgtttcttactcaaccaagagacaagattatttctatataaaagcaccctttagtggtagtcttacgatcatctaaactcccagcccaatcagaatcactgaaaccaacaatagacatgttggtatctctcaaataccataagcacaattcaaaagtcccaaacaagtgtttgaatatgcgtttaacagcgaacaaatggtactgtttaggattagcatggtatcgaacacacagcctaacactaaaacaaatatctggacgactggatgttagatatagaaggctccctatcatgcccttgtacaaggtggaatcaactaactcactagacttatctcaactcagtttggttgtggtacttaaaggggtaggaacatgtttagtgtggtctaagcataacttctcaagcatcttttaatgtatttggattgagaaataaaaatgcatcggtcagtttgcttgacttgtaaaccatgaaagaagctaagatcccctataagacttatttcaaactcactagtcattgtttaactaagagaacaaagttgaaatttttgaaatcggataatcgagtaagaagttatgcgcattttagtcttgaaaaatggcatttttgcctctgttagccatccgaaattccggttgtcatcaatccgaaattcagattcccatccagaattccggttcacggttgactttgtcttgggaaacgcactagcggctttaaacggctatttttctcttaaacactatataaactcaatttttctttcaaaaaaaagttggttgagcatttatttcaaatat

SEQ ID NO: 328936 - DNA, 591 bp, Cannabis indica
tttgttatgatttttcataggtttaaaatgagtttcacatgttttgagagtattgtaatggaatcgctccatttaaagatgttattatattttttttattattttgtttctatgtttaaaattagtttttacacttatattttgtttttagattattattgtacatttgtgtattgttttaattatatttgtgagttttttttagtaattgtatattttcatttggttgactaataaaatcggtttcagttatcttcattgtttatcatttcagttttgttatgatttttcataaggtccaaaatggtttcataggattcacatgttcgaaagtggtttcacagattttgagggttctgtattggggttgctccattttatgatgttattatatatttttttattttaagtttctttgtattattttatttctaggttcgaaattagtttttgtgtgctagatttttaattggttgtttgatatagttagtttttattgatttattttagtcgtctctgtactaagcccagttttttagtgtcagtaccaagcccagcaaatttttcaacatcggtgccaactccgatgac

SEQ ID NO: 328937 - DNA, 1108 bp, Cannabis indica
atgtggtttattaataataaaaataaaatataaaaatatattttattaaataaaacaaaaaataaaaaatttaaataatatttattttacaatagtttatttattttaaatatttttttaataaaatataataaataagtaaatatatttgtagtacaaataaaatttattatagaatcttttagtcaaaataatttttttaaaaaaaaagtttaagttgtactagttttgcttttagcagtagcatttttctataaattattcaattaagttttttttttttttttttttttttgttttaacttatttaccaaacactaaggggtaacaattcgtgtttgtaagtcgtattcgtgtcgtgtcgagatctatgtattaacaggtatatacttgacccgaacatgattcgcttaataatcgtgccaaaaaatgaaaactcgaacacaatccgtttattaacgagtctacacgacccgtgtaaccgtttataagcatattttccttaaacatatcaaactaataacacgtttatgacttgttaaaatactaaaataacgataaatatgtcattaacggctcactttcgtgttagccgtatcaacccaaacatgactcgtttattaacggctcactttcgagttagacaagtcaacttgaatacgatacgaacccatttaggacaaactcaaatctgctaactctcgtgcgagtctcaagtcgtgttatcgtgtctgatccgttttgctagttttaccaacacctttttatcatatttattttttttaaaaaaaaaaataacttttagctttttaaaaaatgtacctaacgaccttccaacaacaaaatccaatactaataccttgtatgccacacacaacaaatcataaaataaaaggattctctaaaaataaaaataaaaataaaaaaaaaaaaaaaactaaaaatgaattatgaaaatcacacattatcttttgaattagaaagcatttcaccttgcaaaaaaaaaaaaaaaacaatttttttataacaggaaagcatatgtttttttgtaacccataaaaattaaaataacaaagataacaaaaactacagagttggtgagagagtt

SEQ ID NO: 328938 - DNA, 834 bp, Cannabis indica
tacaccccattcattaaaaaggaaaaacggcaaagccgattacagcaaagaaaagtaccataggcaacaaagaacacaaactagaaaacagaacataaaataacaggacaaaacaaagaacaacagtctagcacatccattcaaaagacaagatgggataaaccgccattaatccggtacccattctcgatcatccgaaaagatgttggcctccatggaccccaaatcaagaacaccagtgacatgaactgcagcagcccatttcgcagaattatgagccaaaaaattgaaattcctatcaatctttctaagctttgagtcttccaaaattcgagctgcactattgaaacgctgagccactcccttgatgtccaaaacctgattcgaattgcaagttgccgaacaatttgccaccaccacatcattatcacagtaaaaaactatatttcccttcagatttaccattgcatattctgctgcagtagctagcatagaggcttctgcaagagttggatctatggccgcaaatctctccgagtaaatggacatgattctgtccaaatgatctctgaaaactgctgccccgatagataattttgttgaattgagacatcagtacagcagtccaccaacctgcttcagtgattctcttatgcacattctttccaacctttggtttccatgtagaacgatgatcattgtactgtcgattcactgaattgatagcctcccaaatggggcgaatccttgaaccgtgaatgacttcgtttcgagcttcccagatcactttgaagatgcagagggccccagtcatgaactcatcaaacgaaagga

SEQ ID NO: 328939 - DNA, 909 bp, Cannabis indica
acattttatttcatttctgtaatgattaaggtatttgaaatatgttaattaatctatataactctctcactatatatatttctcataattaatttcattgttatataatcatggtgttgacatatataattaatcacatttacacaattttttctgttgatatatatataatcattatgaataatatttaattaattagggcatatacatacaaaggagagtcatattaaccaaaagtagctaaatattattcataaaatatttactatatatatataatttaaattaaggttaattctgagcaataataaataagaacaactaattaatattaattaaacgtgttgttaaagtgagcaggtgcaaactcatgaatagtttctagattatatacagtaggactgttcttctctcttttttttatatataatatatatatgttcagattctaattttagagaactatagatgagtagtagtagctagtttgaagtagtatgaatatatatataaaaaataattatttgtataaaagttgttcctatcaaaaaggcatatattatacttgttagttttagtaacaaagatatgtacctttaaagagaaaatacaatgacactcaataaaagtgctttagtttctttttatgtataattacctatatataatatatatatgtatatagatcactacatatgcacccaatatatatatagaccactacatatacactgatcttctctaaatctcatgaaactgatcttggtataatttatgaaacactattcctcattttttgagatataatttatttaaatgaaataaattataaagaaagtaataatgcatgtatatatttaatgtatagttagtagataaactataatagaagtttgttttattgcatag

SEQ ID NO: 328940 - DNA, 760 bp, Cannabis indica
tttagtataataattttagactagactaatcattggcagacataatagcaatacgtatttattttttgttttttttttttttgaaatagcaatacgtatattattaaaattacataattagtcaatatctatctgaattatatatagtttagtgtactaattatactatatatatgtacatctacgtacaatattctctcttgttaaattaattatagctatatacatatacttatactaatgataatgtgtatgtatactaggataaataattatgagtggaatgaattaattatatattacttgtttcattggaaaagtattaattaccaatgtaaaatgtattataattttctcatatatgataataaaaaaaattctaataaaaaaaattatgatattagaattattaacacatgatatttagtaagaaaaacgttgcattgtgagtattaatataaaatggttattatatataatagaaagcaaaaatctttgcagtggttggtttttatatatatacatatttatataattagttatttgtttgtctttatatgtatgtcttttgttaatttgctgtagtgaaatttgtaatggtgcagttataactaaaatagattattttttttcttcttctttttggagtaatatacaatgtttgggtgtttgacaatgtaatttctaaaatgagtgtatcatgaatgaagctttatttgttttgacatttagggaaaaaaaaaatagtctatttttttta

SEQ ID NO: 328941 - DNA, 1155 bp, Cannabis indica
tacgagtattaatacttctcacttgctcaaatgttataatatataattaaaagtattcatggataatgtatgcttacatttttctcttcacaatgtcaaattaagtcatgggccatatactacttgtttattacgttctctactactctcatcgtcggtccttgctgtaaatggaaagaagttaaagaatattctttttttatatatatataaattaatctttaaataaaatataattaattcaaatatatctatttttaaaatattgtacttaaattattcttacaccctcacataattaagatacaattttaaacataatagattgtgttctttaaaaatagttgtaagtttgtgggaaagttatgacaaaattttgattagagaagaattgagactatcatgaagtgataggggtataattggtagaatgattgaaaaaagaggtaaacataataaattttgaaagaggaggtaaaaattaaaagcatcaatttaaaaaagtatgtagtatataattttctctaataaatttgtacgtggctcagcccatgttattgtattttttaaaatatatataagccatattgtatagtgttatataaaaatatgagtcgtgtcgtgttgtgtcaatatttaaaaaaagaaggctcagtataacacataggcggaatatttttgtatcgtgcttagattcgtactggtccatttttcttaaacaagcctgcccatttttatatttgaaagtatatgcatgacactcaaatacactaataataggtatgccatttttttatggtccatgaatgatgatcttgtgggcagtagtagttcatatatattttattaaatatttgatattaattaattttttttctctttttttccctttatatattttgtaggtattattattaggtgggtcggaagttacaactcttagttttgagattttattttctgatattaatgttttattgtttagttctcttggagtatctcttcatggccttaagatagacaataaatttttataaataaaaaaaaatcttctattgtttgcgtaacgttattacttttgttattttaatctgcatcgatttttctttaaaataaataaaagtgtgaaaagttatttatttttaatctttaatt

SEQ ID NO: 328942 - DNA, 527 bp, Cannabis indica
tatttttattttttcttttttttcaatttccaattaaactaattaagcccctcaaatcatatatatatgcatattattttgttaatatatatacatagtgactgaaatagtaaaaaacaccagaatgtgtcctaaaatttaaagagtcatagaaaaaaaatattttttaacctttatttaaaaaaattaataaaataaaatgtatatataatttgatgagtaatactcatatatatatataaatatatatatatatatcaatatggtttgatgagtgaaagaataggggagagtaattaatttgctaattaagaatgggattaattttgtcaaaccaacatgcaatatatattaaagataaagaaaaaaaaaacatggatagttacaattaatattaattaagagacttatgattgcccattgtttctgcatttagatatcttaaattattataactagtcagaacaacttgttttggaagattccataatgtatacgatacactatactaatatatatatatatat

SEQ ID NO: 328943 - DNA, 581 bp, Cannabis indica
taaaataattaattcatgatatatactatatatataatattttatgtaatacacatataattaaatagcttttaaaaaataaataaaaaaaattatacatataactaaataagttatattatcattatacatttatattgacttgacttcccataaagaaatatattaatctttggatacaacttcatagattgccttttttaagtaagacaaaagccatggccgaattattatgaagggagaaaacaaagaaatctttgttttgtattactgctaggtcacggctgagaatgccaagtgactaaagtaatttaggtcttttacatagtgaatatatataggcaaaaaggaaggcagcccaataggataaatgggccgaaacatatgggccagaaatagggcctacaaaacctaatacccgcctctcaagatgaactatatatgttctttaggttcatcttggttacaatagattggaaatagctaggtaaaagaggcttcgtgaggatgtcggcgagattgtttttggtggtgacatgaatgagcttaagtgtgccttcttggatcttctctcggacgac

SEQ ID NO: 328944 - DNA, 487 bp, Cannabis indica
acctagttatatatactatagaagaaaatagacagtcaaacacaaaacaatcacatagttttttttttgttttttttttttttttttttgaatgaaaaaaagtagtagaataaaggtcaattagaggctttatactcattagcttaaatttcaattgtcaaattcattatctaataattggccacacacattattttctccattagtttgttcaaacactgtttagaaaaaaaaacaataaatgagaacatttaattaaatctcatcaagaagataactaatttatatttggcattaagtaataattttaatctgtttaagaaaaaaaaaagtaataattttaagaatttaatgtgttaattgtgttagttttaagtttagacgcaaataatgagtaagtagaaattaaattgaggaaattacactctataccttttttatattgtcctcttttatttttaccttcttttttaaaatctatcatttt

SEQ ID NO: 328945 - DNA, 662 bp, Cannabis indica
gtagcgtgccttagcattagggcgttacatttgaggtattgaataatgcgataggctgctttgaggtgaggttggcgagggtcgctgaggtactgactaagtctattgacagcatagctaatgtcaggtcttataatggttaagaacaaaagttttccaataagactgcgatatgaagtagcatcattaacagggggaccaacatctttactgagagacaaattagcatccattggtgtggaaacagccttggagccgagaagacctatttcattaagaagttgaagcaaaaaaaaggcgttgagaaacagaaattcctgccttggaccgagcaatctcgaggccaagaaagaatcttaaatgtccaagatccttaagctaaaattttgaattaaggaatgccttgaatttggtcacttcattatcattggtgcttgcaattactatgtcgtcgacatagacaagaagtgcaagaaagctagttggatttgatttgatgaatagtgaatggtcatatgcagattgaaggaaacctgttaggttatttttagtattaattttagattaagtatagtatatttttaattgagttttaatcatgtttggagtatttttacgcttgttatcttttatttgtgcagatttaaaatagaagaagatta

SEQ ID NO: 328946 - DNA, 1744 bp, Cannabis indica
taaccactttaataattgatgaatttattcataataaaaatctcaaattataaatatatttctgtcataatcattaaatctgaattaaatccttaattcataatttgtaaccattttaaattaataggttaattttaaattgatcttagccagtttacatgttttgacttcaaaaataataaacacataaatacaaagaaacaatattcatgtttctactatgagatgcatgacaatacaactgtgtgagatttctatgtatgacatgttattcattaatgcatgcatgttattaatcaactattaatgagcatttatttaaaagcaataaataaataatgatgatgaaccgggtataattagatatttctaattttataacctttgaacttagaaaataaattacaaaactaatttctatcgcaacaagggtatttttataattttgtaggatctcgtaagcctcaaaattaattaaaagaagaattaactaataataattaaactaacgtttaatttaatatacattttaaacccttttaattaattaattcttaaatcaattctttatttaagacaatttaattatctttaattttgtcttaaaataataatatttgttatttatttttgggttaaaaaaatttttatcttaatttggttttaggaatgagtttgaatttcaaacctaaaatcaaatatatttatttaattcaaatatgaatttaaaaaaataaatgttccccaaaactttattatattttaaacttaaaaaaaaaatattttattatttattaattaataattatgatagttattatttgaatttagaattcaaataaataactatgatatttattaggaattaaaatttaaataaatatcccaaaataatctcaattatttacattaaataatttataatatatatactatatatacattatatattatgtatacattatatatacataatatatatactatataaataaaatatatatacactgataatttttgggtatcaaaaaagtggggtcagccaccaccattgaccaccgtggtcggcagcttaacagccacctaggtcagccacgggaagagttgcttgatggcagagcacggaggaggtcgcatgacctaaaccggtcaaactcgtctaggacccaaaccggcttttgcgcacaatggcggagcacgggaggagggaacgagtcccttggtgcttgattgtggtatgaccaccctagaactaccttcacgtgttcttccaccaccaattgcacgggtcaataatgactcgattggttttgtttctctctcgtccatcatgcatgaaatccatgcatggtttttctacgtgggcacggtacccaaaactactcaggtggttgtgcatatctggggaataattcttgagctcacatgcatgtgattttgacgtgcatggatggctttcaagtttagaaattgagcttgcatgctatgaatattatataggtacaatttttacttgaaataatttcataaaataaattacataaaattcatatgccctgaatttgacttacattattttctaaaattaataacaacaaaacctacacccaattataccatataattaacgcttcatcagctctcatacattcacaataaaactaccatccattcacatacatgtcacatatatataaatacataaaatccacacaaaatttaatgtatacacattcatggaact

SEQ ID NO: 328947 - DNA, 803 bp, Cannabis indica
aggaaaaaaaattatacataacaatggaacatacatttgatcttttaagttttgaaatataattgtattatatgtattagactttttaaataattattatcttttacattttaattgtagatataagttttttaagtttttttttttataaatatgtggatgagattggatcacttacttttacatatcaatcaacatcctatccacacaagtgtcgcttttgaattttccaatcattcaatccgcacaggtatggatatccacactttacgaattagattggatcgtacagattaaattgaatcgggtattttatgaacactcttagacgtgacatagccacgctataagatgctcttatttaaagaagattagctaaaaccacaaaccttttctactcaagacaattatgataccatgtaacagtatttttgtaaagatagggaaaaaagtcaattttttttttgtaaattttcctctctaaggatgcgattggaagttggattttaccaagaaaaagaaaaaaagtgtaataattatttttgggaaatccataaaacatgagagataaaagtaataaaaaaaaagttgaaatgtaaaatgactctaaatgtaaaagaaaagagggaaaatttacaaaaatactgacttttgacctaatttttataaaaatactgccacacgatagaaattctttttatactgtcttggccaatatttttttctttcatactgtaaacacaaaaaaaaataaaaatgaaggcctctatcttctacactcacggacagaaccaccacaggaa

SEQ ID NO: 328948 - DNA, 859 bp, Cannabis indica
ttctttctcttttctttcttcttcttcttcttctatcttcacgcctccttcttcttctccctctaacttcttcatctcagaaaccctagccactcctcaaaatcagcctcatcatcgtccccatctcagaactaaccctagtcgactccccattcccagctctcctcaccaccaaaaaatggttgtatagtcaccaaccccaaaaccctaaccgccttcaagctcgcacttggacacgatttcatcggggcttaggaatgcgaagccaccgccgtggaagaagatgaagacggggagggatttagggcctgaggcggaagctgagcttgggacgaagatacgtgaggagaggacggaggcggagctacggctgaggaccacgacggaggtccctgctcccaaaaatcgccaccccaccgctcactatattctctctctcgcctgtgcccgcaccagcaccagaaggagaagagcatcgttaatcgttctcttcctcggacggctcaagaagccattcgtgtcttccattttggctgtggatggacagagacaaccctccagcgttgggccgagctaaacgtagagagagaaagaaaaaaagaaataggatggtggtttggggttggctgtggatggacggagacaattgggttggggtttttgggtcgtggggattattcagatggtggtttggcttccattttggccgtggatgggtttttggggtggttggacgggtggctgtgcgataatgaacagggagagggtgggagatgcgggagggagatgtggtgtgataattttagggttcaaaattaggggttttttagtttttaatttaattacgttttatttattt

SEQ ID NO: 328949 - DNA, 961 bp, Cannabis indica
agtgacaagatttttccacttgcacttgcactgttcagggctgcgattaaaacccttttctttcattctactagaaataacttcccaaaggagtttatttcgtttggtttccatgaaagtttgatcgaactcggctctgatgattagtaactccttcgtttcttgtaaactccattgaggaaatctatctgttacatctaagcttacactgctattattattactattattattattattattactattctgttgcaactgttgaggaagaagatgatgaaactgttgttgttgttgttgttgatgatgatggtgatgaagatggtgatgatgaccctccataaccaagcaacagaaaataatattaaaaagaaaatttataagaagatcttaaactttggtctcaagaaaagaaaaaagaagaaagaaaaaaaaagttagatttgatgaagaaggaaatatttgttataagggtgtgtgaatacaaagtgtgaatcgtcaatgagaaagaaaaaataaattaaaattaaaataaaagaaaaatattaataaaggaatttttattttttctgttcttatatatatatataggtactgtcaactgtcaaagtatatatttatttttttactatttatttttatatataggttcagatttcatcagagactattaataaataaccaaatcaaaattaaagttttccttttaaaataaaaaatcaattttttttttctttttcttaaaacagctcttcttcctctgtctgatctgtctacgcgcaaactttctttttctctatttttgttaaaataaaaaataaaaaattaaattatttttcccatttgttcccaccttacgattacgtatacgtggcgtcactcttacgacactgacttattattttatacttctttgggtttttattgtctacaaccgagtttacataacaataaatacttt

SEQ ID NO: 328950 - DNA, 980 bp, Cannabis indica
ttttagctaaaaattgctaaaaaatactactggtgtctagtactctctttaatgtcatactgctattggtataattaagtatcggatcctatataacttaaaaaaatagcttttaaaaaatattactaaccaatcgtaaaacgccacttatagaaagtattgaacggtatccaataataatgctctaatttttaggctgcgcatcaagtttaaagtttcaattcaacgaattagttatgcaagaagagatattgagtttttcgtttatagaaaattatataaattattattttggtaaaaaatttacgtttattttttatatatatatatatatatatttatggtattctataaagaaacaagaaaaataacataaaagtaataggaaaacaatcaaaaaaacataaaaaataatatataaataacaaaaaatcaacgacaaaataataagagtacaatataaaaatacattaaaaaactttattttatgtaaataaaattttaaaacctgtaaaagtatttaaaatgcttaagatatccgtacaaaatttttttgttctttttgtatttttttttttaaattattcctatcatttccatacagtaagctttttttttttttattaagaaaaaaaatatcgatacagttagtttacttttatttggaaatatttgttagatttcttgttatagtattattaaaaaatgtacgagtccactagcagaattgggtccatagctcagtggtagagcatttgactgcagatcaagaggtcaccggttcgaacccggttgggccctttttaattgatgttctgtttttttttttttttactaaatatccataatttatatcttattttttaaaatatttttcttttgtgaatatcaaacagtcacgtttcttaatatatattttaatataataagttacctaatcctaatagaattcaaataagtcaatttaaactaacctttta

SEQ ID NO: 328951 - DNA, 675 bp, Cannabis indica
tttatctaatgacatcacgctagtttcaaaaaaaaaaaaagttccttatgtcttaatcaagatagataattattcataattttctaaatcattgcagtagtgaaataaaaaatagaaccacactaggtaaaactaaattctctagctttctaaatcattgttatttgttattcttgtttatttgctatttctttgttaatttattacattcaaacaatcaaattttgtttgccaaatagaatcaaaacttcaattaattagtaatcaactacactcgtgggattgacctccctctcttcagttttttttttttgatgaaatttcaacttcattaaatcaactttctgagtacaaaatgtctagaatagaaactggagcattagactcagaaataagacgaccagagagagaccgtgacattctagcaacagcatgtgctagacggtttgctgatcgtttaacaaaacgaattttaacaaaaggcaaagaaagcaaaagtgaaatgcaatcttgaactaaattcccaaacacagaagagagaggtgagcggcaccggatagcttggatggaaactaagctgtctgactccaactcaacatgttgccatccttgtcgtttgatccagcttagagcctccttgattcccatgacttccacaacctcagggccgaaagc

SEQ ID NO: 328952 - DNA, 1253 bp, Cannabis indica
gaccaataaaattgtgctacatgtacactgtgtacacgtagacattccaccatggcagttaacaactaaaaatagatagaagtgttaaactgctaaccgaacacgaatttagaagattttaccaccaaaattttagaattgggagtttgttgcaaaaacctggccacttaaagagattatgccgcaaattactcgaaataatatttagataaaatagagtactaaagaaagaatattgaatctttaaaaaaaaataatataacaaaaatatattctttttaaaaatagtacatcatgaggatagtcgttatagtgtgtcatcatctgaatgctacaatttcaatctcactttgttaggagacttgtatctccgtgacatttgtaagatcagggaaaacataagcaaagaaaagtaagaaaagacagagcaagagaaagagaggaaaagatagagaaagatgaagaagacaaaaaaattgtcttattaatgaattggaaatcgaatacagtttatatactttgatacaaacaactgaagagaaagacagtaaagagctaattaaactaagtgaaaaataacaaacttgactgctaattttactaactcttgacaatcataaccgattcccttatcacttctcctcaaactcacaattggagcagtcaacaatggtgagtttggatcgaaactaaggaaagtgttggctcgaaattaccttagtgaagacatctgcaagttgatcaggaacatgtttgataacaactttgttttgttgaacctttctcgaacgaagtataaatccagctctatgtgtttagtgcgtgcatgaaggacaagatttgcattgaacaagagtactgtactgagattgtcacaccaaataattggtggttgaggcagctatatgtgtagttccaagaacagggattgaagccaagctaactcaagaacaacatttgcaagacttctgtattcagcttctgtgcttgagcgagaaatggtgtgctgtttttgagacttccaggcaattagattcgagctaaaaaaatattgcaaagccagaggtagaccttcgatcatatatatatcagtggtccaatcaacattacagaatgcctttacttcaaaactgagagacttagtgagatgtaagccacagtggacagttccagcaacatatcgaaggatccttttactgtgatagttagtagtcccgtgatccgtaaggggaaataccgggtaagctgtgcaa

SEQ ID NO: 328953 - DNA, 846 bp, Cannabis indica
tttaattctggctccgcccctggctatgagacctttcatgtcagcatccctgacattttgagcattagaaacaacattcccaagtccaatctcaaatatagtcagcttaataaaagccagtcccaattctcttaatatttattccatgtcttgtttggctttgacaattgattcagcgtataaccacaacataaatggaagaaaagttcaatgaccattcttcattcaatgcaaaatcctaaagcttgaataaaaaaaataaatccattagagcagatccatgtgctatctgattataggtttgaagaatctgtaactgtataactcattagagcaaaataaattttccgtaattttgtttgtgttttacatttcctcttacttttatttgtcaatttttctattgtttatctaaatgttattggttggcttagtttataagacagaagagaggtggtaaatgactggattgaataacacatgagcccaagagtatgagataagaatcacaccatcaacaatatgcgtggtgagtacaattttattgcattgaatcatccaagtaaaggcaaagataaaaataagtttgggggttattgcttcaaattagtttgaacgtgatagttttaataactctgtgtagactatatttttggtgtagttcttatcatgctggcctgtggtcacaggtcggattaatacgcgcaccgtagaagatgtttttgcccttgacagtgccacatataactgaccgtgtggaaaaacgagttgtggcaaataaactccaacataatctaacgtttggccttgcgatttgtttattgtcatagcaaaacttaatcttat

SEQ ID NO: 328954 - DNA, 850 bp, Cannabis indica
atgtctcttttctgcttttctatccggccaaaaccatatgtttctaaaattagaatactttcggtgacaagccatgaatgtgaaatctaaatatcggacttaatcgaatataaggtgacacgccaaatattttctatggcacatcattttcctctcattatttatttattcacatatttatatataagcatctaatgattatgataatcaatattaataaggtcgttccagactgagttaaattttgaaacttactaagtaccagcaattcttatagtgtttccttgcgtttgatcttcgccaaacatccttgccatgccaaaatcggatactttaggagacatatttctatctagtaatatgttgctagcttttaaatcacgatgtataacttttagccgagaatcttcatgcaaatatagaattcctctagcaatgccttggattatgttgcaacgtattgaccaattcaactgggactgtatcttggggtctgcatatcgtgaggaaacatgttaacaaaaacacaaaaagtagcagaagagtagggatattaattacatatttattccatcccaaatagtaaaattaatgtgtgtagctgtaataaccaaataaaaaaaaatcaaggcttttgttgggaacgtattcatagacaagtattttctcatctcttcccaggcaaaatcccaaaagccttgccagatttttgtgctggagcttggctaccagcacaacctcattcttaaactctgctgcgccttgtcctgagcccttggacagtctcttcacagctattctcgtccatctaaaagcactcctaaaaaaactagtaagaaaaaacaatagc

SEQ ID NO: 328955 - DNA, 1020 bp, Cannabis indica
ttttgcaggaaatcctaactctgtattctatgtttctcttgaagaagaggaaatcttagaataatattaccagagcttcagctgtctaggttgtgatcccccctttgtatagaaatagaagagtatttataggctgtaaggcgaatatggacatgctcatgactagcctagggtttctgcaaaaagtccactgatggggtaaaatacatgcaaaaagagctcactgttgggccccttagaaggatttgtgctcgtgcattgcaacaactggacaaaaggggaccaatgtacgtagtggacgcgttttgccaaaaggtttaaccttgaaaagtaaatgtctagaataacagtgtggcaaaaaggtgtatgaggtgggcacactaccatgtccgaacacagctaacaagatctaatcctgtgttagaaaaaacataattgtcgttgggcgattcaggtttgtatccaaggtagacgtttgcgatccttttgggcggtcagtgtccacgataggcccttcgaggacccattcgggtatcacttgggcagcgtttgatcttggaccactcgagtcttggagtggtaacgagtcttccacctccaggttgagataaggtaaggtggatctccgcatacttttttagtcttgaccttttcccgaatcagtgaagcttcttcgtgacttggtttaactgaggagttttaattagtgagatcgtgagattatttcttccttatacatcacgtgtcaactgtttaaaaatacaaataacactagtattcaacaaaaaaaaaaaaaaaattattatttattttagtaattatttaaaataaaaagtttttaataagagacaaaaaagtaattgaaaccctcaattacctttaattacacaatacataagggtgtgtttggaagtaactgtgaaattactatatagggtaattactagggtggtaattacacagtctagtaattatactatatattttaaaatacaaggtgtgtttcgatatgaggtggta

SEQ ID NO: 328956 - DNA, 642 bp, Cannabis indica
atatatatcactataaaaaatttaatttttaatcacaacaaaatttataactaaaagtaaaaaaattatgactaattataaatcattattcttatgttgcgactaaaaagtccgtggcaaaagacattagtcacaaaaatcataatttgttctgactaaaacagtacttgttgtgactaaaattaaattgatcataacttgtatctaaatattatgttttagttaaaagtaactttttattgtgactaaaaatcacatttagtcacaaaaattttatattatgattaaaagattatcactaaaaaagtagcttttttgtagtggcagtttatttatatcgcaggtccttaaaactatataatttttggcaagttagtccccaaattttattttttgataaattggtccccaaactataagttttagcaaattggtccccaaattttattttagggcaaattggtccccacacttttatttttttaataacattaagtccccactcttatattgacatttttattgaaaatttaatttattttttttttgtattaaattcaaataattttattttttaatattaatattttgataaaaataattatattaataatttttatatttatttttttaagtattcat

SEQ ID NO: 328957 - DNA, 833 bp, Cannabis indica
ttataacaacagaaacatatgtattaagagtatatataccaatattaggctcaaagaacctgaagagatagcaaaagaagtgtatataataaataaatatatataaagaaaaaaaaaatgaaagtgaagaggatcacatgaaacgtgtgaagcacttgagaaaaagttaggagggaaagactttttagttatgatttgtacatatagaatttaaagtaaggagaggaaagtttgtatgagcaaaaatataaacaaatgaaattcatgtattggggggatatttgaagccaagttgtacttacacttcacatcatcacctttcattaccaaaatataaacacaaaacaaagccaaaccaagcactccatatacaaatctgaattgtccttctcaaagctaaaaattaataataatactaaataataataagaagaaaacacacatgattttaaataataccaccaccagtgtctatgaatggctataactctccctctcctccatatatattgcccactattgctctcttcaataatacgtagatataatgtgtatctttcttactttttagttccattcacattttctttttatgaatatgacccacctttttcttcttttagaaaaatcggaaaataaaaaaataaatatcaatgactttgaagattcatttttttaatttataatgatcttactaaattaccatattcaaacactctttctcttattttttttacaagtagaagcaaatatatatctatatatattaatgaggctacttaactatttttttccctgaaatttgacatgtactaaattatatctcctgaatt

SEQ ID NO: 328958 - DNA, 896 bp, Cannabis indica
aaattaatttcatgctaaacatttttataacttcatatagatgctcatgaagtgaagcacagtggtgttgtttggaacaaacttattatcccaaaacatagattcatcttatggtaggtttgcaacgttcatctcctcacccgagaccatttatgcaagttcttgagcatatcctcaaatctctgtccgatttgcaagaatgaaattgaaactcattctcaccttttctttgattgtgtttacgccaggaaattctatgctgaaatcggtagttggttgggttatgtgaagtggccggttgacataagtaatgtccagcagtggtgtaatcgaggcccccttgacttcaagaatcgaataataaatacggttttagctgctgcaatttacatgatttaaaaaaaaaaaaggaaatgggtgtattttcgatttagcttgcacctctcctcttaaattgagaatggaagttaggaaggttgctcaaactagaattttgagcatggcttgtagaccctaaagaaaagggagatgtatctaattaatgtaattaggtcttggtagtggcttttttttttttttactgttgtgttgttagcagtctctagttggctcgttgagcttttgttttgttttcacactgtttgtattgctcagttttgaataaaattccttttgttcaaaaaaaaaaaaatctatatatacacgtttaggaatttttttcatttattattattattattattattataaattaaaatagaaattatgttttagcgtatagaaaataaaaatatatattttaatttatattttgtagaatatttaaaaatttaataaaaattagaataataagagaattgaggagagaaaataaatagatgtatttagagtaattt

SEQ ID NO: 328959 - DNA, 1275 bp, Cannabis indica
tctctctctctctctctcgcattatgaatttcaccttcatcttctttgtcttttctcgctcctattcttctcaatgggaagtgccgataggatagtgggcagcgccgatgaacgggatcaatggctccaatgttgacagatgtaggttcgtttttggatctgagattttttttcaatctgggtttgttactttgtttcttccgtggatttgagatggaggtatttgtttgtttgtgtttatgtgatatcaatttgtttaaatacttttaggtattttttagatctgggtttggagcttcatatgtatatatatgtgtgtttgtttgttagattgtgttttgtgaaaattttatttgtgcgatttgggtttgaaaaataagttatagtgatggtgttggtgagtagtggtggtttcggtacctgtattgatagtggtggtggtggtggtgatttggtctgtggatggtgatggtggtggtgatgttatgaattgcgaaaatgattaagaaaaataaaaagtgaaaaaaaaaaaacgaaatgttagagacataaaaatatgattggtaattaggtttttttctgatttttatatgttttaaaatgatttattttaaatattaaatttatttattttatttttaataattatatacgtagatcaataaaattgtgccacgtgtatcgtgtatacatgtggacgatacacgtggactgtcattctggcacttaacagttaaatttggatagaagttgtaaattgctaacggtattgtggtttggggggttttaccaccaaaatttgagttttggaggttaattgctagtgaaataatagtattgggggttttgccacaattaaccctttcttatatgttgtttcattttccaaatttaagtggagagggaggcgattttcagatttttgccatcccatttcggtttatgaaattagttcgaaagatttatcatcgtctaggtgagctttgattgggtttctagttggtgttttgtgcttctgcattttttactttttttttcctatttcaggtgagctttgattggttttcatggtggtggtggtcttattgaggtgatggtggtttcgggtggtaaagggagttagggttaggagagagaaatatagagaactgttttgactgcaacttaatataagaggaattgagcttcaaggaaggggaagagaggttgttctttgagcaattaggtgagagagagttgtaaataagaaaaaaaaaaaaaaaaagttgaaaagaa

SEQ ID NO: 328960 - DNA, 957 bp, Cannabis indica
gtatttatagtggtttatcaaatatcaaatatcttcattaatttagataaaaacaagtatatataaataaatatatatatatattcttaaaaggattatttaggtacaccttttatctgtttcaacatcaagaatagtttcttagttctaatttttttttttttttttttttttatagttctattcgtcgtagttatttagaactaccttttaattttcaaaaaaattatgaatagttcacaccgcaactaccaccacaaatgccatcgccaccacaaccaccaccacaaaaaccatcaccatcacaaccacccactgcagaatccatcaccattgaaaccatcaccaacgcaactacaataactgcacaagccataaattgaaatacaagttttaaatcttaatttttcacacaaacccaaacataaacacaaattcatttctaaaatgattacccattaagtcaattagtccacattaatgacacacgcgcgatattatttttagtaactagttccatggcattaaaattcaaactaaaaagttaagagctcaaataccatagtactgaggggaaattgtaaaaaataaaaataattctaagagtaaataagtaatttcaagagataaaaatgataaaaagagctgatgttgtaatatgtcaggacataaagagaaacgcactgtttcactaaagaaaagaagtagagcaggatgcttaaagacagaaaagtaaatctctgaataaaagagaaacagagcagagctcggaaaggagaaaaacataaaagattgaatggacgtggacaaatcaaaacgggaaaagagaaggaagcgggcattccttctcacctataaatagaagatcccatcattcaaaaagcatacatattcttgatcacaccagactagcgaaaactcttttgaaatacacccttaaattcacacttgagctca

SEQ ID NO: 328961 - DNA, 560 bp, Cannabis indica
atcacggtttttaataattaattattctattagtattaaactagtttataaaatcacacacgtggggttcctatagattagagtgttacaactctcattcatagacgacagaagtcgaccatgatacaagtaatcaatctttaacctcccaattcaagaactttggattgaagatctgagcagcttaatcaccgttcgtgagaagttgcggtggaggagcaacattttgaatgaatctttggactcgatttcctttgattgcaatatataaggatctattgtttccaaatgagaaaattgtgattggttagtttctctaaaagtgtataattaaagtatattggagactgagattgctttgtcttgtgagtgtgattccatatagcagtataggaacaagaattggttgagttgcagcaaaggcagacgatgcattaccagcaccagtgaggtgtaatatcgttatttgtgtaatttaatatcatgcttcacttattttattttaatgaaaatttatagagaatcgctaatcaattataagatgacacctcataatcaca

SEQ ID NO: 328962 - DNA, 526 bp, Cannabis indica
ccccaacaccaactacgagtcaagtccgatctgggtttggttttgggtccaggtcctaggtcttgggtctcgggtcttggctccaagtcgcgagttcgggtctaggtccaagtttgggttcagatccgggtccaggttcgggttcgagtttgtttctgggtctgagtctaggtcccaggtcgcggtcttgagtcttgggtctcgggtccaagtgtctgggtctgggtccggggtctaagtctggggtccgagtccgagtctgaggtcctggtcctgagtgcgggccccaagtcgcggatcttgggtctcggatctcgggtccaggttacgagtccaagtccgggtccagggcctgaggtctggggtttggaactgggttcgaggttgggtctcgggttcgggtctaggtcgaagattggtgatgactctgaatcctttgtaaatattaatacaagctaatacagattatttgttatgtattaaataataaaacatacattgtattaaaaaaattggtcgtaataat

SEQ ID NO: 328963 - DNA, 477 bp, Cannabis indica
tgtatggaccatgggtgagatttagtactcaaataaaacattgctaaaaaaacctggataaagaagatgttgaatgtcaatttcaagctttgaaccttgagcatgaggttgctaacaatgaggtcgttgtagaggaactagcaagagctccaatactgattgtgatggcggaagaattagagcctttgggccaaggtcttaactttgaaccggctcttgttaggattcctcatggtaaagaaagaattaggacggaggtggaggtcgctctatcgaaaaccttggtgctaggcacgaggctgaggaatattatgggggaggatgagaacggtagtaatattatcattttttgtgtggacactcaaggacagaggtacaaggctgcagttacggaaggatatagtagtggggtgaattcctcatgttcaatattggatgaggaggacgtggttgttggaatttattttaccaggatct

SEQ ID NO: 328964 - DNA, 1012 bp, Cannabis indica
atttgatagctatccttagttcattctttgaccttggggaagttatcttggcaattttacttgatatgcatgggtgctgcccaatgaatcactagtgacgaatagatgacacctgggtgatcactagtgcacatgggtgtcggtggacttgcgcatgacacatgtacatgagatattgacttgcggaagcatcccaatcttattttgggagcaaaacaagactgatgcctgaagcaaaactactgtttgaaggacagaacacagagccccaggctaatgttaacttgggcacccagtgtgcttgcacattagtactaatgcctggtgatgcttgggggctaactcactacttgaatgataatttctcctgattcaaataatcatatcttgtttttggagcaaaacaagaataatgctcaagacggaatcacaatcgggtcgacggaaccaccaaaagtgaggctatgtcaacttgggcgtccagtgactgtggtgctgtcatccgtgcccaacttttcatattgggcctagatggatttttttgcttctaaaaagtactttttctaagttgttttttttaattaaagtacaatatttttataactttaaaataatattttttaaaatttaattttgtaaaaatataaaagaataaaattgtaaaaataacacaaacaagtatttaaaagagttattggcggtgaaactcttttatatttttattttatacatttaatctctaagttttttttggtggcaaaactcttttaattttattttttcttgtaaattttgagatgctagttaaatctcaccgttaatattgacttttgaaattttaatgtgacatgtacacatatgtatatttatgtcattgttcagtaaaaaaacaataaaattttaaggaataattacataaagtactatttttgtaaaaaaaattatatttttacatttactgattttttttttttttatattttttaggattttctataaaaacaacaaaaaa

SEQ ID NO: 328965 - DNA, 1135 bp, Cannabis indica
atgcaaacataaattataaattataaaatattactagaaatataagataaaatactaaataggttcccatcggggcggggagtgtgatactcgtcctcgccccgtttaacattcgacgacaaaaaataacccccgtccccgcgccgttccccatttagacggggaatccccagggcgggtccccgcggggccccatccccatgggggaaatgtgctccttactcacaacagtttttctaaaatagagaaattttaaaaattctaaataagcatactaaaaatattaaaaacacgttacaacaaatattttaaattcatttttcatttcaaagtttctttaaaatttattgttgtacatttacaaaatattatttattactctaaatatgttttattaatttttattgttttgagttttaataattatttttgtatgagaatgtgtgtacatattaacaaattatatatttaaaatgaataaattattggtgtgctatgtggttaaggcatacgaataatcatgcggtaatgattttcacctaaccgcactttgtgagttggttaagtttttcatcaattcaccgttcaaacttcaacccacaccgcgctcacccctcatctatctacaaataacttaattaaggttagggataaactaaaaatggaagtgaatctaacattaacattatgttattaaaactgtatctaaaatcagaataatgaatagatcgaaaatctaaaatgatcagaaagtaaattttatggttgttgacctcgtttttagccaacgacagtgagtctagttttataagcggcaagtagtttaatacgattgaaatattgtaaagcaaataaagacacaagaattttatagaggttcagccccgagcagttcggtaatagcctaatcctcgttatttgtattgacttaagaataaggagaatagttttttttcttagagttcttacaacagtatctctgaatatgaatgcttagacaaaatctttccacctctcgcccagtgaatacgagtcactatttatagggctataagcttggagagaaagtatttcccttctagttacaattgatataagcagaaagattgcatagtaaataaagaatacactaatc

SEQ ID NO: 328966 - DNA, 754 bp, Cannabis indica
gatgagatgactaatcaattatgttctaactacacccactatataaatttataaataatttacaaaaaggttctaactatattatgtgcatgacttatattaataagtatttttaagattacatactactactttgcattttttgaaaataaaatagtaacaaaatcgtatttaaagtactatgtatcttttaatttattcctacaatttaagagtaagagaatttaattattaatttattcctatcaataatatatagagctaattatgatttttatctcttaatttttacatgtattatgccaccatgaatttttttaggttgttaaaatttttactcgaactattgaaattgttgaatttaaggagtacttctgtcacatctgtttaattttaccaatataatctatgtgttaaatcgtgtcctctgaactttgatatctatcaaattgtactccctaaacttcgatatgatgcaccaatttgtgttccttggaactttcatccacatgaggcttcgttattaaaattagacaaaaatccttacaatcttattagttcggagatatttttaacggcataaaacctaattagccatatattttaacatcttatattttaaagtgctgaagttctatatatattatttaattatatatataacaacatttataaaacttaataattaatacaaaacatattcctagctaactaagtaatgttctctctcaaaaaaaaaaaaaacgtaaatagt

SEQ ID NO: 328967 - DNA, 503 bp, Cannabis indica
atgatcgagcgtgacatttgaaaaaattctacaaggccaaattaggaaatttttagatttttgaaacaggttaaggacctctacactaaaaattagtacactttagctgaaaaattcaaaataaaggttaaaggtcgcaacaatgaaagtttttaattgctctgataccatgttaaaattataagatgcatagggttctatatcaaaattaattgacaattagaagagtagctcattcatatcttagatatggtattatttttctaaatattagtgatgtagaactattatttctaatacatcttcctcatgtttggacctaaatgaatgtgtaatgaatgatatttaagatacacaaggccgaacgtcatatttgaataaaaatagaaaatttgtgggttatttgttgattttttgaaacatatcaaaaatctcaatatgttagaatttaaaaatctatataataataaagtccataatattttatctcaaaattaattagt

SEQ ID NO: 328968 - DNA, 913 bp, Cannabis indica
tcccaaaacttggaagtaaatttgggatcacaatctgaaataattgactttggggcaccatggagtctcactatttccttaatgtacaattcagcatactgttccatagtataagtcactcgcacaggtaaaaagtgcactgacttggtgaatttatccactatcacccatatggaatcatataacccagtagtcctaatcaaccccactacgaagtccattgttatatcttccatttccattaaggtattctcgagggctgaagtaaacttgccggcctttgatgttcagccttcacctactgacaggttaaacactttgaaacgtattcaacaatatcactcttcatttccagccaccaatatattgccttggtgtcatgatacatcttcgttgtccccaggtgtgaggaataaggagtagtatggaactcatcaaggatttccttcctgatctagtcatcttttggaacataaattctatcgttatatctcagtagtccacttggagccacagtgaaattctttgtagcgccaatctcaactttctttctaagtttgatcaattcgggatcattcttgtaataccctaagattaaggaatcagattagcaaactctaactagttaaatgtgtattaatgtggaattatattgttatttaatatataggaattatactgataaatgacatgttaagaccccgttggtgagccaggagaatttttgtaattttgttccgagaagggtaacactgtactttttaatattatagcattcttatggactatattattatatagtatatttgttttgtttttctgcaggtattttctgacaagtcggggtagtatagtcacaatcgggtattttagaccgaaccgggttcggggcccaaaatacattttcgggatt

SEQ ID NO: 328969 - DNA, 1114 bp, Cannabis indica
ccaaaaaatgtcattcaacacgatcaaaggccttagccatgtcgagttttaaacagcccaacctctcttaccatttttcctagagttaatagcatggacaattctttggcaatagaatgttatcaaatataatacgcccagaaacaaaagcaactttgaaagggagagataattttgtcaagaaaccactttaagacgatttgcaagtactttagagataactttatacatagtagtacaaagacttatgggccaaaaaatccttcaaagaattagcatgatgttcttagggattaaagcaatgagagttgtattagtatcagagaaatcaactccattatttaaataatctaaaatagcatggacaaagctagcaccaagagtgtcccaatttttttggtagaagaaagcattaaggccatccagcccaggggctttgtccccagagaggctaaaaacagctttcttcacttcttgagctgtgaaaggttgagccataaaatcaatgtcaggctcattcagtgaaggccctaaacagtccaagatttgattagtagcctcagcatcacacccctcagaactaaaaagattggtgaaaaaagaagaaattatatcaaacataacctcaggatccttggcgctattatcaaaatcatcctttaagtatttaattgtattattcttcctcctatgagaagcaaattgatgaaaaaacttagtattcttgtcaccagcttgaagccaattaacacgagatcgttgtctccaataaacctcttccatataaaggagtgcatcaagctgagactgaagatacttaacacgaaggctagactctctactattagaggcagaagcctgaattctggcaatctctctttgagtatcttggttacgaaattggaaaataactttagtagattttttctaggattttaaagcagagacacaggaatcttgacaaaagagaaactgactgagagccttttcatgagaggagatactagaggaattcaaccaggagtcttgaacagtggtgtaaaaatgagggttatcaagccaaataatttcaaactgaaatcttttcctaataaaaggattgttagagacatta

SEQ ID NO: 328970 - DNA, 602 bp, Cannabis indica
ttttaaaaaaattaatatatatactaaaaatataacttaagtatctacagagttccaaaaatataacttaggtattatcactgtcaatattttctgagtatctaagagttcttatcccaatcgtatcactttgggatcttgctcgtagtagtactcctcgtcgttttcatcatatactcgtcctcaggatcttcgttgtgattttcttaattatccttgttgatgggttcttcatcgatgtgttttccagattgtgaatcttttcaagcgtatcaaccactgacttccaaagtttctctgtctcctatagtactcgcatgagtgtgtactggaggaggcccatcaacattatccataacaataacttcttcaccctcgcgagtagtagatttcgaggtgggttttttagtagccaccgttattatagatgacaaccttagtaaagaatctttcttcaagctctcaatattagcactaaaatatttaccgagttacttagaaactgattataaagtaaatagagtttaaggaacaaacaaattaaaaaagaacaagaccaatatttttacgtggttggggcattaatgagtcttagtccatga

SEQ ID NO: 328971 - DNA, 1007 bp, Cannabis indica
ttctaacagtcgaagcttttataacgggactaaaagtctcgctgaaatcaacccccggtcgttgcgtgaaacccttggcaaccaaccgtgctttgagacgctgaaatgagccatctgcattcctcttttccttatacacccatttattatcaatgatatgcatgtgaggcagtcggggtactaacttccaggtaccatttctggccaaggcatggacttctgaactcattgcattattccaccctttgtgttgaagagcttcttcaattgactggggttcactgctgttgccgatccatttggtctgagttaggtaggtttttggcttaaaaataccggccttagctcttgtgatcatggggtgcgttgacacgacaactttgagattatgatcactggctgaagtatcaattggatcggctgcagattcaagagtggttgtatctgcatgttgctgaatttgaacatcacttatcctgtcaatattaccaaaatctgaaataacatggtcagtatcatttccttgaaatgtgctaagatctggaacaactcgagaggtagttggggtgccatgatcaacttcatcagtttgattgtttcctatagaggaggagaaatcattttgtgaaggagactggctgtttacaaacgaagagcctgtcccaaaaagggactagaactgatacaggagtttctggtttatttgtattaagaaaacctgacttgaagggaaactcatcctcattaaatataacatcacgagaaatgtacaaccgacctgtactggagaggcatttatagcctttgtgcttgtcactatatcccaaattcacacacttagttgagtgaaattggaatttgtgattttgataagcacgaagacaaggaaagcatgacacaccaaacactttcaagaacttataatccggctgttgtttaaacaatacctcaaagggagttttaagtttgagaaccggagtagggagtctatttattaaatagacggc

SEQ ID NO: 328972 - DNA, 564 bp, Cannabis indica
ctaacaaaacaaacacacacatataaacaaaactctcagatctaaaccccaaacataaaatctatttctaaaagactgagaggggaaaaatcgtgactgaaagagagagactctgatgaaaaatttacagcagcgaaatggggacgaaatttttggtttggggttttcgggaggtccggagttcgatggtggccggagaaggcacaatcacatttgtctaagagatcgtgagtggagaaatgcaaaagatgatcttcacggggaggagcagagttcaacgggttttcgttgtggaggagaaaggcggtggtggagagaagaccagatctgagttttaaatctggtttgatttttttttctgtgttaacagtggttattgttgggttttgtgccttaaataaattccattacaatctgattagttatcaatttagaattttgaagtgatttatgattacatgtatgttacatgtttatggtttaatatatatatttgatatatgcacaaagtcagttaaatccaaaacatatagttattcacaattacagtattatcaatacagt

SEQ ID NO: 328973 - DNA, 642 bp, Cannabis indica
aattgggctgggtgatgtaaattattaaaaacaaatttaaaagggtgccgcgggattcgaaccaacatcactttagaatgtatcatatgcatcaattaaccaacctaaagacaatccttgctcatagtacatttaagtttaattaaataaaaatgtaatggggccttttaatttttattttggggccctcaaaaagtgtgagtcctaggcacaggcctagctcgcttgtacctagagtccgtcctggattacatcatatgtgatataacacacacacacacacacacacatatatataatatcatgaatcatgatgaaatagaagaagaatagaaatactcactcacaacttcaagtgtagtttagtcggaaccaccatgacttggatattgtataacacctttgtctaaaagtgaaagtgcaactagtagattttaatgattcaagttatcaagttgtacatctttaaattgatcgatttcaagatatgagttatgaacaagaattaagctttaagcagtaaatcacacatcaatttacaagcttcacctgcactgagaacacatctcagccgagtagtgcttgggttccccgaaccagggtaaattcatccactatcaatcaaaggttcatattacaatt

SEQ ID NO: 328974 - DNA, 643 bp, Cannabis indica
ctagctaatatttttataaagttgataaaaattttcgtatgcatatattctaatccttaattaatttagtagggaaaatagcattgtatggcataatatttgggaagaaaaaaaaaagcaaatacaaagccaagaacaaacaaaaatgtttgtacaatatgcaatacaaacaaaggcagaaaaatcagccacaaaattttcaatcgacacgtgccgagtcctcagccatttgccagcagcaccgctcccaccagctgcaaatatgaaaaatctactaaatatgtcttaacaaaaattatctatacttacatttctttaacttctaattcgctcaatttctttccctatgcggaaaaaataaggagccccgcaataaatttatcctttatatatatatatatatatatgttaatttaccttaagggctaaagtggacatagtttgggttcaaatactagtggtagtagattataatttaatgggcaatttatagttattagggtactaccatgtacctcaaatatagttcataaaactgacaatcgtaatatgttccagggccggccctgagggtaggcgggctaggcgtgcgtctcgggcccccgaatgctaagggctccaaaattgtgaaaaaaaaatatta

SEQ ID NO: 328975 - DNA, 537 bp, Cannabis indica
ttttttttaatatttttataatttttttttcataaatacgaatagttgtttttacgttgttgttacttgttatattatattatgttactgcaatataaaaaacatttatttttttgtaaaaatgttactaaaatatctataaatatataaaaaaaaaatcagtaaaaatatgtattaaaaataatttttaataaaaatataaaaaaccgcgattttaagtaatttgtgtaaaattttcattaattatctttattttttcatataactcatttcgataaatatatatattgcaggaaaatttggtaaatatatttcttccaacatgaaggtataaatttatatactatacataggcaatgaatacattctaatattttgtacttgtggcaatttttatttgattttttttaggggaattggtcctaataaaaagttacaagtacatgggaaggcctcatttttattctaaagcttagtatctcctttaaccctagagagaattcagtaagattagctaatttttttttttttattttt

SEQ ID NO: 328976 - DNA, 954 bp, Cannabis indica
gagaatgaaaattacaacagtgttgaccaagttaaatagttacatttcttttcttctatttgcagacattaaattgacttaaaaactaaagtctagtatataatataatgccaaacaaagaaaataaaaaataaaactgagagagatagatcgacttaaaaactaaatagagtatattctgcatgcactgcatatactcttcttgcatttactcatcattattagctagactagaaagaaacacataatggaaattggagaatgcttaaacaaactggtaacaaattcaatctgcaaggtacattcatggactccacttttcaaaccttactctttcataaatagttcttgtggaaaagaacaaatggatgatcttcaacacacctggaaaaacatgctagaggtgggtgtagtcatcaaacttgtccacgatctctatagaggtattaaatttattttatgtctatgttggaaagtttgattttggtgaggaaaaaaaatgtggtgaataaacataaataaataaaaaaaataagttgagagagataaattgaggagttaccgtggtgtcgtactgccgtggtggtgcgttggggctgtgggcgacgacggaatgaagcgacgacgtgggctgtgggcgactcgagcggacgaaatcatggaggaggaaagcccgaggtcgtcgtcgatccctcccctaggtcgtcgtcgaccgtggcgtgggttgtggctggtggacgcattgtggctggtcggttgggtgtggggtgagatcgttcgtgactcgtgaggtctggagtggtggaggctgaatgattttttagtgctgctgaaaatgtattgtaaatgatttagggtttttaatttttttaattaataatttaatatataatatataaactgtaataaaaaataaaaatatataatatatttatctaccgggttggcgggcgg

SEQ ID NO: 328977 - DNA, 803 bp, Cannabis indica
tcctcatctcttgtctttttaaatctatctttgtgagaagagtgttttatttgtaaaaatttagagtgttcaactaggttttaattttcttgttatgatctcaatcatatactattcatagaataggttgaaaagaagctttgagcaagcgtgggtcttcgggagaagatttttccaagtttcatatcgagagaaagtgagcatatatcttcaagagaaaatttgtttaagccttacttcgagaggaagtaaacacacatcattagttgaagggagttcgctatttggtgtgtttcagagatcagattagcaaaattgattacaaaggattgcaacaaagctttagagaggcctaaacttgtttaagtcaattgcatttgaaattatttgagactttactagttgatttattttctggacatggccccgtggactaggaatattcaaaagaacactaataccacatataattctcttttgtcaaatttttaaattctacactatttatttatgtttctgttttgtttctacaaatttatattctgcaacaacaagtttctatttactacagatcgtaacagttagaaaaatacatttttcaataaggttttgttatattatgaacatattttcttgccattaaagtgatattaattaatcaatcttgataattttaactatctccataatatttttcattacaattcaaattaaattccaatattctgagatatattttttttatttaaaatatatttgttgcccctgatttcgcccaatatacgtggaccaaccggacaggg

SEQ ID NO: 328978 - DNA, 561 bp, Cannabis indica
tttatatatttctttgagtgttttaataaaccctaacactcaccactcaagaccatagacattttattttatttatgaaaatataattatatatttaggggaaaaaaaaacttgcattgctcattttcaagtttatttttcaattggaagcatgattttttattgatcatcctctttttttttttatcttatcattatatattaataatatttaataaaaaaattgttattactcttaaataaaaagagtggtatttacaacattgattgaagtgggtgattgacattattaacaaattaagtgaaaactctttaaaaaaatatgactacaaaattaattcttataattatcttaccaccacatgacagaatactaattttgtattatatataaaacatgtatacactactatgatgtaatgcaacatacatcatttatttatatttatcatttttcactctaattcacataacaatatagggaatgggatatgattttgtcccgttattgtactttcacggattgtaatctgtgatgtacgacagccgtcagatgagaga

SEQ ID NO: 328979 - DNA, 1146 bp, Cannabis indica
gaaaagctgtggatgttatatggcaaacataatcttttaagtgtgtaggtttgatgataggtctgccacttttcgattgtggaagtggattattatctgatgtagtaatttttttattttgattactgtcatcaggtatgggttctgctggtgtggattgttcagcagggatagtgtttaatagttgagaattaataggtgacagtgtgatgtttggttgttcatcagagttggattttgtagagttgttgtcaacagtaggagctgttttaatgagtggagcatttgagatgttgctcgatgtgttatcagcaacagtaggggctgttgtcatgttgggggcatcgaatatgacaccagatgaaggtttagcatgctgaattgctgctggtgtgagggatagaccagaaatctggttttttgtattgattacagttgtatacaccagttggtgttgtgtgtgtattgacccaagatatgggttgaaatacaggtagacatggattttaaaaaaagtgttgatgttagaatgagagatgttggcagtgagaggaaaaatagtctcataaaaaacgacatctcgagattggaagatttactttgtttcaatatcaagtagatcataggctttcataccttgggggtagccaataaaaattgaagcacgaattctaggtgaaaatttatgcctagtagatggtagagtagaagcataggctaggcatccaaaacaccttaggtgttcataatgagggggttttttgtgaagtgtctcatatgaagtgttaccttgaagtagatagaaggagttctattcattaagtatgtggcggtatgaatattaatatggccaataagggaggagtaaattggattgaaagcaaagagttctagcaatattccaaatgtgttgatgctttctttccacaacagaattttattgtggtctctcaacacaagaatgataatgaacaatacctttagaggcatagaaagaatgcatgttgagttctttagcattgtcggaacgaatagcttttatgggtttcgaatatttgtgtacaaaccatgttatagaacatgagaataatagattgcacatcagatttatttttaagcataaccatgtaaagcgagatttgtcat

SEQ ID NO: 328980 - DNA, 797 bp, Cannabis indica
actaaattccaaattccaatcccttcccatcttaattttggtagtaataaatagggcattgttataggtaatagtggtgtctagcactacctaaaggtggtgccttatgattagttagctatttttttaaaaaattattaccttaaaattacatgagattagatgtttaattttacccatatatataacattgacaagagtactagtcactagacactatttgtattttttagtatttttctaataaatagtacaagtatttattgttattatgaggtggcatactaagtgaatgacacgtggaaatccaactatgatggttgaaccagtttgcatgcatgtaaatcgagaatcgcatgaatctaaaattttagagcattgctattaggcaccacttgtgtcgcgttgcaattggctagcaatactctttaaaaagtattatattaaattatatgagacccgatacttagttggactaatagcgatattgacacatagaagagtgttaggcaccaccgatgtcctttaacatttctcaaattttatagccttatagtctcgtaggccacctatatgctatgttggacctaattaatacatttattactcttaattttaacacttatagtagtttttgaataatatatctttgtacttttaaaggaggccctgagaaagtagaggcctagtttacggaggagtagacccatatagaagcgagagggtgattgttcccctaaaaataaaaaaaattaacaaaaaaaaatgttaagctctttataaactttaaagctatc

SEQ ID NO: 328981 - DNA, 546 bp, Cannabis indica
atgccgctatttaccctataatatatagaagagtttctatacaaacctccaaaattttactgggactttcttttgttattgtacatacatatttcatatttgatcttagaaccaaaagaaatataactatactccatgtgtcttcatatctcttgtatttttattatgaattagtctttttctttttatttattttttggaacgaattaatcttaactcaacttatttacgtaattttgaaaacatataactctagctctctctctttcttttcgacgcgaacacattactgtctttacaacttttattattgtcgtcatgaaaatgacagaacgtgtaatactgatagtataattaatatcattgataatatatttttttaaaaaaaaaaaataaaatgataatatttaagaattatcattcatacgtacgttaaaatgaaaaacaatacgtaaaacaaaaaataaatctcacagtcctgtttcactataattttttttttgtaggatatgtttcactataatctatatatatatatatatatat

SEQ ID NO: 328982 - DNA, 1058 bp, Cannabis indica
cgaaaataaatcgacattttaaatatctaactaaattgcttcactatttctaaagtactaaaccaaaataaaatgactctataggccatatgttgcgttccactgttaccgggcataaaatatgaaaatcataaaatttcacatataacataattaacacacctagaattaaaatatatctctatagttatataaataataattaacagtctagctaatttgaattaaactctaattatcggctaatttttaaaataaagctaagcgatcattacatttattgtctatgggagtttggagtcaggggacggtggcattggcagtttgtggtcgacgttgtggtgggaggggcctgttggatctcatttgaaggagtgttggatctcgatacggttgctgaaggcggaggtggctttgaggtctagtgctggcttcattggggtgttaggggcagttgtgactctacacgttggggattttctctttccttgattgttgactgcagtttgcctttccaatcttgagcactctttaggggttgcaatcagaaaggggaggatgcgggtttgaccccgagggaagtgcaccctcgtgttattctatctcatgctttgggttgttcctgttgggcattatgctattgtctcgatcatgttgtctagttctttgaggttttctctttttgtaggtcatcgagtattttttttcttactttctatgtaataaatgtatttcgcaccctatcttctgtgatcaatgttagctttgtgtcttttcttgttgagatttctaaattgtgtcagtgtgggatacggttgttttggccatgcattttcgctgtgagttctatgccactttgttttagcttgacctttgagaacttgttcctcctgttgaatgtaattcaataaaaaaaaaagaataatttgaaaaatgaaataaaaatagagtaatttgtggataaatacctaagtttagctctcaattataaataaatacctaaatttaatttttggcggtaataatacctaagttatatttttagaaatctgtagata

SEQ ID NO: 328983 - DNA, 1089 bp, Cannabis indica
aaattaattactaaaattataatactgtttttcttaacataacaatttattatttttctaagacaaatatgatattatatatatttttgtctttttcttgaattcattcactttaagaaggattgaaaattttgagtctagagaaagaaggtgtcccctcattttaagttatttgttagagaattttgatagtttattatttatttttttcttgaaaattctttaattgatgtttgtcgtataactaatttcaaaaaaaaaatatgatcgatactgaattagatgtgaatgcagccaaagttcataaactagttttggatggatgattttctatgtttatgtgcttaactctaattatttttaatgaagtagtggttttttttttttaaggaaaaaaaaaaaaaacgtacacgtggattctcattttttagtcctcataactaacatttgcatttttagtgcaagctacgttgaaagttgttttagtagattaagttttctaaaaaataaaataaaataaaaataaagtttaagtggcaacaatgctttatttatctcacaaaatttataatatttctcctctacccaacaacaaaagaccccacaccacctgataagctacttttatgtagaagcatcaaaatgggtaagatattgtttggcaagaaaaaaaaaacattccagagtcttgagtcattgtaatcgacgtgggaggggtccatagtcatgcgcccaggttgacctcgagaactccgaaatagatgtttagatccctccaagttatttttaactcaccatccttcagtattatgaaccaagaagacaagaagaatccaagtctaaggcctgaaaattgaaaagatgcgaaataataccccaaaaagtcaacccaagcgcctagggttttcacccaacgcccaatttgacatttccgactagggttttagttttcgagtttgtcttagtgtaaatagctcaaactttgtacttatacatgaataagaactgtcacaaacatgttagaggcatcagaatgagaatcgaaaacacttcctatttgagcacccgggcacctggtgatgcacccag

SEQ ID NO: 328984 - DNA, 998 bp, Cannabis indica
aaaagtctttaaatctaacaataattcaaggaaaatttttaatggccaaaaaattcaaaaaatatgatttagtacatattaaaatttaagaggtaaaaatcttaatagtcttttttttttaattacctgtatatcaagtacctgttaataaggttaaatataaaaactttaacaatatgaaaatttttaaaatataattcggtatatatcaaaattaaaggagatcaaattctaattagccaattaaataaaaacaaaaataactcatcttactacatattttctaacaaggacacattcatataaaaataacatttaataaagttaatggattcttatgtgaagttgtgaacaagtgaacatgaactggacctgcccatatccaacaccgtatacgttaattctaatgaaaagtaataaaaataattaaacattaagcacaaagctctttgttaattaataattaatttattttaaaactaatattctattatagggtaattctattcccgtccacctttattttagatctaagataaattttcagtctaatatatttgaagcaactgtaaattttttgaaaatttcaaaagcttacatgccaaaaatttatataaattaaaatattttgttaccgtatataatttattcttttgcttgggcaggaggggattgtcttagtcacatgatagtgagaatgcgaaaaataactctcttgaagagataaaatattttaactgtaaataaacaaaatatacattgataagaaaaaagaaataaaaataaataataataatcataataaaaaaatgggtctttttttcatttttacatttcataacagttttttctttttaaaaaaattttaacgaaaattcacataggaactcacagattaacctagatcgcaaccaaattccacataacaatccacacataaactaccagagcaatccaaaactataaatttgaaagaaaaaaaaaattaaaaaataagt

SEQ ID NO: 328985 - DNA, 739 bp, Cannabis indica
aatcaatctatttaagctctctttaactgtgtagctacatagcctcggaatcatcacacttgaccttccctagacgatgtgggattacatagcttacctggtatttctccttacggatcacgagactactgactatcacactggcacacctaaattcaaatttaaggtaagattagtattcagatgcacatatacgcatgttttagatatacatattttatgatactgtttacctggtgtactagagatagcactatggatgtacatagagttacatttagataccgatctagtgatattattgggtatcaaatagtatatattgccaattacattaacatataagaaatagtagtatggtgtacatagagttgcactaggatactgatatgttaggaaatataaaaagtacgaattaatgctaccactactagtacaattagagtagtgagtacatttgtgtattatagtaaattgtacttagttaagaacgttagagacttagttatacacgttggacgcgggtagtagatttatggcaattaggtgtatagggacttaattataggttaaatatatattgtatgtttttatactttgtttactaagtctaccaactgttagttatgtttctatgtgtatgtaaatgtaaggctaaaatagagcagcagtgactgatgagcttagtgaagatagtacatatcctaacggttatgtaacaccctaactatcttaggcg

SEQ ID NO: 328986 - DNA, 377 bp, Cannabis indica
gacaatgatagggggttggtctggattcgtggggggtttgacgacgacgagggaccgatcaaatgaatattttattggtcttatacctgccggtttaaaattatctgatatagtattgctgacggattatgttaaaattgtcgcctatttcgttaactagtgactacttctgggaatatctaattttttttttatgatttttaacagttgcttaattttttttagcgataatttttgaaaaaaattaattttgaaaccttcgcttgtgctgatacatagagcattaatctattaaattattataaagaatctttctttaatggaaatatcccaaatataaaatataaatatattatttatatgatataaaaatataa

SEQ ID NO: 328987 - DNA, 802 bp, Cannabis indica
ttgtgattaaacttaccatagaaatatacgaagtttttatatagattgggcttataagtcttaaccaaattataaacttcttaactaaacttatcaaatgaatagaaagaaaagaaattgggtaattatattatgaagtaaaataaaggatagttggggatcacaacaatctttgtctttattattgttatttttcaaaattttaattattctttgttttttatttactttttatccaataattgttattcattaaatagaactaaagaattaattaattggtaattgataattaattctcgagggaacgatattttatttatcattatattacttgtttcgattgcgtatacttgcgtatcaattttaccgactaagtttttggcaccgttgtaggggattgaatttatcaatatcagtttagttaatttttattctaatttgatttttgtttcctcttgtttctaaccaatttggttgatgttttttacatatctcaggtgaatcttatatgcgcagtcgaagacgtgcagagagccttattcctttatatcctaagattgagaaatcttgcaatcaaaatagaaagagcaagagagaagatggagcataacaaagggaatgatctaattcttggagctatgcaaggagatcagactcaccctaattctaaaaggagcatgcaagactatgtactctctactttgacggaggtacaaaattgtataacaccaccagcagtggaagctaacaactttgagatcaagataactatcttacaaatggtgcagtccactctcca

SEQ ID NO: 328988 - DNA, 858 bp, Cannabis indica
tgggtatgatttatgttggttttggttataaactttctttaatttctagaatctgatttttttgtgtgttttatttgttgattttagtagtttcggtttttagggttttcgtgtgttcattgttggtttattatttttttttaaaaaaaaattgttattcaagtttcatatgtactttattattagtttccctttttagcacatatttagtgttttcattttttttggttgtttttcaaattagttttaatggttgtcattgtcgagtttttgttggttatggtggtgtgatcagggatgatgcaggggttgtttgggcatcatggccttttgggtgtgtgagtggatttgaggtttgaggttgcaaaataaacacatatgaaaaaccagcttctagatcttgatcatactttaaaatgggttaaggatgatacatgggttgtttgggagcttgggatattgggtgtgtgagtggttttaatgttgaggttacaaaataatgcacatattaaaaatcagttttttcaacttgattatacctttaaaaaccaacttgatcatacctaaattaaaacatgtcaaaaaccggtttctagagtttgattcattttttagatatgtgttgtttgtgcatcatgtgctattgggtgtgtgagtggttttaaggttgaggttgcaaaatgcttggctctttgagtgactcctttgggttgggctattagttttattgtttataaatctattgttgaggtaaattgtcgttatgttttttttttgggtttgttttgttgatttgtttcgatttttgtgaaaactagttttatgtttattatcatgattgatttgttatttgtgtct

SEQ ID NO: 328989 - DNA, 840 bp, Cannabis indica
atgaaacctaccctagtctagagtaaatatgttgatttttttttttttactaaaatgtcaaataatcatattgtgaatagttgttttttttccatttattattttataatatattttattttaataaaacaataaataaaaaaattataactaattaaggaagattagattgaataataaaaatattttaaaactattattatatgtgacaaaaaaaaatctaattttgtgaaattacaaatgaaaattcataaacttatttatattactaagtgaggctatcacttgcctagcttttattgtttcatttcatttatatttttgtctgtgtaatttgtgttaatttttatttcatagataattgtaaaaaaatttatataatttattttttacatctcaattatagtgtaaattataaaatatatatttaaagcatgtttagtttaatataataagaattgtaatagctttacattgcaattacattatatattgtaatctcattacattataaaactaatataaataatatttacatggcaagaaaatacttttttgcttttttttttgggaaattaacatccattactgcctttttcattttttttttcatttatactgtcgcacggagtatataacttttatactgttttttttctctactgtgtcaattatttttacaatgtctttcattcttactttaacatgtttatactattcttctaaagatttgttcttcgtagtcttatataaaatatgtattatgcattgttgtcatatttatgttttcatcatttataataataataataaataggaaataatgagtagttgtgtctc

SEQ ID NO: 328990 - DNA, 990 bp, Cannabis indica
aatgattttgccacctctagatcgttcagctagtgtggttctgcaattgactcatggtccttctgcgtcaatggaagcagctcggagaacaataatgccggagaagatgaccttagctccaatgatcgatgttagctccaaaattgtctttctcattcgtgattcgaaccagatctgacactaattcagtcgacttcttcgtctgaaatttttgaacaaaaatggcaaccacaatgagagattgtcgaaattggacttcgccgaagaaacagagagtgtcgacgatggatggaggggaatggtgatcatctgtgggcgaagggatgcgtgggtacgccggatcacaaaaaaaacgttagagaagagtcaacgatgtctctatgttgactagtttgctaaaatatatatatacatatagatttctacttaattactgctaggaggaatatatagttatatcgtggtcaaatattgaggactatagaagaagagatgtcacgataagttgaaaaatacttatttttttatttattaatcaaaaatactctcatatttaaaatgtaacaacttttgtggtgggttgcctaatatactctcactctctacttaaatctagcacataatttatattaacttaaggagtataaagagaacatcatctataaattaaagtggatatattttaaaaaaatataaaaatataggtaaaaattaaaacctacaaagtaaactggatatacaatgtaatttcctcgataaattttagagagttataaaatcatagtgggttgaaattagttttttttatctcttatgtttgtgtttattttttgttctattttttagtttttttagttttactatctcgaggacaagataattttaaaaagtgagaaaatgttaaactatgaaatagtgcataaacttattaataatttgtaaagagtgaaagactacaaatatgtaattgtatagctattgttagatatg

SEQ ID NO: 328991 - DNA, 534 bp, Cannabis indica
attaaaataaaaaaactaaaatattaaataaaactaacactacgtggcttggcacgtaacaatcacctagtaaataaataaattataaaaacctgtttgatttttttcttttctttttcctttttttttcttttctctttttttctttctttttctctttttatccttagaaccctttcatcttccacaactacacccaccaaagaccacactccaaagtcgttcaagcataacactaaatcagaatccccaagcactcaaagtcaaaagctctctctctctctccattgaataaccacggcaaggcctgatgcttgctattctcaattgtccaagctcaaaatgaaccctataaaacccaaaatctaagtacggcatcataactaaaaaactatttttgttttaaaaaatagaaaattattttttgaaaacaatttggcttgtttggctttatttttttaaaacagttttcagataacaatgttacaaaaaacaagaattttaaaaacaacaaaatagttgttttctgtttta

SEQ ID NO: 328992 - DNA, 597 bp, Cannabis indica
aaagaagtgtattcattagtgttgaatgcttgtgtatatttaatttggagagccaagaatattattttgtggggaaaagatttacaaaatatcaatagccttattcaaaatgtaaagtttgttgttaaggctaggacatacatagtctaaatattaggattgtaagtgatatagataaaagttggattgaaagtatttgtgtgtaacttgagatgattgggtgtaaaggggtgtagattttcattaattttttatgtacatatttgatgtgcaatacaatcatcttaattatttaccaaaaaaaaaaagagttgatattttacccactatttactctacaattatataggatattccctttttttcaattagagtgtacatctttaaaaataaataaataaataaattctttccaattagttctttgaaaacaagtacttgagctgacccatttgggccaggtttcactcaagcccatgccaaaaattatttgcaaactatctacataatacatatatttatggaataattacatagggctattttcaaaaatatgggaaaaattattaaggttatgataaatatggcataaaaagt

SEQ ID NO: 328993 - DNA, 1194 bp, Cannabis indica
ttgacgaggtttcgttgcttgttttccaactcttacgccttggagaacagcaagacaagacccatgcattgaacatgagattattattcaaggaggtaaacctaaacactttgatgagaataattgctggaaatattagacttttatttgagcttacattaatatattaaatgttttattaaaatatgggttgatgaatagttttttgtcgttttggtccatattgtttatgatttctagttaatgggcttagcagacgtttttgattaacttaagcttttaatggggaggctaagtccaactagcgttttatttctagctcccctgcctagctcaataattacatattgcctcattacaattctatgttttagagacctaaagaagatgatttattaggtttgtattacactaccaatctcggttgtttattagtcatttctatatagcgatcaagtatgttttctacatcattgaattattcacagtgttctatattttctacaatcttgaattctaatgtgatataaattttctaacatgtggtacagattgctaattgtatatgatttatgacttatattttgtttaataattgattaatatagattaattataaaattacatattagtttcgttattattttatgttaaattttttatgtattgatcttgaaacattacaattattattcctcttgtattaagagttagtcccactttgctaatgtgtggaaataaattgtgatatataagatgaatgggctactcctcccattgccaattggttttaagatggaacctcattcatcttatctccaaattctaatatgctatcagagccacttgtgatccgttgtgagcccaaattgccaccggtccaaaaaaaaaaacccgtttgtgatccgttgtgagctaaagtgctgccggtccaaacagatacttccgctgtctccccgttagcctccatttgggaccttgcggccaatgtgccagtttctagtgttagatctttaagctattttaaaatccaaaaatttcctgacgtgtacacttacaaatttcccgatatttggccttgtgagattcttgcaaatgtgacgttcggtcctgtggtctcttaaatgtcgttcgttatacccacactttccaagtccaaacgtgaggagggtgtattaagagttagtcccacat

SEQ ID NO: 328994 - DNA, 625 bp, Cannabis indica
tgaccaatttctgattttcctgatttcccttctctatctcagcttgtaaaactgtatttgggaagaaatgcaatatttcagagcaagtgaagaatttctagcaatgattgtaatcatccaccattaatacatgaaaaatacaaaatcaaattcagtgttcagacgatgaatgtaagtcaattaatatatgttgaaacaacaaaaacaaaaaatacaaagataagcaattaagtcattctaagataagcagaagcctacattattatgaacttgttactcaatacataaatagcttaatgactaacaaggcagtgaaaataaaacaatcctaatgctaaatttggatcattgttatcaggcatacattatacgaaggattaacaattttccataatgattattgaattaaaatatgtgtgatctgatatctaattatacaaacgatatgacatctggtgatggtattgagtgccactactactttttataatttttctttaaaattagtagcttgtagagtcatcacattactggaattttatactactataaaaacaataaaactaatataacacaataaaaaatcgaaaatagaaattaaaaattaggttttaagtaaagggta

SEQ ID NO: 328995 - DNA, 2050 bp, Cannabis indica
aagggtcagcatcctacatttagaattagttaaatgtatacacacctcgtggcgatagaaaagtaaaaaaaaaaataatgtaaacacatatcacatacaatcactctatgaagatatatatgaacaaataataattttacatatatatgtgttcacacgcatgaccataagaaaagaataattgtcgtacactataaactactatcgtatatatacatatactagcaaaaagttacgtgcttcggtatactaaattttacgttagatttttttttacgttatttaaaagtgatacaattaaaggaaaaatattattagttattatgtgagattattattatgtatatgtatctaaataatataatttataatttttgacaattaaaagttaatactggatgcaatatagtagtgtttaagaaagcttgataatttaaatatgttcttaagttaatttaaaaataaattaaaaattgatgttccgatacttaaagaaacataacttgtgtgtaagataaaaaagaaaattaaaaatacaatatctaaattgttgataattgaagataacatttgtctcaaaattgtagataaaaaaactaatgatgctcattggtggaggttaatcttcctttgcttcgacagagacaatactgtaatttttgtattttttcacttttcattctagccgaaaccgcatataattggattgtccattttatcgttgataaattgaatttggtagtgtcgacaaagcggtggtgttcctgtaaatagtgatgttttttcacaagacttgagtgaagcactgatatttggaatctggcaataagaaagagaaagctggaaacaagaaaaagttcaagcgtttcaacattcattaaatacaaggaatattgctgagatatatatatatatatttgagttaagaagttaaagccacacacctttgtcaaagattttacatttatcaaagagtcgccaatttcatcaattggatttttcgattgaactgcaagacaatccccaaaagaagttcacaattatatttctaatcaataactaattcagataatacttcataaaacattagaggtaggaggacaagaagtgaatgatatatgcaaagaggcatcgaagcactgtttccaccatacattacaccaaaacttggtatgagattggaaaaataaatcgtaaatggaccatcaatctaacccaacccacttatgcattgccatatcatgaatgatactctactgtatcaacatcatttcacaccacaaaaaccagttgacttgttttagcactttgaatgcgaaggcggatgcaaagttcgtaaccaaattaaccaatcgtgttcaattctttcatttgatcatgcctgcaaattgaactgatttcattatctataatattatatgaagtagtattataagtttatgatatgtgtacccagatattatacaataacatggtataatttttataagtttcattttagaaaagctgtaattggttaaagactgtcaaatcacttgtctgttaaatttgtgtgcatattttaggtgcacatattttcataatcatatatccttagcaagcagaccagtttcttaaaagaaacatctagatactttaaaatagatttataacaaattctaaatcaatgtcaattcaagattctatcacaatgttcgcacaacaaaacccaaatatccaaactaaatcttgactaatcgcagcaccatccccctactagatatcatctgaacattcacactttaattaatttatatggttacactaatcccaaccttctaataccttgcaatcaactctctgatctaggctctagctcatcaaaagcagattcgtgaataagatatagtaataagtcatcaacaaaatgatgaaccaagaaattgaagactaccagttcttcaaaccttcatatgctttgagaatagcttcagtgcatggcattctttagtaagtaatcgaagacccctataaaaagcaatactactctgattggctgctaagaaagatt

SEQ ID NO: 328996 - DNA, 1091 bp, Cannabis indica
tttggaaaagtttaacacgccgaaaactatgcttaaacagtgtgttgcacgcgtgactattttattttatacgcgtgtaaaataaactgtttgaacactgttttctatattgtaaattattctgaattttttaaaattttgtaagatatcttacatgaatatgaaaaaaaaaattagactaaaaaaattttcgggatgctgaaacaagttaagggtgcatcagtacatcccttttaaaatggtgcattgtagaatcacccaaaaatatatattatctatattaaaatttgtagagtaaacccaataaaaaaaatttaatgaaataaaagaatgtgaatagaaagtagtaatcaatcatgattaatatttgtttgatatttgttttataaatataatcaatttatatattaatatttttgaattaattcttgagattataaattattaagatattttaaagactaatcatacatttagagtcatttgaagagatattaacacattttagtgaaaaatagctagtggaagccgatgagcttgactttacaagacgaaatttaattgtaaattttgacaatcttgaaagcagaactagacttaaagctcaacatgaaagtgtaaatctcgttcttagattttcgagacatcttgaatcgtcaaattctgaattgtattgaaaaaattatggccaaaatactaattacgtgatagaaattttttgacagtgagttatggcagcggcgagaaaattgtggtcgcaacgagggtgcttgtgggcactgcgaggaggtgattactgggaaaaatttgaatttttatcctttttttaagtgagatatttttaaggattataaataaaacttctagaatacgagttttatcacttttaaattacgtttttgagagagaaactcatagagagagcaagaaaaagacggagattgtgacatcgattgttctacttcattattctttttttttatccttaaactcttattatttattatgaatttcattataatgtttagttcagagttgtttctatgataaatgttaatttttagtttccattatatcgaattgcttctatt

SEQ ID NO: 328997 - DNA, 760 bp, Cannabis indica
attctttattttttttacaaaaagaaatggatcttatcatggttaaaaagaaaaaaaataataccttttatcatttttataaccacatatttttttgttaaggacctaattaaatcacattaaagcatgagattttttttttcctttcacaaagattatttattttcagtggtaacaacctgtcaatgttataattttctctctcaagatttttatgtggatttcagtggatttctttttcataagaattttatatttagtaattctatataggtataatcaccagatgtaaaacaactcttgtggagctctaatgttatttttagttaaatagtttgggattgaatttttattattatggctaatgagtaatttaatgagctaatcttatgatacctacaaaaaattatactaaaacttaaactcccttttttaaaaaaaacaaaaaacttaaactcccccattttgcgtgattttcattcatgttcatatttttgggaaaatataactgtaatatattcatcaaatctttacatactcaaataattccatattgtatttttttttttttttgtaaacaatgccatattatatctaaaaaataaataaaccacaccgaataaaaaggaataactcaactgaaataaatgaaatcatcatttaatttaggggaaaaaatatgtaagaagatattgaaaaacttgcgtttgtaatataattatagggtgacatattattttgatgttttttttttttttta

SEQ ID NO: 328998 - DNA, 765 bp, Cannabis indica
aataagcaagaaacaccatccatagcctcccataagccatggccgaccactgacactttccagccccaattagtgcagtggtctcatgttaggatttcggacgtcaaaatgaggttttggggtcccagaaccctcaaaatatgactcaccattaaaaaaaagtcaaaacacaccctgaggggtctgagaacatgcatggccgagcactgccatttcgccatgtcagtgctcgtaactggtataagacaacataaactgccttcaataaaattggcataactctctcaagttttattcaaatgacatggttcaacttgaatttgaaatataatttcaagacggatctaagcgtgtctcacagttctagcccaattctaaagttatcgggtccaaaattggctcacaagatagactggtatattttattcgggaattaagtaatgtagttaagtgacaggtgttggaggacactaccacagtccatgtggcatgatatgcgaacattgacactttaaaacacatattttcagcacttgtcaccaatatcatgaattccaagctaagaggtgacattcattgtcactccatttcaaatattggcgcatcctcaaccaaaagtaactattttctcaatgtttgtgaaattttggcctagaaacaatgaaatttttatagatatttatttttttgtaatttttcattcattaaaaaagatgatatacgatttgttagtgagacacccgacatgtggaggatcactaacaa

SEQ ID NO: 328999 - DNA, 1968 bp, Cannabis indica
gtcaagagcagacatttcaaaggctaaaaatgcagaaacatctacttggttaaggctatagcagttccaactcagctggtaagtccctatccgcacaaacgtctacatagggacttgggggtaaatgttatcctaatgcccacctgacctatcgtgcttacatggacaatatcaaggccacatagtagtacatctcaccaataagaaggtcaagtcagcaaccaagacaacgggggtcccgacactcaaacgggagggatgacaagtgacaaccagccaccccaaggggggctggtaggccagcctctggacagcacaaggctagctagcttgcttttgttaggtgcctagctggccaggattgactggcaagattccagtgcataactttacacgtggactataagctggactgcgaattgggccttaatagcccaataaagtagatagaaaatacctttgtttaaggcgtattttagtcttttgtatttagtcaatttaatatgtaaatatctacttattttatttgtaaattaaggtttaagctctcttatataaagagccttaactcaaccctaaaaatcttaagtcattaagtctcatcctaagcagctaagcctcactctaagtttaataactcactccactctctctctctctcacccccaccatagcatatctcaacacttgagatttgccacctttgattcctactttgtaacctcaagagagctatatcatatcccacctatagtgatctgaatagtgttatctatcggtatcaatacaaataaaaagggagtaggtcattacccgctaactaaggaggtcaaacctctataaaaatccttgtgttgaattactttcgagttctaattgtgtaaggcatggtaagcattagtttagtacgagccccgatgtcagttggccaatttctgaggtcaacacctctatagctatttcatttagtaattgttctaatcatacatcattggactagatggattaagatcatttacttatgatgttgctctattttctttatagaagatgagtgacgcggatgacttattctagatatcctatccaagaaatgatgattaacctcattttttaggtattgaatctccttcttacagtactaataaatatcgactaaacacaaacttaagattatagttctgaaatcgacatctagtttttgcaagctgaacttcgagttataatagtgtctcaatggcgatccaagctagaataataatttaatttctagattacataaacactgtgtttaactttcacaagttattatatccattttagtggatcaaactatgtgttttgatatccacttaaactatttagtatactctttgttgtaactagacctaggactcgtatacatcaaagtatatattagactattgtaacgccctaacaattaggcacgtcacgacaaccaattataaaacccctaatcccataaactgggattactagaaagaaaagcacaggaaatttaaactttaaacgaaaatagaatgaaaataaaacttgtaatagctttaactttacaataaaaaattacatgtttcgggatcccaaaaatacttttcaaaatattacaagtcttttcactagctgacctaaccggcaaaattagacttacaaaagtacatcactagtagaccccaacacgcttggtctagtgtggcccgaacatgtacatacatcgcctagatctcgcactcatggctgataagagacagatttaccctttcctgcacagtagagcacccatgagacaagcccagcaagacagaataaaatatcaataatcataataacacatcatataaaattaatgccatttcacatttgtctctatgacacaccacgtgttacgctcacacgcatatttatgtctatgtggcatagacctacgtgttacgctcacacgtctatata

SEQ ID NO: 329000 - DNA, 1618 bp, Cannabis indica
ttcggggttttgacttatttttgaatattttcattcttttaatctgttgagtactcttggtcggtatattttcttgtttatggttcgatatccctaccaaacactcatctcgtgtgttgtcttttgtagatgaaccatggtgagttttggggaagagaacaccgaattgaccaggacctgcttcaacttctgtacgaggatcatccacgtcttcgttccagtccgtcctcttcaagttacggactctccaattcaagctttgaagagtgggaggtgagtagtgaacggtgttctactccagaactcgaagtgcaacaccactactactccgagtagatcactggagaggggttaagctgcttcatttgggagttgaaaaaagtttggaggtgctatttgccgtcaacctggacatacattgtccaaccaggtattgctgacactctgcctgtttgccgtccaagttcggggaactttggcattcccattgctggtcttgctgttacggtagctcggcattcaccccagtatctgtccagcagagggatgatggctcgaacaaagaaaacgatggaaagggtcaatgcatccgatcctcacgtggcctagcttgccacactacccagtgtcgagcaggatccgcccgtccaggaggagggggatcacgaaggggacatttaggtctaggaaattgagcaacaggacaaagtccatccgggtagtccttctgaggctaaggaagaggaggaggctgaacctccaaattttggggccggggagccaatgtttgcagagggcgaactcttagtcgaaggggtagactacgtcaccgaggagcttactgttgcagttcctcatagaaggcaaggtgccttaggtgccagatgggtgggtcctccgtcaaaaatcaaaaatcactaaggcacgcctaagggatttggaccagtctgactatctaggcaaacttgaatgttatgtccctgcctcaaatcaccgagccacaaacccaaagaaggggatgtgtgcctggtcgggtgcccacaccaagcaaggggcaatgttgcctttgcacccgtacttcaggaagatggcagactactttcgcctctgtctgacccagtttactccgaagggcattaagtatctgtctgccctattcgtccactacgccacccagaagtggggtgtgccttcttcgtatgaggtcagttggttttttgacctgaagtctacccccaagcaaggcaggtcagggtaattctacatctctcagcagacttcaagtggttgacaggcaccgttgacaaggtcgtgagcaaaattgggaattttgttgacaagtattactttgtggaaggcatgggcaccacttatactcagttttagtagatccctatatattaccgtccacccctcacactggctcttagggacagagctcagaggattgttcaactactatatgatgcttggaatatcactttgttgacctcaaaggccaactttgtggagtacgggctttatccgatagattttatacctcagcctatgaatgagaggaagaggaagtccagtgctggccgggctgagggagctgagcaagagaaggagctcattc

SEQ ID NO: 329001 - DNA, 569 bp, Cannabis indica
ttccatttttattttgtaaccaaacgccacctaagtcgtctctccagtattgatcaatttctgtgactttagaaagtgactggtgtagtgattcttaagaaatgcaaaaatgtactactctttctcgaaaatttgtaagaattggcacgtgaaaaaattaacattaaaactatctgaatataaaaaatactaagaaatgtattggtgtgcatataaaattttcttataagtttgttatattaataagttgtcttgtaatataacaaactactatttttatacacaaattattttgtatacctttttattattttaaaagttaattaattattgtataatgtaaatataatattattccattaacaaagctttaaaatgaatgataagtactaaaatttaaaaaaactataaaatggtaactaattattatatcaataactaaattataaattttagaaatttttacatgaaaaatccattttgcacaatttattacctaaatacctctacacgcttatgtctacatttttacttacaaagttggttttattacacaaataccacttagt

SEQ ID NO: 329002 - DNA, 707 bp, Cannabis indica
ttacatttacaagcctgcaaaggtctcaattgaattgattatcgttcatcaaaataatttacaaaccatcggtagttagaataataaaacacttgaccattttccaaagagaaaacaattcactaaacacaacgttcaagtttctacatataaggtaattaattatacactccttcaaacagaaaaataaattacactacttcacaatcttattcaattaagattattaattgttgtgggacacaaatatatctagcaccactataaggtggtgttctataatttattagcggttaataataatttttattaaaataaaataaataaaacccgatattaaattacatcaatcatttctcattattcacaatagcttttcaccaatcatttgtggcttggtaggccaataatctctcaaaaaaacaataattgcatctctaaacgagaattgctaaaagacatttttagaacatgtttgactatgttttcagtttttaatttttaaaattgtatttttaaaagtaagaataaaaaatgtttttttttattttaaaaatttaatgatgtttggcacaaattttttagaactattttaaagtttttcttgaaaaaaaaaaactaatattttaacaccatactataacatgaacccatccgaatcccagttcgggtttagttcgggtttaggatccgagtatgtgagcaaa

SEQ ID NO: 329003 - DNA, 1371 bp, Cannabis indica
atgttacaccattttcttctagttttttttttcaatatcatttaaatattatatattttttagtatgttatgattattaatatgttataattcaaaataaattaatttttttaatataaatttagagtaataaaaattatgtgagtagctaatatatcattgctctaaatatatatgtaaaatttatcattaatacactcataattaatatatgtaaaatagattatatataatacacataataattaataagtacatatatcaagtgtcggttggtttacacgatctctaataaatgatgtaaatttatgttaaatttgactcataatatgctatattggaaagcttaaatttgacaatccattagctttaaaattaattaaaaaactacaaaacatttttattgaaaatgtataaaaatttcattaaaatgtataaatatactgtaaataaataattaattatattaatgagcgaaaaaagagataataaaaaatgttaatttttttttgatttggtgaatagagtcaaacaaaattaacaaagtagtaattataaacggcggccggtggaacctcctcgaatcagaatagctcattattaactgaaggaaatattttgccaaatcatgagctagttgtagaaatctgatcatcacgaaccatatgagataaaattaccattaaaaatgtaatatttatattatggtgtattatatataccacactaccaataaattttaaattaattttataaaaatgggcaaaaaaaatacatgcaccacttttatagcactctataagaaataaactcaatgtacttgtaatgatatataatatagtgatgcaatgaaattataataatgggaatactattatggatctatgatgtttggtttattattttgaaataaataatagtttgttatgtgaaaattgtgaatggaatggaatataaataatatattaataaaactatccttgcttttaatttagcaaaatgagagacaaaatggtagtatatagtattttttttattataaatttatataaatacaatcactattcattagatatatatatttgattgtggaatcacatttcactgaatgagtgaaataatactcgttacagtgtaaaagtatttacagtcacaatatatatataatataaaagaaagcacaaaataagtttatgtaaagtatttttgtttatgggtggttgattaatttcttaccctatgagtttttattatcatgtcttatagttttttatctttcatttaatatacatttcataatttatatttttaaaagtaattatctaataaatatttgttttataagtttttttatatttgatgtaatatata

SEQ ID NO: 329004 - DNA, 947 bp, Cannabis indica
tctctctctctctctctctattaatatatttatatatataatcttattttcttctttccccaaaacccagaaaagaaacactctcaagtttcttcctccataaataatgacacttttcatttcattcacagaataaaaagaaagactcataaatgtggtgttcagtacgtaaaaacaagacaaaaaatatttatttgacacatggggcgagactgagaaaaaagggttctttctttaaaatgggggctgtgtgtttttatttttctttttaaaaattgtttgagtgagattattggccatttgattgagagagatgagcagtgagttttcatttcaaaaaatttgcgaggttaagttagtgaaattgtacgaaagtttttactgttgtggagtgagaagaaatagagactagcacagggttcttctcctgctgacactgacttgagtagtactactgaagaattgaattacgatgagttttgggtcgttgggggtattaatggcgcgagttattacgcctcagaagtcagcatgaacaaatgcaacaagtttgaatttctgaaatgaatcgctttcaaagagatgacaacctgtttggctgtgtgactggtgatgatgacactggtttaatacatcggccatggccatggaaatggaagtcgacacttcaagagtgggactagtgatttaggcttagtgggccgactcaaagcccactcagagttccccacacccacatctaaagttgaagaatactgtttttttctttttttgggaaatttatattatgtattaactttttcttacatttacgtttttactgttttttttttttctaattcggcagtatactgcaggtttgtatatattatatgtttataggtgtcttcataggatttatcctctacattttttaaaaaataatgctttaaaaagtgatgatttga

SEQ ID NO: 329005 - DNA, 546 bp, Cannabis indica
cacccctggccggccctatggccagtataggctggctagcttccttgcacaatatggtcgaccagcatgcactctagcaggtgcatggccagccagcttttacctggcaggtttttggtatgcaaacttcatccatggatagcaagtcaaacaatgaattaggccttagcaacctacaaaaatagggagaacatatcagcaactttcctatttttggaggataatttcatttaaactttattaatttattacgtaaatatagctttatttacctatttttaagggatattaaggatgtaagctctactatgtaaagggcattagaaccctaatggtctaagtctggcattcatcttctctctcacacacacgcacacactttctccatcacttgagatttgccaactttgttctcatatacaatcttaaaagagctactggatattctacaacacctgtgatctaaggagtattatctttggtatcaatacaattaaaagagcagtaggtcattacccgctaactaagggggctgaacctctataa

SEQ ID NO: 329006 - DNA, 815 bp, Cannabis indica
acccaaacgtttttttcttcttgagatgatacaaccacaaattaaattatatataatatacatatataagtaaaatatactaatttacaataagcatatccatactttcagtagtttcatggcaacaattttttattaaaaaactaacttaatcaacatcatgaagacttcggttgaacatatgtggtaatgatggacactacaacgaatcgagattagagatagcaagaaatgtgagaaatatatcacaatagcctttagagtatcaattagcaaaagaaaaaatagcctttagagtatcaaattttgtgtggacactgtcacgatatggttcacaacacggctaattgtaggaaaaactttgatggaaaacaggtatgggctgttaaaaaattagaacagaagtctaaattagaaaggaagaagaatgcagtaatagatgaagatggtttcaaacctatttcaaaaggttggaaaactaaggagattgaaaggagcaagcctgctcaaaccagcagccattttcaagttctagagaatgctacataaaccaattcacttagaggagggaatgagatgagtatgcagaaacaggataaagaagttaaaacaggggagggagaggtcccactcttgctaatggatagaattatggcttggaacgtctgaggaatcaatagccaacataagcaactttcagttaagcaattgattggaaatataaaaaataagcgctagttggtctcctcgagacgagagttaaggctcgaaatttaggagccttaatgtaacgccctaatgctaaggcacgctac

SEQ ID NO: 329007 - DNA, 925 bp, Cannabis indica
atatattgatttgttcataaaaattaaataattcacattatcaaaaataaaatttaaatattttattgtgtttcttataggagtggtaaattatttgtactttatttttaagatcgtaaattattgagaatttttttaaaaatttacattctaaataattataacatacgctattataaaaaaaaaaaataaataaataaatagaaaaattctcttcaacatgtaaacacatgtgtcaatctactaaaaccccttactataaatttttcctatgagttttatttgcactacaaaaaaattaataaaagtacttgattaacgctcaaatttatttactttaaaagctataatgtttttcttttttttttaggtagaaaatctcagtcaccaaacactaaaaacaataagcactcaacaaatataaggatgcaggtttattcaaggataccatccgctatcaacatgttctgaatacaattgagattctctaaccactaaataataccactacttattgatttaaaagctataattgtatatataaattaattttattaaaatattttcataattttaattgtaaaattattttagctaaaaatgtttaatttgctttaattttgtatcaattttagatttgaagcaaaaagaatcaattaatatagtggaacatctatttaagaatattcttgggaccaataaaattatattctaattgaaagtttataactaaatagaagtatactagaaaaaataaaatcaaaacatcaaaaagtatcaaatgtaacaacaataacaataagaaaaacttaatactatttatatatatgggtgcactcttaatgggtattatccatgaatgagtaaaataagaaaattttgagtttttatgcttaattttttatctaattaaaaaaatctctca

SEQ ID NO: 329008 - DNA, 633 bp, Cannabis indica
tccgctttgggcctaaaccctcatggttttgttcttgggtaccttcccaaaaggtctcatattaatggagatatgtctatccttatatactcatgatcattcccatttctagccaatgtgagactttgtttgtattcctaacaatcctcccttcaaacacaggactacatagtcttccctcaaacgatcttccatcttgtaccgccgctattaccaaacggaacacactatctaaccttcattgtcaggaagactttcgacacaaggcaccagataagatctccaatctttttactctctaccaactagtgtactttcctccaatgcgttggatcagcgcatgccttacatggagctccaccactaccttgagaatttctcgctaatcactaggccaactctgccaaatcagagcacagtgcctaattgaatacatccacgaacatcatgaaagtacaccgaagccttatgggtaatgatagagtgggtgggttgaattttgtatattgtgaggccaatattgcagctcacactttagccaattatgctttatcttataaagctagttctatatagattggagtaataccctgtaaagcccgcttagttaatttggaaattagcagttgttta

SEQ ID NO: 329009 - DNA, 1379 bp, Cannabis indica
atggtagtctaattaagtggtagcactaatcatagatacagaatctatagcttctatctggacatagaagtaaaatgataatttctttcgagcttcgcttaatagagataaatggttgagtactcgtttcagtaaatatattagtttaatgaaatatcatttataggtagctaagtgttttaaggataaaatacattgaagtgcgtaacggtaaatttatcgctactcgatgtagatcatctatagaggatcattgattattaggattataataattgataatttcatagcgtatctatatcgtggaacgtatagagcgctctataaaattaagagtacaattccaaatctatagtggtgcaatggcttaatagtgaagaaaagaggtttagggtttgtttattaagtaaataatataaaagataattttattttataattaattgtaatcattaaataaatagttttggcatttataggattaaaattagaaaatatggcttttgtgaaataatagataaatggttgaaaaaatagcaaaaatataattagtggggtccacctatgtggccagccacttaatcctattttaatctattgttttatcatttatttttattctatataatttaatcctaaccctaagtgaaatagtataaaaggaataggagggtctcattatctaataacataagccaatgcttataacctagtttacattctgtcagacaactagagagttttgagacctccttcttccttcttctatttcgaatctccttcattgttcttcaataatttcaagcctatagtgcgtgagtgcatgcccacccatagcaagtctagtactcaatgatagtgtgtaagactttgaaaaatacaacaacctgaaggagaatcaggctcaaatcttgataatactttgcgatagaaaggaacaagggttcaagatctgagtgggaggagttattatattccgctgtaatcaatgtaaggtttcttaactttgtatgtgtttagattcaattgtcttagaaattcatatttaggatgttaatcaacatacttgttagtaaatctagatcctagtaaaatatattccaacattcttgccactagaggtttgggcagagctgttagtgcctacctgtgtgcctagcaagtcataggactgtaggatgtcttgtgaatgcctattctatcttatgagcttccaccattgtttcatattcttgcaagtcctatacagtcgccaccattagggtggtcataaactatataaaaaacttacaagattacttatctttcgagattaaacggtgctaacttggtaatgaacgttcctccattagggaggattactcactaaaacaatagct

SEQ ID NO: 329010 - DNA, 1052 bp, Cannabis indica
gtacatcaatcttggtcttgtcttgtcttcatacttgtagttgtatagacattgaatcacgaccacggacaagtgttgagtacacaggacaaacctcgggatcttgggtggtagtactgcggttgtacgtggataggaagctcaacaccccatcgttgagggaaaagctagtttaggccaccctaaagggaaccttcggcctggccaacgcaagaggaccctcggtctcagcagaccctctatagggtgcatgtggtctcgtccatatccaaaggcttctcatggtaacggttcgtcctttttcgatcgtggttgtactattgtattgggtgaccttatgcgttcctcatagtttccatctcttgtaatctcgtgtcatatatgtcaccatacttgccacatcactcttgtcaaaatttgagtaaacatgagtatatttttgttttcaatatatggaaaattataatttaattacaaaaaaaaaatagaataatttatgatgttgaaagtaagattttcaaagacgtttggtagattccatcacagaaaacaataaagaaagtaatgcagaaaacaaatcaaaaagaaatgaatgaaacccaaccaaattatactaattccaatatcaacaatgaatttgttacacataaatctcatatatatcaacaaatttaggaaaccatatgtttttgaagcccatttttgaatcttgtaacaaattctgactaaccaagacccaactataccaaagttagttatatcaattaggttactattgtgagaattaaacatcacaaattcaaatagtcaactgcacttatgcctgttttatttcgttgcgtgtatagtttgattattaattttaaattttatttcttcaggtacccaaaaaaacgcctctatatttggagcaaaaatgatgtccctaccaaaatatataaatgaaatatatcaaagttgatgatctagctgcctctagtaatgatgattgttatgatgacaatggcgacacaagatatgtaggaatttttaagataggattttactatctt

SEQ ID NO: 329011 - DNA, 1608 bp, Cannabis indica
tatcttaaagatacctcatcactatatttgaaaaaaataaattgtcttaactttagttattttgatactacttaacaatcctgaaataaatgcaatgcaaagtcttattcagactcttaagcatacattaggcttctaaaaaatagaagcaaatgaatgttcttaatgtattcacattcgagatcattttacagatgctggtttgaattaaatttatcacactcaaagataaaaataacacaagatgaataatacataattttatttaatcagagatgttgtggctactctctaattaattaaaattatttatataacatatatattctttatctcaaaataataatttgagatgtgaattatttcaccttatatcagaaacttttatcatcatttgcaaataatatattgtttatatataaaataaatattactcctactgaccttcttgtatataattaatttcataatgctcttttcaaacttagagaaaaagatgacataatgaaaataccatttgtgagatgtttattttaatctatatgtatatttattaagcttgcatatgttcacaactattagaaaaaaaatctttagagtagtatgtataccttatccactaattcactgtttagaattgattgaatataaatgagaacaatgccattgttactaagacaattgagaatgtaaatctcctttgttattgagtcttagtttaaagtaaatttcttagcaatgaatcttgctttatatttttatttattttttcaagttgcctaatgagtatttatttatctacatattgctctttagaattcatttcttcattcataatatattgtactacaatttcaattttgtgcattccacagtttaatttgtgtctcaaattaatattgtaatccaacacttattatacatagtgtaattactagaaactattgatcttattgttctaataagtcatcttaagaatgaatcaacaaactcttaaaatggcaaatagttcaatatccatgaagtttagcaattataaacaatttttaaataatatgacttattagaattttatcaatgacttgtagattattaatgatcaattatgtattatcaataaccattaatcttaagggttgttgtgaatcacaattaatctaatacttgaagtggaagttttaaaaaattatatgaagaatctttctcaaaaattatatatttctctatccataaagatattaaatactattttttttcctttttgcctgtaagtttaatacattttagtatatctcttgaatgttattagagttagtcacacattgctaatatgtagaaataaattgtgatatataatatgaatatgctgctcctcccattaccaaatggttttgaaatgaaacttcattcatcttatctccaaattctaacatggtatcaaagccacttgtgatccattgtgagtccaaaagtgccaccggtccaaaaagtcatttgtgatccattgtgaacccctttaacctccatttaggaccctttcggccaatgtgtgccagtttccaatattggggtctttaacctgtttcaaaaatccacaaattttccgac

SEQ ID NO: 329012 - DNA, 683 bp, Cannabis indica
attaaaaaattatataatgtgtttttctctatttttttctttttctctcaactttattttcttcttctttttctcttttctctttttttcctgaagaaaataaatcctaatcacactaccacagtcataccacccacaacaaccaccacctcccacaaccatcaccacttcataccctaaacttcccaaattctaaagcttcaaagaattaaacctaagaaaaaatcaacaatagcagtattaaaaaaaacgaatctaggcttgtagctcgtaaaaattcaaatccacatcctctttttcctcctccttcagctcagcttgtagctcgctcacatttgggaggaccaaatctggtcgtcgttgaccaaggagagacaagagctgaaaaactcatgggaggggagatccagttcttcctcgagttttcacgattgttgaagctagaaatgaccctcgtctcgtggttgtgggaaactcgccattaacggcattgagggtgagctcaggggaaggagggaaattggggttttggattttgtggtttggggattcagattttgtggtctgactttggtgggctggagctcttggtccgtcggcagcgccaacggtgcacaagcagagagaaagagagagattgtcaagagaggaagagagagattgtcaagagagagagagagaga

SEQ ID NO: 329013 - DNA, 770 bp, Cannabis indica
tttatttatttggtcagctgaaaaatatttttgtaatacttattttttttttttgattaaaacttataaaagtcctttaattcaatccaatgaaaaaccaattaatgcattcaatggttggaacagatccaatattagatcggatcggatgactcaattcaattggattcgatcggatgacaaaattcaatatccaataaataattggattggatcagttaagtccaaatctattaaatgtgatctaattaacacccttaactgaaggtttaatcctctatgtatattcaatctatatacctgtagttttcattttaatttaactgttgcatgtatcatagcaatttacatatcgctacctgtatatttgtatatgattgaacatttttttgttcgatttttttttaatttgttaatcattttttttagagtacaggcttaagtgagccgaatcttgcgagtattaatttcatcttttcttttcaaccaaataaataaagtttcctcttccatatatcttacttttctttccaaactttatctcccttttacaattcttctgataaacttttctaatgttttttttttcttttgaaatgtatcgatttttctcattgcaatttgcaaaaagatgcgatggttgacacatttttctttatatatataaaatagtacttgataataattattgattataatagttgagggttgtttgtcattttatttagggaaatttgacattttatgcttaaaaaacacacatggtgtta

SEQ ID NO: 329014 - DNA, 1073 bp, Cannabis indica
ttttgaactaaaatcaaacttttcggcggaatagataatttgtttttaatttgaaataaacaaaagaaatcaaatactgaaatcaaataaatttttaggaacactggtaaaattattcttagtgaaactgtcacatttatttggaaagtataaatctgattacaaatctacatttaagtgtgtaaatgagcgatagagatcttgaattttatgatttataaatattttgtagttgttggagatgttatttagacatccaagtgtttagatatgttacaaaatgacatgagagaagatttgaagcgttttggcgacgtgtaaccaaatctgaaaattgccacaaacaacatatcgtagcactttcacagcttcgtcttttggggtattgtatgagttctttgagtgttgcaatatcccaagtagccaaaaatcatcccattaacctcatgaacacaataaactcaaataaagcttataacctttgttctaaaagaaatttttcccaggggatgagcatattttacaaggtttctatgtgattcaacgtacattgtatcaagtgtacaataagttattatactgtgaattaggcaattaatgcaaagaagtcacaaatttatgaactaatacgataatgtcaaattgaagcatatttttgtctgaaaaatgatatttataaaagacttggtggcaagttagtacacaccacaaagcgtcataatttgggccatctgtgataacacatttctaatcttaactgtccaaatctatcatcaacaattaatcttatatttattaaaaatatgtttgggaaatggaatttttcataattaccttaaaaagacaaaaaatatagatctacagtattataaacttttttatgaatattttttttataaaatacggacattatttatatgtgttttcaaaataatgtaattttgatgttgacgctacattattgttttttgttaaacatggaaaaagaagtttcatttaggtatgtttttgtaaaattccttttgtataataacacaattaggtccaacgagtgttcattgttacttccccct

SEQ ID NO: 329015 - DNA, 1186 bp, Cannabis indica
tatatatatatataaatacaaaatcaatctaattctaattaatggcagattaattagatttttcttacatgcattaattctcttcggtggccaaaatagttacagtaatttcttaaaaagcaatatgcctacaaatttattacaaacgccattttggtacaaatttgacttgggaagatggtgatttagtggctgtaggcagaaaattggtaatgcgattttttttgttcctcacattcatgcatttacaattataatataactttattgatacttctaataagtgttatatacagctcgttgctcgggtttgatatatacgtacgagataaaaacaaatgttgattttttcataaacaatgtctcgcaagctagctttcattagtactacgtaatgatgactcatccaaatccaatcaaaggttaacttgcctgaacattaagaggatctagacttatatcttaattcttatcttgctagctatcgttctttatgggaatgtggacgatatatattgtcatattcactactccaaacatgaaccacatcaacatctttcagctaaaatacaacgttatctaaatgaaagaattaaactcaaggcaaatacatggttttgaatctgttcatttaaatccaactcaaaatctcagtagtgataagcaaaagtaataaggaacatgtcatgattagagatgaaaatttataccgcaggagatgggtaaccgcgaggacccgcctctaatggggtggggattccccgtcttagtggttaatgggacggtggtggagaacaatttcaatacccgaagcggggatggaacgggggcggagataatactatccacaccatatctgacttcgatatagatatatataatttcctttttattcttaacacatatatagtatatatatcatttataatcaaaattatatatcatgcttaaattatgaagatctaatgacgacgatagtaaactgataattattgtaaattacatgtgtaaagatattttcttctcgattcttagttttatctttatttactttttaatttgttgggaggcttgagaggtatgagactatgatactcatactatatttgagttatgatttttttttttaaaaactttgagacatatttagtttttaatttctactaggttatgctttttttaggta

SEQ ID NO: 329016 - DNA, 702 bp, Cannabis indica
tcttctaaattctctctgtacaaaataaagctatagaactcaatctttagcgagttcatagctgttggtgattatcaccattgtaacaccaagtgtgaatcactaaagactgaagccaaaggctgttccattcggagagtagacagttgccactgccaagcaactaatctagtcttgttatattagtgttgttatcctaatttttgtccacttgacgtgacatacttacgtggtcaatgttagcgccacatggcagtacaactaaccaacaaggagttcaagttagcactctagccaacggggtacctgacactcaaataagatgacaagtggcagactagccaccttaaggggctggccggccaacttttggacagcacaaggctccagcctgcttcctgcaggtgcctcgctggccaggattggaccttgcaggattctggtgcacaaacttacacgtggactactagttggaccacaaattgggccttaacagtccaataaagtagatgaaaaagacctatattttagtttttttgtatttaatcaatttaatatgtaaatactacttatttatttattaattatgatttaaactctcctatataaaaagccttaactcaaccctaaaaaccgtaagtctcattctaagtcattaagtgataactaagtctaataactcactccactctctctctctct

SEQ ID NO: 329017 - DNA, 792 bp, Cannabis indica
ttttatacatttaacctccttattttttttttttggttggcaaaaccccgttctgtttatttttctttgcaaatttaacacgctagttaaatcttaccgttaaatatcaactggatgaccactgtatacacctgtgtatatgtaacagtaaaacttcaaagttgatacaatagtaattcagttaatatttaacggtaatatttaattaaaattttaaatttacaaaggaaagtaaacttaagggggttttgccactaaaaaatgataaagaggttaagtgtataaaaactaaaacatacaggaattttgccaaaaaaaaaaacacaagagggttaagtatataaaaattaaaacataagaaaatctctccgtaaattgttcattaaatctaaagaacatctatataaattattctactttttattctaacttcttaaagataattttttttatttatttgttgaatttttattagaccaatctttcaatttttattttaatatttaatactaatgacagtgtaaactgtcaaaatcgtactgtaccgcactgtatttttataatgtagtttttgtaattttaaagtcttgcagtgcaatttcggtttaaaaattgggtaaattacggcataaatacttaatgtttttgattttatacacttaaatacctaatgtttatttttggtggtaaaaatacctaatgttacaattctcttacatcgttactaccacttctgttattaactcataaatatagacacgtggagggcttaaatgcattacatttatttat

SEQ ID NO: 329018 - DNA, 538 bp, Cannabis indica
ccattaggtgctccattgaaaggaaatgactatgaatattgttacagagaaaataaagagagaagtaatgggaattgataaagggtacaatgaagtcttttttttttttttttcttacagttctttgacttatgaaatgaaagaaggattctctcggacaccgtatttaaagaaaggagcaactgttgatggcgaaattgagagagccgaaggcgtccaaagtttttgaccaaattcttatctctttatgcaatatatagtccaacacacactaggtcttttcctcgtaaaaatttgtccaccaatgattagtttttgtttcttcctctcactctcttttagtttgtattttttatcacagtaaaactctggagaaaaagggctattcacaaaggaaaatattcgtaaattttgatatgctaggtgattgttacgtgataatttagttttatttaaaattttaattttttattttaattaataattaaaatagtataattatttgaatgatttgttttataaaaataaaatatgtgtc

SEQ ID NO: 329019 - DNA, 1191 bp, Cannabis indica
tagggtttataaaacacttaagaaatatataaatcacagatctaaacatattcctaaagtgctttaatatagaaaaccctaaatcataaatctataaagcctttgctaaattaaagaagaagatgatgataaaagatcagcggaagcactaacctgaagccattgttggagattgcagagaaggttttgatcttccaagaatacactattttctaaagtattttctctgatggggaaggagagaatacagaaaccctagtgtttcttggggaccactacctatttatagagtcatcttagaataactcttgggtatttataatttggcccctcaacaaattataaattaacttatggtatctacacattaattccatgacactttaatacccttttgatacccataacataattggtcacttaattttgtatcacactttataatagcatatacattatacatatgtgcccacataggatttttaatccaacataaacaccttaagtaagtcatctaaaatccaatttattttcatgaaagatacaaacaataactgtacttgtataaagagatatcgaggtcaccatcaccaaaccctccacactcacgtttctctctatatatgttggaatttcgaaccaaaatatctgcagcttttggaattagcagtagggtttctagggttagggtttctataattttcttctcttttctttctcttcaactcaaatggcagcaagtgttttatgggttaataatatttattttcttcttcttcttgctacagccgcacacaagttctagggttagggtttttaaatttttcttcttctcttcttaaatggcagcaacatatatatgtatatatatgttcttattagaaagcaacagctaattaattctcagccccaaagctcctgtaagttcccaagcttttccgttttttctaaatatataaatatatatatatatatataaattctttttgtgtttgaatatatataacacttgtgtatatatattgttaacatttctgagtttaaatatatatgacagtattctagcccttgtaacgtacatgcatctaaattataatatggtttgagttatagatatatatatatatatacatttttcattttggtatatatataactttatttcatcttgttcttttgatctttcttttt

SEQ ID NO: 329020 - DNA, 1844 bp, Cannabis indica
gggttttggtctcgttatgtgtattttttgggtttaggttcgggtttgggtgctggtccgtgtcctggtcctagtcctagttcggttcaaattccaattgtgattccaagttcaagtttgggttcgagttcgggttagggttcgagttctggtcggggttcgagtccaggtccgagttggggttcgggttcggatctcggtctaggtcctgatcgggctccgggtgtgggttagagtcctgggtgtgggttagggtccttggtctgggtccaggtttaggtccaggtcccaagtttcgatctcgaactgagttagggtttagttctgggtctaagtcttgggtttcgatcacagtttgtgttcggttcgggtctgggtgcaggtctaggtttgggtcttattctgggtctgggtttgagttcgggtcccgagttcaggtttgatttttaattcgagtccggtttcgggttttatcttggtatgggttcgtgtccaggttcctatcctgatttttgtccggggaaggtttcgggtctaggtctaggtccgactttagattctcgggtctatgttaggtcctagttcgagtttgagtcccgatttagatgtgggtctgggttttggggcctaggtcccccatccaagtccagttcctagctcctggtctaggtccaggtttgtgtttaggtcccgagtcttggttttagtccaggtcctagtccgggttcgggtctaggtctcggtcctagccttggtttgggttcaggtttgggtccttatcagggtctggatcctggtctgggttgcgggtctcaggtcccagggagggtttaggacaacatcaagtctacgtcctagtacgggtcccggtctaggttcctgtcccagtcctcgtcaaggtctcggtccaggttttggtctaagttttgggttatgttttgggttcagttctggtctcaggttcgggtcctagtaacagttccagttttgattttaggtttgggttttgttctgggtccgggtctaggtccaagttgaggccagggtccgagtctcagtcctagtcctagtatgggtttttcggatccttatctgggtccaagtctgagtcctgatctaggttcgtgtattgggtctggtcccaggtttggatctgggtatgcgtctgggtccggttttgagttcgtgtccatgtctgatccaaatcccaatttaggtcaggggcttgatttgggtccgggatcgagtcccgagttcaggtttaggttctagtctaagtcctattctgggtccgagaccgggtccaggactgggtctgagcacgagttccagggctgggttctggttcccagtccaggtgtgggtcctggtcacgttcgcggtcctgttccagggtcctagtcatggtctcgttcatgtttcaattttgggtcccaggtctggtcgaggtcccggtccgttctaagatccctgtccagttacagttcaatttatggttttggttcctaagtgcgggtttgggtcttggtatgtgtccgggtcttggtatgagttctagtgtgggttcgggttcttgtgtaagtcctagatcccaataccgactacgggtccggtccaagcatcgagtcatggatcttaagtcccgagtgttggaaattattttaccaggatcttagatctactcacaagtatgttgattaacaccctaaatataaacttctaaaacgattatgaaataaacacatataaagtgttagaaacattacattgggtgcagcggaatataataactccttccgttcagatatctaacccctgattcctttcagtagcagagcattatc

SEQ ID NO: 329021 - DNA, 546 bp, Cannabis indica
actctctgctggtacacgactaccttcatctgagctttctccctttttcctccaccgagtacaagctctccaccaatgcctcctcattccttacttcctcgaatgtctggaccatgtgagagtttatttccctttcctcacaatatgctcctagtaagtctctgaactgaataccgttatcagtgatgattttataaggaactccaaaccggcaaataataaacttgttgacgaaggaggctacttcttgacggttatgtgaactaatggtcttgcttccacccacttggtgtagtagtccactgccacaatttcatccttcgcccctgctctactcgtcggcagtgctcctattagatccaccccccacatagcaaagagctagggacttgtcaggctgttgagttcagctggcgggcgctagctgaaattgtcatgtttttgatacttgggtgatatttttattagctcaaattaataaatataattttattagcatgctatatatttttatttttatttattgttattatatatatttctatt

SEQ ID NO: 329022 - DNA, 622 bp, Cannabis indica
aatttaaagtaaaaatacaacatatatgtagtatggtatatatgatttggatttgttggaagagatataacaatattgggatgaaaattcaagaaaaacaatattggacatgtattgccaaaaataatttgtttaaaaagaaaaacaaaaacaaaaaacataaaattgactgacttaattaattaatataaacaaaaataaaaaaaaaaaatcaatttgtgaataaattctttcattttaagtaaattaagtgattacttacgtacagcttggtgtccataaatatttataattaatgtttgagtctttgagagaaatatcaatgagccaatgagaaatccatggtgttaaaagcaaaggaaacagccgatcataaaagattaggagctaagggaatataactaagaggctaattccattggacgagtcaaaattatatttaatttgaatcgtgctgagaagaatattgtatcggtagggatgactctcatattttcgttggttggtcggaatgactcttgcattgaataaattatattgtatatccatttttatagatgatatctgctattatgttatattatttttaatataataacatatagattaaaatgtggtaata

SEQ ID NO: 329023 - DNA, 1278 bp, Cannabis indica
taaatatttaattttgtaataaataaataatttttcaaattaataaattgaataaagacaaaaattgttaagataaaagttatccgaacaaaagataccaaccgtaaaagagtaggcgcttagcatactttaattaatcctattaaagtaaatatctaatttgaatagttattatagatattttaatgttgttgagatattctctcgtaattgaaaaattctctcataaatatcaacactaaattagatatttatttatttaaacaattaaatataatttaattgaaaggatttagtctcataggttctttcccgagtagagtttaaaaatgtaaagctgcggtaagcgggtttattggggtattccttggttgtattttttttttctttttgtaaattgtttgattgtaattagttcagtattgataaaactttaacttgaataattattgggccaatggtcctctctcatattttaacccaataggactaaattttgggaggagttgactagtttgaaattgaatgaaccctaatgtttaaaaaattacataatacaccataagtgattacaaatttttttagtttttaagacttaaagaaaacattttggtttgaatttattggttattttgaaaaaaaaaatacatttactctttcattgacatttcaagatttttcgaactcacatgcatttttatataaaattaaaaaataaataataaaaaacaatgtcttagtgaattttatctcttagataaggtggatacaacaacacttaaggttttgtagaaatggagaaatggtggtatggaatgtcatgaaagaattgaatgcggtgagtatttttctaaagagtctattatgagaacaacaaaaatataaaaagattacattctgtacggttttcgatattttagtttttgtttatttaaataaattaattaattataaatatgctatacttacttttcaaaatgtaagcactatacatttgtaaatttttttttaccaatctgtaataattgcttacaatattgtaaatgttgtttacaaaagtgaactatatatatttttgtaaataaaacttgttttaatctgtattttaaataaaattgttaatgcatttcaaaataaataaacaaaatccatattaaaagatacataattacacaagtataatttgaaattgaatttaagactcgattcatacctgggaaggagaacattcaaccagttgggtctgcaatgggctttgtacagagcataattagccgg

SEQ ID NO: 329024 - DNA, 963 bp, Cannabis indica
attgaaagtttttttttttttgtttttaaaattcaaattcttgattaaaaaattagaaagtaaaaacagttttattgaacatgattttagaaaatattttcacttttctaattttaaaaacttttagttacggaagagtgatggagaagaagaaagaacagtgagaattaagagagaaaatgaatgagaaactaatttttttattgaaatggaaaaggtacaagaacggagcatgtatagctcatgaatatattgaattagttagttacactaactgttacagctggcaaactaactaaccgaaacaaactaacttataactaactcttaatactccccctcaagatgaatggtatatgtctaccaatcccatcttgtctttaagagcattaaactgattaggaaataggactttagtcatgatggcagctagttgttctttagtggaaacatgtatggttttgatcaatcattcttgaaccttttcccttctaagattggagtaaatttcaatgtgtttcgttctctcgtgaaacacaagattggctgcaatgtgttgagcagctttgctgccacagtacattaaggcaggtcctttgtgctctatcctcagctctttgagcaatgacaataaccaaatcaactcacttgttgtgtttgccatcactcgatactcatcttcagctaaagatctcgacgcagtgtgttgctttttgctcttccaagatattatagaatctccaagaagatgtaaaaccctgttgtagaccttttggtgtcgacactaatagcctagtcagcatccgtgaatgctctcggctgtatttcaaaagttgcagtaagtcatatgccttgtcctgggcttgactttatatattggagtatccttttagcagtaacaaggtgttggaattattttatcaagatctagatttaccagcaagtatgttattaacatcctaa

SEQ ID NO: 329025 - DNA, 1489 bp, Cannabis indica
atcttaatagcattaggaattattgttaacttttaaattcagatttctattcctatttgcataggatttcaaaattatcttgaaaagggaagggaaaagatatattaatattatttacttggcatttagttgttccttaaaagctttaattttaaaagactctcattagctttaggattaggagattgaattaacctaaaaataagtgaattgactatcaaaatttttacgcttcctcattcatactccagatacctatcgcttttagagagcaatttagaatctcatcttcatcaagccttcaagcatccttcattctaaggtagaaaaatcacatatttgttttttacgccaatttttttccttttgctcctttgttggtcttactccaagaattttcagtctccttaaaaacctttgaaataattttgctaaaactccaaaattccaaaacaattttctagtgccttgaaaagttcctccaaaattgctttgacttttccaacccagtttgacctttcttgagttgtaagcagcttaacttgttgagcttgaaatggctaggatgaagagaagtagaaggttacctgatgagtatgatccccatgtggctcattttattagagctaagttaactatgcctaagtctatgaacttacacaaggtgcatggcaagaaaatgatggcaactgagctttttaaagctgccattgagagtgacgatccgagagatcgagactttaaggggaggcctcttgtgtttatcactcttacttagcattaagctcaattaatttgggatgattactatctccctaaaactattgtccagaagccacaatacgttggtcccaatggctctcaaaatacttgttgtagtgtctggtcgagattccacatgaatgcaggtgcttacttgcccttgcatccatggttcatttccatacctggttttttaggtgtcagcctttactagataaatccaaattgttataggattcttgccaccttcttcatattctactgccttaagaactggcctattcccactttgcatgagataaacttcctttgcgacttgaaaagaagtccaacctgtaaagaagaagcttgaattaccaatttagccaactcatagaacatattaccaaaagcaactgcggtcttctattgagacacattacctttcaaaaagttggtgctttcaaaaggcctgctcctctaattgacatgaagaggagaactgatgccatgctacttgaaattgatgcatgggagagagataggaaaactctgtttagtactgaaaattttcgaaaggttgggatgatcatgtcatgctagttatgctaacacttttttcgatatgaatcttggacaataccacttgagaaaaatgatgaggatgctcatagtaaaactatcatcttgtctcagatactgatgggagaagtgtcttcaatttgaaatgacatagaatattcaagga

SEQ ID NO: 329026 - DNA, 504 bp, Cannabis indica
attgagacagattatgtctccactacttgtcttttcgtgcaaccagctcttcctcagaagcgtgcatgctttaatgactttgtcctttgttgttcgtctttttggcatttatccttttatagctcacattcattatctgaagataaaacttacaaaacttggccaactgttaggcccacatgagtctccttggcttgatgaggggcatgaggaagtaagtgaatgagaatgattgggtgagggaatagagagatagagagagagcatgagggagcagagagggctcattgggcgtgtaaggagagaaatagtggggagctcctgccagtgcgcacgaggaaggagggagcaggtaacagggagctcccgtcggtgcgcacgaggaaggagggagcagggagctcccgttggtgtgcgcagtgagggacggagtgaggagctcccttgggcgcgctgttgggttttgtgcccgaaataaaatccatttaaatataatcagattta

SEQ ID NO: 329027 - DNA, 681 bp, Cannabis indica
ttactattattatttttttaaaagcgtaactatatatgtaaacgctattatatgtacaaatattttttattgttatgaaaattttataaatttcctaatccttagcaacaataatttttttagttttaatttttttattaaaaaattaataatagcatcaatgctactatatagcattcactcagattactacaatgacattcttttctctctaatgatatagtatctcaacattttgtcactttatctatccacctcagtaagcatctcctaaatttttactattggagatgctctaagaagatacaacatttaataactaggaaataatttgagctttgcatgctgttgcatcttgtttggtaataactaagttataaaattatgctaacttgatatttttatataatttttaataatagaaattaaaaaaatacacctaacaaaaaaatacaattgattaatctatagaaaagtcaacctatgatttcataaatgtatcataacattttacttctaatcaccaccaaattcaaagttaatattatcattgtaacatactgacaattgtcactatcattctcaataagtttagaatacgtaaacaaattaatcaaattcttgtcgagtaaaatttgcaacaccaaaaataaataataatactaataataagaagaaatt

SEQ ID NO: 329028 - DNA, 730 bp, Cannabis indica
tatatatttaaatatttttttattataaactttattttttttataagggattccccaccctatctctgatggggaataagcagggatggaaattagaatccttaacggagataggaatggggggagcactccccgctaattccatgctcagtatgcatccctacaactagtcatgcgaaaaaattcttaatacaaaatacaaacaacgaaaaaaaaaaacttgtgtctgcacattaattaaaaaaaatatagtccacacgacattaaattttaattgtcttgaaatactttattacataacataatttaaacaactttaataagagccctttcccaaaaaatttcccaaaggttggtctatatgcacaacttcacgctgagattctaaccttcactgcccaactttcagcttacccttgtttatgaagaaaaataactattattgtgcttctttgggtttgcttcaattcctcagaagctgacaatgaaatctaggaatttccttgaggggactctaaaggtacattttttaggattcagcttcacactgtactttcgaattatcaagaaggcttcttacaaattatttttgtgctccccaatagtcttggacttcagtagaatgtcatccacataaacttccgtatattttcctaggatattgtaacgccctaatctataggaacgccacgtgtgtgattttataaactagtttaatactaatagaata

SEQ ID NO: 329029 - DNA, 818 bp, Cannabis indica
atatttagtgacatttactttttataccatatttatcgtaaccttaataatttttcatatattttttaaaaatagcccaatataaaatcaataaaaattgtaaatatatatgtagtatgttaggcccaagtttatgcatgatgaagtgagtctccaatgaggcagtatggtcggtgagaatagcataacaacatttgcatattcttgtccaaagaagagagcttgaatcttcaaaggtcccacaaatcttgtccttttccataattacatctttttttcctcaaaagaaaagataaggttttccaccgtaccacatccccaatttccaccacccaaactcaactcatcacctcattcatttgattttacctccattccaagttttctttcttttatttttatgtcatttaatgtcaacaatttaattctttttaatgtcaacaatttaattctttctttttataaaaactcacatctaattaatcatcatttatagtaaaattgttgaagcttattgcaatttattttaagagtatataatattcatcatttcatcaaatgcacgtatatgtattatgtaatgcaacaccacaaaataaaaaatcaaatcaattattattagtgataattttgaattaaagttttatgaaccttattaaatctatagctccaaagttcaaactatgtctcctaacttccctcattacaaaacaaacatagtatttttgtaaataaatgacatgtgtttaggatgtatttataaaatcactatgcaatcaaattttaaattcaatgtcattacaaaaaaaaaaaaaaaa

SEQ ID NO: 329030 - DNA, 1404 bp, Cannabis indica
tatttgcttacaccgtacgagatggagctcggaacacgtacccattattgcaatgaattctttatatttttcacttagctagtttttaatggtcgatgtccgaactccgagtaaatagcagcgacatcggtttaacatgagattgggaaagttttatttttttctttttttaatagagttagggtattttgtaacaaaaatgtaattgtttatttaaaaatttaattttagtgtaataaaatatttatttgtttaactattattatttttaatttgagtttcataaaatgttactgtttattattgtatttgaatttttactaaaattaattaattttatttaatttttaaattaaaaaattattgatttattattattaattaaaattgaaaatatataataattataataattgataaataatttagtttttttttattttttttaaaaaaatagagattcaagtccaataaagttagacgtgaatttttatttttcttgtggtctcaatatcaagtccatcaatgctagactagaaaagtttttctagtcaaacaatattggactagaaaaatacctttttatgtccctgaatataatgtccaacacaaaatagactagtaaaacttatctagtccaactttgatggacttataatggggtttttgtagtagtgtatttggattagggaacccggcatacctactcagtcatcgattcctatcgaaggaaagggaaaagctgtcctggaggagcaggaagactcttcggatgatgatgctccatccgtactttttcaggagaattctcccgccagcgtgcaaagtacttcaacttgcatttattttccctgattgttatgtcttcacatattttatgtcttctttcaactgtattgtttcgtccatgcagacatgtctcaaaaaaatatcgaggctctgaagaagagagtgggggtagctcgggtttgtctcctccggccaaaaagtctagaggtggtgagacttcgtccaaggagaagatgtcggttgacgaggtcattgatctctctgaggagtaacctgctgtggacccttcaatcctgaaggtcgctaagtccaaaagttcttggggggagttcagacgaatccgagcaagtcaagggcggatctgaacaagttagggcccccgctcaactctagcgttgtgcatggaggccaagagagacaaagacatgattcaccactacgtggctcaataactctcggaagtgagtgaacaactcaccggggcggatagtgaatcgtccttggagatggtcttgggaggagttttgaaggaaatttctcgagtaagttccctctatcacttttctttcattgttccttggatagttcagattttaatgcattctccgtataggc

SEQ ID NO: 329031 - DNA, 1238 bp, Cannabis indica
taaaataaagaaaataatattttggtaagatattttgaagaataaaatataaaagttgaactgagtgctttaatattatttttttgtccttatttatctttttttctctcaatagtataattttaatatttttttattatttttaaaagatttaattaataattattctttataaatataatatttaaataaagtaaaataaaatataaaaaaaaaattaatgtatagtgtaatatatatgaggtaaaataaaagaaataaaattttagtgaaataatctaaagaatagaataaaaaattattgggaatactcctaaaggggacgccaagctaaattgtacatttttcacgtctttgtttatattatttaacttgatcttgagaataatgaaagaaagaaagaaaaacaactttattattttgtagctactcatcactattcactacataactttataattagctagcatcaatgattcacaatatcattgaccactgttatcataataaaagtaaatagcagtataattactcaaaattttaaatttgtaagtgatataaatttaatatttatttttagtgacataagtacttaatgtttgtaaaattgtaattctttttaatttgattaatatagacttattgtcttaaataacgcatatataagttctaaattttaaattattgggtctagacataaacatgtagtatcaattacttctaaattttcttttaataaattcaaaatgcagtctgtactgaagaaactagaagaaaattacagttttacaaatacttagtacttatgctgctaaaaataaatatgagatttatgccgcttacaaactttaaaattttatgtatttatgccagtatctactctatagataaatttatatatatatatatattcatatcccatacgacaaggtgaatttactcaaagataatttgtggtcgaactccttaaatttttaagtttggtacgatctaatctctatactaaaaaaaattatggctaaagtccccaacttctacaattgttttggtcagcaatctttccattcactttggtatgttaagtgccaaagtggactgccatggtgtatagaagttacatgtgataaatttttattggtccacctaatattaataattaaaaattaaaattaaaatatttaaaaataaaaaaattagaaaaaaatttaaaaaaaaaataaatttcttcttactttttt

SEQ ID NO: 329032 - DNA, 953 bp, Cannabis indica
ttaattttacataaataaatttacaaaatatatgtatatattttattaagatgtaattatttttatatagaggtatattttgttaatacgggacttaaaaaatgtataactaattataatttagaggttattcttatttataactggctcaaattgggacttgatttttttataacaaattagaaattattcttgaatagaatattcttaaataaaagttctccatatacattatacatacatatatatggatactgaaccttgagatctcccacactcacgttattgacagttcaagaccaaccatacattgccaattgcaatgcaaaatcctccttgaattttaattttatgtttacttattaccctattattatgattattataattatagttattaatttattattatatattgaaatgataatgccaaaaaaattataacaatgagaattgtttttgttaaatgtgtataatagagaattaattctctaaaaattgtattttttttttggaaggattgatggtttgagaataaatttgtattggtttagatttgtataggtgaatatgaggaagaaatatttaatggttgttatggtaattgaagtagtgatgttgataagtagttgttaatttagtatatgagaatggttttggcttagaagagatgattgtatgagaaggtagtaagctttattgatagtttggatgttggttgttgggtgttggttacaatttagaacccttgatgggtatttatagttgctccccccttacacttcatggttagaattatttcttctagatccttctttgactagaaggaattatatccaaacaaatctaaatatttctagagttcaacataactagtatattctagacttaatctaatttagaaatctcttaggttcttaaataatttttctacaagtgtatagaaatttcta

SEQ ID NO: 329033 - DNA, 1346 bp, Cannabis indica
ttccgtacttatgctatgagtttgcttcagtcttccgaagtagttttgtcaccaattagagtctatgatggcttaagtttttggtggggtttctaatgctaataattccaaaatacattggaagaaatggaaattcatgtgctcctcaaaagctgatggtggtatgggttttcgatcgttcatccattttaatcaagccctattagcaaagcaagcttggagaatactagattttcctgattcgcttttagcaagagtgcttaaagcccggtattttcgaattggagattttctaatggctcggaaagacactctaccatctctcacttggcaaagtatttgtgatggtaaggaattgttattgaaaggtcttagatggaaaattggtaatgggcaaactgttagatgtgcaagggatccttggttacccggtaacactactttcactccctatcattatggtggagatcctctatttactgttgagcactacattaattcaaataggcaatgggatattcagttattacaacagcattttggtgacttggatgttcaacgtattctttctattctgttgagtccttttcccaaagatgataagattatttggcaccattcggaatctggatgttatacagtgcaatccggatatcaccttgctgttagtttggactcacgagatgatcattcatcatcatccaccaataggaaatggtggaatcgattatggtcactccaacttcccaaaaaaagtcaaaatttttgcttggagacttgtgaatgatgctcttcctacagcagttaatcttgcacatcgaaaaattgcctcttctgctgcttgtgctctttgcaaatgtagctgggaatcagtcggacatgccctctttcgttgtcacagagctaagttgatatgggataagttccactttaatgttttcattcccaacattgctaacattaaaggatttgatatttattctcatcttgctgctgcccataatgacaatgacttagaaattattacatgcctcctgtggtgtatttggtctgaaaggaacaaagagattcatggcactaaaccgaaacctgcgcccattctctgtacttttgctgccaattatttaactcaatacaaaatggctgctacacatcagaattgtgcttctggtttatcttctaccagctgcaatgcttcggttcctgtggacgcacctgagaagcaaggcctcaatggaagccacctgatgaaggctgctacaaattaaatgttgatgcagcatgtactgaagcaggtgccgtaataggctttggtgcgattctccgagatcatcatggcactgtta

SEQ ID NO: 329034 - DNA, 894 bp, Cannabis indica
gcaactgctagttgtaacacatttcaatcaaaaattaattttttttcttttattttactattgtgtagaatagttttttacatgtaattaaacaacaaaagaatgataaaataccaaccaaatttaaagtgtgcccataataacataaggtttaacattactcaacttctctaaagaacacaagaaaataatataaaaataaaaccataaacgacgaacttctctgctgatcacttgatgagttatatgttagagaaatagtttgtctttatatgttgctttaaagtctatcgtatccgatagagatttaaagttcacatcaagattttggaagggtactcaacgagctatgggtatgaagttaaagatcagcacatcattccatccttagccagatagtctgaaaggactgttcagattttagaagacatgctacaggcatgtgtgttagattttttaagaatttttgggtgaagtaccttcccgtgatcaaattttcttataataacaactatccttcaactattgagatgccttcttatgagctattatatgcaagaaaatgtagatcacttgtaaactgggatgaaataggtaagaagaattttttaagtcccaaagttattcagaatataagtgaggcaatagacaaaactagagttagaatgctcgctactcaaaatatgcaaaaaagttatgcaaatccaaagcgtcggaatgttgactttcaagttggacatacattgttcctctagatctgacttatgacaggtgtgaaatgccttggtaagagaggaaagctaagcccaaggttcgttggaccttttgaaatcctagaaaggttagggcaagtagtgtacaagttggctatgcccccagcgctggcagctgtac

SEQ ID NO: 329035 - DNA, 913 bp, Cannabis indica
atagtttataagagacaaaagcaaagtaaagtgattccatttgccttatagtttattagttaacttatttatgactcactcgtccgattaaagtttcctcgtataataataacttttattatcatctttgtttccattttattttgtatatttatattttttttcattctatattgatgcatattttaatataactggttgtaaaatctaaagtaatttattattattttttacatgcttttgttgtatttattaattaaccaattcatataattaaatcgggtaaataacggataactgacaaacctaagagttgtcaagtcgtgcctgatatttgctttgaagaatccaaactgaaatttgaatttgaagaaagaaaaaaaattgttctctaatttatttttcttaaaaagcataattatttaaataatattgagcgttggtgcgtgtctcaagtgaagagtgttacagtcgatgtagttacatttatatttaaggttatggtcagggttagtttgaaacttagtaagctataaaaaaattttttttggactctaagtcaggaaaaaaaatatataatgttttttaaaattaataaaaaaaatatgtaatttaaaaaaattattttttgaccctatactaagtgggctctaggtacaagtctaacctgcttatactcatgatcgaacttggctatggtattagaattgtggctaggaatgatcatagttttttgctgggaggaatcacacaatactttattagtgttgttcggccaaaactagctgaagcaattggtgctagagaagttttaagcaatattataattaagcgatatgaatgttatcatgtcacataagaaacctatgttttgatagtggtgcaagttttactaagttcattttttttttta

SEQ ID NO: 329036 - DNA, 1061 bp, Cannabis indica
attagtttcgaaaatattttttaagattacctaaatatattttaaattattatctaccgtaatataacttaaaaataactaattaattataaagatgtatataaataagtttttagagagtaaccaaaatgtatctcaaactatatgatataaaaataattaattgatttcttatcaacactattaataactaaaaaattacttttaaaaatatcaaaaaaaaaaataataaaaaatcaaaaaaaggtcaaagaaaaaagtcaaaaatatcaaatttaattgatatgacacgtcagtaataatataaattattattataaattaaataaaaaatatatattattataaacttctcattattaaatcactataacaaatatgacacattattaatagggcctctctaattaatattgtgtattttgtttttttaacatttttctcattaatattgtgtattcctaaaacaaacttttgttattaaagaaaaaaaaaaagcacaaaaggaacaactacaagccaaagtttgctttccaaagtaaaagtttgaaaattaagattaaaaaataagaaaatatatatgataaaaaaaagggtttgtagagttagaggactgaaaagtgaaagacattgacaaggcaaccacaacaaaaatgtaagagagtagatccctacaaatggtcacatcttcttttgagacacctttgattgacattttctttcacaaaaaatggcttcatttccctccaaatctctaatttcaagagattgtcttttccaatatgtgcttccttgcttgcttattagattataatttagaattcaataagtttttaacatataatgctcgttgctagaggaactgcataaagtatattgtcacttagtcattttaataaaggactgtttggaatgagttaatattagtaagaaattggtaatatgaaacattaccttatttgttttgaggatttaaccttgtaatgttagttattgttcatccttaaaaaagtgtaggattgaattattaccttctattatattaatttgaatagtatttt

SEQ ID NO: 329037 - DNA, 514 bp, Cannabis indica
aattatattaaattaaattaaatgaaaaaaataattattacaaattgggcgttggtaattagaggtatttggcatcggttatggggtctatggcgtcggttattcactataaactgacgccatatgtaccctatggcgtcagtgctatatagcaaccgacgctatagggtaccatttagcatcagttgttttcaaccctatagcgtcactcaaatcagcgtcggtagcgaattttgctaaaatcgacgctgaaaggccttaaaaaccccctctaaagggtgtttttgtagtagtgagagtgttcgactaggcaattttataatggggacgatgaacctaatagtctgcttgcacatttctgagcagtctttataccaccatttcatacttctcctatatatatagactagcaaaaattacgtgcgaggcacgtatactaaattttatgctagtttttttctatgttatttaaaagtgatacaattaaaaattaaagaaaaaatattattagtta

SEQ ID NO: 329038 - DNA, 996 bp, Cannabis indica
tcactatagtcattgtttactttttcacttgtagttgacaacacaataaacatagatcaagtatagtgaaaatggtttgaaatgaatttataaattaatagataaacaattgataaggtgaaaccaaacatacacaaatgaatgaaaaatacttactgttatttttattgattattgaataatctggattacattgaaacaaagttttatttagggcataaaacccaacagaggtgacactaggtactttcccctgaaggagcattctaagcttatcttttttttttttgattgaatcagtgagtgttattgcatataaactaatttatacaacctaaaagcaccatgacaaccaagccatggcccttaatttgtctatacaattcataaaaaatgaaactaatcttcctgttttttactaacttccttaggccacactaatacaactctttgctttacattttcctttatgcaattcactattgtatgccaattaggctctttatcttgccataaaacttcatttctgattttccatatgttgtaaactaggctagcaaggtaaggagccatagttttcttcttgaattttccttcctttgctctttgtatcattcttatgatttgggtaagggtggcatcaattggtttccatcccatccaggttgcaatttcaccaaagcaacctgctactttactgcagtgaaagaataagtggtcatgtgtttcttcctgcattttgcacagcacacaaatggtattttcacaaataccaaacttatgcagcctatcttttgtcctcagtctcccctgtacagctatccacataataaagctatgtttgggagtgttgaatctaccccaaacctgttcactccatctttgttttggctgaaccgagcacaatagcttatatccttcaactatggttgaatcataataaagcttttaatcttctaccaagaatatatatgatttttgctctgtagacatatg

SEQ ID NO: 329039 - DNA, 1419 bp, Cannabis indica
atcaaaaatgaggcgatcagacagaaaggcattctgagtaggagaaataatgtcctccataacagacttaatcctattagcgatagtcttagcaacaatcttgtataaagttgtgcaaaggctaataggcctaaagtcattaagagaggaggcattagttcttttcaggatagggacaataagagtgctgttaacagactccaaactggtattgttgttgagaatatcaagaatcgccttacacagatcctccccaaggtattctagtttttctgataaaagtaggcattaagcccatcagaaccaggggccttgtctcctgaaagctaaaacaaagtcgatttgatttcttcagcaataaaaggagcatccaacaagttgaattattgagcaattaactgagtgttaataacggagaggagcaaatcagtagcctccctgtcactgccctgagaattaaaaagagtggagaaaaaatgatagacctcattctcaatatcaaccaaattggaaatggtgttaccatcatcaaggttgagagccctaatgaagttagtttcttcctagaggagactttattatggaagaatttagtgttttgtcacctgctctaagccaataaactttagatcttgtttccaaaaaatttcctgtttataaagaagactatctaactgagattagagattagaagcttcaagaaaagtctccttagaagcagaaagagaagacaaaatgtcaccaagatttttgtcaatattattgatccttgtagttaagttattaaaagatttgttccagtttttaatagcgttaacacaagtattctgcttattgaggaaaattaacaaaggatgattattagaattaatattagagtacttccaagagctactaacattgtcaaaaaaggaagggtcagtaagccaatgattttcaaaaataaatcttttatttttcactttacgcatactatcatcaaataaaactaattttaaaaccctatggtccgagccataaaagttaagatggtgaagggtggcttggggataatgatgaagccatttgtcattagcaattccccaatccaagcattcataagtggaaccatgcttccaagtgaacttatttccaacagaacaggggataaggagaacttattaacaaaattttggacattattcatagcataattgggggggggggggaggagaggaactactactccggtcattaatagagaggtaatcattaaaatcatcgagaatgagccaagggagtagggggcattatcaaagagtctatctaaaagtttccaagtatgcactttatcatgaacataaggagagtcatagtaacaagaaatatgattagttatattatcttcaaaagtggtaatacagtcaatatgatttaagg

SEQ ID NO: 329040 - DNA, 831 bp, Cannabis indica
aaaaacgtaccctgacactcattaaatgtactcttagacccatctaatgtaccacggaatacatttcgtgaaagtacatcactagacaaaattatatctctacatttatattcaaaatatgtatttatggtaagtacatttatatttaattattaccatatatattataaaaaatgaaaaaaaaaagtttctaattatatataaaaatgtattaaaaaacagtaataaaatattttgtacatattttataattaattaaaataatgtatatatttatgtaaaataaaaatggtacaacaaaagtgcaagtatatatagctttccttggtcagtagtcacggaaggttttcaaaatcaaaatcaaaatcaaacttgcaatcctcttacacagaccttttagttgcacacctttacgtttcatttaaggaaacttttaatatttacatgcaaccaatatatatattatataaatttcaattttagggatctgactactgaccaatttaatataaattttagaatgaataagatttgtattttaatgttatactattactatgtttaatgttaataattactcatttttttttaaagaaagttgtaacttcattagatcacaaacaagatctcttataacattacatttctgaaatagtatcattgcatattctccctttatcaaccctacaatattcttagataaattatgtgccatatgttataaatattattaattatgtggatgtccaaattttttatttattaccattaattgtaattaacattactcttttcttagtttccctttttcttagtttcttaatatctcac

SEQ ID NO: 329041 - DNA, 613 bp, Cannabis indica
taatatactaaaaaaaatacaaacgcatttataaaatataaaatattaataaaaaataattaataaattaaacgggtccccgtcggggcggggagtgtcatttccgtccccgccccgtttaacattcggggacaaaatttaatccccgtctccgccccgttccccatttagacggggaatccccgccccattaggggcgggtccccgcggggcaccatccccgtggggaaaatgtgcatccctacttagtgctcttccttgctgcagtgtggtttcccttccaattagaattatagaggcggattctgaagagttagctaataaattgaattctagtaatgaaaatttttctcactttactaatttgattaggaaaggtaaatatttattggttttgttctctggtgataagatttatcatatatttaggaaaaagaatttgcagcataaatacttaagtgtcaagttattatatacatgttattttttttattgttatatttaaattaaatataacaatttaatgatttggactaatcggactgtcacgtgacgattaacttaaaatttagggaaaattttagtattatacctataatataatcaattaaca

SEQ ID NO: 329042 - DNA, 918 bp, Cannabis indica
tataatatagagatatcattaatttttacaaaatttaaatattatattagtaggataatgtcgtttaggtagagtcaataaaacatgtctctacataacaaacttagttttttttattatgtgtccacccccatattcaatagactaaaatttaattaattctattttatattaatttttttaataattttgtaatattaatatataaggaaagtttaacttttttttttaaaaaaaaaatggaaaaaatacttagttttttttttacttttaagtatactattattgtatacatgcataaatatcctttttagttttctaaccatatgtaattaaaaaaagaatgaacttataatgatttttttttttaattttttaataatatgcaactagaaaagggacgaggatagaaaaaaaaacgcaacccaataaatacataaaaaaataaaaattataaagatattgacaaaaatatcatatctttgtataaattcaatctgattactaggtttatagaaaattaaaatatggtatttaaaactaggcattgcaaaaataaaacaagtttcaccttatcatagataaattttttacaatgtatcatcttgtcaattccagcttcacatctcccaaataaatcaagtactttttatttttttcaaaatcagacttttatcacataacaaatagagaaaaataaaacttgttgacatgataattacacatcattattgcctaaaacacaatcattgttgcactaaatcaacccatcctctactcttccctcatctttagggacgagcgtcatcttcaaacattcctttctcctacgagttgataataaaatgtccaaacattttatttcctcaaaaaaagaggaagctaatgagttcagcattatatcttctgattttatat

SEQ ID NO: 329043 - DNA, 1004 bp, Cannabis indica
ccacaactcacttggtttcttaaaataattcttcaatcaacttagaaatttcatgttctatacctacataatcgtgagcagtaagtgcgactttcattttatagaaaagaaaagacttgctgtgattttcttcacaagaaaactgatcaaacagtttaggaaaataattaaggatcagatatacacagctggatagatagaagttagttgagtcatcaaacttacccttcatgccttactttccataaatagaaaactagtcatatttcctaccttatataattcaatcaatataaaaacacaatcaaggaaacaacctaaacaactacgtccaaaataaataattaaattataaaatatattttttcaattgaaagataccaaaaatagaattaacaatcttcccatttggcactttgattgacaaaataatctataagaaaaaaacctacatcaagagttagaaataaaaataatagagtataaaaaatgctccccctgcatgaaagcataataagggtctagagttgtaaccaataatccaaaaaataaatactactccctatttttgtctatgaaggagccaaagataaaaatgaaaataaacaaagtcataaaaaagtttaacaaagcatggataatgagcaaaaaagaaaagaaccacttaagcatcatcattggattggaagaatttcatgatgttttccatcctcatgagaagtagggttgacttgtctccattcttcccaaatgcaagttgaattcatccatttttgtaggagcaaagtggaggctaaaacagcagcatgtttatctatagcaccaagggaagcaaactgagcctttttctttgtatatttgccttgaggaagtttttttgggattttgaaagtggtaccaatagcaggagcttcaatggactcattctcaagaatcaactccttttggttagacaaaattttataaatcaaatgatgaaaaataagattaagcctaggtttctt

SEQ ID NO: 329044 - DNA, 1899 bp, Cannabis indica
atccaagtatttctagtccaaaagaaatatacatgctagatgacaatccaacttagacgacaccaatagtaacttacctccaattaggtttcctgtcagaaaacaggaacggagcaagaaagatgatgaggaaagttgtctggtatcttatcttggatggaattatgtaccgttgtgggttttcaatgccacttttgagatttgttactaaggaaaaagttacaaggatgatagtaaaagtttatgaaggtttttacggcaatcatgctaggggtaaatccttttaaagaaaatactcaaacaaggatatttttggcctacgatgatcgaatatttaatggactatgtcaaaaaatgtgacaagttccaaaggttctcaaagatcccaagggctctaccatatgagctcatacaaatgcagtttccatttgatataagggggatagatttatcaggaaactacccaaggggaaggaggagtacaacacgccgtagtcgttgtcgattattttacaaaatagattgaagctgaacccctagctactacaacttcaaagaaagtcctaaactttgttgttaaaaatatcatttgtcgaaacggtctcccacagaagattatgtcaaacaatggtaaacagtttgatagtgatacattcacttaatttttgcgattgtcacaacattatattaaaagcttctccacagttgctcacccacaatcaaatggaatagtagaagctgtaaataaaaccaagtttagcttttaggacaagtgggacagttgttagggtttatgtcctcaaaagcctgtaaagtatattttttatttattaaataaagagttttaacatttgatatatgtgtgaatgttaagttattaatatttattattaaataatttatattatatatcagaaaattcattattcatataagaggttgtggcttgtagttgtatagagaagtaagaccatttagctatgaataaaacagtcagtaacatattaaagttatagaatctttaatcaacagttactagtacagttcactgatgcctgtttgtcgatacaagtaatcttggttcagattataaatgtagtatgacatcaaattaaaagtgttgtatataatagagattatatatgacaacgaccgatatgaatgaagcaatctttattaacatgtcttttatcgtaaagacctatttcataatgatgatcaatagtagatcgacctaaatcctgagttgtcatgaatttttgctcatgttattagtttctttgattcactcgttaaagtttcttaaagaagatgattcttaaaacttctattttgggaatctaataatatggatggctgggaacatgatttaaaattatagaatcttgactttcctaacatatcgaatgttagttcatttcaagtgttaattctagaattagaatattgtgcacaaatttagatgagatctaatttatacttctactagtgaattaattggactaaaggataaagaagtatttagaatggtaaaacaataatttgaccaaaactaattacgaaacaacacatggagggctaatcactggaattgattatattaatcaacactgtagttaaactcaataaatataattctataattactaagagttcaattccatatttatagtggagtaaccatggaattaataaacaaggattatttggttgatgagactcaataaataatctagtttattggagcttagaattataggtccatggtcctcggatcgccaccttgagatactatcaagggtagggataaagagttgtataatatgttcgaaaaaaattctatttttaaaattgcaaaaaatagtaattatttatttttgtaataaataaagatttttt

SEQ ID NO: 329045 - DNA, 651 bp, Cannabis indica
tgggacaatgttctccaatagatcctggacagcaacatatgaaagttcattataattttaatatttttttttattattatcttgttaatattcttatgagcattacataatacatatataaagtttgggcaaattctaccatttactctttcttaaaataaaaaggatatatcgatgcattcatatctatttcggtatttgaaaaaaaaaattagtcttttttttatatatatatataatcgtgtagattgtaattatttaagatatcttgtaaattttgagacttttgaaaaaatttaacatgccgaaaataatgttcaaacatgccaaaaattaagagtaatttgtggtgtaaatacttaagtttagctctcacttgtagatatatacataaatttaatttttgatagtaataatacctaagttatattatagaactataggtacccagctattaagtgtcaagttaattgtcgcatgctagtttttgattggttcgggttattaaatttttattttaatttaaatatactaataagaaaataacacgacgatattgacttagcattaggtacctacagaagtttcaaaaaaatataatttaaatattattatcgtaaaaaattaaacttaaatatttatttgtaaaat

SEQ ID NO: 329046 - DNA, 1044 bp, Cannabis indica
aaacgcacccttacttaatgtaactttacaatttaccgtttacattaaatataaattaacaaccaactttttctatttcaaaaaaaaaatcaaaaaaattcttcaatgaccttaattaatacaaaagtgtaatgcaataattaatttcttcgaaaatttggtcgtgattgaagaatttgtcaatggtcatggttatatagtctagtaagtataaacaaaaaaaaaaattacccaaaattcgaacctcatccactataccaaaaaaaaaaaaaaatacgtttaaagtttataaaaataaaattagtctaaattacaattgggttgatgttgatattcttttgttatatacgaggaaaaaagtgaaaaaaaaaaaaataaaaaaaaaaaaaaaaaaagtatcatttcaatagagtatattagcacgaaaaggatcgtcttctacattacaatatgttcatgtctttttctttaacttttactttgccaagttatccctagttttaaatgataattttccctattgtatcaagcaatgacagagtataattttctttttctttcaattcttttcttattcttcttcttttggtagaaaatccttttccttctttttcttgaagcgtaaaacgcactagtaccatcccattcattattcttcttaccaaagaaggtttgacagaaagaataagaaactaagttgtattattgatcaggaaataaaaggatacatttatagactggtagcaaaaactaaccccaaagaataataagaaccatgtattaaaatatttctatttaatatcagaatatttataatattgctataaaattatggctaaatactattttagactttgtgttttgcaagaactattaattagactttatgttttgttaaatgacaaaatggactctgtattttctaaaattatacaaatagaattctgaactgatttttgtcaaaataaaacctaataataatctgatatagagaaattataacaaaactggttacattttatgtatctgttcgtgttaaaaatt

SEQ ID NO: 329047 - DNA, 729 bp, Cannabis indica
gcatgtaattataatcatcaattaaaaaaaaatacaaacaataaagtaacagtatatgtaggtgcattcaaaatatctactaagaaattattacacatgttaatgtgacaatttttttaataaccaatcacatttatttaaatgggacatcgcgagttttttttttttttttttttaaaaaaagttcaatagaatcatgaaatcaatttacaataacattaagaaaaaagaagaatgataccattcttttttttacctacatcaactttctgttttgactgatctcttaattttttgggttgcatatatcattattcttaataataataatagtgatagaaaaggagctgagtctggacttggataacaatctataaatgtaactgttcattgcttttttttatattaagaatttaattaatgattgatgcatgaaaatggtaatatattcaatggctttttcatagttgactaacaaaataatagtaactgcaatcactattcctactaccaattggagacttgtatctatcacacttctgagtatatgatgtggcagaatccaccaattgaaattatgaacttagattttatttttaccatatatatataaaataaatatcccagattcatattaccaactaaagcaaagcaatattcaaagtagattacctgaatcacaataattaaaagttatcaatgattgttgggtggagtctgctttgagtg

SEQ ID NO: 329048 - DNA, 1083 bp, Cannabis indica
taggatcataatcctacttattacttgattaacctataatataaatataaaccatattatttaccattaggcttatcgggatattacagtgtcgcacgaagaggctattcctttatgtccaatccgcacgaagaagaagagatggaagaaagagaaaaagttagtttagggttctatttttttcttttcttttttactaaattatgtttttattttgcattttttgtttaatcatatttatatattgttataattttattaagacaaattataatatgtcatatgttcagtcgtaggaatggcaatttgggtttttcttgcgggtcggcccccgcctcgacaggatagcctttcacccgtgacaatcgagtttttctcgggtcgttgccctgatctagctcgacccgacactttttatatcagattgaggtcgacccagtctagtttagctccaaaagaaatcgtgagaatgaatcccaaaacaatgaaatcagacctaaattaaaatcccaaacaccttcagaccaaaatcaaaaatcaaattcagaaatttctccgaaattattgaaatccttaatgttgactgagaattttagacagaaattcttaagccacactcgctcgctagattggtgagaatgaaatatttgttaagtataaatagagagacacaatgtaatatcccgataagcctaatggtaaataattagggtttataattatattatgggttaattagataataagtgggattatggtcctactaatatagtttaacataaattttgaattcgctataagtggataaataagcgtaatttataaattatggagatttacatggcatacgtgaatgtaatttgggttactggtgtaataaaaatatttttaggtttggcgactttagagactcgatcgggggccagaaatgtcataacgattttaattgatagaattgattaggggtgttcataaaatagcagatccaatccaatccgtaaagtgcggatatccgcacttgtgcggatttgattggattggaaaattcaaaatccgcacttgtgcggattggatgttgattga

SEQ ID NO: 329049 - DNA, 622 bp, Cannabis indica
ttgcccattgagccaccgagtgggccacaccattacaggatctagggatccattgaacctcccagaggttcagatttcgaacaaggttgaagaagatagcaatcttgtcttgaatgttaaaatggagcttgtgaatctcagcaggattactttttatagcattaaccggattcaatgagtcacattggaagataatgttcttgtatccttagtaaacagccactgcagctccttcacaaatagcagcaacctccctagccagagggtccaattgggtcgtgcggaaggtgaggatgtgccgaaacgaacctgaggcgtctctgaagaccacagtccctgcagattgagaacgcccaatagcaatatcagagttgcatgccaaccagccatcgagggggggggggttccaaacagattgtagagaggcatttccagttgggtcaagctcacgaagcctaagattgacaaggttaatggtgatgccaatcggagtggaattcccttcatggatgattcgattccgcaccttccaaatgttttcgaatattattgcagcgcctctgtaatatccagattaaaatagtattaaatttttttttttttggatattaattgagcgagg

SEQ ID NO: 329050 - DNA, 554 bp, Cannabis indica
ataaaaataaaaagatagcatcaatattatatagttgcatcaacacaatttctatgataacactaatttatcttcaatagtatagcatacttgtattttgctaaataaacattccacataagtaagtatcctcaaaaatttaaccattggagatgcaagtttattttcctaactaggctgcttccagggtttagataccaattatgattttctttatacaaattaaatattaaaattgatagttataattttaaattattttataatatggtgtatattgtagctaattaaataattttgagaaatttagaacaatttacaatatgctataaaattactatgaagaatacaaaataaataaggagaaaagaagaagagagaatgagaatgagaatttcttcgtaatttatttcaataggatgaacccctattcatacaaaaatatgactagaataataaaaaattaaatcaatgaaataaaaagaaatgtaatgaaacatttatagtgataattaatgcattgatttgggtgatttgtacatccatataacact

SEQ ID NO: 329051 - DNA, 1141 bp, Cannabis indica
tatataataaaatattttttttataatgtatagtatacataataaatgttagtaaatatgcatttaacacttataaaaaaatgataaaatcttgtggtcccaatgcacattattctaaaaattttacctattttagaatttatgaagtatttgtttaaaaaaaaatttgaagttatgaaatattaattgataattttttttctaataaaaagctcaattttaattttttgcccaaagctcctaaatcgcttggatcggccctgaaaatagttatgaaagttagttagctctaactgttttgttgtaaccatgttcggtttctattaggctagcttggttgttagtcagctttgctcttctcctttctagcttgtatatatttcagtttgttctcttacatgattcagtaatgagattcacttttttgatctcaatctttctctctttcgattctttcaagcttttactatgtcaaggaagtttaatactagttatctacatatttaggcgatgtgtaggaccgttatatttggagggtgtggaacacattaagtattataactcttaaacatgttatggctagatcaacaggtcttgagatattttcttacatcccaacttaaaagttttccatgcattctcaacgtgtatatatatatatatatatatatatatatattttttttaccataaactgacatcgaagcaaataattgcgcgttcactaaagttttaatcagatttcatcacaaatcatcgcacaacttgttatattattttaaataatataatgtttagattaaataattaagtgtgacaaattcaaattataacatacattatggagttacaaaatgtgtgtagaatgatcacaaaatatgagttgcaaatcttttaatttaatgatcatttgaatatgtaactctcacttctttttcactcttaaattagtaaaagatgttactaattgtttatgaatgcgaaagaatgataactattgaaaatatagctgttggagacttgatttattcatttataaggtatataaatggttcaaaatcaagtggaagtaatttggaacaccttggaaaagaattggccaaagctgaaaaaatagtactagtaactagttactgtttta

SEQ ID NO: 329052 - DNA, 648 bp, Cannabis indica
gctgatttttcagttcaagagacattgtacagatgtgtctttaatgtatgttttatttctttatttatataagaaaattttgctaaaaatctgtccagatataatgaatctgtttgtaacggtttgatagtttctttgaacagattctgctttcctttttagaaatatttttcatttattgtttgaatgtttccttacttataaagtacgacctgttgtgtagtaattgaaaatatatttttactcaagttgtggttttatatggtaagaataaaatattttattatgtaataaattatatatatagtatttttttgtatttgatttattttattcattttctaatatgatctcattgctctccaattgggttgtgatgtttaagaaaatttttgtgaggatgaacttgggtttgatggagtctagattcacaatattcactagacatatcaagattttatctgcacacatatctcttctgacatgatttcatcatttaatgagcttttgtaagaaaactaattaatattttctcttcgtattcaaaccttttgagctcggttttgggtgtcatttattactataaatatgacctaaactagcagcaaaatgttaaactttttcacttcttaatttcttatattttta

SEQ ID NO: 329053 - DNA, 502 bp, Cannabis indica
tgtgagttcttgccaagatctatagcaagaatggatgatcatttttttaaaacaaaaagaatcaaggataccctgataatgcatcaataggtatattgatctcatcatgtagtataggtttaatgtttataaatatttttcataaactgtttttgctttctactctaatttgaaccatgaaaaccaacacccagacccagccccatacccggacctagtccagaaccctagacttggaccccatatctaaaattgctcccggaccctgaccccaaacctcagaactcagacctcggatccaacccggaccagggtgcaaaagttcgaggtcaaggtttagggatggggtctaggttagggttagtagcctggggctggagatgggatctgggtccaggtttaggatcgagatgagagttgtgtttatggtaaatatagtataattctacataatctataaataaaagttaatgttaaatataatactatttaaatatactaa

SEQ ID NO: 329054 - DNA, 1147 bp, Cannabis indica
gataaccctaaaatgatagcaattgagacaatggtttattcatattactaactagttactagttatatgagttgtaactaattagtttctcacaactagttatattgatggtggtgatgatgagaggaatttacacaacaattcgtcaagtgatgacgacttaaatgatttctaattatcattgcatttgccattaatattttactttgagttttatgagtcaagtgtgtttatggcatgtaatttttatgagatatttatagtatgtttgaaatttatgtggtattttatttattcttagatgttctaaaatattaattcaatataattttttaggcttatgcctcaaggcttatttgcgttatttttaacattgaaccaactagtaactaatcttactctaaattactaagtagtaattagttctaattctaccgaaattttggcaagataacggttataattgaacgttcctaaccttgtctggcactactataatacactttaataaatatctaaaaattccatattcatataaagaaggtatgatcttgtaaggtagtacaagagaattaagatcatacaatatgaataaaataagtcggtaggatattaaagtattgaatctttaatatgaaattaccaagtacggtttaccaagcactatactcgagtatgtgtgattttgaagtggatcacatatgtggatagacatttagtaaaggtagtgtctataatttgattatatatgattggatcgatatgaaataacatctttcatcaacgtgccgtttatcaagaaagagttattcatattacaatgatgatcattagtagatgagtctgaatcccgagtatgcatgaactcttgtttgtgttcattgagttatttgattcactcgttaagcttctcaaggaaaatgattcttataacttctaattttggaacttaataacatgagtggctgggaacaagttatacaataatagaattcatgctttccaagaggaacaaacattagttcttttatagtattaaagtgctaacggttggatccaaatctataattagattatagattaactattcacattgaattaatggtacataaagaattcagtagataattagaagggtaaaatgata

SEQ ID NO: 329055 - DNA, 588 bp, Cannabis indica
accattgatattgacttagaaagatataacagtaagtttatgataacattgactagagaatttgtggagtgttgatttattctcattttttggttgtggagtatgaattaaacttcttgcaaatcaaaagattcagatcgagatgtaagattgacaataacaacttcgtattcaaattcaagataggattaaatcttcatcatagattggtcggccagaagcagctagatcatctccaaactattagcctttcttggtgtattcgagatatcctcgaatctgaagtagtcaagctctggatcttgtgttgaataattgattgaaggtgttccagatctcagcagaggtttgacaatttatgacatatccatcactttggttggctcattaagcttctaaaattttgttcaccaacaagaaccctttggcgaagatgacggttattcatgcaatcaaccaatagcaactcttcacaatattccacattgaactattatatatgatgccaaataaagctatcttaggtgggtgtgtatgttgaaagtcttgagttcgagtcccaagtaaaacatgattgtaatatataaa

SEQ ID NO: 329056 - DNA, 660 bp, Cannabis indica
tatatattatatatatatcatcctcaagcttcttattgatcatttcatttttatttttttgtaataattaattgataggttcgatgcatggcatcctagatctgctcacgtggctatatgggttggagattaattaatcatttaaaattattattatcaaagcaaagacgaattaatttcttgtggctattagtgcatggtagagagattagtcaatgataattataaatttgtaatgacttacattagattagttataataataatgtttagattccttaaataagaataaaaatattactctaccttaataattaattagcttaaataggtatcactacaaaatattactatgtttagtgacaattttttagttacaaaataaattttttgttactaaatataacatttagtcacaataaaatattactatctttagtgacaattttttagtcaatatatagttttttttttttttgactaaatgtaacttttaatcataataaaaatattacttgtgactaaaacataatatttagatacaaattgtcactaatttagttttagtcacaataaatattgtgactaaaactaatatttagttcacaacaaattagtaatttttagttgactaatacatttagctacagaccttttagt

SEQ ID NO: 329057 - DNA, 493 bp, Cannabis indica
aacaaactagaaattgactattttttgttgttttgattttctgtccttataaattttggccatgtttttaggtagttgaaatagtcataatttatggttattaagaatattttgagactaaacagattggattaacacatattttaggcaagaagctctagattcttgaaaatgacttacgtaccacttttttaatagtaagtagataaggaataggaatatatttaggtgaatggtttgtttttaggtctcttcaccttattttgaaatttgaaaaattatatgaggtaataatggttagagaaaataatatatatatggttatgtaatagaatttttagtttaacatattttttaaatttttacgtcaattttaacacaatatatttttaattaacagaatattaatttatattctttattaattttgtattattattattatatatatgttaaaaataaaaattaagtatatattttatataaagaaatt

SEQ ID NO: 329058 - DNA, 640 bp, Cannabis indica
ggaggccttcatcatctcctcaatttcactgtagatgaggtcttcatcatctcctcggcttcaaagtggaggaagtcttcatcatctcctgagctttagagctaaggaggtcttcgtgatgactgctaatgatgtgttgtaatagtcagtggctgttctttggtcaagtgtggatttgaccaactcttaaattaatatgcccaagatgggggtgatgtcttccccatctccggtgcacttttgagtgattgtaggtgcggtctccatttcatcctcggtcttaaccttagcggtcttcattgtcccttctattgtattcacaatggaagaggccttcttcatctccttagttttcttgatagcaaaggaggcctcaaggatgtttctcaggcaaatatcactgatgtattgtaacattcaaattctactctttggttgccaaggagatgctcgataccagctgttgtcgagaactttacagacatgtggtagataagtgagattggcaaggtaggtcttgggtttgaccttcaaaggatactggtgtcgattcactatgtaagatagttcatagtgatgttgtctatgggtacagtttcaactactaagtggtgattttgagtttctacctacgtaagcg

SEQ ID NO: 329059 - DNA, 814 bp, Cannabis indica
tacagtctcatcatcttagtattaatgggttttcgttttgttaccactctcactttatagttttctttaagggctcaatagatataatataggttgtgtttcccaattattcattataccattttccacatcgagaagtttggtactacacagcacgtgctcttaacgtggataaagttatacttgtttaataaagtgaaacgatcggagctgatttttgaaatggctctctaataataataataatagtacttgaccttgaaatatcaaaaattaaaacactcaaaagtctttggctccttgttttttttccttaaaatgtaaagctcagtcaccttctttcatttaattagtattatttccatgccacaaaaaagtatattattatttccttaggtgagaaaaaagagaaatgctatttatataaatatttaatatttaggaccataattacgacaacaagcgtagtacatgaatgggagagcttatattatacatatgatatgctccgtccgtaccctcattcacaagttaaacatatatggaatatttttttagagaaaattacggttttaatatttaactttaactttcagttgtaaataaatactgaagtttaattttttgcggtaataatacttaagttatatttctagaattctggaagtaggagtggacatcatccaatccaatccaattgaaccgaactaatccaatctaatctaattataaaaagttggatatccaattacaattgaattagattggatgctaaaaggtagattctaattggattagatcggttattggatgt

SEQ ID NO: 329060 - DNA, 743 bp, Cannabis indica
aaaacaatggtaatcctgcaaattagtgggtattttaatgtgtctaacaggtctggtattaggaataggtgctgcaatatcagcaacatcattgtgaaaataaggaccagggctgttatggacattagaagcaggaatagttgctggtgtatcaatatctggtgcatcgggttcagtaatatgtggaacattttgatggttgggactaatatctgagattggggtgatatgagataaagaattaatagtagcagtaggattttgagatgcatcagcaaggaaaaaatctgtgaaagcagaaggcagattgctatgattaaaaaaggaaagatgtgctcatgaaatattacatctctagagcaaaaaattttgttagtattgagatcaagcaattcgtatgccttcattccaggaggataccccaagaaggcacaagcagtagctcttggagataattttgacctcccttctcctagagtaaaagcataagccaaacatccaaatgcctttagatgttggtaactaggaacttttgaattcaagatttcaaagggagatttgtgttaaagattaggagtgggagtcctattgatgagataggcagcagtgcttatgcaatctccccaataaggcaaaggaatgtgagattggaaaagaatggctctagcaacattcagtaaatgctgatgctttctttctacaacagagttttgttgtggcctttggacacaagaatggtagtg

SEQ ID NO: 329061 - DNA, 1104 bp, Cannabis indica
tggctttatgctcaagacaaaacctttgacccatctttaggtttgttgtttcctgaagatggtaatgagcattggacttcaccaaatattgatacgattaagattaataccgatgctacaatattctcttcaactaactactatagctactcctgtgttgctagaactcatgctagtacattattggaagccaaggccaagtgtgtaagaggtgttgtctcccctaaggtggctgaagtcattggcatacatgaagaattgagttggatcaaagacaaacggtggagctatgtggaagtagaatcgaactgccttgtagccattcagtctatttatagctcgtataccatgtattcctattttggtagagttattactaagtgcaaaaggttgttggatgagttgaaagattgttttgtttctttaaaatttgttaaacggtctacaaacaatggagctcactatttagcgagatccacttgttttatttctgatcgtagtttgagtgtgagcaatgctccctaccgagttcatttctctattgatgaacaatttgattatttaatgaagtttatctttttttgtcaaaaaaaaataaattataaatataaaagtgaaaattgctctttattatatttgccattttatttaatttttctaaaaaaataaatatttactcatttaatttttaatttaatggcacgtttattaaactgtaattggaatcagaataattaataggagaaatgtatcagtttaaaatagaaaataatcggaaacaatgttttattatgttgtttactaaactgtttggaaagaaaaccaaaatatcatatattattttgtttacataactagtaaaggtaatcggaatgctttaatttgacaaaattgtcattattagataatataattattttttgctaatagatttttaaaaagcatatttgtcttttttatttttaattaataaaattaaaattgaaataaattaagttaggaaagggaaaggtattccctataaaaatggggggagaaccttttcctttattttctccctaatttgtgtggatcccactactttctctctttccaaaatttagt

SEQ ID NO: 329062 - DNA, 1515 bp, Cannabis indica
aattccaagattaggcatgatctagtgattacaacaatgacacaactagttgcgttgagatggtttaaaaggctctccaagccaaagatgtagtggaatttttacaggagcccaagggtctccgactgttggtggaaccaccacccttcatacttctgcttatggttaggatggaggtgataccaatgttgatcagaagagaaataatgttctgacatctggtaattggagacagagcaagaggttctgtgggaactagggcagaggtccacgttagagttattcatatcttaagtaacctcgttgaaagaaacatcatcccagggaaagtacatgaaatgcatgatctcatggtcaggaatttcaagaaacactgtcctcagataaaaaaggaaaagctaaaacaaaggcaaaacccgtacctgcttgggtgtttcccattacacaagcggatgctacaaccagtcttttggtggtaatacgtcaatttcttgtcaactactcctaatattttgtactgtttgactctggggctacacattcatatgtgagagcaagagtaattaataaattaggtaggccttgtgattttatcgagttaagatttagaaccctactacctatctgagaactggttatttctaaaaggttgattaggtctatgctagttaaaatttaaaatagggagtttagtgttaacctagtttagttggaattgatggagtttgatattatacttgtaatgggttttttgtccatgtattcggtcagtagtgattgaaaatgtaaaatggtaactttttagccggacggtgaagatccatttgcttatgtcaagactattcagggttctcggatcttaatcattttcaatataaaggctaaagatttattacatagtggatgtgtaggatttttagcatttgtgattgactccagcagacctgaaacacttgggctaagaagaaagatagatcccttcggatatagcattgattattgggagttgaataagctgacaataaaaaataactatccattgcctagaatggataacttgttcaatcagttttagggtaagacagtgttctctaagattgacctgcatttgggttatcatcaattgagaattcaggaggcagacatcctgaagacagcattttgaacaagatattgccgctacgaattcctggtaatgtcatttagattgaaaaattcttcactagcttttatgaatctcatgaacagagtgttcaaggatttcttagataactaggttatagtgtttatcgaagacatccttgtatactctctgacggaagcaaaacatgagaaacatcttgggatggttttacaatgactcagaaatcataaattttatgcaatgtttaacaagtgtgaattctggttatcataagtgtccttcgcagggcatattgtcagaaggatagaattatggttgatttgggaaagattgtgtaatgaccgctttagtaatttggattagtaaaggca

SEQ ID NO: 329063 - DNA, 2154 bp, Cannabis indica
caggagggcatctctttttgccttctttctgtctgctccttgaagtcacgaagctccttcacctcaacggtcaagttgggtgtcatttttaaatcagcctagtgcagctcctctaaggacttcagcttggcagtcagatctttaaccgcctccttggcctcccgaagctcgcgcctcgccttagtcacagcctcatcctaggtcctcagggcatcatcctttgcctttaactcctccgccttggccttcaatgcctcctggtgcctccgctctatctgagcctccctctgctgggcctcctcccaaaaagctttcttctcagccgccaagtctcttagactcttcatggcctcatccatgcccccaaattcaaacaagatgtacccatgattgattaaagtctttgagaggcgactggcctctgcagcaatctggcaatataagaaaaatgagtaagtacgggagatcaggtgccataaagcaaagcccaagaacactaatagatagacttacagcagtcatagcaacgctaatatcctgcatctggtaaattgagttcgtggaagcgcaggctgcatatctctttgtcgggagctgggtcaggttggagacaaagtggctcatcaactctgaggcaaagggagcgagagtaggccaaatgaagcggttgaatcagtctgtcagggggtccatgttcaggtcccaggcgttcccaaaggtctcactacgcgaggaattctcttgggcctcccttaaaacctttttcaaggcctccacctcagcgttcttctttgtgtattcagccatagcgtagttgtgcttggcgatctggagctgttgtctctcttcatcagtaggaacgagagtcaggacaatgctgggggcacagtatattcctccgcttcgagagggatccccgagtcagagctggcggccggagtatcaaccctcctcggcttcttggtaaactcaacctccaccatcttgcccttgcgcttccggtctaaaggggcaaggatttctccctcttcttcctcttcggcctccctgtcttcatcgatcaagacgatttggcctaaggtaatgcttgaagaagacctccctggagtcaccgtttggtcaggtgcaggaggaagagcggagtcaggactgtaagtctgggtgagagtcgccaaaagctcctccattggcctagttgcttcaaggaacaaacaaataagtgtcagaatggccacgagaatttatgcaaacaaaaacaaagctgtaaaactagtcctacccagacaatctaattcagccgtagcaaagtcttgtactataatactggcttcgtcatccccaagaaagttgtccgaggggagaaaccaactggaagacagataggctgaatgatccaaagggataggtgccggaggcccagaccccatccaggaccggcctagaaaatgacctaagttggaaaaatataaacccttggcatgataaccccaccgggtaggggcattctaattctaaggagacgtttgtcaaactctataggtctacatagagaataatcttgagcgaaaggaacatgatggaccgttaagggagacttaccgaatccggatgtgctggcattaagagccccagtattgggaatcgggagcagcaacttaggccgagaagatacccgttctttaccagcttctaccaagagcgtcttcccggcagcagcttgagccttagtgtaggctaactcatgttccctcctaaagaagtacttctggtaccgatcatccgccgaggcgatgatgtccgcccagagagccttttcagaatccggggtgcgaatgttgtggcagaggaccttagagaggttgaagtcgtccaccgattggctctccgtgataagcttggccttccggcaatgcaccgttgtgaataagtctcccacattaaggtcgtttttatcatatgtggagaagaccttagcgtgctgaaggaaaagttgggtaggagcggtacggtgcatcagagggatcctgacccactccatgagcaattctggacgttccacggcttgaaagccggaagagaagaagaattggtggcgtttttccttgacattcttttgaaaattataagggaccggaccctcattggcaggatggg

SEQ ID NO: 329064 - DNA, 558 bp, Cannabis indica
catgtgttatgtggctttctatctacaagcctaaaaaatatagtttgtcttggattgcaaattgggtaaattatacttacatacatatctatcgcttgttttgttatttatttaattatttatgtattttgatgtgatgtgtttatttttctttaatttttttttttttcagttttgcataatattgggagtaacattgatggttgtagcacctattggagctcttaggacaatcatcatttcggctaagaactacaagttttttggttgaacttattaattatattatagattgttttagtgtgttaatagtttttgttttctcttttttttcctccctttgaaattttagcttatattagattagtttttgttttggtattttatttaattagtttggacatcaattaagtttttttctgagtaataattttggaagtatttttttctcttattgtttaattagtattgtatgctaaaatcatacgaaagtaatgtagtaagtgagcgtgagagacctatatatttaagtaatttggattatatatatatatatat

SEQ ID NO: 329065 - DNA, 754 bp, Cannabis indica
tattataaatatatattataattaattaaaatgtatatgcattttttctttttaagaggcaactatcccacctttttattttgaaataagcgttagataaataaaaaaaaatttacctctcggtcattacaaaggatagagtcaagtattgaggaaggttccacaaaacctgaaatgttctgggcgaatgccaaattagccacgttatgggcagcaaaattacaataccgagttataaacgaaaaattacatacttgattacataaagagacatgattatcaataatccaactaaagtgtagtcctttaagagctttgatagctatttcagaatcactctccaccaagacatacttgtgactcttgagtctagccgagtccaaagcaagacgacacgttgccgcctcacctatcagaggatctctaaagtagaggatgttaatagcagcccacacgatagttctagaatgattcctagctaaggtcgtcgtacacatggaatccccaccaacctatcacaccttacttctatatagtttgtccctgattatttaaaatatcatgcgcataataaaatatttaattcttaaatactatgaattatttaactttttttaaaataattttaaataattacaatatatacacctcaaacaattctattagtaattattatggctaattagaaatttttttcaccgaactttgacatgtactaaatcatgcccctagaacttttttggccgttaaaaat

SEQ ID NO: 329066 - DNA, 804 bp, Cannabis indica
ttaaaaataaaataatcaatttttaaatttaaaccttaaaatatcaaaaattaacaataatctaattaaaaattaaatattattaattttaaaattttgatatttaagtttgaatattaaaaataatatttcattttgaaatttagggtttgaaattggaaaaatacaaaattgggtgaaaaatatcacaaaattgaatttttgggtgcaaaacacccttgctgtgcacacaggctgagtgcagcctcatccgcgtgcaggaggttgcttgcagccttcgtgtgcgtagttgggtgatcgctcgggtgggcgttcagacaagaggataggcttcagacatgcatggacaagcaccttgtctgaattactgcgtgcgcctagtgctatctcgacaccatattcacctgaaacttcaaaacaccataacttcttcgtttttcatcggaattgatttctttaaaaaatgaaaattgcttaatttttttataagaaatccaaataaattattttcattgaaattttttgtaatttacatacattcatcaaataccacataaactaacatgaacacatccaaatcaacacaattaacatattcatcgttttaaatccatatttcattactatggctctgaggccagttgtatcaggatttagatttactaacaagtatgttgattaacatcctaaatatgaatatctctaaaataatgaaattaaacacataagagttcagaaaaccttacattgatgtagcagaatataatgactccttttcgctcatctctaacccttgttcctttc

SEQ ID NO: 329067 - DNA, 1101 bp, Cannabis indica
ctagggaggaagacttagttgatagtattgcactatcgaattgaagtaattgctatggatcgaattgaggtaattgctatggtacaatcaggtacgcatacctaattattatatattattattgtgttctatgttatatacaaattgatcttgggattattattaatttttctaacaggccctgggtgtaccaatataaatgtgctacgtgtacaagagtgtacacataagtagtttatgttggcagctaactgtaaaaaatagatgacacattaaatttactaacagttcagtcatttggagggttttattttatcaccaaaatttaagcttggaagattaagtacaaatacaaatagattaataattgaaaatactaaaaaaaatgtctctttcaacttactgctctctttctttcttattttttattttttttatgaaaaaataactaattcatcttaaagaagaatgactattaagttgggcacaaaaaatattatatttagctcaaaccctcaccactttttttaaaaaaataaataatataagaccagtcacgcatccgtgtccccccttctatatatctatatatataatagaaacttgaacctatgacatgacattcttaaactcctctatttttatttatctattttatcatttttcttctatttatctatgtaatcaattatttctaaccactaatcttaattattaattattcattaatattaatattaagaatcaattaaaaaccctcctattgaattgatggtaactcccatttacatttcaattcacaacgacacttaaaaaaaaaaaacttttcaatatttaaacagtttagagttgttagtattaataatcaaataattttcttttattaaattgataataactccaattaatattaattaattacaattacactctcaaaaatatatatagggcaagactatagtaatacttagcataagtttcttacgagtagggaaacttttttgatgattagttttagattagttattaagatataaggtttatacccttacgaaaggaatgcttatatataattaaattttatacatattataataatat

SEQ ID NO: 329068 - DNA, 909 bp, Cannabis indica
attatggtgttaaaattgttcaagtgggcgatagaattagtggtaccattatattgcgagatgtgtggatttttaaatccttgagaaaattgtgagttcaagatatcagggtggaatggttccatttcttcatctgagtcataccctggtaattttccatactctccatcctggtattttctaaacttgtcctctaattatattactcgcaactgaatgggatccacaagttgttgatctgtgttttgattaagttggttacgtagatcaggtgcatttcgatttaaatattcacgtaggtctggttgccttcaattttattgttcacggaggtcaggttcacgacgtctctgatcgtaattactcacggttctagtccctgagtaacttttagattgttttctttttatacacatgggataatatttaataactaaccaaccactcttttatctttaccattaaacgactatgatgactatgcaggttgtttctcgctgagtacaagctgtcattctttaccatctttataggaaaaaatgctaagtatagatacttcttctcgcaatgttctcatattataatgatattagcaaggtagttattccgtcgcatagagggcaagatggatgaatgtagttattctctatatgtgcaaatatgtgggtcaataagttacaagctcttattcttaagtatgtgggtcaatgagctagaagctttttattatctcgtcttaaacaattctattgtgtactgtgtctatcccgagatggatatattgtctcgttagctgtacctattaatagttattattcttatatcgcatatgctcatatggcagcgagtttgaatatttctatcaactgtaatttattgaaacgagttatttaagacgcatttaataat

SEQ ID NO: 329069 - DNA, 1019 bp, Cannabis indica
acaaatatatatgaggcatcagattgagattcgaagcactttcattttagagcacctagagcaccaggtgccccaggcacccagcgcccaagttgacatattatcaacctaggctacttccaagcatcaagctcaacaactatcccaggaattgtcgtcatcttcatcaaaagtgaggaaacaagtacttacgatggaagaaacggaccaatctgggagccagaataagggtccaacgcctaggttaacattttgtcaacctaggccaattccaatgagttttttcaagaagtatttcaggcatatcctccattttcgtcagagattaagatacaagtattttcgaaaattaaacaaaatcatttagtggcttgaaactggacccggcgctcaggttgacacctagtgctgggcccaacactcaggttaatattttgtcaacttgggctgtttccaatcatgtttccaaaaaagtatttcgggcatttttcccatcagcaaaaataatgaagatacaagtaaactcgagaagaaaataagaattctaggggcatgaaaacaaagcccagcgcctaggttagcaatcaacctagtgcgctagttttgatcatccaaatgtaaattctgctaccagaattctctctgaaatggtcaaacacagggtaggagaccttgtcctcaatttcaagaatctggaaagtataaaaacaacatcatggaagctccaaaaatagcacccagagcctaggttgacaagtgacctggtgcgttgtgttttgcttacccgattctaattctgtctcgagcgttcgtctagtttttcattgtaaccgagagctatgaaatcagaaaaatcaaattcacaacttcataatttcactttttcagaaaagtgactcactcgcaaattgggcagtttcaagtctcctgatttcgcaaaacaacaacacctccgagaactagtgaacagcttcacttgaacgtagaaacaaactaggtgatgtcaaaatatcacttag

SEQ ID NO: 329070 - DNA, 913 bp, Cannabis indica
acaaaaagataaatggcgaaattaagaagccatataccaagtcataaatttgccatgagtgatggtggggattactcctcctcctcctaccactggaggaacaacgttttgggttccttgtgggtacatatcatgatcaaagagatgatgatttaaatttgggtcattcagatgaggtggattaaatataaaatcatgatcctgttgattagcaatttaataaaaattagcagaagccgtaatcagtaatgaagataggagcaaaagggatatgagatttaacatgaggcgagccatgtaatacaattaatactatatatatttaagtttgatttatctataaaactatctatacatatagatagcttaaaatgaaggatataaattgatgaatgaatatgatgagcactattgttttatatacgaaggccacatataattgtttataaattataaacattacttgatcccacgtacattacttgatcccacgttctgcacagtccaataaatatatgtttgatattataataataactgtagtttattaatttgacatgtgactcataaatttctcataaattaatttattttaataataaatcattttatttttaatataaataaaaagtcacccatgaattatataactcaattttttttaatctaaatattatattatataaaataatataacattaaatataacaaagttgcaaagttatttaattctgtgtctttacattcactttcaaggcaccaacagaaacatatatatctattagttgtgtccatgatcaaaacttattaataatcatcttctcatctacatctttgattattaagattcaaacttatagtttcaatattattcttccaacatcaagatttgcattcattccatgagaataga

SEQ ID NO: 329071 - DNA, 872 bp, Cannabis indica
atattttggggggaatttctaacggctaaaaaagttcaggagtacaatttaatacatgtcaaagttcagaaaagaaaattactaattagcattgtcattatgattatttatatattataaaaaaaaaacatatttattatatataaagggatgaaaaaaaaagacttttatatttatttatattttaaatgctaactaaattaaaaagatacttagtttaaaacttaatttttcctttactttaagtagtgtagtagttgaaatttgaaagttattttgaatttttagtattaatcatgagtgtaaaacagatacctacccatgttaaatagagtaattaatttttcaaaatccaacaaaatattatttactgatatattgtttttttcatttactctgtctcagacgtgtaagagaggctaagcctaattaataaatagactctctttatagtgcacagagccccatcataacaaacctacactcatttgaaaagtcaccaccatgtaccaataataatatgacacgtgtaagcctcagtagtctattcatatatgatctcaggtgtaatccccaaaaatttgcctcaatctactaactaataataagtatattagctaaccccaaaaaaagctagagaatcattattattattattacttattattattattataattactctaattagtctaattagtctcaatctttattgatctcctttgacttaattatgcagctttggacagtgactcggatatttagttacacaaattatgccccattgggaaatgaaacaattcacattgattaataaaaaaaaaataataatatttttgcatgacaagagaaaagaaatagtttttaagtaa

SEQ ID NO: 329072 - DNA, 1261 bp, Cannabis indica
ggtcgatgctccttcaaacattgtttcaccgccatcgcagacatcgactcacaccattccttgagctcctactttagctcctcaaaatcaatccgctctgattgatcgaccagcatacgaggatgttagaaatctctactaccttagcactacaggtcatccaagtttagccttggccacacgagttcttactaatcacaatttccaaccatagaagcgtgatttaaaactttcaataggtgtgcacaacaaagcccctttccttgacaacggtcttcccaaatctcttacccaagaccctctgttgagttctttgatccgttgcaatcaaatggttcaaccttggatccttcattctgtctctcccaaaataaagaccagtatcatgtatctagatactgcacccgaaaggtggtttgaacttcacaatagattcaaccaagggaacagtctttgcatctttgaacttaatgaaaccttgaccttcttgcatcaacgagatgactcggtgagtgcttacttcaccaaattaactgatgtttgggatgaaatcaatcaattgcgtccaaaggttccttatacttgtgtggctgctgcaaaaacctaagaacatttgaatcatgatgaggtattacaatttctcaagggtctcaatgaattctaccatgttgtctgtgctcaggtacctcttattgacccttgcccccctctcaataaagttttttctataattgttcatcaagaacaacaacgaacccttggccaatcgtaacaccactcttcttactaccactactaccaccactgccccgaatcccatagctgattctcctacagccatggcttcaagaaccacacatatgcgtcctacttgttcccattgcctaaaacttggtcaccttaaatataaatgttactttcttataagatttcctccagcttatggcaacaaaaagtttgttgatacccttacatatagttggaaacaagacaatggcaatacctcaaaaaaccctccccactttacaaagttttgtcaccacaattgaaaaaaaacccctaagctcataccaacacaatgttaacaaattatttcaatgttgactcaacagttgcagctaactacttctacatcccaagatacttctgcggctgtgactaatttctctggtaatatcaatcattttccttataatttctagataacagataatgggtcaactcatcatatttgttgtgacattagatgtttttccttttt

SEQ ID NO: 329073 - DNA, 524 bp, Cannabis indica
aaattagattgaaataattttatttagggcataaaatcccaacatgctcccagacctgttttaagggctctagatccaaagtagcatccacacacaaacaaagactgtcaagggaaacggcaggggtagtgatagaacttcatgtggtcttattttgactccctgcgtttgggggttcagaatctggattaaaatgttaagcttccttgtaatcatgcaataatctactgacaaaatcttccacatcaattattttagtgtaatgatcattaaaaagagcattgttccttgtgttccaaatttgtcagaggatactaataagcaatgtgaaactgtctttgctaagctggtctaaaccttgaaggtaaaaatccttaatgtcataattttgattagttgtatcaaacattttgagtgaggagtgcttccaaacagtccttgccctgggacattctgtaatgactgcatttataatatgaattagtttaggcaattagcactaattattggtattttttataatt

SEQ ID NO: 329074 - DNA, 1857 bp, Cannabis indica
tttaaattgggattgataaagaaaatgggttagaaaaaaaatttaaaagacaatataagaagaaatacaatttttttttttagaaaaataaacaaacaaaaattcaaatgggccctgtgtagttgatttggttgcacagcctttttgggccagccatggtgaggttgacttaataacatgaactaagcccgattctctcgaaactaccaggtgggcattaattttgacaattttggacaatcacttatgttattcaagcattcccactaagagtaggagtttgaattcccattccttgttgaatagtaggattcaaaattttaagtaaagaaagaagagaaaagatgatcatcttttcttatcatttatcttttcctttttaacttaaaatttagatgactccttgagtgatttctttttatttaagcaactgtgaaatcatgccgccattggaatgtcaacatttactttgatctttgcctattgtcttagcgtttgaatctcttgtcacactctgtgtttatgtaaatatagatgtagtctttgtcttctcttaggttgtagccttgaagtcctttagcattccatcagatgtagtctttgtcttctcttgttcatctcctcgatttgatagtagaggaggcatttgtcaactccttagctttacagtgttggaggctttcatcatctccttggctttacagcataggaggccttcatcatctcctcaactttacagcagagaaggtcttcttggggactgtcaatgatttgttgaagcggtcgctagccgttctttggtcaattaaagatgtgaccaactctcaaattaatatacccaagatgggggcgatgtcttccccatctcaggtgcaccttagagtgattgtaggtgcggtctccattttttccttggtctttaaccttagaggtcttcatcgtctcttttgttgtattcacaacagaccttcttcatccccttggttgtcttcacagtaaaggaggtcttcctcatcccttgcttgttagcacagtcgaggaagtattcttggcgaatgtcgtcgatgtgttgtaacattcacatactactctttagttgccaaggaaacggtcgatactagctgttgtcgagaacaagacagaaaaatggtagatatgtgagatggctcagaggtcgttgggtgttgacctttcaaagagacttggtgtcgatcactttgaaggtagtcttagtgatgtttgtcacagggtagttttaactatgagtggcaatctaattttaccacagggagcgatgttagctcactcgagaccatacatgagctacttgcatggctccgaatctcttaaggagtgacccactctttttagggtctgtttgattagaatatttagtaatgcttgattattaataaccatcatctttgtcgccttgatgtttaaaatttcgtcaacaatgtctgagcttgattgctcttgtcctcccaatttatttaacttagataaagctttaaaattaatagagatagactaatttaggcaataaattaatgaagcatataatacctttgacaatattaaaaactgcaatttatcacaaatacttagaacgctagactattaggtgaatagtaatcctaaaatgataatagattaaagtaaaacttaatttagtaataatctaaataagattaaaacaataatcatggcattaaatatagagaatagaaacaattcgatgtaatggaaactaagaaattaatattcatcatagaaattaaagattcatgtcttgagttttgaaataacccttatctaaaagaaaccaactctgaattagacattataataaaaatc

SEQ ID NO: 329075 - DNA, 849 bp, Cannabis indica
aaaataaaagtaaatagtgcatttattgtgatgtaaattttacataatatcatattatgatctaaatttagatcaatttttattatgtaataaatttagatcgacttttaactcactatttgagcaaattttttataaaataaactatattttagtaatagatcaccaatttacatttatattaaagatgttcttagtactctataatactttaacaattcttcactacaccaataataaaatgaaaattttgttaaatgtgctatcttaaaaggattcaatgttattatttttttttttttggaactggttaaatgtgcaagatacttaaaatgaaaattttgttatttagtgagattattaagtcaatgtttgactacgttcttatacttttttcaaagaatttgtgaagtacaaagttgtaaatctctttattttgttaacattttaaattgtctcatttattgaagatgatcaaaacaaaaagaaaaacatattaagcctgtctatggtgatacacctattctttactttgttggcaatgcagtcctcttgtgtcacttacataagaaaaatcctcttttcacatattcttctcccaaattgaaagtaatactttgacttagaatgcatttaagggctaaggaacaaccaaaacacctataaaataagtaaatatatttagagagctaattttaagagttttcaacattcttcaatcatcttttcctcgttctttttattatttggtatggttatgacggttaaacattctcaattattattttatttgcacttaattttttaaatttaaattttgaaaataaaatcctctaaactactaaatta

SEQ ID NO: 329076 - DNA, 572 bp, Cannabis indica
aaaaaaaaaaaaagaacaaaaaataaaaacttaaaagacccatagaggcaatcaaaaaaatcaacaaagaaaattataagtatttgtattaattacagcttatatttgtaattaaaaatcatacgaagctatctcacatattataaagatgaagaattctaaaagcattttacttttaatatttaatttacattttgcttatcactagaagtatcttcaaaagataggctcaaacttcaaaaaaattattcacctttctaaaatcagaagaatatttattgggtttttttttttttgaaataaatagaaaactttattatttatttattttgaaaaggaatagaaataaacttcattaaaatgtgaaaacaatcggcaaattaaggcaagaatatttatgttaagcattcttttccaaaacactttttattctttctctatccgttacaagaaaattaattattttctgacatatgtctttgttaaaattatatataaaaagattcttaatgggtaatacccattgatgggaactaaaaaaaattaataagataataatctaataacctttt

SEQ ID NO: 329077 - DNA, 1022 bp, Cannabis indica
aaaaatagttagcaatactttataaaaattattatattaaattaaataaaatttaaaatttaattatattaataatatatatatagcactttttaatatattaggtgctacctgtatcttttagcagttcttattataaaatcttactacgtacttattcacaatatatcacaaccagagatactatgcatccaccatcttgactttcttaatcagtagtaagattattaattaattaattaattaattaataaggtcccaaaagagactcctatcatatcatatttagtaacatgtaatgttattaactcactacctaactacacttgctaatcaaactagctaattaaccaagtatagttatatatatatagttatatagataagaaagagatgggaaactcctcctacaataaaaaatgctaaagggcacactagtcatatataactgagttgcgtatatctctttaacttattaattattattattattattattattattattattattattattgttataaaatatcacttgtgctgtctaaaatatcaatgctctaaaaattaatacttagatctatacggcgatatatatatcactgttcatgtataatttggtgtctagtactttatttttatagtgttacatgatttttaaaaacgttactttcaatggttttgtttttgaaataaatgaaaatgaataatatatatcattattaattaattaatttgtgagtgaggttgtgaactggacggcagaataaaccaatgtaaagagagccaataatgaatgaataggctttggaaaactctccttaaattacaatgccatgacgtaacatatgcatgaatgaatgaattaaacgacaagtgttccatgacaaaataaaccctggttattagggtttacactctctagctacaacaccctacctatatagctatgtgtggaaatcaagagcaacgttgactttttctttgggttgtacttacatttacaatgagtcaaacaatgg

SEQ ID NO: 329078 - DNA, 1234 bp, Cannabis indica
tcttcatctatagaagattctccatacataacccaaacctaatctctctcttttctctgtacctctctctacctcataatttttctctctcacgatcacctctcaaaactcgtctgattctcattctttttgaaaagctaagtgttggtagtatttatagattcaagatttagatctcaaagtcagtggctgcatgagctaagttgataagttaacaaactcctcgtaacaaaatctccacgccagcttaagttatagtgctcccgaatgaagcaaccacttccgggactatgattgaagcacacgctgaacggtcttcccagataggagaaacgacagctagactcgactatctggactcctttccaggagagaagaactagctatccgaaactccttttcggaggaagacttgcttttctgaagattccttccggatgggcacaaaggcctttcgagaaaactcttccgagagacaactaattttccatgtagacagaaaacttacagagaccattttatttagaggaactatactacaaatccaatagactaaccttgacaacaaagcttttgtttctgatgagagacaaaattatctttaagaaagaaaaaaaaatgcaaaaagaggacaagatatccacactaaggaaaagaaacaaacatgacactacaacaaaaactaacattacagcagttttttcagctgtaagaaagtggtttttctgtactttaattttttcccaaaatcttattaataaatgtttacaagcctggataagttgtctcacttcaattactaatatccagaatatacttatttgacatcttgtggtttttctaaaatcacctttcctactctataatctatattttcaataatgcccatggggcatattgtaattttgaaaattgtaataacgtcaaaattttgaatcctttaaaaaaaaaaaagtcaaattttatcagtacttttattttttcaggaaaacaagatctaaattttattaattaatacttccttacaaaaataaaaatatatatttagtaatacttaaatacaattgatctgatgataatttaattaatggttcaactaaatatacattattattaatttattctaattttgattcttcgatcaattcgattgaggatcaatctaattcttactcatttaaattatgtgtaagtaataaataaaataaaatcaatatataatactatatgttca

SEQ ID NO: 329079 - DNA, 516 bp, Cannabis indica
taaaaagaaaaagaaatatagaggtaggatgagaagaggggggtgtgggaatctatatactataaagcttagtaacatatatgctttatttcttttttggtgtaatcgatgatgaattatgtggggagcggggagcttttaatataatatataaaatagataaatgtaatagcctatatagtttggtttgaatgagaggactagatagatagagactgagtggcagatcttaataataagattataagaccaagaagattgtatcttaaatattgaatattaaattgtattaaaatatgctttgagagaaaagaaagagagagtgattgaaagaatgtgaaggaaggaaggaaggctaggtgggattgatggggttggtttagaaatagatctattctcttcttcttcttagtgtctgacaaaaagttaaggaaaaagttaaacaaaggtcgagatcaccaaatgggttagtggattagcttttcattcttataagcagagagagagagagagaga

SEQ ID NO: 329080 - DNA, 784 bp, Cannabis indica
ggtaaaatattcccaacactatcctctcctcttctaaatcgagttcttttcgacaagagcatttcatcatggcatctgtatagaaagaaggaaatccaagtagtcaaccaccctaactacctaatatagaaagggagttgggggtcgtcccccataaactgcttggagagatcccaactagactcactacttaataacgatggctccaaggggttacttgtttcgaattagaaaccaagaacaatgtaaaaaagaagacgagacagattagcagtcgaccaaaaatctcaaggatttagggcgtaaaattggccagcgtatttgatgaaattcctaaacaaaaatttcagaagtaaagcaattttaaattcctaaactgcctacggtggtatttgcacaaatgagaaaaccctaattttatccccgaacagagcatgcaaatataagctaaaacaacaaattcgtaaagttcaatacacgagtaaaaaatatgtacctgatgtaggcaaggggagatttaaggtgattgttgctaggtttggttcaggaagacgatcgcaactctcctgaagatgaaaaatagaggcgatcaatgagtcgattccttctcaaagtctaagcttgcggtttcctctacagtagctgtaaagcccgcttagtttaatttggaaattagcagttaattataattaattatgaaaattatttatagctatttaaataatttattatactgttatttatggaattcagtgatgcatttttatgtcatgtagtagtttgc

SEQ ID NO: 329081 - DNA, 846 bp, Cannabis indica
aaatctctctaaattaaatattatttatttttgattcatttatttccttctgaactcataatataatacttaatataaagcatagtatacgtgcatcccacgtaacaatatactagtatatatataaatataaaaccccataaaatttgtaattaaacaaatacggatgaaaatatgttacagtaaaagtttcatacaaatttttatttaatccgtaaatactttcaaaattgtgaatatatgactataagagcatctctaatggattgctaaaaaagtggtatattgctatattttagcgcacttaaaaaatattattctaatggtgttttaaaaagtgtgccaaatttgccacaagatatagcattttgccaaatgttgcccacaataatgatgtttgtatattttcaatacaatattaataattctttatattggaggacaattgtaatgtaaatagtgggctaaatatagcacaaacttaatttttgtaccaaatttagcatcaattttatactttgcatgggagatgtctaaccttgtaaacttcagttacgaaaagaaaaaacatattttaaacaaataaacgcggattccgtaattttaatattctttttttcaaaagttgtatttatgtccttccctttcaggaaattacactctatactatttttatattgtcctcttttatttttatcttcttttttaaaatctatcatttttacctctttttttaaacattataccaattttgtctctgccacttcaagatactctctgtgtgactctcttatgtcagagtattttaggtacaatacatataaaaagaggtatgtttcaattaaa

SEQ ID NO: 329082 - DNA, 638 bp, Cannabis indica
tctttagaagactcataagacacgtcttcacagctacttctatgttcctaatcattgtcaaaaatagggggagaatcttcgtcactaccccatgtcccaagttgtcttgggaagtaggggagattgttgctcgagaccatcttcagaaataataggggatttgttatcattatctccctactcaagctcactttgggaaataaaagaggaatatgtttcagtggaagcatttgatgttgactcttcttcactctcctggtcaatgtttatttgagactcaagaaataaaaaagcagtgtaatcggttgcttctagttgagcaactcctctgaccttcttgacagcttcttcaagcttaatgaaaccatcagctctctctagaaattcttgaatggtgtaaactgatttgagcttcaagtctttccagaatggactcattactgttaatctagctgtcattgttatgaccttggcatcttcattaagtatcaatgtccgatttttgcccctaagaatcattgtaagtaatcttttagaggctcgtcttcttactgtttgatgcaaaccaaatcattgggctcgattagtttgtgcctcgatagggagaattggtcatagaatgcttacttaagtgtctc

SEQ ID NO: 329083 - DNA, 804 bp, Cannabis indica
caagagaacatgcagcagaaggcgtagaagggaataaaaacaacaacagaacaacagtggaaaaacaggagaaaactgaacatacatttgagcatgagatattgaggaatttaaatttctgaaagacctagcgtttaaagtttttatttgaaaatattgattacaatgggatttgttcatactttagaagagttattaaaagaaattggatactaaattgaatatatatatacatgaaagttattattgatacagtttgtttttttattacagtaatggaaatttttattcaaaaaagttaataacgtaactgaattgatattaatcacttaaaaatgaattataacaactgcaaaaaaaaaaaaaacagaataacaatagaacaacaatattaaaaaatccaaaaaaagaagaaatatgaaataagaatactaaacaatttaacataacaacttgtttatacataacaaaaacaaaaaaaaaaaaaggaaaataaggattacatattgtccacagaaaacttaaaaacataaaagaacaccaatgtttgttccaaaaacaacattaaaactactaaaactaaaaacaagtacgatctgattgaaaatgatatatcatttcttcggaaggttgggagaggcctcagattcacctttaatgttctcaagttgcttcttcatgccataatgataaaaatgacacaaccaaatgatcgcggtgaacttccacatcaaaatcagaggatgggatgggttttccatcaataaaatactcagcaaaagatgctacgaaaacaccacaatc

SEQ ID NO: 329084 - DNA, 681 bp, Cannabis indica
ttcaacctgaggatcgacctcctcaaggtcttctaactcaacgtatggctctctaggtggcattttttcgttggttctaataccgagagaatttggtggccttgggggacgagttgtagagttaattcttgggcctactcctagcacctacggtgtaggactagtcccagttctagttttataactggtgttcccccagttttctggctaatttttggggcttctttgtcgatactgaagagcatgtttcaaccatcttgtaagtgactttcttgagttgttgttcttaatgaaagtaccaaactattgactgataaatctagacaaaaatttctaagccacatctgctcgctagattggcgagaatgagatatatgttaagtataaatagagagacacaataatttatagtacttcactccctatatcacgacaataatggatctacctttacttcgagatttaattctcatgagatggattacaaaaaaatggctaagtcttgatgatctaattttcagatagagaaactagattgaaagtctttgaccttatgactacattttctgaatatgaaaaatgagctagagaagctctctttttataggtaaatgaggtcctattaaatgtgaataaaataatctaaaaaatatggaaaaataaatttaggatatttttgat

SEQ ID NO: 329085 - DNA, 855 bp, Cannabis indica
tttttttactaaaacgaaaagtaaagttatcttagaaaaaaaaaagtaaaatgtgaaagatacttttaaatgttgtttgagaatcaaccatttaatttacttttaactggcaaaaaaaaaatattgaatgaaaaagagtattgttattaggcaccagtggtgattagcacctttttgacatgttgtgttgtgattggctagtgatacttcctaaaagctattatattaaactacatgagacctgatacttagttgaaccaacataggaagttgcaccactgatgccctttagtatttctcgaatgaaaaggctatcaacccaacatataatcaaattaagtgcacctaatatattcttaaaaggaaactccaaaaccttataataagttacattcatggtaaattgaaatgtcgttgagaatcataggattccatctcaaaatcaattggtgattagtggagtagcccatgttcttatatatggctcaatatttttacatttgatccatgtgggacaatattgtcaaatattcgccgtcaagatggttgttatttttgctcaccaatcttgaatcaccttatcataagtagtgtcatttgctaacttatttttgtttgttttgcgactgggaattccattgtctcgcttattcttgtttgcggctggaagtaccattttgcttgcttgtggctggctaactctttgatagatgtggatcgaaagcccgctagggatatgactctgataccatggtgagaatcatgagattctatctcaaaacgaattagcaatgagtagagtagcgcccatgttcttttatatggctcaattctctactatttattctatgtagg

SEQ ID NO: 329086 - DNA, 567 bp, Cannabis indica
tattataatacaagctaatacagtgtatttattacatattaatttatacaacttatattatattaaagattttggacataataattagtacaatatattattttattcaaatataatcttatttattatttaatataatacaattttaaaagatgtaacaaaaccagcccctaatgcattgggacgttgataccgcgtggacttcatattgagtgtgaagtgaagagaggtggaatatatatttcatattaaatatccaagtacaaaatatattatgagattatataaataaaataaaaaaagtgtattaatccaccaatttataatgatgatcatgcatgatataaattatatgataagattaattgctattttaatttcactaaatatatatatgatcgatactcactaatgagagttgaattttctatttgacccattgcgaacataaaaatatatctattctatataaaatgtgtctatataacagaatttttggtttttgaaaaatttatgagtgacttttttatttatattaaaaataaaatggtttatgagaaattcatg

SEQ ID NO: 329087 - DNA, 796 bp, Cannabis indica
tttttttaaaagaaaaatttaataaaaaatcaaaataattgcttgaattttaattttgcttgtaatatatttttccaaactttataaattataaattaatttaaaatagttgcatgtgtttaattttgctcaaaatatttttgcataaagactttatacacgagtctatgaaaatgtgtagatatacccgataattattaaactttacgagtttattcatgagataatatttagtaaaaaatacatagtttaaaatagtattaaatattttttaaggcttaactaaacattttttccctcttatgattaattaaaatttattatggagaaattatttatttatgtaatgtatatgatttgatttaggtggctattaatctaatggtgaatcaattattgggagtaacaagtgaaagtgagattaatgagatggctaatttgttctctcactttgttgatggttgtctttctctacctataaatttaccaggttgcccttatcacattgctatgaaggtaacacaatttttcttttctttatggtatttatcaataattttgattattatgacatatatgggaagatttttagaaagaaaaaaagaccaatttctactacaagttcaattatttggttacaagttactcattttaggggagtatctcatggtttttgggtttcaaaaagaaactttagttaatactattttggattctgtattttgtaaaaattatcatttaaacttactattttgttaaatgataaaatagatcttatattttttaaaattataca

SEQ ID NO: 329088 - DNA, 889 bp, Cannabis indica
aataatacaacatacattgtgttaaaaaatttggtcgtaataattaatacaatacattgctttatctaaacatagtgttttttattatccaatacaatacgacctttatacagcgtaccaaacgagccctaagactgttgtttttatctatatactatattaataacaatatgaccatttaaatgaccaaatatgaaatacattaaatcctttcaattgagacaaacggttaataaattaaagttatcaaaagagtgataatactagaattttaactaactaaaatataatttaatttagacaaatatatatatttttttctctcataaattacagtgctggtggaaacttggcccaaacttttgttcatggaaaaaaatctccctcaattataagaaacattgaatatgtcccttttctattgcgtttctttctttttaaaagggcccaccgtaaattaagatttttctactcgaattttgacatgtactagatcgtgttttatgaattttttatgtcgttaaaaattattcttgaattagtgagattgttaaattcaaagacttttatccaactttgttcaactgtactaacgagtgtatgatgtgggtggaagtttgggagcaaagttggtacatgtataatcctaggggtgttcatccgatccaatccgtatttttttggtcaaacaacatccaatccccactaagtgcggattttatattttggatccaatgcgatctgcataacagtttaaatccaatccaatccgcaatagtgcagattggatcttgattgttttttttaatgataaattatttaatatttcatagaaaaaagattaaaaaaagattattgttttttaatctccaataataatctatttcca

SEQ ID NO: 329089 - DNA, 560 bp, Cannabis indica
ttttgtatatttgtaaaattatccctatatttatttgggttacaaaatttattttatacgcgtatacggtagtattttactaaaatttcaaaaaactgtatttaattagctcatttatcatttaaataaataaaaaaaaggatgagttatttattttttttttaaagtaaaggcaaaactattaggtggagtaattagatttatagttctagaatacttagagggtttattttagggaccaaattttagtcaaagagatattattattatttacgtcgatatactagtcattcaaaattagacaacttctatgtgcaaaattctttggacataattacttaattaatcatggtaatctctcgatgtaataatagacatgcaacggtatacgatttgtaattaattacacaacatgcattgcttttgtctcaaattcaagacagatttttattttatttttttatttttatccagatataactggttcgaaaattcagacacatacttatcaaaatcattttttttttaaaaaaaatcaaaaactaagctaatatgactta

SEQ ID NO: 329090 - DNA, 911 bp, Cannabis indica
ctaatgtatacagagcgtaggcttgctttgagcactctaatttcttcaaagtaacagcaccggaggcacgacccggccaattaaggccaggagcgcatcgccggtagaagggacagaccaccaccacgacttgctactattaaggtagcactactcactcctaataagcttgccattttcttcttcttcttgtaactttactatatgtattgatttttcttcacaacaagtacaagtgctactactaccacttgttattcaatttataattaaatataataatatagtaatgataataataatatgtgatgaaaattactgtcaagtgtcaacctctcacacctcatctcatcccatcctctcttgtttcatttttccaatttacaattatacccctttcatatataagacaaaaatgaaaaagaacttattactttggtggagtaattggtattttgcttggctgttgcccacttgttctattgtagggttgctttggtgggattttatataattaataattacttcacaaaataaataaataaatttatcttcaactcttcaaacactttataattaactctctttacctttttatttttggtaaaataaaaatgtgatattatgactcaattatgatgacttgactacccaacatcatcctactacatataattttctcattaattataataatatcatatgaaaacaaataatgattaaaatgaattatatgtatatatgttaatattattgcttaattaacattcttgagtcttcacacactccatatgaccctacctcactacccaacttgattcaaaaatttggaatttttatgaaatgaattttgaattaatttttatattaatcttaattttttttatgaggagaaaagggtcaaacatata

SEQ ID NO: 329091 - DNA, 518 bp, Cannabis indica
ttttttagttcccatcaatgggtattacccattaagaagtgttccatatatatatatgtgagaaatggtaggagccacacatgcttagcaccctcttatgtgtcatatcgagttttatataatttaatataatatcttttagagaatattgctgactaatcgtatatagggctttagaggcgggttttaaggtctttcagcgtcgattttggcaaaattcattatcgacgcttatttaggcgacgctatagaattgaaaataattgatgttaaagtgtaccttagtgcgtcggttattatcaaataactgacgtcatatatacactatgacgtcagttatataaataaccaacgccatatacactaataaccgacgtcaaatgattaaaaactgacgtcaaatccttcataattaatttatttttcaatttaaaacctagtataaattcaaaattttaatttatttaaattatatatttattaatttataataaatattatttaattaaaattaaata

SEQ ID NO: 329092 - DNA, 1253 bp, Cannabis indica
tgcataaatacttctagaaaaatatgtttgacactcagtgtcccacaacacttttgaaaaatatgcacattaagttttcaattttttttaacattttataaatcataatcacatataaaatcaagtttaatattcaattaagttgagtccctacctccttaggatcatcaaactttctgcaaaggagacactcctaagcccggcgattctttaactccaaatagtttagtcacttcataagtcactttgtcctaagcggtgcacaataacaatcactggcggtagaaattgatatattggaaacttcgtcgaaaatagaggtaatatatgtcaaaacaatcacctcgactagtaaatcacaataacaataggatttttttttttgtttgaccgagactttacagcaaatgtactaacttcttagcttcacatccgaacccaccttagtttcccgaaagtgaataaaaagcacttttgaggaaattgtcattacacttcgtaggacagaggacccatagaggctcagcacatgcccactccttgtctgtacgattcacaatatcatgaatccccatacaagaattaacaccatatttagacatactcaccatcaaaaaccttagaacaagggttaaagaccatcgatagcactcaggtcacagagaccaaatattaatccttgatttttcttcagtcaattatattgaaaaatatagaaataaaatgtgtatttttttctttgaacaatttagttatatggtgtattctttttattttaataaaatacaatgcacttgagtcgaatcatgaacacattaataagcattctcaacaatttaattttaaaattgcaaaataatttttaagtttaatacaaccttgtcttcatttagcttacaccaaacaatatctcagctagtcttcaattaatttgttgattgaaatggaatcaaattacgatactcagccaaggcccaattaggaaagatatttctatacgctgcataatgcgacatgcagttcctcataaaaacacccataagttcctgccatatatatgttaaacccaaccaagaatgattaaacatcataaaattactgtataatttattgtataaggacaacccttttaatcatgaatcatagtacctgttgggggaaatctgttagataaattaataatgaacccaagatctatttgtatataacatagaacacaatagtaagatataataattaggtatgtgtacctg

SEQ ID NO: 329093 - DNA, 488 bp, Cannabis indica
aaaaatggtcaaaaaccgcactacccgcactgcaaataccctaatatttttttagcacacttaaaaatataaaaatacaaagaaatacatttataaaagttttgattaatatttatttagtttttatttaaatattatataattattaaaaagtaaaaaagaaaaattagtgttgtctacagtgcccacctaaatatggtgggacactgtagacaaacccaaaattaatgttgcaaatggcgtgcagttggacttgcttttagtgtaatggccttagaaaatgaaaatccagtgaatagctagtaaatacttcacaattcctttacataaatctcccataaatattatcatcctctatttttatttattgtaaaataaccctagttgtcgtcagagtctatggtgattgtgtaatgaaggtatccacatactaggttttttcagagaaatttgattttttatgcttacatttggttaaattttttttt

SEQ ID NO: 329094 - DNA, 561 bp, Cannabis indica
ttgtttaacaaaattggaatgagaaaatgaacaaatataaaatgttgattatatgttataacaaattattaaaattagatggccaatgttttctatgggtaggagaattatttaagtaataattacaatagtaatttttttttttttgggaagaatacttcaagtaaattaaataataaataaataaaaaaaaatcaatggttggagatttgatgtacctttctttagtagataaaaaatcattaataacaaaaattaattaattggccactatccaattttaccataataattacataatttattattattattattattattattattattattattattattattattattattattattattattattattattattattattattttgttgaaaatgagcaactttgcatttattatataacctaaaataaatactttaaataataacaagacaatgcataattggacataaaagttagtgtggttggatggtgttgtcccacaaattttctttctttatttatctattatttttttaaaaaaattaaactaatat

SEQ ID NO: 329095 - DNA, 723 bp, Cannabis indica
tgcttgatcttgcttgattgcctctgaatcattgacaattgacatgccacatgtgaggagtgtgccaagatggcacattataagctaggtgatgtccacaagttgaccaagtggtggtcaagtagtggcgcatgttggtgtgcatgctggtggcatgttgatgcttagtttgtacgacagtggcatttttgtaaatatctttaatattgtctggattgggacgagtcttggtattcgttatttatttgggtctacaaataaagtggtgcaatcaaatttgagaaactctgtgatttggtgtatggcgatgaccatatttcaatagagcaaaaatcatatatgttcctggtagaaggctaaaagcttagaatgccctttaaagggggagtaactagtgtcaactcttcaccctaggcaccttggtactaagtgagctactattagttagtgggactagtagggcaagcatatgaggaccatgaggggacttattatgtctccatgagttggaatactcatggacactatcgggttggcctggtagtgcgtctaagaatgcaaccagaggttagcaggtacgttttcattggcttgtcggtgtgctgatgcacgagacgtggccctacacctccaagagacattgtggtgtgccttggctacgagtcccaacaggagatgacatgggtagtcattcgtgagctagtttgcatacgcgcatgggac

SEQ ID NO: 329096 - DNA, 727 bp, Cannabis indica
atacacatttgtatatgtaacggtaaaacctcgaagtcgatacagtagtaatccagttagtatttaacggtaatatttaactaaaactttaaatttgcaaagaaaaataaacataagagggttttgccaccaaaacaaaagatagaggggttaagtgtataaaaattaaaacataagggggttttgccaccaaaaaaaagataagtgggttaagtgtataaaaattaaaacataagggggttttgccaccaaaaataaagataagggggttaagtgtataaaaatacaaaatataaggggggtttcgtccgcaaattgctacacacaaatatatataaaaaaatataattatttttgtcattacacttttaaatcaagttattattaaatttcaatttataaaaattaaactcaaaatttattttaactattttaaaaacatacagtacaaattattatttaataaaacatgataaaattaataattttttttaaaaaaaaaaaaatactaacatagcattattaactacatatttatatatcatgtatattatgtatgcatacctcacactattcttacaacattaatgctaaaagacgtgcacacgatgtctaatattatcattaaatattattgttgaccgaggtttttcggcaactaataaaatacgaatttaatagtgagctataagaaagcgagatgaagactttttaacgtggttggggc

SEQ ID NO: 329097 - DNA, 921 bp, Cannabis indica
acttttgttattttattgttgtatttttttatttgtatattagttttttttatgttgttttgttgttattttctggctacttttatgtggatttcttattgtttccttgtatttttatagaatatcataaatatgtaaaaaagaaactttgaacgtaaaagtgtaaaacacaaaaataggcatttttttcaaaaaaaatgagcctttaaaaatggaaggctttgtgcaatggcccaagcagtccaaaacttgggccgaccctgattattatttcatatttttaataaatatagttagatcagcattaaatgacatataaaattttgcatcaggttcataatgtcataaaactgttatttgtaccaaatatagatcaacttttacatctctcatagagataatctaagtcaagtgcaagtggttattgtaaggagaaatgctagctaaaaggtaggttaacagtcttctcaatatcatagtactattagtgtaattaattatcggatctcatatcacttaagataataacttttaaggaatattgcaaaccaatcatagtatgacacctctagatcgctaagaatggtactcaataacaatacttttaattatattatgaaagtactactcatgaattagatgatgtgtggaccaaactcatcttggtgttataagagaattgttattggggtatgatgaggggtgtttataaaatacccaattcaattcaatctgcacgatctaatctaatccaatctgcaaagtgcggagatctgcacttgtgcgcagattgaatgttgattgatatgtaaaagtaaccgatctaatccaatcaacacatatttatatatatttaaaaaaattatatatatatgcaattaatattttaatacaaaaaaatagtaatttaagaatctaata

SEQ ID NO: 329098 - DNA, 959 bp, Cannabis indica
ggacttggctaagttgcgtgtgcatttgagcattttcccaaattcagcagcattcaggcagtcgggccacttgggtttgatcttgtgaatgccagaagtagtgggagcaggattagcagatgatccaatagcaaatcggagtggctgagacggattgagataagccaaaatggtagagaaagcttgggaaatgggaaccacatgttgggaagctccatttgtggccacaatggtctcggctgaagtggatacaacctttgggagaggtgtagcaagttgctcagcagtggtgataggtgggaaaggtaagggaatagagggaatggtattactttgagtgaggacattggatgcaccttgggtgtgagtggtatgtgtggcagtaacagaagtttgagggtagagccatgtggtagtagtgagagggggttggttaaggttatgggtgtgggaagtgaccacattggatgaggagtgagccatataaaaccctagaggagtagtttgcggctggctcaagtgttgaacaccataagcagaagtgggatcattgaagaggccttccgagatgactggaggctggtgaagatgataaggaggagtgggggccaaagaggttgggttagctatatgtggcctcagccgagttctttagcaagcaatgtaaaaaggatttgaagtgatttgaattttggcgcctaaagattgatcataatgaagcaaaggaggagccgaggaggaatcacattttgcaaggaactcatggcaatgattcacgatatggctaagacatccacagtaatgacagaatctgggagatttttgaagcggaattcaagccaaaccgggtcagccatgccatggaaatgaaagtccgtaccacgcggaagtggttgagttacatcgatctcaatgcggacccggagataaggaccccaagtctcctttagagaagcagt

SEQ ID NO: 329099 - DNA, 1860 bp, Cannabis indica
ataaatacaacccaaaacaactcttgacagcccaacacacaagtcggtgaggtcaatatgtacattactggagaagactatcatctcatgattgttctaattttccttgcccttacttgtacagctgtaccacagagcacccgtgagtcacatagactccacaagaaaagtaataaagaaggatacattaattaactaattaaatatttcattatcataaaataattaaaccataactttcaacagtaagtaatataaccagccaaatgcatagaaatagatttgctcatatatttatattgcctaatcaagcaagcccatgtcataatataatatcatatataataccattgcaccacctaatcaaatgagctcgtgccacgacctggcaccattataacgcatcacctaatcagacgagcccgtacctatgcccaatactcatatgtcactaacgcccgtacctacgctcgatacgtcgccaggagaaaaccctacaacggttcattttgtgccataacctgacaattttcatattactatcgcccatatctgataaggtacgctaccagttggaaacctaacaactattttgatctatgccataaccatgcattttcatattattgtcgcccgtatctaataaggtacgtcgccagttggaaacctaacagcagtttcgatctatgcaataactaagtattttcatattactgtcgtccatatctaataaggtacaccgccagttggaaacctaatatcagtttcgatctatgccataactacgcattttcatattattgttgcccgcatctaataaggtacgttgccagttagaaacctaacaacgatttcgattcataatcatgactttataacgattgctccacacgtacaacttgaatgtcagtatccatttatcatattatactcatacaagtttatgccatagcctgacattcatcatatatatacatatgttgcattgcctaatcaggcaagctcagcctatgtcatagcttggcactatatctatatcacctaatcaggtgtatttagatatcatatattgcctaatcaggcaagctcatttcacaatttgaaagcatctatcatatcactgaatcaggtgaagttgtatgtcgcattcatattattactgtctaatcagacagccgaggatcacaaaacctctcatgccacatggtacaatttacttttcttacctcatgttctggtataggtatgttggccaacctacttggagaacgattaatgatctcgggccctatgtcataacaatgataaaccaataagtgtttatcccaaaatactgcttgacagctgcaaagaacaacttagggtttcttaccaaatctcgtatttcaaatacactaaaataaaacttatgttttgcctctaaaacatacaccatatgatagttcttgtcgtaagcttcgaaacggtatatagaacgtccaaaatagacaccaagtgaaaagttacggcaaaaatatgattctcgaattaccaaacagcttctacgagaaccagatgaccggttggtgaggggcaaaaagtgtaattttcaaagtttacgcactcatcgaaacactaccggaacctgtccaaaccacccaaaactttatagggcacataattaccacacttacataatagaaattacggttgtatttcccataaaaaccagtgacccccatcgcaaggcaccaagaagatggacttcaatatcaatatggttgaaagtaggggtgggcatcatccaatccaatccaattgaaccgaaccgatccaatccaatccaattacaaaaagttggatatccaattacaattggat

SEQ ID NO: 329100 - DNA, 1243 bp, Cannabis indica
tattttttggaaaaccgtaaaaatgtaaaaaaaacattctttgacgtaaaaatgtaaatattttataaaaatggtgccttatgtaattattccaaaagaaaaaagttgaaaaattataaagatttaaaaaatagaaaataaaaaaaatgatcatatttggtatggaagaaaaattgtatagaaaaatattcaatccaacaaaattttccatttcaatttacttaaaaaaaaaaaatccatttcaaagttgaaaaattaatttattttaatttttattctccacaattttttccctatattttctttagttttttcttttcgtactaaaatccaacttccaaatataactttatgatctagcgaaaaatgttactttttcttttccaaattaagatttgtaccaaaaaaataaattactaaaagaataaacagtaaatactattttagaccatgtattctgcaaaagttactgattgagccatttgtttcattaaatcataaaatagactctgtattttttaaaatagtacaaataagacccagaattaatattttgttaaaataaaacttaataataactcgatctataggtgttatgataaaactgattatatatattttctgcatctgttcatgctaggaattatcttcaagtgagttatattaaaaatattttcgaaaattgagctgaaggttatatttttatcattttagaaaatacagggtacattttgtgatttaataaaatagaaggttcaatcgataacttttgtaaaatacaatatcaaaatggtatttacccaaaaataaattactcatttctcaatatttctttaaaaaaataagtaatgtggttataatcatacaatttaatactagtattataatttcgaagatgtctgagtttaaatatttcttcttcaaataaaataattcatattgttttgttagtgtgtaggcgcgttttgtattcaggctggtgggatattaaaatattaaactaatttcatttttttttttcaatttatatgtgataatattaattttaatttcttagttttagttactaccaaactttaaattaaaattacttccgacaaatttgtaattaaaattaaatattcttaactaaacataattctaatcataataatatgagttatcgctaaaaatttgcgcaaaaagtattatttattatgaaatattagtattatgtaatattataatttagagaaagaaaata

SEQ ID NO: 329101 - DNA, 915 bp, Cannabis indica
ttttgactaattgtaattttttatttatttttaaattatgtaattttacagctcgataatgtggtcaaatgaatttttgctcataatgtgactagtatagtaaatctgtttatagtgacacaaggtctaattttttaagcttttattaaaatacactctggctatccaaattcctcaaaacccaagaaaatttgtttttcttaacctaattttcggtacgttgtagatataccaaaatcatacaaatgtataaacttaacactaaaaaatttatggtatgatctgtcagtttttactcatttaagatttatcaaagtatataatatatatcgctacaaaaaatatatatatataaataaatatatacaatattggtctgaatattttggtttttgttgtccgttcacaatataacattctttctcttattttttttttcaatcaataaatctgaagataatacctaagaaaatagttcactttattaatgtttttatctatatataattattgtataataaaacatattaaaatgtaaattgttaaatagtgatgaataatataattaaggtgcatgcacgagtattgagtaacgtgttttaaaagcatagttcatgcatatgaattggttgatttgcttaaatgaatattaataaggttaattaattgttgaaaatatatttccagccaaaaacagttcaatatgtcagtagatggaatagagtgatcacatctttaatttggttctcaattaattaaattgttagaaaataacaatttaatcattaatatatcaacattaatcttagtcatttggattttttttggctaaaatggaattaaaatattttgaaattccatttctatatttttatattctaaatttttacttaatatttgtatgatgttattaaa

SEQ ID NO: 329102 - DNA, 697 bp, Cannabis indica
tttatttatttatttatattataatatatagaagaaactttgcaagttgaattggagaagtaaacattctcaaacatgtgcttggaaagtaagaccaaagcacaagtacttaattgtacaacaattcaattctaaacccaacagccctcaaattaaaaccgctacaaatatatattattaaatttaatataattcccttttctttgactagtttttcttttttctttttttttcaaaaaaaatggaaaaaagatggatactttatggtagggtatatatagtgtggaagattttaaatttttcattacaatttctattgtagttaaaaattttaaaaatttataaataatttacaattaatgtcaagaaaagtttaaaatatgtatttatgataagttgtttgaactatatttgtgatattataaattattaaatatatataaatatttgtaaacttgtaagaggttttcatatatatgagctccgcaaatacattttataataattaaatttaaaattaataaatttatataaagtaattataatttttatttaagtaggtataaatattttttattacaattaaaccccacacagcaaaatttatagattctggatataaaacttaaaagagaaaactatatataggatcaataaatctccaatgttgaaccaaatgatgagacaaaaaaataaa

SEQ ID NO: 329103 - DNA, 1752 bp, Cannabis indica
cttttatttttaagtatattctgttaaacctgttaaaccagataggtttgttagagagatatattgatattgattattttccaattttcataaatgatttcaattttagcaagtctttttcaatggaaaggtttaaattatttcaaaacaatcgataaaatagtattaattggatcccaccattaaatgttattaattacaaaataaatctaaataaaccttaaccaataagaaaggaaagaaaagaaaacattaattattaattaatataaataagaaacagaaaccttttcaaaaaaaaaaataaataaatacataaatacataaataattactatatttgatcgtatacagtgtataccctaccaagttttgatctttgtatcttgccctatataattcttactctcaaataaccaaatttcaaactttgaaaagcattgctctctattctacaagtcatggagttttgcacccaaattgcaacacaatcaattcttaacgagatgaataagaatgtgagcagtgctgaaaacgttttaatgtctcctatatcaatatgcttgatgctgaatatattggctgctggagctggaggaaagacattagagcagttgttgaagtttcttggttcaaatggaatcgaagatttgaaccaaaaatcttctctgatgatgtctctactccactcctcctctgctcctccaaagcatcccatgggcttcttccccacatttccccacaacacagaacaaaaacaacttcaacaacttcaacaacaacaacctcttttttctgttgcaaacgctatactggttgataaacaataccagctaattccatctttcaaagaaattacggaaacaatctataaggcaaaagtggaaaatgtcgaccttaaatttgaggtatgaataatttcatcttttacatctataatagtttttcatattgtcattttcattttttttttaatttgtatatgtaggctgataaagttagagaaaatgtgaacttatgggtggaaaaggagacaagaggtctcatcaaagaaattttgccaaagactgtagaattggctcccccactttctcttgctaatgctttatatttcaggggatcatgggaagatccttttatggcctggaagactaaacataagaagtttcacattcttaacagagaaataatcgatgtacctttcttgaatagttatgatgtttatcgctcctatgcatcccttgatgatttcaaggttctcaaactcccatatgaaagaggaataggtgatgatggaaagccattacaattctctatgtactcgcttcttcctcatgatacgtacggattacaagatatggtgaaaaagttcaattcagatccgaaactgttggcgcccaagagtcttaataatcatctaaggaaggtggaactttctcgtgtgtcaattcccaagatgaaattctcttatggtgttgatgctaaggagttacttgaggatcaagggttaactttgcctttcagtgtgaatgcagatttctcaaacatggttaatgtcaatcctgttactaatgtttatgttaacattatggttcacaagtcttgtatcgaagtgaatgaagaagggacagaggctgctgctgccacctttgctagaatcgcattcggttttgatccagattgtgagcctactccagtttctacctttgttgctgaccatccattcatgtttatgattgttgaagagttttc

SEQ ID NO: 329104 - DNA, 1272 bp, Cannabis indica
aagaaatgccgttagataggcacttttaatatataaagatatataaaatatatatatatatatatatatattatacttatagcatgcactttattattttaaaaaattatgaataattatttgtgttgaaaataagttcaaaggtgtaactagtttttaaatttatttgtaaatatgtgcaattaattatttgaaattcaattttcaatgctataaattattatacattttttttaaaaaaaaataattgatagaactataactataatatatatacatggtattacgtacatatataaagaaatctatcaatagaaacaaaaatactcctaacttaaaattttggttgatatattttatgtatatatgacaatggcaaactaaaatagtgacatttaattgtgatagcaaatatatattacatgtctatatattagtttcattatattgatccattcaatcatagtatgtggctgttgttttttctctgaattatatagttcattatattattattattattagaaaactgtttattatttaattatttaagttcttaaacaagtcgacttcgaagcttgtccctacaatacaaactgatgaagttcaatctaagccaagggttgatatttttaggcactttaataatatatttgtttacgacccaaatcaaaaagaaagtatatttatatttatatatatttatgtttgtataaatatcattttctttcatttggtcatcttaatgaagttggggcttaattattgtttcttgtgacttatacatatgttttaatgtgcacttttaacgtagtattagtgatgaattagtaaattaaaaaaattatattaattttcttatctaattagaaattttgttattttatattatacacgagtcaggttatttcactaactaaaaaaagtttttcaacaaaaaaataataaaaaattaattttaacataaatatttttgtatgaatagtatgaaaagaaattattttttgatatattttttaataaattaactaaattaagcctaacaatttataaattaaaatttaattatttatgattttaaaattaattaattttatttaataaccatcaataaatcccaccacacagtactatatattccactttaattgaatatactattagcagtaaggaataatcacttatttttttttttttaacataaagccttcattcatcaaataacattacaaaggaaatggcaagtcatgcctcgcggcatgtcgagcacaa

SEQ ID NO: 329105 - DNA, 1024 bp, Cannabis indica
gtttggggaaaggaattattgtttaagggtctgagatggagggttgcctggggtgttagaatcaattgtaaatcttatccatggtttcctggacatacaacctttaaaccgtaattcttcaaaggttcagttcccaatttgatggttgcagatttgattactgagcaaaggcaatgggatatgatctcacttgagacaaatttcaatcaagcggatatggatcgtatactctctattcccttaagtctgtttccacacgatgatatcctaatctggaatcactctttcacaggcatttatatgtaaaatcaggatatcaatttgctgtttctttagctgaacaagatgactcaacttgcagcacttcaattgagcattggtggtcaactttttggaaaatgaaactccctcaaaaagtgagaatttttgtttggaaactctttcacacttctctccctgtagctgcggagctttatcgaaggcatattgctttttctccatattgtacaatctgcaactctgtgaggaaacaattcatcatgctttgttctattgtccaagagctaaatcagtttgggaattatctaatctttgcatcaacttccagactctagaactaagttcaactgctgatactttactacagctctctacaacactatccacatcagaatttgagctatttcttgtcctctgctggagtatttggcatgaaagaaatgccatttaccatggtaatactgttcgcactccagttgttgttgcagcatatgcaccgttgtatctacaagagtttcaacaagcccgtgcaaagagtacacaacctgctcctacttcaggttcttctacaacccctcgaccatcatctgaatttacacatgctcctaaatggacaactcctcctcagggagactcaaattaaatacagatgttgcaatagacaaagagcacaatatgttggtattggagcgggttctcagaaattcagatggcattattgttgctgcactttcgaagcctatac

SEQ ID NO: 329106 - DNA, 769 bp, Cannabis indica
aattagatgaataataatatgacatctcttgagaatataataattatgctcacccaaagtattttttttttagcatttctcatattatatatttttacttttttttttttttaaaaaaagtccattactacttatttgtttgcatgcatactaatatattgttattagcataagtatattgaataataaactagcaatatatttattttcaattttcctttagcttattatagatgttactttaggaaatatttttatatttataaatcaacttatttttaagaaaatacaaattctgttgtgaggagatgcatctcgtttatcattgattgtagattgataatttaattgatttaaacgagtattaatcaatatataactaaatacaacacaaacttaaacaaacttgttaaaattataaaatataaagcacttttgcaagaagttactctttcaaacttagagcttgaggagcaggtttttaaagtgattttaaatggtaaatccaaccaaatccttcaaccaattttctttaagggtgtgtttggacgtaactgtgtaattactaggcagggtaattactagggtagtaattacacagtttagtaattacactatattttaaaatgcaaggtgtgtttgaatatggggcggtataattcctcatatcttgtttggcaaaatagttagtaattacatagaaaaataatattttctaatagctaatgtttaatatgaaaagtttttagtaattacattcaattctcat

SEQ ID NO: 329107 - DNA, 730 bp, Cannabis indica
ctttagctgtagtcataacatgtgaggcttcgcaattgaagcatacataaaattgaccaaccatgcataaccagcgagtttttagatttccacactccatacctgacatcatctagtttttggttgcttccttttctcccagtgaggaatccaagcttcccttgagcttgacagattgtgaccattctagataattttgtccattcaatctatgcacaataatttgcatagatgaatgaactacatcaatggcagcagtttgttggacagttgtggtggtatttttttgagtgataatactaggattattattggtagtgtcttcacttaagttagccattagagaagaggtgtttagggttttttagggtcatcgacagtctaggtatgtaggctctataccatgtagttgtagggaaaagaataattatcttttactcacgtgccaattggctttttaataaaatacatcagtaacaaattacataacatcacacccataaaaaatgagaactaactcctaactctaaggcaacaacttatgactgacatacttgacatttttatacgttaattcacacttttcaataagaatagctatcatcagcaaatagcatatgataaattacgtgaactccattagcaattttacaccccatgtaaccactttctctctttatatttttgaattaaagagagaaacctttagcatattgttgggttttgtgcc

SEQ ID NO: 329108 - DNA, 689 bp, Cannabis indica
atatcgatgtctaataagacaacagttacatatgagacctttcaactgtcttaattggagtcataactctttctcataaacggtagttactgtatcatacatatatccatgctttgaggtaaaattgtacttttcttaccttatatccaaattgaggtatggcgaccaacctaagtagaaattgctcgatgatccaggaccttatgtcacaacagtgataaattaataataaataactaattttaatccgttctaggacttaaactcaaaaccaaaaatttccttattgataaatagcatggaaaagccctaaaattaatatcaagaaaacatgaagattgaggtactcgaaaatcacctcaaatggttaactggattcgaaacgggtacccgtttaccccaggtctaccagataaaagtagggctgcacacgggtcgagttttcagattttcgggtgatcgggttcgggtttttcagatttcgggtgtttgaaatgtgtaaccgaacccgagtttcgggtggccgggtatggcgggtttcgagtcgggtttggcgagtttaatatggtcaggttcgggttttattaggctaagtctgaatgattcatttttgggcccaaataaaactacttaatttttaaaaataccattgttgcgaaaattattaattactacgcaagtgcacgcaa

SEQ ID NO: 329109 - DNA, 545 bp, Cannabis indica
ttattattagtaattttattttttgtaaaattaaatacataattttattaattattatttagaattatttattaagaagtttaaaatttaagaataattatatttgatttcagttttaatattttttttttgaaatttacgttttattttctaactttttttttaatataaaatgccttaaagttcacggcattttccatcctaacagaggatatagagacaattttcacaactacctagtccgtggtgccatacaaaaaacctcctcccatggagaaaggcatgagcaaaaaggatactaccaagttttgtcattttcatacagactatggtcacgacactaatgaatgcaataacttaaagcgagagatagaattactcattaggaaaaataacccgcacttgcaaaaatatgtcaagaccaaccaagaataaagggttgcccaaacaaataacaaacaaagtcatttgatgcctccaccagtggacagacatcttcaagttattattggaggcccccaccttgctggagactcgagaaaagc

SEQ ID NO: 329110 - DNA, 1081 bp, Cannabis indica
atttccttaattagaaaataatttccataaataaaatattctaataagtaaatgatactacatgtttttgtctagacccgatgatcaagaatctggactttatatgtggcctgttcaagaaaataacaaagtttgtagtgacgaaattaaaaaaaattacagttttacaaatattgggtacttatgctgctaaaaataaacatagagtttatgcctcttataaacttaaaactttaagtacttataacgctatttacccaattattattgccaaatagacaaaacaaatgtcttgatttacagcaaaataaaaaataaaaaaaaataagacaaaataaatgtgtatttatatttattaataaaaacaagtacatttttttaaaaataaaataaaataaaaacaagtgtctctagaagactagaaatatcatatactatattatatattatattgtgtggttaaaatgtgacacatctgataccttacaatacaactcaacattttaagattagagtttatccaaattattatacaagacttgctaataactaaaatatatttgatatttctttctttataataaaaaataaaaatcttttgtctaaaaaataaaagaaaataatatatttggagttgtacgtaggtgtgtgattggagaactataatacggcgaacgtaacctttccacggtggcggtcccacatttattaatttcattttatttcctttactcgcgtcgaagcgcgtgtggctcaactgtcacctttctttttttaaagtttccgcgaccaccgaccgcgagaaattgcagttaaatttcttcataattgattatcaatttttttttgaaagaattgattatcaatttattgggtcaagaaagtgatgcccgagcactgtgggaaaacgatgacgtattatggtttatggtccaaattacccttcgcccttttcaatttggggctttttttttttttttatttgttttaactataatttgggtttattttaaaagaattacataaaatattaattttcttaaaacttttatatttttaaatttattttttatatatttta

SEQ ID NO: 329111 - DNA, 1491 bp, Cannabis indica
tttaaaagtgttgtaagactgaagaacaaaacagtgtagtattgtagacagaattattactctagtccaatggtatttgaacatataccacttaggtttcagcttgaggtctcatacttagttcttctagttgtataaaaataattaaatattatttaaaaatttattatacaagaaaagaattctagtttatgtaaaaagaagtctaatttttgttaaaaaaattaaaattttattgtaaatattatatttaaatgacttaattgttaaaataattatagtaggaatttatatataaaaaataaattatttataaattttaattgctaaaagatgtcttattaaatattcaattaattattttaagaaaatagttaattataattaagtaattctaaaaaaagaatttttacctattgataacctgctattacaggtcaaaaaaagaaaatgtaaccatgatagttacaataaaaacttaaccattgagtagtcacccttaatttaaattattattattatttaaaaaattaatttgaattgattttatataggtatttatttttaaaaaataaatttatagaattatatttactaaaatttactatagtgtccattgatataatcaattccagtgattaaccctccatgtggtagttcataattagttttggtcaatttcttgaatattaatcaaaaaattgcaaaaataattgagagagagggggtcagtttgagagaaagccaagaccagaaaatgatttttttccctttaatttcacaaaatgaaacactcaactcatttattgtaaaagatggttaaaacaccattatgcctttaaagccaaaattccacttataacataaacaaggacattcacataaatattctcatatatattatgttataacataattttattaattatgttataacataattaacaataaaataattttagacctcgaacccattttaagacaaaatacctaattagtgactatatcgcgctaacttgtctaattgtgactatatcgcgctaacttgtcaaaaatcagtcgcagtaagacaatataaacatactacataataatattgtctattagcataatatatattaaaataataatttttcccttctcaggtcaaaattacaaaaatgcccctaactcataaatgtgatcttaaatgtaataattctcaaataattttatataattaataatataataatataattactaaattataataaattctttttaattagggatgctaattcatttactaatcctgggatattacagcgttgtagatggtggggcaatccactactacaaacgagtaatgtttaatgcagtgacattgtgttcctcttttaaggtgactgggagctggtgttgtcctcaaaagtgagtgttttaatatttatactcgcaagtgcacgaatcgtttcgaaatataatgttcatgtaagtgcaaggtcgaac

SEQ ID NO: 329112 - DNA, 811 bp, Cannabis indica
ttttttttataaagcaaccactttttttttagccagaaaaaaataatcctatgtgtacatattatcataccatgtaatttttatttgattttaattttattggtaaaaaatctacccaagatacaaactaaaggtcctacaatataattatcatatatatagaagtaatagttaaaaatgcaatattgtaaaatatgatttgtgagtgtgtcacatattttatcataaacacaaataaaaaatatatattaatagtacaaatacaatgttgtaaaatatgctaaattcaacactacaatagtacatacctaatttttgaatagtacctaagtaattctcaaaatttcactatctctattaaagttatatttaccctaatgtaatataagtttagtattcaactttattataatgttggattattaatttatcataaaccatgtcaaaaagtatatcaatattccatccatgaaagttacatatcattttttttttctatgcacatgagactatgagagaatattaattaattaattaattaattctttgatcttatgctaaaaatatttaattcaataaaaataaaactacttctttcctgctagttcttccacattcccaaatcaacgagccattttaattagtaggcctttaaataccattgctttgctcaaatctttcccattctcaaaacccaaatcttagtttcatctataaatccttatatacttctcttccattattttcttcatagtgcaaaatcaataatggctcataagaacattattattatgtctattaaattcctttt

SEQ ID NO: 329113 - DNA, 572 bp, Cannabis indica
ttaaaatatttttatatattcgccgcgaagtgcggatgtttactagttcatatagtgtgatagattttttagttgataatatttatataaaacaagatccattatttttttaaaataaaatagcatcacaccacagattataatatttaagtgcatatttatatatttagtctgaatactccatatatgttttttggttgacaattgaaataggaattaatgaatatgatgtaataagtttttggttgaagcagaagatcagaatgaatatgatgtacgttttagtattatcacacacaaactaattatagtttaaaatttaaaactctaatttgggaataataaatatgtatgtatacaaatatatgattatgtacgaattggttagagaaattaagaggctgtttggttttacagtttaaaaactgttttttgttttctaaaactgaaaacagtttttaaaaactattaggagtcgtttgacaaaaatttttaaaaactgttttttaaaaattgatttttaaaaaattagaaaacaaaaaacatcaaaatgctcttttcaatttttaaaa

SEQ ID NO: 329114 - DNA, 2403 bp, Cannabis indica
tcaaacaattataattttttgattaaaaacctatttgacgggaaacaaaaatcaaaaattataaatgagatataactcataactcgcgtgtgaagctgaatactaacagctagcactaaaggaaagtattaagcaagacatcaaggtgtcttcaaaaaaattacttaaacctagcacatcggaataggatctaactattcatctaagcaataaaaatttataaaaaaaaagtgacaaggtcattgaaaatatattcaagtttgcttgaaacagattaatctaactgattattgggaggcgaaatcaatgactgctcgcaaatcgagtgcatggcagatgataaactgctcgcgagtaaagtaggcttttaactacttaatgtcaaagggatatacgagcaatggaaacccctaaaatactttctgtatgttcaaaatatgattgtttaaattgtaaataaaacgcaagcaaacaagcacatgtcaaagttcaaacataaaagtacgaggcattaaaagataaagtaaaaagcaaagttgcccatccaacttcacaaatttgtctttacaaaaagtgccacaaggggcaaaccattgtcttggctctaaagccatttccatacaaaaaaagagaagaaagagataaataaaaaccaagcctacatgtaggagacttggatggatcttcttctaccactacctcggcctcttcctcctccttcctggcctttttttataataagccaaaatctcctcctcgtcatcctccaaaaagcttgtgtccaagttgggattcgccatcaaggcttgataaaaggtacgaagaccaaccttgttgcattgctctttggttttggcctctttcccttcgagctcggcctctttccccacgagcaccttcttaagttcattgcattcattagtcttgatctttatggccttctcggcttattcaaggcttttcttcaacctctcagcttcttgtttgagacaggtgatttcctactgagtgtcgttccattatttaatcacgaccttgcgttgggctagtgacttttgggccttgctctccaggattcgccgatgggaggaaaatagaggaaagaagtctggaaaattacgagcaaatgaatataagaaacagggaggaaaaagaaagaagaaatatatggattaatacagtaaacttaccatagcgcatcatgcaagctcctcaaaagcatttcttctggattcccacaattgattagatcccaatcgtgggggaggagagccttgagttggcgccaacaggcagtcccaaacacctggcgaaattcctaaccagtcttccccactgcggcaaataatgtttcaatggcctagctcaaggaagcagaggcatgagttgtgttaggaggaggcgctttggtgttgggatcgaccggaggaggagtctattcatgggtctcagtttcagagacctcgaggtcgattggctcagatattttcttcttcttgtgggtggtggttttctttggccttttagaaggctccacctcggtatcagcaggagcccctgagttggttccccacttcttcccattccattccatgacatcctcgaaatgcatatctgcaagacaagataaaatattaaaattatttaaaggcaaatgaaaagggagtgtggggtgtaattttccacctaagaaatttaccaaaaccactagaaggtgagctatcactagaagaggtggtagaaggaccgtagtatctgtcaaaatccctacagattgtgatcttaaatatatcaaatggctagagtggttctaaattccagctcatgtctatatgactttccctatcttcatggtgccatatttcttagctataccataataagtcgtgacagttaatcttaacgtggaatctagtgtaccagctgtcaaacctatgagcaatttgatctacgagaaggggattccaaatatgaaaattaaggttgctatctcagaaagtaactaatgtgttacgcttggccctatggattgtgggtcaccaaccacattgattacctcgggatgctccttcactggcttcttgaggaacagtgttttgaaggtattgtgcccaagccacgcgatcccaagccttatccccctctagaatgagaacctgctaccaagaagaatacttgggaaatttataatcacaactaaactccttatcagtaaggaagtccatagatctcagattggcctcacttagaaggaagtcgcacgatctaaagccgtggggaagagtcagcaggagcctgtgctggttgaccatcttgggagtagggacgggtctcttcgagagggctgcaaaaaaccaaaccttagtcagaaaacttagaatgaaaagacatggattaatctaa

SEQ ID NO: 329115 - DNA, 1172 bp, Cannabis indica
ttaaaaaaatatatatatcttaaagtatatcttttttatttaaacctctaaaatatgtgagctataagcatagacctaactcgttttaacttaaaatcaaccctgtatacttatcttattttatataaacactatagaaattagaaacacacatggattctttgtgtttgttattttaataatatatatatttatataaagagacatgtagtgatatttatacatctttgtttgtagagctttggtagtcaattgtgggatgctacatttgcagttcaagctcttcttgcaagtaaccttattgatgaagttggaccaatcttggcaaaagctcatgactttattaaaaaatctcaggttagtgctaatttaaaagtttatgattattttgataaatgttacaaaaaaaaaattgtgtagaatattatttcatcaaagcactttttgtagaaaaaaaaaatatttatcctaattcttgcctaacttgcttgtaatatacttttagatgttatacaaaataaaatattaaaaattattttagattttccatcataattttgtaatatatataagaaatatgtatgcatattaattttattgtattctttaactggttgaaaaaataaggtaaatattattttagattctgtgttttataaaaattattgattaggccatttatttgttaaatgataaattggactatagtactctgaattgatttttctttgtaaaaataaaagttaataatagcctaatctaaagttgctatgataaaactggatacattttttgtatctggcaatgctagaattgtcttcaagttggttatattagaaaaaaaaattatcgaaaattgagctcagagtactattttgtatcatttttgaaaatatagagtccaaaatgaaatgaagccaaaaaaatatcacgttaattagtgtgtattatttgagtgtaatttgtgaatgtaaggaatgagtcgattcctatgcaatccaacacactgatctaagaacaattacaaaccagtttgaacacttagaaaaaccgtgagcagtagtgctcttttattgaatcaatactcttgtatttacaatgtgtgtctaaccaattaaccagttacaaatgaattggacagagctatttatagctttgtcatttggtgtcaa

SEQ ID NO: 329116 - DNA, 857 bp, Cannabis indica
aaaaaagtaaaaagattgaatatttatgtatgtagtgtaaaaatcccaaaatttatatggtgtacttttttgcattagaaaaaataatatttttataaaattttgtaaaaaacctaataatactcacattttactttcacacaatttcttggacttattattactcagagccgcgttgccacaacgcgtgcaaattttaaataatattggataattttaaaaataagggtactagcaaataattattaattaattataaaaataaaaaaaaaaattatggttgcatatgttgtagttattcaatactatttgtatgttttcaaaaaaaaaatcgagtagtttataatatcaaaaataagatttacatatttaattgtatacatgaatttttttcttatatgtgtggtaagtaactgtttaaatcttcttttcagtactaaattattttataattttcaaaaaaatttacaaataatcctaaatagctaaaacgtacataattatagaaaattaaattaaaaaacaatttgaataccaaaataaataaaagaggtaccaaattcaccctttaaagggttactatatatatataggtgaagataataaatatggatctacaatcttggaaccccaatataagtaccacaccctctttattttgggaaaacttataaaaatactggaatttaagttaatttttataaaaatactagcacacagaattttttttaaaaatactatatttttataaaataacagtgaaacaactaaaaaactaccgtagaacaacagtgaaaacttatcacactgcacagtataaaacttacacagtatttttgaaaaaaaaattccgcccc

SEQ ID NO: 329117 - DNA, 1405 bp, Cannabis indica
ctttgaggaagaattcaagtgtgtttcccttaggaagacttggttgtaaacatttcctgcttttggttgcataagtatgctgagctaataactttggcaagtggacgtaagaaattgtagtcgtcagcaaccgggtgcaccatacccccaaaatgagctgagaattttggttttaaattctcggtcatttgcttgaaatttaactcctatcattttccaatcttcaaggaggggctccgagtgcggttctactttgctccgggaagcgtattattaatccaagccatgtcttccctcttcatgactacttggaggggaaatcttgaaagtttagcagtaatctcttggctttagtaggggaagagtcgtgggattataggtgaaaacttagatggatggatgtcctcaaacagttccttcatgacatgggcctcgtaagggagagtataggctctcgcggaatggcaggcttttggtttcctagagggaaagcttggcctgtgttcttgcgtgagaatttctcctatgccgaggtctgtttcaataagcaagagtcatgcatttttgaatttcatagcggcaaacttttggctttcacaaggaaaggctggaagtgcacaaaaaattcggacaataactttgcttgcaaaagctaaaggtaaccatcactgggcacgcgacagaattcaagcatttcttccactccaggaaggaaggttgaagacgtgttacaccctcagtgaactttcctgcacaaaaacaacatgcattcgagagtcgtgttgaatttttataaaaaaagctttggcttccacaagggaaggctaaagttgcataaaaatttaagcaatgacttcgcttgaaaaatcaaagggtgaaaacatcactaggagtgaaacaaaattcaaacagtccttccatcctgggaaggagggttgaagacgtgtctgttggaaatattataccaggatctagatttactaccatgtatgtttcattaacaccctaatatgaatgctaaaacaatgaaataaacacatataaagtttaggaaaccttacatttggggcagcagaacataatgactacttccgttcagatctctagcccttgattcctttttgtagcagagcaacaccaagatctgaacctggatctcattctctccttcctttgatgttgattctccttcttgtttattggattcttcacagtcttccacactatgattgagataccacttgatgtgtgtggtcactcactcattcactcaaggttcaaaaatttagagaagaaaggagaagaagatggtcctccatggttaacagttctagcttttcgattaggtcctccatgaatctagtaatggtttacactaagtatccaaccattacatcattctgaa

SEQ ID NO: 329118 - DNA, 761 bp, Cannabis indica
atttttttacaaatagcaattatttttcttcctccctcaattcaattgtagaaattgggattgataatttcaattatataatttgtttctacctctatcaatcacattcaattctattgggattacctcaatcacacaaaaaaaaaaaaaaaatccctcacccctcaatcgcaaagaaggagatgatatattttactttattttctttttgagaaattttggttataaagttgagattgaatttcagtcgtggattttttttctttctcctttaatcattaatgtctagctaacggaaaaaattaactctccgttagtttttattttatagaaaaagaaatgttatgcgtgcaaatagtactcacacaggtcatgtcaattccacaaacaatttaagtgaatgccactaaattaaatttatatttctatttagtaaataataattattatggtagtaaaaataagaaatacaataaaataaaattaagcaataagagtatttaatcaaggatgagaaattaggaaaataaatcatgtagttttaattatccaattgttaatgctaattactattcctctttcttagaccatcttcaatgagagatgtaaaaattgtgctatatttagcactaaaagtagttttgtggtaaatttataccaaattaattttagctttgtgctccaatgcacaattgcaaaattttgatgtaaaatttaatatctaattaatgttttatttaaaaaaaataaaatttaataac

SEQ ID NO: 329119 - DNA, 666 bp, Cannabis indica
gttaaaattgttatttgaatagttatgcattacaagtcaaaaccttttttaagtgattatatcatttgtagtttttcaaatgtttttgagatttagaatgattcttgactctaatatccctaattaatatgccaaatatgttctaaaaaaaatataccaaaaatatttctaactagttaagaataccatcattaaatgaaatttatatttaaaatttaatttaattaaaaaaatggaaaacgatttcaaattactttaattaatgaccaaaaaagaaatactccactattagtggaaatattttaataaaatcgcactatttaataaaatgtagtatcatgaataatgagtataattaaaaagttggcattaattggttaataatttattaataataaataataaagttatgaggtaaaatatttataaatataaatctatatatatataaatagggaaatgttaaagaacaccagtggtgactagcactttctatgtgttaatatttttattggtccaactaagtatcgggtgcaatataatttaatataagggaaacttacaaaaatactggaatttgagttaacttttacaaaaatactgtcatacggaattttttctaaaaatactgtgttttattaaacaccagtaaaacacaaagcagta

SEQ ID NO: 329120 - DNA, 505 bp, Cannabis indica
taagagccattcattccgtgggtgtaagggcctaatggaggcttgaagcggggacgttacaatggcatacaccatattttgcattccacgttgcttcaaactattgtgaaacatttttgtattgctatctctacctatactctaatcaagcttagctttctgatgcaaaaaagaaagatgagcagaattagcctgattatactctacctaaacttttgcttcagcagcaatcaataacaaattatttgtggacaaccattgacatttttgtaaattgattctagcttgatttttcttagctgcaatatcatcgaaaccttccttattcagaatctttaaacaaacctttatttctttcaactttttagtcaagttgaacataggagaaccaataaacttcttatcccaagcatcagtattgtaatgtccccgcttcaagcctccattgggtccttacacccacggaatgaatggtttttatacacgagtacgtcactctggctgc

SEQ ID NO: 329121 - DNA, 1429 bp, Cannabis indica
ccatccattggatgcgtttaactggttttttattggattaaattagatccataccaatgaatccaagtggatgaattcaattcatttagccactatttaggtcgaatttcaattaaaaaagaaaaaaatatatagaaaaaacataatttaaaatctaataatccaacatagataataaaataatataaaaaatattaaataaaataattaattatataaaaattataaatattaaatatgattggatggacattggatgatgttggattggatggggttcggttatccattggatcgaatgtctcatccaacatccgatccgatccaattgaatttttaaaatttgcatccgattcgatccatttatgattgggatatccgattctattagatcggatgactttcttcacacccctaataagggttatcatgaagaatttcgtaaaaatgcaaaaaaaattattttgaagtgtaaaaatgaaaaaaccccaaaatttaaatgcaatgtgaattgtattattcaatatataacaaaagattcgtattagttagtattaggatatttagagtacggcataagggactcagaccctcgatctagtctttgttctcagaattggatcccgtctcgaatccatacccgaccctggactacgagtcagacctggatcccgaacttagactttaacctagtctttgttcccaaaatcggactaggacctcgaacctcgaacttcgaactcaaacttggtcttcgttcctagaatcaaaccaagactaggactccgaactctagacttggaccttgaacttagaacctagcccctgacctcagccttagatcccagacctaactcgaactccagtcccaagccttggaccttgggccccagactggggtccgggtcaaaggtcggaggtccgggttcaaagtcaggggatggagtccggggttgagtttatagtaaagataatataattgtacacaacttattaatacaaatcaatatcaaacatattattgtattaaataatactaagacaatataatgcaacaatgtgtacaaaacgagccctaaatgtgagagcccctatttttttgctaatatttttaatattattttaatcaaaagcactattacttttttattatttaattaaattaatttatatttaacaaatttaaattataaaatattatttaaataattaaatactaactaaattttaaaattttaactaaaatttgactgaaaaaaagtgtccttagagatgctcttacacgataaattattaatgtgatttaaaaattaatagagaataataagtagttataatcatgtgataataatattgtatttctcgtgtatgtgtgattttccccaataagcaaaacaaattcaagcgaatatagaaatttaattacttt

SEQ ID NO: 329122 - DNA, 509 bp, Cannabis indica
aaaaaaaaaaaaaaaatagcaaccacgtatcaattctatggtttcattgcctaaacttatgtaggaaataaattaaagcacatcctattttcgttttccataaattcaaatcgaccaaattaggaggaatcttactaaatgagcggatattaaatcttctagcctcctgtgatacattcattacctaaataaattttaaattaatttccaattaaatttattagagtagccacggagaatcttgtggttgaattatgaaaacttaatataataataaaataatttgttgcataaatacttaaatttaattttcggttggtacttaattgtcaagtgtttaataaattacatatggtaattcttaatcgtaatgttccggctaatttacaagctctgaatgctaaatttcaataaaattgatatttcattttaaaaaaaaaattacatatggtaattcttgattagtttaggtcattaatttttttttaaataatttaaatataccaata

SEQ ID NO: 329123 - DNA, 670 bp, Cannabis indica
aattaaaaaaaacgataaaaaaaatctcatttgcatgagattatttatcccaccctgctggatgggataaataatcccaaacagatgagattagctggattagttatccagacttctaccatgcccaaacactggattagacaaattaacctgtctaatccaatccaatcctgcataccaaacggaccctaagagaataagcaaattaactccacttggacaccactattcagaattgctaaaaaacaccatatactgcccaacatcactatatgatgaggtgtaatattgccctattaatataagccagtatttcaattgaatataattattataaaatattgttagccgtttacaagagactacctcgtgataataatcggtactactaatgcctatttagatatatagcggtatatatacttaaaattttaaatttgtaagcggtataaatctaataattattttttggcggcatacataccaaatgttagtaaaattttaattttcgttcaatttcgtcactacgaaattcgttagtattttaaacaaaacacttataaagctcagattgtaaattatttagtttaaacagaaatatgtagtatcagctacttttaagtcttttttttattgacaaaaattacaattatgccgctaaaaaattatt

SEQ ID NO: 329124 - DNA, 431 bp, Cannabis indica
ttttataaacgcttttattcaaaaaaaaaaaaaatcaattcccattcacttgagatttggacaatattcaattttgagagtcaccagggaaagaatagaaagtacgaaattgatctaattttgggtaatattgccacttcttacaattattactttaactccaattcaataaatttatccaatgaagaatcccaatctcacacacacccatgaaaccccaccacaccatgcatctcttttaggatagaaccaatgattctcataaaagcactcataactttttccaagagacattatatgtgcttttctttttgtcttcattcttacttttgtaaatactttgctgaatgttgtaatcaaattaagtatgaaattatattgggattagtatattattagtgattaaattaggtggcgtttggtaacacttt

SEQ ID NO: 329125 - DNA, 947 bp, Cannabis indica
ataccatcttagttactgaaaggtcgatttcattgtggaatttcgtaccaaacctagaaattaaacaaaaaaaaataaaataataggagaactgttacttaaataatataaaacaaaatcaataataataattggaattataacataccatgtcacagaaattggctttgcaaatatcaaccaataaaggtttgaagatccccaaactctcccttaccattttctcaggatgtaaaaatataatatggagatttcttctgtattcatccatttgtgtccattgcttagcaacttcactcataaacaataattcttccccaaacttatgattttccaatgaaggaatcacctgcaccaaattaattatataaataataataataatttaactaaatctaaacatgaatttattttaatattttttgttaaaaaaaaaaatcaaattataattaagcttacatattttgaaatcctttgcttcagtgtcctcccaaatttatcataatactcatctattgcgaaagaaagaaagccctttacctcattggagctgagaatggtgtaaaccattctatacgtatacaacaaataaaagaaattattaaagaaaaagaaatttatactaataatatttgaaaaagaaataaaaaccattctttacgtgtatatcttcattttttcctctgcattccaagattgagctctaacatcaacagggttattaggattcaatttcagatttattttctcaatggaatcatctatagcaaccattgattcagttatcattcttgtaagctcttgaagacgtaacttcttctgttgctgatcagggaacaacctaaaattattcaccatgattcttgagtaacacagtacttcttgctgagaaaatcacccaagatcatatacaaaaaatcagattgaaaattcaagaatatatatat

SEQ ID NO: 329126 - DNA, 633 bp, Cannabis indica
gacccgtcccattgacattcctaatttagcctatcaaaaatattttaaaaaacattttaatatgtaattttagttgtagaagttgactaagaaattgtaataaaaagttataattaattgcagctttttacataattttcttgcacttttttcacagcacaatgtttttcctagtgcaactgtattaactgctctttaattgatgtttgtgaaaatatatatgggtagacataaaacttatcatattttaaaataaataaatagacaaataactgtcctgatgtcattcatataattaagttctagtatcaaatttaatttatttttctaacaaaaaaaactatttttcggctaattaagatttttttctccaaattttgatatgtactaaattatgcttttgaacttttttagccgttaaaaattcccctgaactattaagattgttagatttaagaacttttgtctaatttcatttaattttactatttcagtgattgtttatgtgctaaactatgctctccagactttgatatctactaaattatgtccctcaaactttgatatgtactaaatcatgtctctttaactttcatccatgttagattttttttattaaaattggacaaaagt

SEQ ID NO: 329127 - DNA, 569 bp, Cannabis indica
atatttaaaattaaaaaattatagtaaaagctttaaacataattaactaatgattataaattattaaaatgtaataaagcataagaaaaataaataaataaaaagaataataatttgcacaaattttttaataattttcaaataataattaggcacggtaatattatgaacataatattggaatgatttaagaatgaaacactaactataaaatttataaaataaaaagtgttattttttttttttttagtgtgtgtgatatataatacaaaaaaatcccctctattttagctaaattttaatttgactttctgttttaataaaccataaaaatggccatttgtttattaaaatggtagaaaaaaatatcactggaaaaaattttagtcaaattttattgatacgcatcatttcaaacaccaataattcaataaatagtactgtgatacacaatttttattacaagcgtatagtcactacaagaaatgtcacttttgccaacacaaaaaaatgctggtaaaagttggtattacgctgtaaaatagaatttacttgtgatgtgttggcaa

SEQ ID NO: 329128 - DNA, 1262 bp, Cannabis indica
ccctctttactcttttgttggcgagtaggattgtaatcacgagcaggtcgacatgagggtaccttacatgttttgtatcttcctccgagaacacaattggaggttactcagtcttagccttcttagacagttatggaccgaaagctgaagtattattcttaaattccttgacatatctcttctgggcattgttactttctcaggtgagatgtggccctcccgagataacaaaatgtcctctccttcaacaggaagaggttgtaatctttggttgcctgggttattgggcggatttggctggctttgtctattgccttgtcgctttacatacggttgaaagtaaccacgtgagatgaggctttccatctcgtctttcaactgacagcattcatccgttgtatgcccaatgtccttgtgaaatctatagaattttgttgcatcccgattgtgccttgcatgtctcatgggctcaggcttgcgaaatgcaacactatgctcatgtgcgagaaaatattttctcgagtttcattaagcacggtataaacagtgtaaattggcacgtacttatcgtgcttctttttttttcttatccttggctgattccttggagtcatcttttctctttgtgctggaacctcctggatttccagccttcgtcgagagggtgcttgcttggacagtgttgggtttacctcccaagctagtctttatcgatttcatctcgtttgttgctttttattttcgtacaaacacctaacctctttcattgaacttgttaaagttatttacatggcgaccctgtaagtcatcccagagctcacctccaactgtcaagagatcagtcgtagtccccgcttgaagatgtgtaagttgtatattttcgttcaatttcctaactctagcagcgactatactaaatcgactcacgtatgccttgactaactcgcctggctgctactttacattagtgaggaaaggcgcttcaggttgcatgtctcttgctgcgtggaactgtttcttgaaatctttagacagctgttccgaagaagtaattgagtgatgggtgaatttattgaactagctgctcgccgtcccaataaacgaggtgggaaataaaatacaacgtaagttgtctgttgttggaaattattttaccaggatcttagatctactcacaagtatgtagattaacaccctaaatatgaactttctaaaacgatgaaataaacacatataaagttaagtaaaccttacattgggtg

SEQ ID NO: 329129 - DNA, 703 bp, Cannabis indica
gtaatttccacattaaaaataataaattggacttaaatgtaaaaaaaaaatggaccttttattttttggggcctgtgcagcagcccattttgcaaaacctatgggctggctgtgcacaaatggaagaacttgcaattataaaaagaaaatttgtaatgaactacgttttttattagatgattttgcgaatttactttctagttttccttaagcattttatgtttgtggtatagccattaattaaagcttaaagttattcatgtatatattcagagtgaatgatgaattagtgtattttttttctttttttttttaattaatgtattaagttctaattgtagttaataaaagtttaatttacaaaaaaagaaaaaaaaacttaaaaaaaaaaaagtaaatcatttttttccctaaattctatatttaatttttttttagttaaaaaagtaatacgtatacggtaaattgaagaggtgacatgggaaaaatatcattaaaatacgtcacattggtcaaagtcaatagaggttaaattaattttttttaaattaaataacaagaaaacgacacagagttcgatgtcgtatgacataaaccttaacaataaaaaatattattgttcctctttgctttgcttagcttgttgagttgagttgtctccgatcatctcccttcttccgctcatcattgctagtactccctt

SEQ ID NO: 329130 - DNA, 635 bp, Cannabis indica
tgcatacaacgcacaattagactaattaaaacgccacacttagtcttataccaacaaattatactccaagaattcaatcttttgagtattacatgtatatttagaaaagttagatacttctctttagaaccaatgatactatacacccaagggttgagaacttacgcataaaaaaattaaaagaaatcctttatttttccaatgtccgatgagatctgatctcccatacgaagtgaagtaatctataactattcattactacactctcaatgatatgtggctcccatgctaatgggtgtagtgttttaatgacagaaaacatatgtgtttcctcaataataaataataatactactattactaataatatagtatctcagtgcatttaattgtaaatttagttttttatacttggtgtatattgtcattattatttaacatatcacctaaaaaaaatttaaaaattcaaaataattattacatgtttaaaataaaataggtagatatcaggagcggaattatgtagctctccgcatgggccatgaccccttaaattgtttaatttataatagtgaaaattacatgaaatatgagattttgtaaaaaagttacaaaaatatggcatttataggttt

SEQ ID NO: 329131 - DNA, 489 bp, Cannabis indica
ttctttgtctcatgtttagatccctctgactcgggagaaaatgcaattgacgtggctccaaatgtttagcatttctctactaattaataccaatctagtgcatttcaaaaaaaaatccaatctagtacattttccaaaaaaaaaaaataccaatttagtgcaattttttttaaaaaaaaaataccaacttattgagtgggatccacggtacaaattaataccaatctactataatagaccacaccctaatggaaatgcaaccctcttcatatccacaagattcacagggatccattttattttaaatccctacagattaggtctttttttaatggctcatagtaaaagcctcctatatatatgatgaattacttgaaaaatatattataactaataagctgataaatgcattaattcatgcactgagtaaattaaaagagtcaatgctggaaaaatagaaaaggcttcaaaaatgagagattttggcaa

SEQ ID NO: 329132 - DNA, 1498 bp, Cannabis indica
aaatttataaaataaaaatattataaattttgaaatattttttataaattttgaataataatattaagtgtactaatataaacgtatcacgtgtacaagagtatatatataagcaatccatgttagcagttaactgtgaaaaataaatgacacattaaatttgctaacagtttagtaatttagaaaattttatcaataaaatttaaacttaaagagttaagtaaaaataaaataatagttaaaagagtttaattaaaaaaaaaaaactcattatttattgatagccccatgagaatttgagtccaccaccctatagagaaggttcttttgccctttgccaaaaccaaaccataccatgtttggagtcatgtacatacatacacataaatcccatatatatatatatatatatatatgtataattttacctcatccatacaaattcttagctatgattgtcttgattataggaagcataccatatgatattaaatacaaggaaaacacataaagacaaactcatatatggaatcaaaggcaaattgttatagcataatacaaattgaattagttgttcccatgtgatggaaagagtttgaagttaaatatagttagagattataatgatgatgatgaggatgatcattatcattactatattgattgtgttacaagattgtgaatatatagtcaatatataatcaaagatattgagaaatagtactcatttattaacttgagtataataattaatcaccaacccaaattggtttattaattgcaaatttcatatattgcatgaaattatcaatgtttttgatttttgattttctataaatagtagggttggttctaattattacaatgtgctcaacggtcaaaataaacatatttgcacaaatataggagatacctaataatatgtcccaacataggtctcataacataatcaagcaataatttaatattattttatttaatatcaaactttaattttatgtaaaggattaaggctagtttagtggtgagagagagataggaaaaaagaataggtcataattcgaactcaagacctttaaaactattaaactattaaaatgattgtaatattattacgctacactaaaaaaaaaaacctttaattttaatgtatgtatgtgatcaatttttatttttcatatttagataattattatttaattttttaaatgaagtgtttggatattatttttttaatggtaaccttacatttaatttaatattaagtgacacaaatatatttgttgacataactattttctttcttttttttttttttaattggcaaacattgttgattctataacatcaattaatatttagcttagctttttattggggttggttgggttcttaactttacctttttatttctttatttttggggtcatcttatagaaagtgaatgtgtgcattttgtaaagcacaaagttatgtgtctcaaaaaaaaaaaactaat

SEQ ID NO: 329133 - DNA, 1018 bp, Cannabis indica
taaagtccaattttatagtagtgaagataaaaatgtgatgatagatttgtagttattaatttaaaaaaaaatggaataattaaagagaaaataaataaaggtaaagattttatatcaattaatatacataaagttaataaaaaaattaaaaggaaatgaaagaattaaagaaaataacaaataatgcgaattaaaagattttggtgtatcatatcaccttttagcatgtcatgtcatcttattttagaatggacactctaatatatagtcattttgttttgtagtggacgtcaggtgtggattaaaaatctacgaattctttcctagagacttcaaaaataattatttattatcgtttatgactattataattttttattactattcttcattcaaggtcgtcttgacttaaactgcattgtacagccaggctatgctgcataatagtaatgactaaatgatctagttgtctggatgactctattacaagtcataaacaaaagttttatccaaatagtttgtggaatatgtacactatctagagcatcggaaataacataaccattgcattgttgatatttcttggcttttgtttaaagatagtagttgttgaagaataaagtaaatttccacgcaacgtgtggtgtaactatcaagaaacccaacaacttttgttttgagtttaggaccttaggtcgttgactttacttagtgccaaaacggtaccctaaaaccaagaatttcatgaaagctaagctttgaatataaaattaggaaactaacacaaattacttaaaatacaaactttttttttaagatttcttttacagttgtacaaactgatattttataagaggaaaaataatgttatttctgttttgctacaatataacacttgttgactcagaaatttagattagacttattggccaaaatgaataagtagttaataattataagagaagcacagtaaatttattgtagttcactccctttatcgcgatagtaatggaactac

SEQ ID NO: 329134 - DNA, 556 bp, Cannabis indica
ttcatattaggatgttaaggaaacatacatggtagtaaatctatatcctggtaaaatatttccaacagcttgcaggcgagcatactcgagctcctactccctcttgtacctataattattgtatttatctttcgcggatgaaataatgtttccctgagcgccttctcgctccccggattcaggacgttgggacagaggaccttgaacaagttgaagtcttcaacaaattgactcttcagaatcaacttggccctcctacagttaacagtcgtcaccaaatcgcccacattcaagttttccttattataactggcaaatactcacacgtggttcaggaagagttgggtgggggcgatacagtgcatggggggaatcctgacccagtccgtcaacaaatccggatgctcgaaggccttgaacccgaaagagaagaaaaatcaagtggtgatactcctttacaatcttttgaaaattaaagggtaatcggggtctcattgactggatggtcctgaagcttgtcaaaatcgtctttaaacttgtctccctttgtaatatc

SEQ ID NO: 329135 - DNA, 824 bp, Cannabis indica
tttttgtaaaaaaataacaaaagttagtataccatgtaaatttcccttctaataaggtttttttacaaaaatactgaattttgtacaaaattttattgctacatgaaattttttacaaaaatactattttttataaaacaaccgtaatttactacacagaataattaaaagcaacggtagaacaactagaaaaataatagtggaacaacacatgaaacttaacacaatacacagtatttttgaaaaaattatgccccacagtaaaaaaaagtaagaaatttcagtatatggtgtaaaaatcccttttctaatattaaagggaaaacttacacaaatacctaaattgggccaaactttacaaaaatattaggacacataaaatttaatatttatactgtcctaatttattttttaacttttatattgtgtgtaagtcaaacaataccaaagctccttaaactcaccaaccacgatgaacaaccaccaatcaatcatggaacagtaagaaaacaactataatttaagactccaatcctaaaataataacataaaaccaactaaaataactttaaaataataataaaactacaaaaacaaaataaaccaaaaaaattacaataaataaatactatacctcaataactattttggcaatgaagacttccatatcttcatgagaggaaacctttctctcagaaagttttcccttaccctatatacatttaagaacaattcataacaacaacaaaaataaccgtaaaaaacataaaaatcaagtatataatactaaataccgaataggacatacaaaataacaaaacata

SEQ ID NO: 329136 - DNA, 749 bp, Cannabis indica
ataatttattccatgatccgttttccccatttgtcaaggcattttcttcttatggcacacatatataatatgttattattgtatattaatttctattgtttactttatgtctatatcaaataaaatcaacacttgtgatcttgaccgatttgcagtccaactccgaacagccatcccccaccaatacctgctaataaattcttcaaaatacttgatagtacttaaaagtgccaacactgcaaccaataacattttctgagtataacaattttttcatgatttttttttttttttgtttattaaattagaaaaatatctaacactaaaaataacatttcagtgattagcggtctttttatataaattaaaatatttgaagcttcatattaaataatatcaataataataaaatataattattttacaatattaaatatctcaaaatgccataaattttccaaaacaaacaaaatcaaattctttattcacaattttctctcatttcttctttcttggaatcgcattgttctctagcgattataaacaacaatttgaacacaaaaaccagcattcttaactcatttcattgaaaactatataattgaaacacaaatcactatcgttgattgccttttccaactccggtactatgccaattagttctgattatcttctccggcaacaataatctgctactactacaaaattagcttttctcaacggtttataactgtcttttatactatttc

SEQ ID NO: 329137 - DNA, 563 bp, Cannabis indica
cattggagttcccttgctgtgtatatgtgtgtatgaatacattttgttattggtgtttctcaacatgaagagacctcacacaacacgccaaagcataccctataatatgaggattatatactgttagtattaattaaatgattatatatatagatatagataagtaataaaaaaataacttaggatttctagtcaatgtttctcaatcatattgatattagtatatatgtttattatttttagaaaaaaataaaaataaaaattatcactgatgattttttgtaagggcaattctatttaccccacaaaaaattatgcgtacgttctaataatttttaaaaaataaacttaaaataattttaaaaattagtgttaatatcttttgaatttttttattatgttattttgtgttaatttgaatgctaatttttatttaattttcataatttttttaaaatcatctatatacttttttatataaaatttgatataatttttcatttatttttttgtcataatgtttgaaatataatttatttttgtttgataagtatattttttaa

SEQ ID NO: 329138 - DNA, 1042 bp, Cannabis indica
gaaaaataagcaactcaaaacaaattaattattatatatatacgcatataaaatatactataaatataaatatatatatattaagcttgttttatgtggcaaatttttaagtttatccacaaattaataattgaaaaattatttggaatttcacaaaaaaaattgctaggacgtacaaaagttaatgcaaatataccttcataaatatatatatatatatatatataaattataatttattcagagtctagaagtagaaagggagacttcatatattgtcgtgcctatttttttatgaacagattaaattgttatatcgttctcatgcgatattatattcaatacatttcaaccaaatgcatgcgcatgtatgattgcgtaatttctttctaatacaataaactacgtttcttctgagttattcatatatatttttccaataatattatttagatatatatagtttgttctcgacacctattattacaagagtttgttaattaatgaatgaggtaacatattaatatattatttaatatttagtgcgcctcaaaacagtagtgagataacacaactaaattaatttaattaatttaattagtaattaaatttacatttagttactaaaatttatattatgactaaatataattattagttagtttttttgtaagtgacctttttattttttcttttcttacataagatttataaaattttacttaaaaaaaaatactacatcactaaaaaagttatccattgtctcgtatcaaattaaattaataacttttagataaaaataactttttttaaataaaaaatgacaccatatatatagtaagaccactttaacggacaaggtgagattgattattattacaattattatatatatatatatggaagaggtttcaatggttacattttttattgtaaccatcatggttacattttttttaagccattggattactattaaatggttgtgattaatttagaaattaaataaaaataaataataaataacttgtaacctgaaagt

SEQ ID NO: 329139 - DNA, 535 bp, Cannabis indica
tttttagttttaattacttttatataatttctcaataataattattaattacggcttgttaggtgttgtttttcaatttttttttttggattttttcttttgttgtaataatggtattatcacttttgtaatatcggttttatgtcattttggtaaaccatcttatttttgcctattttttgggctttgtccggttaaactgttgattgttacccattgttattcttctttttcataaaaataaagaaaaaacaaaaaatctgcagtattattattttgtgttttttctttaataaataatattttttttgtcaatatgaatggaagtccattggactaacccataaaaagggatttttttaataaatacattattatcaaatatttacaaaaataaccttacacaaacaattacttaatactaactatatatatatatatatatattcaaacttctctattttgaaaatttcaaatactacatttaaaaaaaaaaacattattaaatatgtatataaggcaaagaaatagctta

SEQ ID NO: 329140 - DNA, 573 bp, Cannabis indica
agatatgattttagaattgggctgttttaaacctaacgagagagttgtggagtgagatggcgttgagcatcgagagaggaagttatgttaaacccaaaacaatagtgtttattcatactaaatattctagacttgaacatatataaaaagcttcttgatcaatgatttcaacaaaagcaaaacgaaagaaaaaatatatttttatttcatttattttgttaatttaatttaaatttatttttatttttaaatattcttttacattggccaattaaattaagccatgtataaactgtgttcatgtggacagtacagaattgtagttaacactcaaatagatgaaaatgataaactgctaatagaacacgggttttggcagtttgtcgcaaaaaaataggttcagggaattaattgctagcaaagtaaaaattttgggagttttttccatagtttactcgtaaaattattataagatggcaccatccactatataataacagtgataggcgcctatcataatgataggtctcgctatatttgtttttgaattaaataattaattcaaaagataaa

SEQ ID NO: 329141 - DNA, 680 bp, Cannabis indica
gaaattagttgaggaaatggagtttatagaacaacaaagctacgatggttgaaagtgagaaaaccgagaatgtggttagaggttttatgatggacgattgcacgcgcacccattactttactgattttatttttagaaaattagtgcctaagaagaggtaaaaacaatgttgattaagaccatctctcaagcggtatggctaagtggacgtttaggtaatgtggttaagtgagcgtgtttaatatgcagtatggagtgtctcctccatctcaattaatctccttttgtaacacgtttattgaaaaaaaaaaaagaatatctctcaaaaattgtgctacatttggcacaaaatataattttatgataaatttacttaaaatttcaatactatgcttcaatgcacaattacaaatttttaatataaaatttaatatttaattaatgtttttattaaaaaataaaattaataactttattatcaattttattattattttaatatgtaagacaataaaaaaatgagaaatgctaaagggcaccagtggtgcctagcaccttcctatgtgtcaatatcgctattagtctaactaagtatcgggtcccatataatttaatataatagcttttaaggagtatcgctagtcaatcggaacgcgacatgtcgagaaggtgctagcttt

SEQ ID NO: 329142 - DNA, 2031 bp, Cannabis indica
atcgatattcatgctcttgaaaactagacttaggtattcattggaaatatgttagcacttaattttctctccccctaacttttgagttttacatgtctaaattattgatgttgtgacacttttattttctaaaggactgctgggaattacaaacaagaggggaagacttatgtggttcaagatggagacatcatatttttcaagtttaatgtttctggaggtggaaagaagtgaggaatgtatatgctaacaagttaagtagctaaacttaatatgtctgtcacatcacatgcctccattatttctactgtaaacaattctattttgagaaaaagaggacaacaaaagttcatggtaatatttttgtatcatgcagttttgggattgtgttatttattcaccaacattattagagaaatgaattgtattgttgaaaagagtcttgtggataatgcatgctagataagacctgtataaactaatatgctttgagaatctcaatttctttaatttagttttttttttatgtacttttcttaacctgaaaacattaccctatttgatttacacatgaatgacttggattgtaaattgtgatattatgtaagctgagattttctcccacacattatgggtttaggactattctattacttaattcttcaatggaaggtaatcaacatcagaattttgttaggttgttgtatgaacttgtttaaccttttgtttagggtaatgtaatttcttccagagttgttgaaatcagtttcattttgatcagttaaatggtttagaaatgggaaatttgagcttttctgcccttaagagacccataattaattataaagataattattgaaaagttttggccactttttcttctacctacctaccgttctctacgtctctcccacttaaataccaatgccccttatctcatttaggaactaggaccacattcagttacattcttttgttaaaaactctaagattgagatcattaaaaccacaaaaatcccatccttgacgtcatgatttatcttagtaatggtaataatgtaatgatagaccctctcagttttaagagtgcgttggtaaaatcatcattgaaactggtgtattttaagataattattcggtttggcccttttgtttaataatataattacacatttttcataaaattggaagtaattgaggaatctctataagaattggtgtgtatgtaattacttaatatgtttcatttttgataatatgaatttttatgtaattagtttgttacttcatatccaaacaaaatacattaaataattctagaacatgagtaaacacaaatatccgttggcaaatctattagtgtgtgtttcactgtgtggcatttacttagtcattaaaaaacaaaaacaatcacaggcagaaacaagaatgtatgcctaatattcatgtttatttcacattttggcattatttgtttatatttggtggggttaataagttgattgcattgtccccttgtaccatttattggggttatcattttgcctttgccatcctttctacatttactttttaaaggcctttgttttcttctttcaaatcaattgcaaagcaaggagagttaaaatcttttctaggtgtcacacattgcaattagagaaaattacagtttatactgtaataataagaatattttttatttttattattattattattttagattgtcacatttctacttttttttaaaacaaaatgaaaagaaaaaacaaaacagaacattcacttatactctatccaattattcttaacagctacataaatttttgcaccttatatgatttttcattttttttttcttgaacggaaggaaaattttattaaaggcaaaggcaaatttcattaaaggcaaaagttaaatataaaattacatacaaataagtcgtaaattagaacaagacggtaaatcaggccataaagtatagaagagttaagagataaactaaacgtacaacaggatgagctatagca

SEQ ID NO: 329143 - DNA, 1836 bp, Cannabis indica
taccatgatttcttcaagatttccaagaataagatcttttggatgattcaatatcactctagtgctgggttccttctgaatagaattagtaatgattttttgatgaaacgaaacaagttgttcttgttcacatccttcagttgttgtagcagattcaacacttgcttctactggattcaaatccactccgttaggatcatacttgatgcttcaaatggaggatccaaaaaacaatcaatctcaacttctatggaaaattttgtaaaatctttagagtcatcaacaaccacattagctgattccataatattttgggttctcatgttgtaaactattggtttttatggttcatatcagagtcgaatcggaagttaataatatcaaatttaataaaaaaaattgttgaatccaatatgaacgataaaaccccaaatctcaacacaattatacataacacaaaccctaactattaatgtagagatttttaactcttattgcctattagggttttcttcctatcttttcattttaatgaaacaatcatccaatccagtgagacttgttgaagatttcacaccatggtcttcgaagttagtttcaacactctaagaatacaatgggctatcagattgaattcagataaatataattttttgatcacagtgtcttctcaactcatgagactgtgattgagatagggaaaacacacaatcacctctagagagagagtgatgcgtgagtaaggggtagagagagagtgagaaagacgtgagctagagggagagagttggaaaattcaatcgttaatttttcaaccctaaaactgatccctcttaagttgttcgctttatctgcttattgtattatattttttatctatcatatatgttgacctcgcttttagccaacgacaatgagtcgaatttagtaagaaataagtgatttatagcaattgatatataataaagcaatataaagacacaagaattttatagaggtttagccccgagaagttcggtactagcctaatcctcgttacttgtattgacttaagaacaaggagaaaggttccttttcttatagctcttacaacaatatctctaaatatataattcttagataatatctttaaggtatagtctcaactaaactgtttgcgaccttttgcccagtgaacatgcatcactatttatagggctagtaagcttggagaggaagtctttcccctctcgttacaatgtgtataaatagaaagatcgtgggtttaatgctgagtacaaagatcgtgggattgatgcagaatacactgatcgtgggatcatgtgtatgccatatccctataatctgatccccaagttatagggatttagttgatgactcacaatgcgaaagctgaattcgctaagtgttggttcctctgcgcggattgctgattgctttgctttgggcatgccagcaaggcaccctgctcggactatgccctctaagaagatactccaagtggattccacgtgtcaccattatgtgatgccacgtcagagtgcaaagattgggataacatttgccccccaagtctgtacgtgacttccaaagttgcatgtagacttcatccgagctgttcctacctttggatgtggacacgtgttaagcgcgagtgtctgagactcgatgtgaggctgactgtgcgtccgttcagttttcggctaataaatgctttgacaattaatattttaaaatccaattttctctcaccacggctgacggcttgcacttcattatttttgatttcccatatttgcttttatggagggaaactgaggcgtctgaggttccttt

SEQ ID NO: 329144 - DNA, 985 bp, Cannabis indica
aagtttgaagccttcaacttgactgagagggtgaaggaaactccctttggagttttttggaatgccaatgatctgaaattctccggggtgattgtgcatcaactgctgtagaggaaaaagaaagtgagtgaggtcaaaaatgatgaagtgtggttttacgtgggtaaaactgaagccaaatttgggcggtctgagtttggtttgatcaccggcctaaagatgagcggtggcccctcgacagaagaattgagtacactatgtaagtgatcggatattgtgggactacctcaataatgccaaaagggtcactttcaaaaccctttggctagcttttgaggtgtgctatgtggccgatgatgtgtacaagctagggttgtgtgcatttgttgaaggtgtgctattatcaagggctaagggtgtttatatatggacagatatgctgatcaaagttattgtggatggggctattttcacccaagtgaagtgctttggcttgtgctttggctttggcttcgtggctcgagatcatgaaggagctctaatcaaagccaatcaagcatcaaaaccgagtatggtttctgctgtcattgcagaagcagtcggcatcaaaaaggcactaagttggttcaaacaccaagattggtcaaacataatagtggaaacagagtgcattaatgttgtgcatgctatttaaagtacttgtcatatgatctctccatatggtgtttaattaatgagtctaattttttattattgaaattatataatgtgtcgattaatcttgttaaacgatctgcgaattaggggtctcaattttttacacagaactcctattctatagctagttgtatcatcaggggtgatttattgtccttgtcattgaaggataattgattaatgtagttgttattttgttttacattaaaaaaaaatagtattataatttaaataataaagattaggtaatcacaatttatattttaat

SEQ ID NO: 329145 - DNA, 920 bp, Cannabis indica
tatcccaacttgcaaaccatttcagtgtaattcaaatctattaaattcagtttctgtaaaacatattttaatttagttcaaataattttacaacagtttcacattcaaaatttatttattaatttatttggtaattttcacctatatataatattttatatatttgtctatgcaaagaaaaaaaaacgaagaggtgtgatattattttttctttattatgatatattacatataaaaataaaaattatagaaaattctgccgggcaaaaattatatacatttaaagtttggagaaagtgatttaataaggaattaaattaattgactattgagttaaatatcacatgtacgtactaatcaattaattatcaattgtagctaggaaattaattagttcaaaaataaaaccacctaacttgttagtggcacaactcatcataattaagaagtggatatatatgatacttcttgagctacatatagagagaattataggccaaatacatttaggaattcattttccactacaataaatataagacaacactattatgtatctatacacttcacttcacgagtcaaataatctaataattttttgaaggataaaatacattatttttcaataatatttctttatataataaaagggtataattggaatttggtcagtaaaatcatacccataccttataaaataatctattatttgtataataatcccacttgggccaatgaacaacttcctctattttacactattttttttatccacacgtgttttaataaatatatatcaaagaagaatgttaattagatactcctattacaatttctatgtccgaaattatattccgaaatacttttttttaaattttttttcatagcgatattcgttatagttacagtatcatctctgt

SEQ ID NO: 329146 - DNA, 1061 bp, Cannabis indica
taaaatttaactgacgcttcaaatttacaaaaaatgtgaagttatgggagtattgctacaaaaaatatatcaagggattaactgtataaaaattaaagcttaagagaatttcaccgccaatcaccatattatttaatacaataatatgtttagtattgacttgtattaataagtgtgtaaaattagattatctacccataaactcgacactaacctaatcctgatcctgggccctgatcccatcttcgaccccaggccacaaaccttggctcaaaccccatccataaacccccgacatcgaacctggacctctatttgtgtctacgctcgggatttagggtctggggttagagtttggggttgactttaagttcgggtccagagttcgagtttgggtctggggtcgaaatttgggtctgatgtcattcacattatatccataaacataggcttaatatggcaatgcctttaccttggtccaaaaattcttattgaaaaaagtcctaattttatttgaaattatttcataaatacttaaaaatgatttaaaaattaattttttatggaatttctttaaaaaaaaatgcagaccataaaaaattgttttcatgttactacaacattatactatgtttttcaaataaaaaaaagattgaaaaaacaaccatccgaaaaaatgtgaagaaaaaaaatgcgtacaatagtaaaaattttaaaaatgatattgtaattaaaataaatactactctgaacaaaaaattagaaaaaaaatattttaatacgtgatttcaaaaataaattatattttttgacttttttattattttggtgaaacatgttagaccttaatcatcatataaagcccattaattaagtaggccaattcgagttaaataaaataaatagagtggatatggtttttttttttttatatatatatatatataaatatggataaatatagtatagtttacttttatatggcataaataaataatgtaagagtataattaaagtttaaaatatgagaaaaataataaataaatttaataaaacttgta

SEQ ID NO: 329147 - DNA, 768 bp, Cannabis indica
ttatacttctataattaatatattcatttatcttgtaattgtatttcatatattttataatatagtgtccattaattacttgcttttagggcataaatcccaacagaaataccattgatgggcggtatttgatagagtagctggaaaaattcagcatcagacatttcccttgatgccttggagattggtctgcatctcaaaatacttgatgtgagataatggatcatttttctcggtgtacatcttctaagtcaacattttaaacttggtcagaaggtcaagggaattgatctgcgcagtaaatgacaaaccccttgtccaattgagctccaagtcagtgagttttgggccggttaagctttgtactaggctcttaaactgatctaattgggcttgtatcccttgatcaacttggtctgcttgttgatcggcctgtgcaacctgttgaccccttggagccttaaagggcacgaggttatctctatttagaagaacatagttttccacattaatcggctggttattacgcggagggatgaaatgtccatctagatcacttctcctttagtttgagtcattcgaaaggttgcttttaggtccaagtcagaaggatgctttcatgtccgggtcagaagttggtctggtcattcctcccaaggtaatgaccaagaaaaacttgcttattcgctaggcagacaatggtttgatcatggggcctggaactagatgatccttctgttgggttttatgccctaaataaaactcttt

SEQ ID NO: 329148 - DNA, 549 bp, Cannabis indica
taaggcataaaacccaacaaaagtaaccatcttcattgcatcacgttacctaatcaggcaagtcgataatataatctgataatcctgtattgcattgcctaatcaggcaagcccttttctatagcctggcactcatatatcgcataattgaattacctaattaggtgagcccgtgccaaaaacctacacccatatatcacataattttatcacctagtgaggtgagtccgtacctacgctcggtacttgtatatatcactgctgcctgtacctaataacgtacgacgcccgacatattgcatcacctaattaggcgagcctgtacctacactcggtactcatatgtcactgccgcccgtacctaataaggtacaacgcctgacatattgcatcaccaaattaggtgagctcgtacctacactcgatagtcatatattactgctccatgtacctaataaggtaaaaagcccgacatatcgcattacctgatcaagtgatcctacatatcccattcatggtatgtaacgccctaatgctaaggcacgctac

SEQ ID NO: 329149 - DNA, 631 bp, Cannabis indica
atgagtactaaacaaatttaacttataaaaactcaatttttttctaatattacccatttaaagtacacccatatatatatgttgtaattttagtgaaattttacaaatctttggatgagaaggaagtgtgtgagtgtattgaatcccacatgggataaaaaaccttaattatatatacctttatgttataagatgctgaatcaacacttaggaggcgtttggttgagaggaatgaaaatataggaatgggaatatgaataggaatggaatggaataaaatttaaaatgcataaaaaattgataaaaaatcattaatacattggaatggtcattcctttctttttaaaatggaatagccattccaccaaaatggtggaaagagcattccattggaatgctattctaatctttaaaatgcaaccaaacaaataaatggaatgaaaaataatttcatttccattccattccatttcattacctccaaccaaacactacctaagtacgaatttcatattttagatctaatccaatctgcacaagagctcaaatccaatctaatccaatccgcaaaagtacggattggatcggtttttttagattgattactttttaatattaaattatttaatat

SEQ ID NO: 329150 - DNA, 911 bp, Cannabis indica
tcacatgagttcatgatcatgatcataacatatttccttatctaaatattagaaaaaatgggggaccaaattggcaattgtactatagagctagctagaatattcaaaattaatataaatataaatattctttttgtgtaatgtgtatcacgaaaatgctttcgtcatttctaaaggtgtcaatttctaatgacatgacctataacgtcatctcaccacaatcatggtaagatgtagtaatacacaattggtcaagattaatttttttaagaaaacttaaaatttattaatcagcaacaatcaaacgtttgaagaaccatagaaattgtatcttccacaagagtacaacctgatcaagaacaggagttatgagcagcacaatgcgtaactttgttagcagatcgtttaataaaacaaatcttgacattcaatagaaaaaataaaagcaattgacattcaagaaccaacaacccaaacaacaaaggcatacaagtggaactatccagagcttgtaacaccaaaagacagtcgatttcaacgattatgatcctctttccgtttgatccaacttaaggccttcttaatatccacaatctctgcaatttcaggttggacaccatcaggagagttcacttgataacgccttgaccaacttcccctcatcattcctaacaacaacactcgaaccatatgcattttgcagtctcaaacatggcactatcagtgttaattttgagctgatttggagcaggtttctcccaatgctcaccaacctcaaatgttccaggttgaacagaagtggctcaaacttccttgagcatgcgtgattccattgagcaagaactaaccttgttcaacttttgaaaaatcctaaaaacaaaatgtaaagcccttttttggcaagttaggtg

SEQ ID NO: 329151 - DNA, 757 bp, Cannabis indica
taatatgcagctcatcgagttgcccacctaaaggaccagaggaccaagagctagaatcgccatacatatgctctgctccaataaaggttatacaaaaatataaagaaaagagtgtagtgatagttacaactttctaaaacacaagtttttggtattctaatttctcaccatgacttttttatatatttttactagtatttttcaattttaatgtatacgtcattttgtgtttcaaaaatgtgttcttaaaaatgagaataaaagatagttatgaagttttcaaaataagtgtgtttttttagaaaaaaaaaatacacttaaatattttaaaaccttgatatgaacaagactgacacagatccgggtcctagcctcagacctgacctcgaacttggatcatggacccggtattagatcttggcccgatctcagactcagaccctgaacttggcctcgcgaatccctgatcacgaccttgatgagaaagtggtgagagtgaaaataatgaaaaaaaaagtggtgagagggaaaataaggaaaaataaagtgactagagagaaaaaaatatgtgaaaagtgaaagaaaaaaatgaggagaaaaaataataagatgaaaaataatgagagataaagtaaaaaagaataatcaaaaaattaattattttttaaactagaaagctacattttattgttctagaatttttgttattttttttcagaaaaagagaatcaagttattaaaattttgtagtatattt

SEQ ID NO: 329152 - DNA, 750 bp, Cannabis indica
aattagtaaaattaaagctatgcaaaattatgaaatatggggtcaagttttagaatattgttttctcgtactataagaaattattattttaaaaagaagaaagataaaagaaaaatatctaaccatgtgtgtaaaaagtgtaacatatatatagcattattactaaactatttttttaattaaattaagataaatatacataagtgagtggtgtgggctatatatatttatataaagctagtaaaaaagagattgatatgggtttgtggagattgatatgttcgagtgtgtccatgtatgagttttggctttatatgaagagagaaaatatgaaacaagattcactttgtggaatgatccataaagtttttcccaattgggattttctcaattattattttattatatacacttgggactttgctattgctagctacctttattattttttaaaaaaaattttatttatgagttaattgtccatgacgaaatgtacaaatttaatttctttgatatgtttggacagtactcatttgaacattattttctattcctacctatatataattataatactgataaaaaataagtagctccaaaatggtgtatagtactcacttaaaagtaggcctatgtatccttcaataataattatatgtctctatatgcctagtttaccgttaatttttatttttagtttttagtttttttaatatcataattttaaaattaataatatttaatgtagtg

SEQ ID NO: 329153 - DNA, 620 bp, Cannabis indica
gtgacttttagtcacaaaaaaaaaggttatttttgactaaaatatagtatttagatacaagatgtcactaatttagttttagtcacacaaatattgtgactaaaaacatatttactcacaataaattgtacttttaatttgaaactaatacctttatagtcatggatcttttagtcacaacataaggataataatttataattagtcacaattttttaacttttaatcacaagttttattgtgactaataataagattttttatagtgtccgattgatacatggccataccaatcagaagtctggttggacagttttgaggaaatgttgatttttcgtattttggctataatttcactttgatgttcgttttggacgttctataaatagttaagaagctcgtgaaatgctctacaacatggtaaataaattagagccaaaatatgtattttattttaggatattttcaccacgtagttgggtagaaaaatcctagattttaaatacaagtattagaaagtgttttagaattgacacttaccagtttaatactgatatgacttagagtctctgatcgatgagtaaaattctactcaggttttccggcacacatgattatgg

SEQ ID NO: 329154 - DNA, 846 bp, Cannabis indica
gataagccttctagaactattaaatatagaccgattacttattgaaatacactatacaaatatatttttaagatgacatatgtgtgctaactaaattaagtaactaaccaattgttatgttatatgataaacagatagctaattaattgtaagagtatttgttattagacaccagtagtgtttagcagtcttaagacgtgtcattttgtgattggctagcgatactccctaaaaattattatattaaactatatgggacccgatacttaattagaccaattatagcgatattgacacgtaggagggtacttggcaccactaatgccttttagcatctaattgtaaatagttagttaaatttttgtgataaattttttcttctttttagctaattgtaatttttagttttgagttgtatatataaatgactgaagctagctatcatttagcttattgtgctggcaaaaggcgtagtgggaactgccaaaaggtgcatcccattttggaaggtatttgcactggcaaaaggtgaaaaaaatttggtgagaaatttccctctatgaaatagttttagcggggaatttaaagttttatcggtgcataaatgcgtcggaaaaagtaaccaaaaatttgggggcaaaattcccgcatgggaattggttttgagaggaataaagttttgttggcgcagttatgaaactaaaccatttaatgaaatgcaccgtttcaacttaggattccaattaagacttttgtcggcgcaactaaatgcgctgacaaaagtaacaaacctaaatacgaccaggttcctcgccattcttcttcttcttttgtctctctctctct

SEQ ID NO: 329155 - DNA, 855 bp, Cannabis indica
ttgacgcgactatctttgaagaacaaaaccattttggtttggcatgtgtgattagagaccataatggttttcttttgactgctctcacgaggttgtttcgaggtgctattcatcgtatggtagctgaagctttaagcttcagagaggctttaagttggctcaaaacacaccaaagacatatggccgttattgaaactgattgtttgttggttgtgcaagccttgagaagttctattcatacaagttctccgtttggtgaaattattactaaatgtaagaatttacttgctcaagttagaaatgtttcatttaattttgttaaacggtcagctaatgtagttgctcatgaatttgctagagcatctatgttacatcctgatcgtattttcattatggggaatgtcccaacttagttgcttccttgtgtgattgctgaatttgaaggataaataaagtttgacctttcaaaaataaataaataaataaataactttcgagagattgatatatcacattgcttaactcattagctaaatctttctaatagacaaatgagaaataataataaatggtcttgtttctccctctagtaaaagctaatgtccttttttattttttgctatcgaaaatacccttaattatagataaagtattattatgttatagtacatcagttattttctaactatagttagagtatggtatatactataatagataggtatattctattgaatgaataatatttttttagctgctcactttttattaacaagtgttaatatacattaactataaaactaattatcgtgtatatatgaatatgaatatatatatttcatgctaacttagaga

SEQ ID NO: 329156 - DNA, 979 bp, Cannabis indica
ccgggtccaggatcgagactatggtatgggtttgggttccaaggtttaggttggagtgagagtccaaaatatttattaaaaaaaaaattgttcaaaaaattttaaatggttttttttttcaaaattttcaaaattttgattttcaattaaaaaattaaaaagtgaaaacaattttatacaacatgattttagtaaaatattttcacttttttaattttaaaaataataaattaattaaaaaaatattactaaatgcactcatagaaaaaataataagactttgaatgtaaatttagtatttgaattttggaaaggttttcttttggtagatctctttcttgaaggaatttatttataagactgtatttgtctaaattagtttaataatgcatgaacttgattagggtgtgtttattgataagaaaaatgatgtaccttggaaaacattccattccattcttttctgtttaacaataatattcattttttctccaaaatcaataataatttcactaaaattttatttatttatacattgggtatagcaagttagaccttgttcttcttttcttataagagcatgtttagaaagtcatatgaaaatttgaaattggatgtaattggagataattacacagtttgatgtatttatataactacatatttacactgtaaccatgtaattagagattataattaggaggcctcaattactctttccaattctcttacttctaatgagaattggatgtaattacactgtataattacatactaaaaataattttaattattaattaatatgatttagtcttttatttttattttcttttctcttatacataatttttttttatcatgtgtctgatactattttataatattatttagtgtgatttttcttgtattgtttgtaacaaaacttaatatacaaatatatgatatatgatttttttttttttaaaaaatttaaaactat

SEQ ID NO: 329157 - DNA, 603 bp, Cannabis indica
gtttctgtactatttatcacttttggttgagaaatttattaataaaagaatgtactacagtaatatgtggtaatatatttaattttttgtactatgtttatgtccccttttaaattttagtaactttttccaaatgtatatatatatagtgagctgtaaaacggaaaaccacttttacattttgtaatattttgcatttattgagagatcatcatatcatataataataataataataataataataataataataatgaaaagtgtattgctattaggtaccagtgcctagcactttttcaacatgtcgtgttgcgattggctagcgcgatactccttaaaagttatatacaaaacctaatatttaattagaccaatatcgatattaacacataggagggtgctaagtaccactggtaccttttaatgttttctctaatgaaaagtgtgaagcttagggctacatgatcacttcactatttataaatatttaatatatttattattaaatgtacaaccgacaattcctctccatatctttatatattaaaagtgtctatctaacggcatttcttggtttaacagaatataaccttaaaaata

SEQ ID NO: 329158 - DNA, 809 bp, Cannabis indica
actacttgaaacgatacgtacacttgcgtgtgcaaaatatcgcaacacaaataatagtcatcatcaaagttgaaatccattaagaaaaaaaaactgttttaagtacttaatataatataaccaccgtctttggttcatctgtaattgataacttggatggattaatatatatatttacttggaaacagctaaacacagagtatatattagatagagctttgaatttgatagctattcttacttgtagaataagaaatggaccatttcaaatacatttatctattgctattcatccaaattgtaagttcaaaccgataccatacttaaaaaaaaatgaaaaatgttttagtcaaaatctaatgtgactaaaaacaccatgacataaacaatgttaatgggaaattctattatgctttataaaagaagtgagactagagaagttaccctgaaattgaatacctcatttaataattgtttttgattatatttgtaggaatcaattaaaaagtctccatgaatcaatataaaagtctccatgtcggctcttcactaaattgtagtatgttccaaactgtaaataaaaagttgttggacaaacaatttctcaattatatgtttttgttttacttaataatcagaaagtttttaattgggaaatttgacaatatatgcttaaaaataaatggtacactaaaaatatgctagcatattttgcatcatgcaaaatatacttaaaccatttttcccttacaattttacccctaaacaaataaaaataaaaacaaaaattcataacactttctctctct

SEQ ID NO: 329159 - DNA, 762 bp, Cannabis indica
gacccttatttaattacaagaacatttaaacatgctaagtatttaaggatgtatttatactctcctatgaagattttgtttaaaaagatatcaaattgctatgatctgtttggtaatgtataaattagatcctattgtatagttttatatatattatataaaagtataatttacaacacaattttattaatataagagcactcacatcagtgagaagtttaaaaaaattcatgaaagatatgtgagcaaatgctctaatttatttttcattttaaagtttctttaaaattaggttttacatttataaaatactgttcgttactctaaatatattttattaattgttttgaattttaataattatttttatatggggatatatatttgaaatgaaataattttttaaaaaaggtgaaataagtatacttggtgatgtaaaggataaagtagaaaaattattgagaattacaacaacctcattatataatagtgattttctaaatttttttagctacagtaatagaaaaagctttcttcagcttatttaaattatatatataataaatatgcattcaaaccaatgcaactatctttatatgtagagaatgaataatacattctctaaatttattttaataatatataaataatgggatacgattttgtcccgtgatgtactttcacggaatgaattccgtggtacattagatgggtctcggagtacattaaatgagtgtcagagtacgtttctactttttaacc

SEQ ID NO: 329160 - DNA, 664 bp, Cannabis indica
ttatatatttttttgtcaattattgaaaagaccgcgcaacgcgcggttacgttacctagttaataatatattgtacggtacaatatcatatcttatgagttatttgcggtgaaacctgttattatttgattttatacttaacttatttacttttttttggcaaaacttatttatgattatttttttttataaatttgaggtgtcagcttgatattgctattaaatactaactgaattattactgtattagtgtattcctttcaaagttttattttcacgaatacgtacacatgtgtatacagtgatcatcccgttggtttttaatgatgcctaatatttgaaaaaaaattaaaaacataaaataattagactgtaaattagtcttatattattcaaatgtaacttaatgatgtaatgaattgaaaatatatatatatatataaatatataaatgcattaaatttatttatatcatatatgtaaatagtttctagttactttttttttttagaaacaaaatagtttctagtactaagaatctttaaataactatactaactaaaatttatatttgatttaattgtttaagaatatcagtttattgcttttttcttttagtataatgttttaatttaccattgttaaacggtctgctaataaagtc

SEQ ID NO: 329161 - DNA, 814 bp, Cannabis indica
ctactatcatcatcatcatctccttcctactttgagcagagctaatatattaatatttcattcagtggtgtgatctagggactttaagtttaaaaaaaaaaaaaaaaacctttctttgattgtttggctttgatttgatatgttaattcattgttcaattttcataattgtgtatttaatatgtatttgtgtttgaatctgtctataattgaaggtcgtgactgggaatggggtagggtgaggattagattggcgataggtgaagaaaacgaagaattaaaaaataaataaaataaataattttatgattctagaataattttttattttattttatttttaattaaaattattatttaaaccaataaaaaattgacatgtgatattttattagtatctaacggatcaattagaaagagagaccaatagacgtatataaaacgtggccttaaggattagtactgtcaattttttaggttaaaaactaatctgcatcaaccttaagtttttgggaacttttgccgtaattattctttttatttatatgtattttttttaattatgccaaaataaaaaatcaagacagtttttaaatatgccaaaataagaaaaataaaatatatttttatttatatgtatttttttaaattcaaatcaagaaatattttgaacattacaaaactatatatatacatgtgaaccaatgatttatctttttatgaacaacacttggacaaaatattttcgttatataatagttcctctgcactttaagcaaatatttcttctcatcaaatagttaatgtgcatgcac

SEQ ID NO: 329162 - DNA, 726 bp, Cannabis indica
taccaatataaatatatatatatatatatatatatatatatataaaaactgtattacttatattatgttttctttgttatattgtaagtttgcttatagcaaaatattaatttattttgtaatgaatagaaaatatatatatatatatattttaattccttactaaaacacaaaagatatatattacttaatttattttttgcattttttaaatggattttatttttgtatttagactatgatacatcacttcatttattctaactcataactgttaacacaacactgtagtctatatataagtcaataattaacttagtctaaaatattcataattaagattagaaggaaatcattaacttagatattcatagaatttcataaatgatgtgtgcttaattaaatgaataaaatataaagaaaatacaataaaatttaacatgcagcaaagttttataaaacaagaaaatataatattttcttccattaaacaaatatttgactataaaaatagagtaatttgcgacataaatacttaagtttaacttccagttgtaaataaatacctaaatttaatttttagtggtaataatatctaagttatatttatagaactctgtaggtacctaaacgttaaatattaagccattaaatccacatgtcattttcttattggtatatttgaacttaatttttttaaaataataaaaatttaatgacttgaac

SEQ ID NO: 329163 - DNA, 546 bp, Cannabis indica
atattcttatatatggcttattacttttacaattaattcatgtgggataatattcttcaataaattcgtatgattaaatttaattcaatttgtaaagtgtgaatatctacatttgtataaattggcttaatttgatttaaaattctaaaatttgctttatgcgaattaaatattaattaatatgtgaaaataatgatttaatccactccaatccatacatatttatatttatcatgtacatattaattaagtatttattaataattgagatgtataattagaaagggtttaacaaatcctcgtgctgatttaatagatctaatcactcttatcggccgacttttcatataatcactccattctccaaccaactaattaaagccaagaccaaagcattaggttataagtttccattaaaataacaaaaagtaaatggcaaaaactatataagcaatagctttttctctttgattttatagttattgtcaagaaaatcaaaatcaaaaccaatatatgacataaatttgagaaaaaaaaattgaagtt

SEQ ID NO: 329164 - DNA, 684 bp, Cannabis indica
aaagtgtaaagaataggattttgttaatttggccaaatatattagtacgtagtgaagatgttgtttggtttaagaaccttacgtacaaaataacgtgaatcgtttagaaaatgttctgattttccaaaaaaaaattaaaaatattttgttaaacaaaattaaatgcagaatccagttgattcaaattataaaagtttgttattaaaatatttatcaagaatctctccattttcttaataagttatatataaaacttaaaattaagtttgacatgatttttaattaatttgaatatatatataattattcaaaataaataataatatcaatcggttcagatcgtgagatggctgcagcgacacaaagcaaatgggttcaagacaagagtctatgccgctcccgtggcagctttagcatatacaatatttggcaagtctgaaatggagttctttgagaaggaaaaatgtgcaagttgatcaaatagtgagtaaaacaaaaatagatactttgtatagataagaaagttagtgctaaaaataaatcatggtttggaaagttggaaagaaatacaaatgtgcatatttgttgatgtataaattatttctcacgtctcgtttgagatgctattaagttgtaattggttgtttggagtaatgataatctcgctgattcatcaaaaaaaaa

SEQ ID NO: 329165 - DNA, 796 bp, Cannabis indica
aatttaattattaggtaaattgctagggttttatatagttcataatggattaatggtatttttggccagagcaataaacttattttttttttctttttgaagaatactaaattcatagattagcattctaaaattaacatttttttcgtctaataattatactaataaataataattctaaatattattaatgttctttagtatttatcttcatatactttctcttgtttcctaataatttcttttaatattataaaaacataaaaattcctattatacaaattacaaaacaccatgttatgctattttttttggcttatactctcattgaaaggacaaatcttttccacttatctttcaattgaatttttttaattatgtataaacaatatctaatcaaatttgtcatatatatacaaatgaattttatttactgatttataataatataatttataatggcaataccatactttttggtattgcccacatcaaaatgttcttagatacaaaaatgtttgtcttagtgttttttgagttcaccttcataacatggaaagattcttttcctcaattataacaagtgattaattaaaactatgtttttttttttacttaggtttattatttagcttggataaatgggtaaaatgtctacatgatctgattatgcttttaaaatattattctaaaaaacattgtggttattattttaaatatatatactaattggttccaatctaatctcaaaatgggtttttgattattgattattgtagactaatatgaatataat

SEQ ID NO: 329166 - DNA, 510 bp, Cannabis indica
tcaatataatactatacaatacactacggtgtaatacgacttaacaaaccaacctcacatgaattaaatagtaaaatattaattcatataataaaaatataaatatttatcgtcaattaattttaaaaataaataatatcatagacatatttcttatgaacaatttgatctacgagattcaagaaggaaggtaacaatatcacaacttactttatatatttattagtcatgtagttcaataataaatttgtatatattataattttaatttaatataattatttataaaacgttggaatgcctaatataacaattattaattgatacttcataaaaatgatgctatgcataattaaaaaacacttccaagttccaagaccttttcagtacaatgctcctgttatcttatcttgactcaaagcttcttttcctcacacacatatacatatgaaatatttatttgatatatctttttaggcaaatatacatgtatatatatatagagagaga

SEQ ID NO: 329167 - DNA, 477 bp, Cannabis indica
agataattaggagttacaaaataaaaacctaaaagatatttggtggaaataaactatgtggagtggaagaatttttttagttagttaaaaaaaaaataagaaaaaggtataaatattcatcaatcactctttaatcagttatatgagataattgaatttttaactattgaaatgaaagaaaaattaagaaaattaaaaattgaaaaagaaactcagtaaagttaccacctaaaacactcttttatatattgattattagttactgcaatttaatatagaatatcatatattttaatcaactactataaaaaaaaaaaaaaaaaaaattaactgaccacgtgttggacgaattagtttcaataaacaatatatgatttaaatcggcctaaaatgtttgtggttgagatagcataggtcagagtggtactattcttgtcgtccacgtcaacctccatgttatttaaattgaaagaggag

SEQ ID NO: 329168 - DNA, 616 bp, Cannabis indica
agtcgataataatatttatgtatagatctatagagataagttgaacgttgtgagtagtggaggaggtgagattgggatgagatttgatcattaattaatattaatatattaattattgtccaatacatcactagctgcagaaaatttctttcgatcacataattattaatttttgtttttttaaggttaactatatttccatcaaagaaatacaccaaaaaatcatacaagatcataaaaattattgtgcatataaatttagcacataaaatttacaatagtaattatcaatatattcttttgtgaaataataataataataataataataataataataataataataataatattccatctataaattacctcccaatatattatctagaatctacattcgcatatcatccatcaaatcattaaaaaaaaatatcaatggtaattaaggcacgagcattgctattatgtactagtggtgtggtgtttagtaccttctttacatgttgcgttgtaattaactagcgatactccctaaaagttattatattaaattatatggtacccgatacttttttttttttttgtagaaaatatggtacccgatacttaatta

SEQ ID NO: 329169 - DNA, 794 bp, Cannabis indica
cagagctttttgtcatgtgctataatgccgcatttttgacaaaacttaggcagttttttcatattttgatttgaacccacaaatctttgatggatttccctcttcatgaaaaaacccagagaatataggcttgtcgatttcaatggtggccttaaaacgtaacgtccccatgccaaaggatcccctctcgaagtcaatgtaacgaggaagtttatatactgctgaaactttagcagcgagttcttctaggtttgtcttgttccaatagaaaggagggataccacttagcctcacccaaaatagggacttgtcaaatttcacttcagaaggagcaagccacgatggccatggcataatgaccaataaagcaccacagatgatccatggacgtctattaagaacattccaggcatcttcgttgtttgcaaaggagaaatgtattatcccagcatcatcctctttccaactccaccctttaaatgaagaccaggcttttttaaggttccggcaatagcttttctttccagtttgcctttgcagatgagttttcccagtagaacatttccttgaggttcctggacttcagtttctccagggtcaaggcgacacgtcaaggcctctgtagtaatctgtaccgtatcttcaaacagatggctgagactattgtccgccataacaatgcacctattcgagaatcacagagtgttgatattttgaatacggtacaaaagtccacagccttccagtcgataacactaggctatggtaaaaaacttccatgaagttatactctc

SEQ ID NO: 329170 - DNA, 569 bp, Cannabis indica
ttaaataacatacttgtgagtagatctaagatcctggtaaaataaattccaacagattcttctacaccatcaggacaactagatcttcaggcggacatgaaagcgctcatcaacaaagattgctccctttggacaagacttgtgctccttgactaaccttctttgatagagatttctttaagactgaggcataacgtttgaatccttctccacatcctccatcttgcacaaattcttcatcaagtaagtaatttcaatgtatattgaaattcttggcaatattgaaatttagtctgtgggagaaactttgaacatttatgcgatcttctgtctttaccagtgaattgaaataacaaaaatttagcactaatctctgcaaaacttaatttctctgtctaacatccttatggttctagatgagacattttgtagctttttatttcattttagtgttcccgttctgatcatcttggaacaattttcttttggaattttgcttttggatatagggtccggcggggacctctccaagcaatattaggggaggattctgttggaaatattttacc

SEQ ID NO: 329171 - DNA, 663 bp, Cannabis indica
tttttttcttaatttttttctagttatggaacaaccctaacttatataatgtaaaaatagagattaaactattagataaaaaaaaaattaagcttaaatatttaaatctatctattcatggataatatccgttaagattgtactcatataaatatagggatatgattttgtcctgttattgtactttcacggattgtaatccgtgatgtacggcagccgtcagatgagggagttatttgatttgacggttgagattgatctacgggtaattaggattaaaaagtagaaacgtaccctaacactcatttaatgtaccctgagactcatctaatgtattacggaatacattccgtgaaagtacatcacgggacaaaatcatattcaaataaatcatatccgtgaatagtaacccatatatattgaggggtattgttaaacgttgtacaacctcactaatctttattctatgccaacgtcattaataattttgatattataataattgttatcattattacaagctggacttttgtagccatggtgtcgagcaacgcagaatctgcacaaaattcttcaatgattacactcgttgagccataaaataatatctcaagctaaactaaactaaaccaacttaatatatttatttcaaaaaaaaaaaaa

SEQ ID NO: 329172 - DNA, 881 bp, Cannabis indica
ccttaacaaagtagaagaaagaaaagatcatgccacctaaagctgcaggcctactaggaagataggaaatatgaaaccatgatattctttgaattacactagtatgaatacactgactagaacaagagacaatattcaaatcaaaagcaatagggttccaagcaatgacaatccttccgttgggatgataggaagaattagaagagaaacaccaccctcgaaataaactaacatatcaagctcccattttgtgagctttaaccttagtctccaagagacgaataattcctatgttcttatcatgaataagcctaagcacctcatgatgtttccaggaactatttatccctcaaacatcaaacagagaattctatccattaggattaggaggtgctcctcctccttttccaaaatgaaccaaatcacaaagagcctgtgcaacttgtgtttcctcctcatttaggacctgaaatgcattatccatagtcaaaatcgtctctgttttatttattaaactttcttttctagtttcttcatccaaactccatggacttctttaacattctcttgtccctcggcctaaataatcttaacaacctcttgattctgcaccttttttcccaatattgatttgagttttctcatgcaccttgtcattacaaggtttggtctttaccttcttaggaatccattttggccttaaagtatctctctgacactgatcttgagaatgccccatccttttacatcgcttgcataaaattggtttccattcgtaatgaataggaaaataaatcacttcacctatctcattttcaaaagtgatctgatctggcaaacttgatctatattgatttcaatcatgatccaagcatattcca

SEQ ID NO: 329173 - DNA, 835 bp, Cannabis indica
tgagagggcggtggaaaagacttttttgggctcttttcacgtttagcttgtaaaaagaaaaaataaagtaaaatctaagctcatgtgcaactctgcttcagtttctatttttaaatgtaaaagcgtggctgccacgcaaattaggtgcaatgtcatgggcaaagccgtcatttcacatttcgtttagtcataatctttgaactagcgcggtaaatttaatatttaaatataccatattaatgaaaaacgtgggatttttaatacgacattaatacattaaaccacgattttccattttttaaaaaggttttttcccttaattatgtttctaagtaagttttgtccttattttttctttgcaaatattagactaacatactacttatttatgaaacaatttatttaattaactctataaatatagattatcctgggacatatagatttacatttgtttttttttttgtccaaactcttaaattggctcatattatcgtcactttaaatataattgaagagaatatttacaataatttttatagtttacaagatatttttatgacaaaaaaattaaaataggatcataattcaaaaaaattttacagtgcacactgatacacctttatctcctttgatatctagaaaaaaaaaatttagcataattttttttataatcgtataggttatagttatttaagatatcctataaaattgtgaaaaatttgaaaaaatttaacacgttaaaaaataagattcaaagagtaaaatatgaatgttcattgtcaaaaaaaaaaaaaagtaaaataatgaatattaaattttatattgtaaatta

SEQ ID NO: 329174 - DNA, 916 bp, Cannabis indica
aaaaaaaaagaaaaaaactaaacaattctagtaaaatattcattcaataaagtaatattactgaagaagccacgtcatcattcatcaacttgaaggtagttggaacgattttttcagacgtgcgaaacagttaagtcctcactactctaccaccctccacatttaaacatctgatcatttttaccttttctctttaaaaaaacaattaaataaaaaaatctcttttcctttccatatattaaaaaaatcgtttattttatctcaaaaaaaaaaatcgtttattttattaattttacttttccaacaatattatgattttttttcaaacatattcatatatatttttttaaaatgtaacaatgttattattaatttttttttatttgacaaaacataaaaccaaatttagtactgatatcaatggttgatatttgaaaaaaaaaatagtaatagttagtggattacagtttgtgtgagccataacaaaatctatggtactttttattttagctcctaacaaatctatttccctatataatacacgaaacaagtataaaattaccacaagacaccttaggtattttaagtcaagttgaaaaccaataatttttatttttgttagattacttaccaaataatcttgaggcagaggataaagacaggtaaaaaagaaaggggggttaaggcatcattttctaaccccaaaaaagaaatattttttcacagctctttttccattttaacaaacaaataaaaatctcatagtcaatgaaatttgattttctatgcttagaaaatcaaaaaatttgatttttaaaccaaaaatttaaaacctaaaaaactattccttttttttcaaaaccccaaaataccccctcacaatattctctctctctgcatcatctctctctccctc

SEQ ID NO: 329175 - DNA, 665 bp, Cannabis indica
tagactcaattaattgacttatttaatcaattagaattttaaaatcgactatatcaaatttcagaatttttaactaaattaggctgaattgagaagataacaaagatacaagctttattgttaattgtgacaattttgtgttaaataaattaatacatttgaagttttaatttataattatttataataattaggaattgaataaggatttatataagatttaattatttaattaattagaactataattataataatatatataattaaagtttgtttaaaccttaatatctacagttttcaaatcgtgtatatatataattatatttatataattaataataaaatattatattggtggtgggaagatttcttatgagtagggatctacatggggacgggaaattggcagagagtattttcttattcttattctcgataaggattttaatcttttttcttgtttatttttcattaaggatgggtagaaaatcccttaataggggtaagggcgaacaatctcctaataaaaaaataaagtttataataaaaatttaaatatataaaaatattaaattatataaaaattaaaatattacacattaattattattcaataaactaattattatccaaaataaaatttaaaattcataaaaagatac

SEQ ID NO: 329176 - DNA, 935 bp, Cannabis indica
atatatatatttttttaaaatatgccaaaataagattaaaaaacaaatcaagatatattttgaatattacaaaactatataaacatgtgaaccaataatttatctttttatgaacaacacttgcacaaaatatttctagtaccaaataattcatttccacttcaagcaaatattccttctcatcaaatagctacacaactacaaataagtcaataaaaatatttaaattctctaattgtttttcctactattagaggaggatcatttcttaaatatataaaagaatttaatatgaaatctatttacatatgtagcaaaatattattttgtgaccaaaatatttttttttataaactaccaagtaaattatattataaaatttatttttaacttatactcactgggaaactcataaaattttaccagcgttgatgtaaaatttaaataatatataaataaagcacattttaaatattttggtaaaaaatgaaatattatatcaatacttaaaaaaataaaataataaatgaatatattaatataattattttatcaaagtattaaaattaaaaaaataaaattatttaaatctaacacaaaaaaaataaattaaagtaagtaaaataaataaaaatatcaatatctaagagtaaggacttaatattgctaataaaataaaagtttgtagattaatttaccaaaaaataaagtttggcgataaacttgccaaaatgtatatagtttgagaaccaatttgtcaaaaaataaagtttgaggactaactagccaaaacctatatagtttagggcatgcagtataaataaacctaattataactatacccaaaagagtattaggtaacttaaaattgaaaaataaataaataaataaataatctgaaaaaaaaataatatatgcattttagctagttacaa

SEQ ID NO: 329177 - DNA, 640 bp, Cannabis indica
gaggttattcttgaatagagtatttttaagaggttctactgtagttataaaatgcttttttttattagataataataagtaattataaaaatgcactctcccttaatgggatttgggtgctcacccaataaaatatcctcgtacaaattggatgtgaatttataattttagatttttttctgttaataattttatttttcttttttggcttaagaattgtgtggtggaaaatgtattaaattgtgggtattgaaccattaaagtttaaagatgtcatttttttttaagcataagtttagagatgtgaaatgttagtattgagatttatatgattaccttccaactttcaagtcacgacaacagtcttgtatggaataatttaatatttagttttttttttttttttgcaatttaatattagttaattaggaaaaataataaaataaaagagatgtggattgatttttttttttttcaaaaaaaaaatccacatggatattgctgttcccagattcttcaagttgtaaatgcttttatcatatattttgaaaaaatatttgtagcattattatttaactagtaaacgggcttcgccgtaaatattataaaaattaaaattttatatataaaataaattatc

SEQ ID NO: 329178 - DNA, 1148 bp, Cannabis indica
aagaacataacacttgcctagtgtaagcagattgtatcatagattagcaattcatcataaaccttgtgcactaccacttgcatatatgaacatacaatcataattatattctacagtgattgtgtcactataattatgattttcttcatatgttccaaatttaataaacgcatatattaaagtaaatcgtcatgggaataaacatgtaaacaatgcatcaattaaataaattaatttctatttatcatattgataaataatagtctataaaaaacatggtataacacccctactgttacgatgttttcttaattaatatgttgatctttcctaattaaagggttttaacataaaaatagatttaataaaatttgcgtaatgattaaaacttcactaaacacaaaacacttttgtaaaaaaattacaaaccgaaatcccaaaatctagttatagaacatacatagcatatagtatcaaaagtgtcgtttaacgatatagtcaaataggtattagcggtgtctcgaagatcgcaaccctttaggtttagatagctagatatgtacaatcttcaccaagctcattactcacggttgttcagcattcgctttgccttacctacacgtaaaaatattgttggaattttatgcttaaacaaaatctaatttcattgtaatcttatttactttcaataaagatcagaaatcatatatttaccttgttgttggtacatatcagagttagaatagtgaaagcaaatgtaacaccctactagtttaggtgtgttatcatgattttatattaactatgcagttcgttgctaatcaacgagtttattgaaaatcgtaagtaattaaaattttacttaattactattaatattaaaaataactaattttatataaccgagatcccaagtttaaaatatttacaactcattcaaaatacttgacacaaaatttgtctcttagcgactatacaaaatacaaccagctgtcccaaagattgtacgctccaagtctaaccaccctgacatgtaaagttttcatccgctcgctctcacggctgctcagccttagccttgcccttcctacacatcaaacaatatctgtgagtcgacaaactcaataagaaaagcataatcataatca

SEQ ID NO: 329179 - DNA, 639 bp, Cannabis indica
agatatatattttgtgttatatttgttgatttagggttactagtatattatttatttgttttttgaatgactactagtatattatttagtgttatgataataggctgaattgttgaaacataatgttgggattcatttattcaatccctacaccaactcaacatgcacattagatcatcaaggttaattatggttgatcttcacaatcaaacaagtaataatcatgatttgatcaaacttcgagggatcaatttgcattcaaaacaggttaagattaggaattcaaacatggacaaacataacaatgaaagtagaaaaataaagagaccaaacacaatcatatagttacatgagctcaccttgctctttacactataatcaaccttgaattacatcaacggtgtgaaattctaagtcacaagttgactagtaattcaagatctcactctttctctttcaatctttctttagggcaattcctctaggttttgcccaaagaattgaaaaaagtgatgttaatttttgaaatcatttttgttataggttttgaaaaatgcaagcaagctacagcactgtagttttcaacactaaattcaatgatgtgagtgtgggatcataccaaacattcatgcaatctct

SEQ ID NO: 329180 - DNA, 607 bp, Cannabis indica
actaataaattttttagctagatagaatatataaatatataaccacttggggctagctcaagtgaccataagtggttgtgtgagtgttggaggtcctaggttcgagttccaagtaaaatatgttgtaatatataaacgcttaaatcaaaaaaaaaatatatatataaatattatttttagtgggagaaaaataaaaaaataaaaaataaaaaataaatgttgtaataagttatatatataaagaaaaacaaatattattaatgtgaatattgtataattttggatgagaataaatatttgatcagtagtagcagatgagaggagggggggcaacatcattattattcatcatcatttggattgttttatatgttgttgttctcttctgtaacaatttttattttgtaaagaacaattattataactactctctctctctctctctctaaaaattaaaagagtttcccctcgtgactgcacttctgtactcatgtaccaatatatatatatatatatgtatatatatttactgtattattggagagctaagacaaatagagtagataattattttactctctctctctccctatgtctttctttctta

SEQ ID NO: 329181 - DNA, 550 bp, Cannabis indica
cttccactgtattaaggttttcttgagttggttaagccaagccctaggtgcttgtttttaaccatacaaggacttgtgaagcttgcatacataatttggtttgcttggatcctcaaaacataatggttgcaccatgtaaacatctttttcgagctgactattgaggaatgcatttttaatgtccaattatttgatctcccaattttttgatacaacaatagtaaggacattttgaatggttgatgcttttataatatgactgaaagtctcactaaaatctataccaagtctttggtgaaagcctttcacaacaagactgactttgtgtctttcaagtgagccatcatcattccactttattcgatatacccacttgttacccaccaacttatagctatccaaccttggcacaatagtctagattttcttagccttgagagcaccaaatttagttcccattgctgaattccaaactgcagaacttagagcttcctcaagagttcttggttccatatggctgatattcaacatagcttatcccaagtacact

SEQ ID NO: 329182 - DNA, 549 bp, Cannabis indica
ataattaattaaaatattctaattatgatcatatttaatcgctgaatatttcagttatctaatttaatttctagaattaattatcaaaatattctgacaatttattatggtagagactttgatggaaagtctcacctatataaatatagggtctcgatctctgagctcactactcattctgtaaaacacagtaaatctatgtaaagagagtagagaaatcgagcttggaagaccgaatacccacactaataaatttcctttcttttgcaaattcagtgtgggattgaagctcaaaaaatcgatgactagagatattttgatcctttagttatatagtgtatatgttcgtttaattctagattttatatacacattcatatattttatctatccacatataacatactctatattagattaattatatgttaataaaaatatgtagtttataaatttatttatatatgtaaaattaataatcttattccggtattatatttattcaataatagttttattacaacaatagttttattatgatataatatt

SEQ ID NO: 329183 - DNA, 889 bp, Cannabis indica
cgttagatctgactttttgcattttttcattgttcgttaatttttcaatggttttacctttcatgatatatagtgtcccaaagttggacgaccatatatgttaatttgacgatggttatacgatttatgttatttatttgatattttttcgataagtcttcgatagaattttgatatttttcgataaatttatcaaattgcttcaagcttgcaatttctaatagatttaccattaaaaaaatattaacattttttcaaaaaacctacaaaaatgtaagtttttataactctgacaaaattgatcgaaaaaaatatcgaaagcctatcaaaattttaattaattttgttagatttgcttaaaacttaatttttgatatttttttctatggatatttatcatgcatgcctgaagcaatcaatgaaatttattaaaaatatcaaaattctatcgaaacttatcgaaaaaatgtcaaataaataacacaattgtataaccattgtgaatgatcgtatttggtcatccctaactttgtattggataatattgtcccaccggatcaaatgtaaaaatattgaactatatataagaacatggactactccactcatcaccaattagttttgagatggaaccccatgattttgaacatggtatatcagaaccatatccctagcgtactttcgatccacacctatcaaaagttagcgagccgcaagcgagcaaatggtactccagtctgaacagataagcgagcaaatggaactccagcagcaaaacaataaaataagcaaggcaaatgacactactatgataaggtgattcaagattagtgaacaaaatagccagcatcttgagagggaatattggacaatatagtccacatggatc

SEQ ID NO: 329184 - DNA, 882 bp, Cannabis indica
aggacaaaacacaagcccaatttatttgataaaaatcatgttagcttcctgatcttagcttctgatacttggacttagattgattatttctctcgtaatgtagatgaaaagtttttgagcatttttttttgggctccttcttgctcctcgctttggctatcggaaggtggtgttggaatttgattgttactgttattattagtgccattattcataataaaattaatccttattatttagattgtattattagagatgttattgtctattgtaataattttattggtattttttttatttactgtactagctctatccttgattgatcactatgtttggtgtgatctgatcaccctgattatatggcaattattttgtaagcactcttataattaatggtattatttaatactcttttctttttttgaggttttatcctacttattagtttactcatgaaattatatttttttgtattttagagaactttttaaatccaattttattttataatcacatttaagattatagttgtttttttagaaaaaaatcaattaattttgtgtgttaaaaataaaatttaaaattatatattttttaaactcaaaattgtaactttatttctaaatagagtatgctatgatgattattatacacgataataagtataataattatgatttatgagtaacaattatttgcctaaatccctcatttctttcacattatacatttttttttgtctggtaattacttattattatacatagaatccctaaatagtcaattcaatcacgtgcacttcttttataaatttaccaaaatcccgacttttaaacatctcgacaaccaaacatactatcaagaaacaaacaaaaaacc

SEQ ID NO: 329185 - DNA, 819 bp, Cannabis indica
ggcccaaaaatattttttttctctatggctcactaaattttagggtcgaccctgatatcaccttatgtgcatccttagccagttagagcaaaacaatgcataagtaaaactaatataaaaaaaaaaatacataaacacataataaggcaagttgatacaacgtggtagttgaaacagaggtacaaaaatttcatactttcatagaagaaaaaagtgtttggtaaggaaaaggttattagagcaggcatatcaattaaagctacaaaaatctcatgtttgaacaaagtgatcactattgtcctacatttcgtttggggttgattagaacacaggaaaaagctactaaatttgtattcagaacttactgatattacttttacttattaactagggcttgctaatattaaccattttgcatttcaaatttttctgaaacttttgctaaaaattctttatctttcaaaaatgtaaaaatctcaaaaaacggaaaattaagatttccaacatacacattataacatacacattcatatcaatgaagttcatttagtaggatgatcaacatgtatatatatatatacactcctataaaaaccacttttagtggcggttttttagggctttcagtgtcggtcttgacgaaattttttatcgatgttgatcagggcgacgctgtagggttgaatttaactgacgtcatatatactcgaatttcaatttttttaattaaatttaatttatttaaattatatatttattaatttatatcttattttatttaaattacatatttattttttaaaaggtaaattaaatatt

SEQ ID NO: 329186 - DNA, 429 bp, Cannabis indica
attaaaaaagtgttaccaaacgttactttatattatagttatccaaacaaccgaaataaatcacagctaaaacttattttatgctaagtaaaaacttaaccaaataaaatctggttcaagacgtcaaacctaaaaaaaaataattggtatcaaaactaacacgcataaaaaatgcataaaaaacgcaaaaaaggaaatcaaatatagactctaaagaagcaaagccactgctgtaaggtattgaaaaaaaaggtagcgtttattcttttgctttgttaaagaagttatgattattatagggaaacttacaaaaatactgttttttccccaaattttacaataatactgccacacagcaataatttcttttttactgtccaagcctttttttttttctttcatactctccagacctaaaatatttacttt

SEQ ID NO: 329187 - DNA, 604 bp, Cannabis indica
atattttagggagaatttttaacaagccgtatattttagggccaaaatcaggtagtgtcgaaagtttaggagacaaaaatagtaaattattctaataataataataataataaagggtagttgaaatatttttattttttttgaaacttagtagttgaaataatcgagtaacgtgaagaagcaaagcaagcattatccttgaaaaatcgtgtttttgcaaatgccaatagattaattaaattgcaataattaaaatcccaactgataaggtctgcagtaacatggaaagttgttgctgcagaatataaacacttgacacaagagaattatacatggtattagtgttctttcaaacactcctaatccactgggtcacgctcagagaatgaaatcaattagtaaagtatcaaagattacaaaagtaattgacttgtacaaatttaattagtcacaatataagaatgatgatttatatttaataattgtacaaggttttctgtttcagtcacaattttgttgtgagtaaaagtacgtaagattttttatagagccattgttaggttgtttttagttcactcacaaaagtggatatattttaataaaa

SEQ ID NO: 329188 - DNA, 2176 bp, Cannabis indica
tcaactttagctttgtcaacttcgatttcctcagatgaaatcatgtccaaagacaattccacgttttaccataaaatgacatttttcccaatttagcactaaactaatttctttacaacgaatcaagataagagacaggtggtgtaaacattcatcaaaagaagatccataaatagaaaaatcatccataaagattccaaaaaatgttcaaccatatcagaaaaaattgcaatcatacacctttgaaatgtggtaggttcattgcataagccaaaagacttgtgtcaataagcaaaagctccataagtacatatataagtggtcttcttaatcctcaggtgctattgagatttggttgtatcccgaataaccatcaagaaaatagtagtacttgtgaccaactaatctttcaagcatttggtcaatgaagggtaatacctcagaaaataatatggcatttaattgagcatattttattaaatatgtaattatcatgacaaagaagtaagattatgattttacttaggctaattagtgagaattaataaatgattaaataaagcataatttattaattacagagattttattgcactatgtgggtatcgtagatatcatttttaaataaaatgttttcgggcctggcaaccatgggagctcgacggagtggtcagagatgccacgacaatataagatgaataaaatttgagttattctggactagtttagaattttaggttatcagtttggtggattagttaaattacataaatactcctaagtatataataatttaagttttgagaggaggggtagaatggtcattatgaaaggttaattctttttgtcatttaggctaaaatctagattataataaaggttatatgctgattatttacgaaatgagaaggacaacctagaaagttgagaaaaatcaaaatagcctattttcttcttcttccttccttcgaacccaagggagcagcagaccaagggatttttctcctttaaattcagtcaatttcagttgttcttgcaagagcttgtcgctgtccaagcattgaggtgagttatcttggtgttggtttagattttttttcaagtttaagttagtttttgtatgggttttgtgattttgaggctgtgatactaaattgagtttaaattatgtttattgatccgatttaggggttgcttgagtttagattaggtgttttaatggctgttatgtgtggagttggaaaaaaattcgattttaggatccaatttaggttcaaacatggtaaattggaaaatttgaagaaatattgtgaaatggtgctttagatagattgtgttaatgatattataatgttctagaagatttcagcaggtttggtggagcttagattgggtttcggggtgaaaaaccagatttccccatggctacctagaaaagcagtcgaccagttttgtagactagttgtctagcagggggaaatctcaggttttctcatcgtgattttggtttggggaattttccaaagtttaatttagggcatttttaggggtatttgagttagtttgaaccattgggaaataaggtttgtctggttacgggaattagggtttattcttggaaatttgattaaggtatttatcgaattttgttgtcgtgacataggactaggatcgtcaagccttgtttacactcaggtctgcccgaacgcctgatttctggacttaggtaagaaaagtgttatgcatcatttatggttaaacaattttgattgttatagtgtcaattatgatcgatatctcgatatgtgtttgttgtggctccattatgatcgagggttggaaacagtgattaccgttatgagtaattactcttcaaactacagataggtttattacttattgttctctgtatcaggcaacaaaagttacatatatagctcgtggataacgagttgtaagggtgctttatgaagcattgagtttgtgtgattataatgatgtgaaattgtataggcatattaatatgttacgtgttatgattgcgtacatcttgtcatagtgtgattacttggattttatattgatttttgatttagtcacttttcttgttgagtctctgtgactcgcgggtgcttaatggtacaagtaaaggtaagggcaaagttgagcaaccatg

SEQ ID NO: 329189 - DNA, 525 bp, Cannabis indica
agggttttgctaatccttttcttaattctgggtattacagtatcactctccaagcaaagattttaatctttgagggcaatttgaggttctaaaaaaaacttccaccattctttatgagagtgagaagaagaatccatctcagcatcatctaaatccgaagctaggtgaaaaccagacttcactgtgtaagttctagcagttgtgtagtgccaaattagccgatcatgaataggaaaaaaactcaaaggaatggataagattctatccacatcaatgtcaccaaaatgagtttttaacaaggaaaggttccattctcttgtcttggtaatgaagtatgatactagtagtgttggggggccaacataagtaattggaaagaagtttgaaatggttggaatccatgggtcttttgcagtagaaatatgaaatccattccctattttatatcgaagccctttgataagtaactcacgtcccccaacaaattccttgccaagttagagacggcgaatgaccaagattggc

SEQ ID NO: 329190 - DNA, 1131 bp, Cannabis indica
tttacgattttaaaaattttatttacataaaaatatatattttctatttttttttatgttgtactcttgatattttgttgttggttttttattatttgtatattattttttatgttgtttgaatgatattttactactattttgatgtggagtttttttttttattttggttcatttatgaatactgtaaaaatataaacaaaaatatttaaatgtaaatgtataaagaatttgccaaaaaataataatttatgtaaattttttatttaatatcaaacactcccttagagcatctctggacaatctttaaaattgttataaaatttcatatcatcttaaaatataatattttattttatctctcatccgcgttattttttgactactttactactaaaaatgctctaatactaatactaagcaattctaaaattgatcatcacagtctcacacactattatttaatatctaacttatattgttatcattggtttatttgacatattacatttttttattattatttgtttaaaaaaaagacataaatggttgctcatatctagccatcatatttatctccaatgcataagctattttggagagttagtttctctttgcttatccttagatgtttggggacattgttgtaatgaggagctctaaacatggccaaaatgagtgggttttggggttgaggggcaaataccatctgaattctgaagcttcggccctccttcctgatcttgggctcttaagtcaagtcctctattgtgacgattgggtccaaaaccaaggggcttctgtgatacttacttatgttccttcacctttgaggagatcaaaggtttcggcccagcattctgatgaaggcctagtcatttgttgggcttgaggtccaagacctcacagttttgacatgaatttcattaagggaaacttacaaaaatacagagttttagtccaatttttataaaaatagatagaagtaatttttatactatcctgaccaattttttttcttttatactgtaaaacaccaaaaaaaaaaaaactaagaggacctccatcttccacactcacagacagaaccaccacaagaacaccagaataatcggaaaacaaccattaatt

SEQ ID NO: 329191 - DNA, 1224 bp, Cannabis indica
caacaatagaaattgttgcagtatattcattcaacattgtagctagagcactcaactattgtgtaaggtaagtaactacactactaacaaccccttcggtggcagaaaacttgttatttctaactactaacaacgatttgattgcgagttatcataagaacaaagaagaaccaacaacaaaacaaaacaaaataatatcatacagacaagactaaaacactcaaaattatgtcacagagacaatactaaaatactcaaaatcatatcatattgagaaaactaagtaaaaattaaattgtagtagcaaaatacaatcccgaccaagtcgcacctaaccctagagaaggttggtgggcttggctgaaaattgatattttagtgatattatatgcatttagggggttaatttttttatgagaggatggcccataattggcctaaggctggcccataattggcccaagtcagatttagtggccctagtattgaataaaagtccaagtttatatgataatttttttcattttcgagcaatattttaatgggattattttacaattacacaaaaatagtaaaacaagtacaaatatatagttgtaccaaattttaaatttttacaatttttatgattttacttatataaatacggtcttttgatatatttttatgttgtactttcgttaatttggtgttgattttttgttattgttttgatgctattttcctattacttttatgtaatttttttttattatttttgggtggtttttatataacatcgtaaaaataaaaaaaaatatctttcaacgtttttacaaaaaaatagtacttcatgtaatttttattttaattttacatcacttatttatttgtatttttttatccatagtttcttctaactataaatatattttattttattttattctcaataaagatatataaaattaattcttttaatcaaaatttacttttgataattaagaattaaatttaaaatttcatttatttcaagtcaaacaaataataatagatttctcgaaggagattagcgataatataaaaaattgtaaataaaaattcttcaaatggaaaatgcaaattctctaactaaaaattgtattgatattcgagcatcacttaataggaaaaagtttagtgttttattctaaagcgtatcttttttaccaactatagtgataattttaccactaaaaataacgc

SEQ ID NO: 329192 - DNA, 719 bp, Cannabis indica
aattttattgatacttttaaataattatttaaattatattttaataaataaattaaatttaaaaataatagaaatatattttaagatgtgtgaagtaaataaatttgaatcacaatatattagatatttttagatatgactatgtagatttaaatttgaaatacaatattgaaaaaatagaagaacactttttattacatagttacatttaatgtaatagagatatataatttaaatttggtatagtgtaagagatatataatcaaacgataatattcaactttgggtttctatttctactaaaagcttaattttttctcaccatttcattctatataacttgttcttttattttagtacaatgttttttatgacgcctcgtacatacatcatcattagtactggagaaaatgtacaccatgtgacgttatgtgactttattagaagttaagcatgcatttaacctactattttaagaatttaatttatttttttagataattcttagatacttagagtaattttagaataatattgatataatacatgagaatgcacacaaagcaaaaaaattggtggggagtactctccctgtccctatccttgcttattccccattgtggatagggcgagaaatcctctaatggagtggggatgggacaaaaaatctcttaatgtaaaaataaatttttttttaaaaaaattaaatgtgtataaaa

SEQ ID NO: 329193 - DNA, 1150 bp, Cannabis indica
gggtaatgaactactccccttttggttgtattgatactagagataatacaacttagatcagtgttgtggaatctgcagtagctctcttaagagtacaatgcatgaattagtaggcaaatatctaatgagagagaggtagagccttgaaggcatgagagagagagagagagagagggagagagcccttggggcgtgtaacggagaggagaagagagaattagggtttttagacgtagagttgagagcttagggagcttggaggcttaatgacttagggttttagagacagcctaatgctctttatatagtagagcttacatgcctaatatccttagaaataggtaaataaagccattatccacataataaattaacaaaatgcaaatgaataaattgccccttgaaaatatatattttctctctattttcgtggattgttaaggcccaatctgttacttgacttactgtccatgaatgagagctacatatcaaaatcctatcaggccaaaggctggtggaccatgcaatacctacaggttgaggtctggccgaccatgttcctactagggtctggcaggtcatgttcctgccagttttggaaagagttagccaggtctttgcatgtgttggccaaccttggttggtgatggccagcctttgtgatcgtcagcgttggtgatggcaagcctcttagacggaggccagcttttgtaggtggaggttagcctttgtaggtggaggccagcctttgtacaacttttccttgtagaggtttggcttccttagtcaaacagacccttccttggcctgaaagtcaccttttggctagctagcttgtgctcaaaccctgtccagccatataagctcatcctgtcagcctatagactccccttggccagccaaacatggtggtacaacttcttgatggttcggttaactcctttcgcttgctacttgacgattttaccatacattcaaaggagactttgtcttgttattggcaaggctatattctacatgtactctatcttggcttgcgtggacatgccacgttaggtggacaaaatttgggataacattttcccctaaagtccctgtttgaacatctggtcaaatagggacttcgtcattctcatcttgcttgtagtag

SEQ ID NO: 329194 - DNA, 828 bp, Cannabis indica
taatttttataactaatatatttagccactaattatttaataataatataagaatgataatttataattagttataatttttttatttttatagtgactattctacattaaatgataggaagaaatataggtatgtatatggatagcaaaacaaaactatttttttttcattcacatgttatatatgattagatatatgaccaatttgatctagaaactcttgcaaaattatttggttaggtgttgaattaattttccctacataatttctctttttgaataattttccctacataaattgttcaatcaaatttctcaattttatttaataaattcctacagtttggttgggttccatgatctcgtttcgaatatatagttagaacactactagctaggaaaaaaacaaagcaaacataataataatgataataataataacattttcttttgacaacaattaatataataacatgactgttttgtatagtcttttgaaaattacaagaagtaaattgttttgagtagataggaaataaagcaaggatatatataataataaaactaagttttttttgacaacaactaatataataacatgattgtgttttatagtctttttgaaaattacaagtaaattgttttgagtaatttgatatattggattaggttaattatagcaagggacatttactcccttatttttttccattttataatctttttcctcatacgaaatttttacaaaaatattgtctttatgtaaaataaccgtacaaaacagaacaattaaaacaacagtgaaaataactaaaaacaatcgtagaa

SEQ ID NO: 329195 - DNA, 1171 bp, Cannabis indica
tttgaatgcttacaggagagagaacacgttttaaaaaagaaaaaaaaagttaatattaaatggttaataaaagattttacggaaaagaaagcaaataaaatttattctaacttaaatgtataccgcatattaatgtaaagaaaatcatatcggtatatacataaattaattacgtaatcatatattcataaataaaatacaattagcgtgtgttggtgtaattaatccttaaatttatatatacgtacgtaaagctctttgacatattgttcatttttaatttattattatatatatagacgtacgtacgtaagactacattcagaataaaagactaataattaattacttagaattaatattatgctcacctctctataaaattgttttttatttaagtttttctttacgactcaaattaactatataggcctcttaaaaaatattactcaagaacatgatgaggaaaaagatttacgaactttttgagcctttctcgtcatgaatatataattaataatttagttatagtcaataattaattttattatcactctaaacaattatcatatatgtatatttatattttttttatctttattctttctttttgtttttctgaaaatattttttcctttttccactcagacactttttcaataaatttacagtgacacaattttattcttgaaatttaatagacattaatatttatgatatatcaataatcctaattaatatttatataatataatatttattatatatatatagtgcggtttgtccatgatttctttttttcattttgaaaaatatatttattaatttcaaccttattgtttccgaaaggcaggataggtgcatacaaattcaccaacatgtgatgtgaataatatgttgtagctaaaatagaacaaaaattaccacatatgcatgcatgattattggtcatatataatttagtccatataattaagtcaagtgttgtggtcatgataactacatatatatatatatatatatatatatatatatacatatagtcgagagtctctataggagaccaataataatatatatagaaactacacaatatatatcttacaaattaaaatcatgatcaggaaggatcttcttcctaattaattaattcccatgagtcaataaatta

SEQ ID NO: 329196 - DNA, 673 bp, Cannabis indica
accacaaagtttttctctaattctagcattgagcaacatgatgaacaacctattatcacaaacaaaaaaaaaaagaaaaaaaaaaaaaagaaagaaagagagaattgaggtaagaattaatatttttaaactaaatatattaaattgggaaagtaaaagtttgataaagtattggaagaagaagaaaaccttaattgtaaaatttaacgatccttcaacaaaaatttcgaagtctctaaattttcataaactcacagaaaatataacttaacaaaaagcgatacctagtgaataaaacttaacataacacaccaaaatataattcagacactaagaaggtcaaacttggtctttgaccttaatttgcatagatacataaatggccacacacatataacacaaccatatgttagtttttccctcttctatttagaaaaatgaatttttacaaatgccaataattataaaagaaaatcagtaaaatatttaactgtcacagtctgcagtagcataatggaattctatcactgcagagtgcaaaatacagttttacaaaaacaaaccagaaataaacaaaatttaaaaacttgacacaagagaattgtaagtagtatcagtgttctttcaaacactactagtccatggggtcacgcccagagaatgaaatcaatta

SEQ ID NO: 329197 - DNA, 1047 bp, Cannabis indica
atatatatataaataaataaatggaaaccaaattagccaaattaattaagtggaatagcataaatgatggtcttttatacattttgtacaaaaatattatttaaaaaaagtaatttaatagtttcttcattgtttttttttaatgaaaaaaaaattaagccatgcacatatatagtttcatttttaattaattaagtatatatccttgcatttaaagaatatttttgtaatttctcttcgagggagaagtctcatatttaatttaatctctaaattaaataccatttttaaaacactaattaatgagtcaaatatatatatatatatatattacataaaaataaaaaactaaacctaaattaatagtattatatataattaacttatttttccatgcctattttttttttttatgtatttagaatctataaactgataaaaatatatataataaactatatcgatactaagaataatatattgtatttaaattatatattatggggtggattttatgcctacgtgtttgttggcataaccatgtccaagtatcaatttatatataaaaaatatagatatatacactatattgtatttaaaaaaattataattggtcctataataaaagcaaaaataatgtcacattttttttttaaaaaaatagataatgcatgttaaatggttctatcaagttctagggtttaatatataatcgatcatatataatccaaatctctatacatacagttgaaaatattaatagacatcacttacattaattagcttctccgatttggtacttacctatcaattgttaattaattagttatgtatataattggtgttcaatcactttcaaaaaaaaaaatccatcaattgtaagtaataatagtcttaattatattacattatatacacgatgtatatatatatttattctatataaagtgtgcctatataacagaattcttggtttatgaaaaattcatgggtcactttttatttatattaaaaataaaataatttaatattaaaataaaatggttt

SEQ ID NO: 329198 - DNA, 1446 bp, Cannabis indica
agtagtaaactcacacaggcgaggttgaaccacagggaattgaactgaataccactagattaaatttatgattctatttggcaaaccaataatttttatgattgaaacacaaaacaaaaagtatcaagaaactaaaattgacggcaaaagatttaatcaagatgataaaatagagaagagaatcctgttgatttattacccaattgttaatgctaattactatcctttttcttgatgcgaacgatagattaaataaattaacctaactctttttagatcttttaggccctaaatcacccgttatctaatcaatctctgaattagattaacatgtgatcaggtttaagcaataatctaaatatcacacaggttacgcaaatacttttgtttcacataaaacctagattatccaattttagcattctcaattctcacttttcagattttgaattaagatcatagaacatgtagaaggtgatcaatcttaaacatgaaaatacacacaaatatggataatttcacaaacaagataaaaagaataacaattatcattaactaagaaaaacttcaatcaacattcatcgtcttccccatttggaaatttagttcataaaaatcatattaacacccataatcaaatttagaacagaaattaacataaaaaaactcaagagataagaaagaactagttggtgattgcgctccagatcgtcacaatagcttcctctcctccttcaatcacgttttcggggctaatctctggtgatttttgtcatcaaacttgaatcccttgtataggaagtagggttgctacctctgaatggcaaaatttcaaaactggccaaaaatctagtgtttcgcccctggtcgcaactacataaagtcctagttgcgaccatagaccaattaaaaaatacaccctttctgccaagcctcttagtcacgacccaggtcgtgaccatagataagggtcgcgaccatgggtaagcctggtcgcgactactgatgctaatttgacagcttcagcagatttttctccataatgccccgtcttttcgccaattgatacaatttgaactataatgcatcgggaacctgaaacaaggaaaatcaagcgtaaaaccattccaaaaaagcaacattatgtgagaaaacacttatgaaatcggcccggaacttaggctaaagatagcctaacatcagtgtagatcatctatggaggatctttgactattaggattgtaacaatggataatcataacgtttctatatcgtggtacatatagagtcttctatataattgagagtgctattcaattctaaatctatagtggcgcaaggcggaattaataagttagagaatttacttggtgaattttagatctacttattaaaaactcggttatatagtcccattgtcccctcactagttgagataatactgct

SEQ ID NO: 329199 - DNA, 1549 bp, Cannabis indica
tttcgaaacttatcaaaagagttataaagtgccaacgatgcaatataactactaagattcttcaaatccatgttctttattttctcctttaacacttcttccatctcccatgcaaatatgttgtcccaaactccatccgtccccaagatgatgacatctcctggctccacttctaccttcgcttccactgcaactctaggggtgtcacaacccttagcattgcccagctgatatggcatgttaaatgttttctgttgagttgctgattcatagatacatctatttaagaatagaattgtcataaatttaatgagaaaagtctactataattaaaatatatatttagagagttaaatgtaattttattttaaaatggataatttttagtaattttctttagagagggttaatatgcaatatcatattattcgaaaaataattaaataaatagatggttttttttggtttataatgtatgcttgtaattatttataattattaattaattagatattaattgcagttcttcactctttattattattttttttattatttatgaatttataaatttaaaaatttaaacgagactcgacctgttgtttctgaacacataaacttactatcccaacgttgaccgtttgcaaaccccgttattgtggcgaattatgcatgcagttgacgagccttgaattcctgagtaagcattttccatgaatgcttgctccaaaattattttcggattggttatttcgttgtcgacaacttcatgtattgagttgagcatgagttggcgagcgtactcaccagcatcaataccttttttggcccaaccacccactccgtcagttactccgataatttcttgagttgagcaaacgaagtgtgcgtcttctcctaaaagatggtcctttggaccataacaagcctcacataccatctaatcttcatctttttaattaatctcaggtattgatcactaattgagtttagtggtattgatcactaattgagtttagtcaaagtatattctttattaggttataattttgtttaatattataaaatatgagtctagaagttcgtataaaatgtgagttcatacttcattctatatatagagaatgggaaaggatttaaaaatataattaaaaaaattaaaaaaataaatgccaaatagatataaagcggtgaagagtattaatattatatattattttggaaaaaataaataagtaatatatattttaggattgactttttaattagaattagttagaaatatttttcttaattagtaaataacttgttttttattagtaaagtaaacaaccggttgtttttttctcaattaataattaattaaaaaataagcaataaatatcattggattgatttttattaaagttatatagattgaattaatatctattataaattattgatttttataagtcattaattaataattataaattaatttttttactataattaattaataataactgactttttttaaaaaaaaaacgttaaaaaaaacttaaaa

SEQ ID NO: 329200 - DNA, 906 bp, Cannabis indica
aatttccctataacttattttgtttcttatgtcattttgtattcttaattttaacttttgtctttgtcaagtattttgaatattttgttgttatttttttcaaaaaaaaaatggaatttttcgttcttcttcccccactttctcagaaaccaatacaaattctttcttttttgaaaataaaaacctaatcaaatgaaactacttacaaataactaattagtattataatctcaatccaaactcaaaataaacttttacattggtatcaaggtggtgtttcgttaggaggaatgaaaatataagaataagaatgagaataggaatttgaataacaattgaatagaataaaattaaaatgcataaaaaaaattaataaaaaatttattaaattttctctcatcatgcattggaatggtttttccttccattttaaaatagaatagtcattccaccaaaatggtagaaagattattctattagaatgacattccaatactttagtatgcaactaaacaaaggaataaaataaagattgattcctttccatttcattctatttcattacctccaaccaaacatcacctaagttcatatccattcaaaatctaatgtggaaaaagtatgaaagaaatatagattctaacaacaaactagttgcaagctctgcatcgtgaacggttgggttttgtgctctaactaaaattgtatttcaatgttttcttaaattttatttatcaataaatgaacagaattattttattacttgtttaaatataatgcttggttcacatttttccttcatggtcatttgtttgatttataaattttttaaaatccttatcatattgttattcataataattgtgttgtctacacagtagaaagtaatcaagattatgtgattaa

SEQ ID NO: 329201 - DNA, 2108 bp, Cannabis indica
tttttttttcagctgatgaaacaatttcatcccatataatgtaaaaatgagaaatttttctaatcatataactaaatttttttaatattacctatttatggataatacccattaaaagtgcactcatatatatttatattttacttgcagaatcttagctctagaaggaaaagaagtcatagataaattgagaacatcattgaaaactcaagagctatcaaaggagagtaagtcagcatgtgaagagattatcttggaattagcatcaaatgaatatgattttgaagatccacgagccgtacagaaagctacatgaaaaagaaaagactaagaactgaatgtaggtgccatatgcaatttaggacaaattatgtaaaactgcatccttatattgaggaattcaaaaccttaaatatatttgagccattgaatttatggcaaaaatgtatttttatcctatcgtagatatatataagagtgatatatttgattaaaactactaactgaattttatattttcattgtaccatataatattaaaatgataaattaaactagtaaagtaaaaaagagtattttttagcaggtattgaagagacttttcattcatacatagacgatgaagaacatattagaatttttttccatttgggtatctgagaatttttctatcttttggatatagataatgagtgattcgtctcttttatcttttttatcaagttattttaatattagagattggttagtgtgttaattagtttagttgagtgagctgcattgttagagttacttagttatggttgatgaagtttgttatttttgtaactgttttcagctactataagtagttagctcatctcttgtaaactgtcatgacaattcaatgaatgtagcttagttttttcttcatttctttgttttctttgtttcttttgatctcgtttcactgctaatatggtatcagagctactttactcgtgagctctcttcttcctccttttttctctccatttctttcgcttctgctttgtgttcatggcgagaggagaaggtgttcaaacacgaagcaatcgagatcttgaaaacaactcaaatgactcgaattatttttctattcggggtgagaattccagatctacgaatgcaaatgatctttctaatccttattttctttctaattgtgacaatccaggtgttgttttggttccaaaaattctcacaggaagtaagaactatagcacctggagaagatcgatgatgattgcccttgttgctcgaaacaaagttaaatttgtcaatggtaaacttccacaacctgatgaagatactgagaattatgatagctggtgcagatgcaacaacactgtgatttcttagatacttcatgctatttctggtgaaatcgcaggtagcataaggtatcacgataatgcagctgagatctggaaagaattgcatgaaaggttcaatgaaaataatgctccaaggatctttgaggctaagaaaaccattcaaagtcttacacagggatcgaattctgttactacatacttcactcgactcaaatctctatgggatcagatcagggagtatagaccacaacctgtttgtagttgtggtgctatgaaaactatttaggaatatcaagatgaagatcgattacttgaattccttgttggattgaatgattcgtataacatggtcagatctcagattcttatgtaagataactcttcaccagattcctcggatgatcaacttatagtgtcatatttttctggtaagaactcttttgttcataattctaattgatcatcgatacaggagccacacattatgtgtgtcctaatctttctttatttcaaaagactcataatgatcctagtcttaaaacagttcttttacctacaggtatccacactaaaattgattacatagggacaattaaattgacccctgacttgattcttgaaaatgtactgtatgttcctacctttaaatgcaatctgttatcagttaactgtttgacaacaacaactgattgcacatttttattttctcatggaaattgtgcgatttaaaacattatgaagaacaaggtgatt

SEQ ID NO: 329202 - DNA, 1075 bp, Cannabis indica
ggcgtgcctatatgctattattgatgtagtgtaaccagagtataagatgtatttctctcacaaatcataatccaagttatgaacttagcagggaaccggtaaagtttcagcatgttcaagaaaatcccaattgatagtgtcataagccttgcttatatctatctttacagtgcatcttggagagcaattctttcttttatagttcttcaatagatcatggaggataagaatattgtaagcaattgaatgaccttttacaaacgcaccatggttctgattaactaagatcaatagggcattagctaaccgagaacacaatagtttggaaatgcatttataaaaaggttgagtagcatgtaattggttgatagtctatagctcttgaagggttatctacttttgagattaaagacaaggttgtgttatataggtcaacaagaaattgatttgtatttaagaaaatgaacaatagctctatggatgtccttccccaccccaggccaaacaaatttaaagaaacccgaaccaaatccatcagggccaggagatttagtactaggtatactaaacatagcatccctaacttccttaagagtaaaaggattcaatagagatacctgttaatctaaagtgagaatggagcccatgtctatacaatcctgctgtaaagatcttgaagttggttttgctttgcccatgatgtttcgaaaatgactaaggaagtgttgaacaacttctggaaagttatcattcaacctccctttttcagtaatatagaaaataatcctattttcctccttccttttattgagcacggcatgaaaacatgttgtgttagcatctcccttttgtatccaccttatcttactcctcttgcttaaaaaattcaaattgatcttaattgaaatagattctgctagtttatataacttctactgtgtatggttcacttcttctctaataagtctctcgtgctctaatttaaaaatagtttgaggatgtattcagaaaaacgttttcactaatctggtatgatgaaaaatttgccttatcttttttttttttttattttgaa

SEQ ID NO: 329203 - DNA, 799 bp, Cannabis indica
atccccacttgccaaaagaaataattccacatgtcgtttcacttcaaaaaaacaagaaaatgtcaaccacaaactatttgatttgggattcataaaggttcctgtttttagcctccacatgtcctcacatcattcgggaggaagaatgcaagcttccataactcctagagttttgaaagcttgggggtaaatgttattcgtatttccagatggggacatatgtaattttgaaagtgataaatcttgaatatttcagaccctaacaacaagcccaaccaaagataatggactagatcgattatccaagtcatgtctttcgaatattggataaatgactcatccaagtgggataactctccagcacaaagtgtatccagaagaactcagttagaatgtctggagaagtaatcagcatgcatctagacatccaactaattatcatattcattaattactaaatcccacgatatcatgacttaattcctaggttttgtccgaggatcatatcttcccagtatgaaaagatagtaattgatgatcaaacattactatatctttaatatccacaaaagtaggacacattttgataactatgaacgagatgtggcctccacgttagcatacaatgaaagcctcatgggctaggcctaaacaaactggctcaaagttaatatattattagggttttttcaatattatacctaaaattgattttatttataaaaataacttcaagaaaattatttgcccaaataacgctgtgccatgttagcatacatactgaaattcaaaataatta

SEQ ID NO: 329204 - DNA, 1601 bp, Cannabis indica
agggtaaagaacctatctttcttaggattgtaatataaatatagtacaatttatgcttttaagatagtcttttttttttttaaaattaaaattttggcagcacctccccacaattctcataagtaagcaacctattaataagtctgccaacttacaaaaacgtgtgaggagacgacgtactaaaatctttagcaaagaaacaatcaaataagcaatagatcacattatgggtacacaataagtccaaactatccatgcgaacaaaaaaaagtcctggataatttagataagcgtatttaagagtctttactgacttagcctctccaaacgggtctaaagaaaaattgtgcacaatgaaaaaaaaattatcactagattattatacaaacacaattgttttattctatctttaatttacaaataaagagatcaaatcaagataagaattttattttatactatcttacaatgtcccttttgctattttatataagagaatgtaaaggcaactcttgagtttatttcattctctataacttttttttctttttaccaagatagagatttttgggtactttgctaaagagaaaaacttatttttctttcttatcatttcattccattccacataacttgtcgggatttttttttggcaaagagatgagatttttggatactctttagaagtttaaagtttaactttttattccacataacaattttttttaacattttaaagttactaaattgttaaaattgaaaattattttatcattttaaagctaccaatttattaaaattaacaatttgtttatcattttaaaatttccaatttattaaaattgacacttaatttttcattttaaagttaccaatttgttaaaattggttaaaactaactcaaccaaaataaataaatatatactactacaaatatatcttttaatttaagtttttttctttagtaaattaaatatccaaagataaaactattttaatacccgtatcactgctttcctcataaaattttggttatattttcagttatttacaaaaaccgaagttaaaagtatttattttttttaatttgaggaattttgttggaagacctttattttcggttatttggcaaataccgatgacaaaggtgctacacaaaataaagcataacttgacccttcatttaccctgtcgaaaccccctcaaacccacgattcactcaaaccctccaacccacgactcgctcaaaccctcaaacccacgactcggtcaaaccctaaaactcttcgatcgcttacagctacccttgatgaggaagacgacgacgaggagatgacgacaaggacgtctcttgcccaactcctcctcctcctccgacggtcctcccacggcgacaatgacaatgtaataatcacattatctaatttgaaatcggtcataaacataatatatgtgttttgttatatgttttgattttatggttatttttttttttttggaatgtccgatttatagttgttatgttaccaaaataggatactatacttataattaagtgatttataattaatttacactttaattttacagtttggaatgaa

SEQ ID NO: 329205 - DNA, 986 bp, Cannabis indica
ttaaatatatatatatatatatatacatatagtaaagtttattttatgaatgactaagattaatgttaattttttacttaaaaaaaaaaaagattaatatatatatatatatagtttttttttttaagaaatcagctcattgtgttttgctcaaccaacttgtacacttaacaattccctgaaactttgtatacatgtaatctttataaactctcaaaccattttctatccttcctaaatagtaaatattttcttcggcattaattctatatcttacatcttgtttcattctctaaattaatgtattaataatatattaaatttgtgatacaattatgacaacaagattgaccaattaataacaatacttaatcaaattagagtatataagtttattaccatatataacttgcacattaaaatgagaaatatttttctcatttaaagaaatttacaattattaaaattgctacacatttttgatacgttggtagattgtcaatggaaagcacaagaaggaaatgtttgcgtggcatcgtttgattggcagtgcagtgggatatgcaattcagtggacagaatgaaaacagtccatgactcctgtggagaaggaaacagtgccctttggagtgttgatatatgatatttattctctcatttattttttatttttcaactcctttcattctctcttttctcatgtttctcaaccttatttcctttactgtactcaaaaaaaaaaaaaaacgaccacatttctttactactacattataaacaattaaataaaagcaagactcgcataatattttactatgactctaattaatctctttggatatgtagtatgcttttcatattttctatttatttagggttttgtagtctccttactatgattttgtttttacttttctttttacaaaacctaatttattgatatatatattaatctggaacaactttattatcatatatatatatat

SEQ ID NO: 329206 - DNA, 1069 bp, Cannabis indica
ttttgtcatactgagttttcctgacaggtttttaatgagacaacttgcaaatgattatgaatatgaagtgagtaaaaaatgtgtgggagcgagatcattgacataacatattcgggaagcatatagattatactgaataaagaagtatcaacacaagcagtagtatataaagataatatactatttgcatcgctcaactaaaaggagggtatattgaaggaaatagaattaaaacatattttactaaattcttctttatacatttcaagagattgcatattggtgtccaacatattaatcaagtgtcaatcttgtagatctattcacaaagctattaccaacaccaatatttgagaaggcaacatataagattgaaattcaatgattagaagagctccacaaacacctaaatgagagggagttaattcatgtggcactcttttctctttgaccaaattttttagctaggtttttaacataattagatggtttttatggacatccaaaggagagtgttatgaaatattatatatggatgtccaaatcacaaaattaattatcatcataaatgtttgattgtattttttattttattttattgattgtattttttattattctagtcatatttttgtataaataggagttcaccctattaaaataaactactgagaaaaatctcattcattctctcattcttttcttctctttgcgttcttttttatttctttctctagtttatattattttataatactaattgatttatcaatattgagcatgactcatcatgcatgaaataatatttattaatgttgaagtaaatattggaagtgtttgcatgcaagatcttcttaattattaatagatttgaaattaatattgtatatacatataagtatttaagaatatatataggataatataattaaacaattatttgttttatttttccacacattcattatcccatcccaaactcataagtaccggccaactaccagaacaattttattaatggtgcgtttagaaagtcatattgtaatagaatttgtgtgtaattggaggt

SEQ ID NO: 329207 - DNA, 1614 bp, Cannabis indica
tatgattgtaatcgtaatggttgattgttttgtcatttttttattaaaataaatttttattgaaagattttgatgataattattatgatttgtcacatattcatttaaattgaagatctaacatatttaactatatacattatatataactacttaaaactacaggtacgtgtttgtacatgtgttcatattacaaagtatgtataatttacgttcctatgaaaccaaaaaagtgaaaagtatacgacgatgaattgtgaaacgcactgcagattcatggaaagtcagtatttttttttttaagacaggagggcaaaagtaaacttgtaaagaaaaaaaatactttgtgtgggatttttatagtattttataaaacgaatacgaaaacaataaaaaaactacatgaaattaagagaaaaataacacaaaaaataatatacaaataacaaaaattaacaacaaaataacaaatacatatgatagcagacccaaaatttaaagtgaggggacgtaatttattttttgtaaagcatggacaaaagtaaacttaaagggctcgtttggtacgccgtattgtaatgtattgtattgtattgtattagtattatttaatacaatacaatgtttggtattgacttgtattaattgattgtgtaaagttataatatattttttatacactcgatcctaacaccaactacgggttcgagtctcgggtcccgtgtagcgggtcggggtcggggtccgggtctgggttctgggtccaggtccaagtctggctccgggatttcaggtccgggtttaggttcgggctcgggtcggggtcgaggtccgggtccgggtctggggttcgaggttcgggtctgagtccgggccggagattggtgttgaccccaaatcttttgtaattattataatacaaactaatacggaccatttattatgtattaaataatacaacatacgttatattaaaaaatttggtcgtaataattaatacaatacattgcttaattcaaacatagtgttatttattatttaatacaatacgactcttatacggcattccaaacgagcccaaaaagggaaaaaaaaaatacttttattaggatttgaacccttaatctctatctcatatgtaatctagcttaactattagtccaaacctaatattatgtttataaatattatattttattacaaatatatattgtaactaactatattgcatgtatatattttttttccaattttctttttatggggagcgatcgtcccgcctcgcttctatgtgagtctgtctcctaatatgtattccttcaaaaaataaaaaataacaagtatacaatataaaaatactttaaaagactgtggtttcaataaataaaatttaaaaaattacaaaaatatttaaaatttcgtaattataataaataattttgtaatttatttattattattttttttttgaaataaccctcaaataaataaattcagccaagcaataaaaaaaaatgtaatcaaaagatattgcaggtttattaggacactttcttgactatcatttataattattttctttttttttttaaaaaaaaaaaacttttttaaact

SEQ ID NO: 329208 - DNA, 1085 bp, Cannabis indica
gttccagtcacaactagaatctcgacaaatccaacagatgtggccactcttaccccctcggcaagcaccacgaacctggccaggacgacacaaccgttcatgtgggtctgaataatcagcctatcctgcctagggaagaccctccactagcgcctcctggtgaaggaagaacccacgtggatcaacccctaggcactgtaacttgatatggtccccgctattatattggagagacggggccaagaattgatgaccttgcctttggtaagccccatgtagacttgggagaagacatggaattggccagataagagaagatgcctgccaaattgatcaaattgaagaaccacgcgctattggctgcgatgcattcacacataaagacataaatttctaaggtggatggataaccaagagtacatccttcgatctcactaggcagagctagaccgcgataatagagaagttacaacctgataaggtagttcaataagcgcactgttgggagaggccataatctcatcagagatcccctcaaagggagactagtcaacagatcgaggagggtctaccaacaaattgtccaaccaggttccttaaaaactaggacatgccttctcttacccaaaggaggacacgtcttgccacaaagatctagttgcgagaacagctagatctcggcaactagcagtttggggggcctacatcagtcccaactaatctggaaagtccatattcgcatagacgttagcacaagaacttgggggcaaattttatcccaatttttgcccacctggcgtggcagtacagcttgccaacaagagggccaggccaactactcagtatttcaaccaacaaggtgtctgagtactcaggcgggatgacaaagtgacgaactaaccaccgtaaaggggttggccggccacccttagccggccctatggccaagacaggtcggccagcttctagacatctcatggccgaccaacatgcactctaaaggtacatggccaaccagcctttcacgtgataggattttgatgcgcaactttcataagtggacaacaagccagaccacgaattgg

SEQ ID NO: 329209 - DNA, 575 bp, Cannabis indica
tcagttttgaaatggcacaacccattttgtgttactttaaaaccgacgcaaaatgttataaagaaaattttatattttgcgtcagtttcaaaatgacgaatatagttttcagtgtcgttttataaacgacacaaataatatatcatttatgtctatggtttatacgttaattttttagactgacgcaaaaattttatatgtcacttagtaactaacaaaaataccctattttatagtagtgttagtttgatcacttgagaacatataattaagtatgaagaagaaaattgatgttattactcctttcaaaatatattattgttgttactattattatgaaattaataatttctacattttgaaaaaaaagaaaaattatccattaaatcgaggcaagtgcaataccaagaaaaatagtagagctagtatataaatatagggcaatactattgtaggacctagcaaaagtttcctaccgataggtaaacgttttttttttttaccgttggattttagatcttgtggttattattgtaaggtatatactcttattataggactacttgtatataatt

SEQ ID NO: 329210 - DNA, 731 bp, Cannabis indica
ccgcgtagagtagactttagtcaaaaaccgagacgagatcacacattatccaactaatcacattcacacacatatctctctttttcatttctagaacccaaaattgtttagattaaaaaaataatatcaactcttcacatttttatattttcagtactccctgtagtaatccatacaaaaattacaaatattatggtgcatcattattaataatttaaatataacgacgctaaaatattacaatctatacccttaaattaatattacaaaatattatattttttttatttagttgtaactattttttttacttgacgacagtgtaccaaatataattatacataatattttaaatttaggccacttactcactcctcatttaattaataaattttaaaatattggtaaggtgattaaattttaatttatagatatttctgttttattataaaaaaattattttgaaaaaatatttgtttttaattaatgtaaaaaagaaaaaaaaaattagagtgtttttaaactgtcacaggtcaatcttctagttctcaaattttcttttttttttgattaataatgttaattccatttttggcatattcaattgacaaaaatattttattatttaatgtatatttcggctggcatatattgatatggtttccatatttgtgtaaatcaaacttgaaaggaagttgtctagctttcctatttttggaaaaaaggtaaaa

SEQ ID NO: 329211 - DNA, 787 bp, Cannabis indica
acgaaaaacaactaagaacaatatagtgccaatataggaacaactttagctttaaatatgcgtgttgtaatgtgttagtccgactcttattattcgggtcttttaaaaatacaagttgtgtcgtgtcggactataaaaaaaatatgggtcgtgccgtgcaataggataggtccaatacagtctgcaagtctggtaatttcgtgtcatactttaatttgtgttatgctttattcggctcaacttgttattcttaaataaaccaacatgtttttttatacgtgttcaaattcatactctatatttttgtatttttataacaattaatagtctaaatactaaaatatatgtgcattttatattttttaattatttttatatatgttttcaataataataataatatacaaaataattataattattataatttgaatattattattttaattgataaataaatatttattataattataattattataaaattattaagtattttaatgtgtcatgtttttaagctaatctattcgtgtttatgtgttgtgctttttaggggtaaattgaaaatactttttttatttatcaattaactaaatctatttctaatttatatttaattgaaacatacctctttttatatgtactgtactcaaaataccttgacataataagggagtcgcatggagagtatcttgaagtgaagggcaaaatcggtacagtgtttttaaaaaaagaggataaaaaaaaaagaggacattataaaaaaaggtatagagtctaattt

SEQ ID NO: 329212 - DNA, 1011 bp, Cannabis indica
tttttttacctccaatgattcaaaaccagtaaaagaataaagagtcatgtgagagtaacacaaccctgatatagtacctagtcccactcgatataatgtaaacaacaagaaaaggaatgtcaaattaaagttgcaaaatttactattaaagaaatttagagaattacttatttgtccacttgtatatgtgcaagttaccaaagtggaaacacacaatataaagagaactaaaatcagagttacttctccacagaacaagagaaagaacctgcaaagtgcaaacacatgaacactacaggaacttctaccatttcaaacaaaaactttacatacttctcattcactgcaatctcataaagttgttcgcatatgttactataattttataacgttggagctagtgttctcttctggataaaaagctacctgcaaccactaaccaccctatagaaagcaagtgattgaaattatacatagcacaaatctaaacagaaaaagtagcctttttcatgctcaccttttggtgtagataccttgaacttatttacatcatcactgtaaatacgaaaatcatctcctactccttaaagtattacccaatgcccatttagaataacaattaaaataaagaggcaattttaaaggaaggaaggcaatgatacctatatttgccaatgcatcagcaaaagtcatgatcatgttcaccaaaatttttcttctacttggaaaatgcacgaaccaaaaaagaaaacaaaagaaatagtaagagctaataatagagagaaataaatctatttctcataaatgctaaaagatgaaaagctaccattgttgtggctggttgttcttgcagcatattggacaatccattgaccaaagaaaatagagagcagagatttcggtcaaacaaaaaagtaaaaagaaattcaaatatgggaaattgttagatgggatttgatttgaagatgaagatgagatgaccactcattgttatatgtgaagcggcttaat

SEQ ID NO: 329213 - DNA, 809 bp, Cannabis indica
aacattaaatgttatttctgatctatatcaataagtaaatctgattatattgaaatgagttttatttagggcataaaacccaacagagagacccaacgttctccttgtgccccatcagtgagaacttgaggctcaaaagcctgtatcaagacatggtctacaccgatcactaaaggctaaccaagcctgttcaatggatgcctatcatcatcatacgagcccagatggttgttggagaaaacagtctaggtcttgtactgcgtcctcctggcaggtgcagcatcctcaacctcaaacttgttgtctagactctcaacaccatgcttagccatagacacttctgcctggccaacctctagatctctaccattaaggggttgtgtggccttctccactataccaaccttacccattgttgccaggctcgcaatgtgagcatcaaaaggtggtgctctacgataagattgcttaattatgacaatagtaggtcactatcaacccagagttcacccagattcttgctagagaacagactagatcctagctcacaaaggaaaaactgattgggcttatgaaaacgtggttgtcacctccccaaaccaatacttgaaatcacctacatagaagagacaaggggaggtgagaacctgacaaagctacaaagtacaaataaaatttaggccaatcatatccaagggtactttccaagtaagttacattgtacaaggctgggcatcagcgaagtaccaactcaagtatacctacttagacaaatggtgagtcttaagttctacattcgagtttaatag

SEQ ID NO: 329214 - DNA, 661 bp, Cannabis indica
aagaaccttataaccaccaactttgataagatttatgaatattgagtctctcatgagtcctgtgttcataggtctcgattaagatttcacctagcaatactttggtgtatttttatccacactcttgagaacataactctagtgtgtcagatctaatcaataaaaaaaagtagacatagtcccactataccatcgcaacatgggggtcaactactataaattcctggtatccactttttttattgcagttttatttagtcgaattaattcatcgtagttctctttatttttacaattttcttagatcagttgacgaaaaacaatgtcaacatataacactttaagagggatgctattataataaaatattattttaaattagtttatgtggcgataaaaattatttgttatatagggataaaaaagttaaaattcatatcgtctcaaaatttgaacaattatttttattttaaatttttgtaaaagagaaaggtctcgtttcaaattttatcctaagcctctcaacacctcgagacaaccatgtagatatggtaagtatttatttgaactttattttcagtcttataaattattcagaattttctaaaattttagagataattttaaataattacaatacatacacgattatgaaaaaaaa

SEQ ID NO: 329215 - DNA, 932 bp, Cannabis indica
aatattcatgcatatatcaaaattttcaacttttattcataattagaaatttctttacagcctttttagggcataaatcctaacagataaaatcaaaaaattcaacccgttcttgaacactgtgtacctagcaggcggcttcttccatttctcattttggtcttcatacaaccacaactcaggtcgtatttgcaagtcttgtaaatccaatttcgctttctctgtatcttttgacttcccattcatacttagaagaatacctagtaaactgtcacacacatttttctcgatgtgcattatattaagattatgtcataaggataaatttttccaatactcaagtttaaaaaatatactctttttcgaccaatttagctcttaagtagaacgtttttgcttgacactctcgaattatttgtgttttcctagcaaacagaattaaattctctccgattgtgctaaaatatcaaccccgtcaatactggaggtggtgctcttttcttagtcttcctatgtacttttttgctttcccttcttgggtcattaattcatttccaaaaaacgtctatgaccaacgtatatagtatctgattttactgttattgtgatattttgcacatgcaagtgcacatatcgtgacaagtagtaaactcaccaagagtgagatcgatcctacgaggattgtagttaagtacgttaaaattaaacttttacttctatttggttgaatcaaaattaagaaaagattaaaactagaaaataaaaatagtgaaagagtaagcaaataaactaataaggaaattaacagttaataaaaactagggcttcgactttgattgtttctattgattatagtctaatatgattatcttcctattattaattcctatgaaatagcaggtttactaaggtaatttatagtcttctcagat

SEQ ID NO: 329216 - DNA, 921 bp, Cannabis indica
tttttttttttttgaaatgaatatagttatattgatttaatagtcaaatttttacataatttgatcatatatcattaaatgaataactttttgttccataaaaaacttataattaaatgtagataaatataatgacactatttagatttttattacaattaactctcataaaatttggatttttcaaagtaaatattgttaatagtgtgcattgtaagggtggtaattcatattaacatgtcgtgttcgagtcttgttgaggtcttaaatttactgaaaaattgttgtcatgaacacgacctatgcacgagaaatttataaacattgacacgaacacgaatcgaataaatttgtatcgtgttgaacccaaaaaatattgtgtaatggattgtaagttgaattgttgtttttagtgtcattgtgtcgtgttcgtgtagtatggagttcttaaatttattttcgatggctaacacgagcacgactcatgacacgaatttttttttaaatacgaacacatacacaactaatataagttttttgtgtcgtgtcgaacccataaaatttcgagtcatgttcgtgtcaaatcgagagtatctcatgacttgaattatcacccttattgcattgggctatttttcattatttttttggtggagatatttcttgctaattttcctttaaaggacattgagcgggctattgtggttcgttggcaggtttggttttgttcagtggcggaaccagatgaggaaataaggaggggccaaataaaatatatttttagctatttttttttagtatgaaatattttataaatcaatataaaaagttaattacctttatacaatgtatataaaataatgaaaaataataaagagcacccttatagtgtcaagtactaaaaaatactataaaaagtgt

SEQ ID NO: 329217 - DNA, 525 bp, Cannabis indica
taattaacaaatatgcccctataactttgcttgaaaagatcaaaagggtgaaagagtcacttggcatgtgacagacttcaagtccttccattctggtaaggaaggttgaagatgcgtctcccaagctttgggaagctccaagagacgtgcaagcgccccatgatatcttgggcagtctgtttcctccgatggataacaaggcatttagcagcttttttggcaaagactcgaatccctagtaggatgaatgctattgcggtagagattctctaattggtttttaatggcccgagttactttcttttatgtaactccaggttgtagttacatcataatgacaaagatccatgtcagcaaactttgccaaataaaggttggccctagcaactccttctgtaaagaccgcttagtttaatttagaaattagcagttaatcacgtttaattatgaaattatttatagctatttaaataattatttatactgttattattgaattccgagatgcatttttatgtcatgtag

SEQ ID NO: 329218 - DNA, 652 bp, Cannabis indica
ggaaagaccattccaactttctctcccagccgtgtgatcaatctcagccattcctccatgaaattgattattattctctgatgatgatccattcaattgccatggacatccccacaaaaccttattattattattatgatctgatgatgatgatctcagctcttgtttgatcatcatatcatcatgatcatgatcatgataagacatgtgatgatgatgattacccaaattttgatcatcatttccaacaacaacattcccattaatctcattcccattcccaaatccataaaacatattattgttattgttggaatgagatgattgatcaagaaaaccattccttaatgcatcaagaaacccaatattactattattaatcccaattaattcattattattatgattatgatcataaccatgatcaaaattacctaataactgcccacatgatgactgtttttggagcctagcaaaagcaagactaaggtcatttgagtcataaccactactactattactacccccaataaccgaaagttgttggggaagcaataggagtgagttgtgatgatgactaggcttgatcaattttgatgatgatgtggcagatgatgtggcagttgatgatgatgatgagttgtattattag

SEQ ID NO: 329219 - DNA, 785 bp, Cannabis indica
ttttcttttctttcttcttctccttctatcctcacgcactcctcctcctccttcttcttcttcttcttcttctcgtctctctttcacttccttcgccctcaataaccgccacctcccaaacccatttcgtttctccgccaccaactcaacctcaacaatctccgccacaatctcatcggtgacaagcttctggaatcaaccttctcttacttagacgcagccggagaagtccagaccgtcacagtctctgacctcaccaagggcaagaaagtcgtactcttcgctgttcccggcgctttcacccctacctgctcgtagaaacacctccccaaatttgtggagaagtcaatggagctaaaatcgaaatacgtggacaccatcgcctacatttcagtgaacgacgcctacgtgatgaaggcttggaaggaggatttgaaggtaaacggaggttcttctgttgtccgatggaaatggggatataactagggcaatcaatgcggaggtagatttgagtgacaagccagttaggctcggagttaggtctaggagatacgcactattggacgaagacagcgttgttaaggtcctcaatttggaggaaggtggtgccttcaccatcagcagcgcctacgatatcctcaaagtcctttaagtttaatctcaactcttttcaaaggtattttcattttttttttaactctttagataaatgcagtgggaagtggtggttttgttgaggttgatggtggtgatggaggaggaggaggagtgcgtgaggatagaag

SEQ ID NO: 329220 - DNA, 710 bp, Cannabis indica
ccgccataaaaaattaaaaaaaatccaacatgtgtttttaggtacggaggttgactaagaggttgtaatagaatgttgacggtagcactcctcttaaaataatcattttggtaaaaaaaaattgtttcggtattaaaagaaattttttagtccattatttctttcatgattgtgtatgttaaaattacatagatgcacccgtaaattttcagaaagaataaatagaatgtttgctcttccaaactttcatattttgatttttaccatttgaattattttttgtaaaacaatatctctcgaactttgagaataattgtaaatttgtccattcaattgcatttcactctttttttacaaatagtttcttaatgtaatatcatccatgactatttattgtaattcgagaatccatgtaaaaagtaattacataaatatacaatactctaacgataaaatttaggataatatatttgtaattttagagtaatgcttgaatgtttaaagtcattatacttattttaactagtttaagttagttaaatatgtcatcgtactataactcgacaaatttataattatttctaaagttcgaggagtattttaaaaataataaatgatttagaaagtaaactcatataagtgtcaaagttcaggagataaaaagatattattctttattttttaaaaatatttacaatgtcaaaataaaa

SEQ ID NO: 329221 - DNA, 712 bp, Cannabis indica
tattatatcaatcataaaaataatcccatacatatttaaataccataaatatagtaaaataaaaaaaaataactctacaactaaataaaattacaaaaataccctttcgggattagcggatattacattacatgaggagacgaaattttaaaacaaattttgaaaatagcgttgcctattttattataatagaattagcactttgtttttatttattttacttgatttcggcaactgtataccaatggaaacttattgcttatatgagatttttagagagtttgaaaaagttatttcctctttttatctctctttaatagacactagtatatatgccggtttcctctttttttcaattttttttgttcttttatttttattttttttttgttttgtccttttatttagcgtcatcatattgtttttttttttcttgatacattgatttgaagtattcattttaaatattttattttattattgtatttctttctctctttctctcgtttaaaaatttaaaaaaaaaaatcgatcgtagagaaattattttggctgaaaaattacatatgatttatttttgaagatcattattttaataggataagtatatatacatatatttttgttactattactagagaaaataaatagaatttaaagtaactatttaatttcttttttttttatataattaacaaataaataattaaaa

SEQ ID NO: 329222 - DNA, 556 bp, Cannabis indica
taaaaatgataatctaaataagtgtatatttttaatactttgtgtttttcccaaaaaatacggaataaagtaaagccacataatagaaacaatatagcatacattttcagacacgtttttagatttgtagtataggttgctttaaaattaaaaggaattctgtaatataaattagaaaaaattgtgagtgacacgtatacttttacttaaaatggagattttttagttagtgaaactttgtaaattattttatatatcatgttgttataatgtgaaattgcaaaaagagaccttataataaaaaatttaagtaattttcaaatagaaatatttttcttacttaaagaataatattaggtattaaagtaactaagcaaataagataagtacaataattttaaaattaaaaaaaatagtttacagtagatgatgagtacaaataaaagtaaaaaaaaagtaatatacataaaagttggtagaaaaattatattagaaataataactagtactagtaccaaaattaattaggaaacaattaatttcacaatctatgata

SEQ ID NO: 329223 - DNA, 660 bp, Cannabis indica
ccaaaaaaaaaagtaccctgtacgtgaataggggaattctcttgaaaaagcaaggaaggggtatcctcgtctgaagaatcctcctcttcctgctcaaccatgatggcctttccctttccagccactagggtggaagattgagcgaccttcttgggaccatccctaatcctaatggcaggcgcaacaggtacttggtcaccatgaggagccttcctcttcttcttcttgctcggggcctcctgttcggatacaacctctccctcctggactgagataggctctcttgctgcttgctcagtcctttgtacatggtcagatcggtaaagcttgtacttgataaaattggctttagtaggcaagagagagatattccaatcgttcgagggaagttggagaatttcttgagccctctttctaagttccagagtgaacggaggtcatcagtaagacggaatgtgctgaaaattggtatgctttgtatccatgcccttaacaaagtagtaatcctccgcaaagccaccaattttggtcacctcggtatatgtggtatcggtcaggcacgaccctgttgggttttatgccataaataaaactcatttcaatataattagatttacttattaatatagatcagaaatagcatttaatgttgcatggttc

SEQ ID NO: 329224 - DNA, 778 bp, Cannabis indica
agaatatgaaaataaaagtaaataaaacataaaataaaatagatatacaatgtaatttccactttattttatacacccgagaatttgttatgatgtatgattctttgggtagctgaggatttacctcttaattaataatttttttttccataataatattaataatctcattattattcagcaaaaaaattctcattattataaaagctaaaaaaataaatgttggaaatagatacatgtatggtagaacaaccctattgataagagcaaacctatctatactcctataactaattttaataacataataatatgtttattgggacacgattttgtcccgtgatgtactttcaaggaatgtattccgtagtacattagatgggtctcagggtacattagattggtgtcagggtacattactattttttaaccctaattacccctagatcaatctcaacgctcagattaaataatatctaacggttgtcgtacattacggaatacattacgtgaaagtacaatcacggaacaaaatcatgtccctatttttatatatattatattctatacaacatatatataccctttttatttttatttttattttgcaagaaataccctttttatttgggaacatgtaattatttaaatttaattaaatgactaatagtattcaagaatgtatattttattatatatctcagtattcataacattattagtagagaaatactaattacaacttccacgtccgaaattacatgccgaaatatttttt

SEQ ID NO: 329225 - DNA, 820 bp, Cannabis indica
aaatttattaattcaaatagtaacagtaaaaagtaaatttgattcaattatattttaaaaatatatgtaaaaattaattgtaaatcaaatttaaatttaaacttatacaaaaataactaacctattttccttttcaacaaattaattatcacaattatatgagatatatttttttttatatatatacacacgtgggttagatatttttataatacactttcaaacaacacaccatttctaaacaatacacacatgacaaattatcatcaaatatttattttatataagaagagatcctttctaaaagattttctttcttttaaaaatgatattttccctagactcaccaaataaagataaatactataaatgacaaaaatccaaaatgatttattgtgttgaggttgaatattttctctgatttaggatttgattttttaacatggtgaatagggtgatattgagatgtgtttcagactggattagttaataatttaaagctcatttatcatgtgattatttaattatatatttataaattataattatttaatatgaatgcttccatcaaccaacaattttaaactcgtttgtattactttcaaaactctgattacaacctaaccacacttttgtataaaaacctgattatacacatatacacataattacaagagttcaaattctattataggcaacggttttaaatcgtcaagattgtaaaaaagaaaaaatacagttttttttttgaaatagcagaaaaatctatattttttcttttttgaatgatgcattatttttataattttatctaaattaa

SEQ ID NO: 329226 - DNA, 1511 bp, Cannabis indica
tttcaacccccctttaggcatctcatgtcaaagttatggtcatctagggagttcttctttgtttacactgtctgtctatcttcctagcctctctcgtgttgcctattatggatacccttaccgttcccctatcattgaattgtcgtgtttcactcctctgtcgggggcacactgtcgacaatctttccttagtttcatagagtaatgagtcttccatggcagaagtttcccttaatatttcttttgtgtgttgcttttcctcaactttaagtgctacatacccttgagccattgctagagctcttgtcagtgataatctcagctctactattatagccttcttaagttatgatccgtgaactaatctctgcatcagagcttttgttgcaatacaataaatacactttgagatgcttacatactctccagtgaatctatttatgaacctctcaagcagttcatctgacccttgatgtattcatcatatatgcatcaacttttgctaactgtacacatattgtgaagttggtatggaatttcacaattagttcttgatacgaatttactgcctccaaagataggttatgaaacctctgcaaggtaggacccctcaagccttgggtgaatattttacattttatggcttccaagtcttctaagggaaccgagattgttaacagcttctcctcaaactgacatacatactttaatgggtctctagtcccatcatactcatggagctttggtgcaacatagctttgcggagcttctactcatgaaatgtggttttcaaagggggacaatgagtggatccttccatccttgcccattttactatttattcccatctggctttttgattccatagcaaggagcttgtcctatatcatctcttgttctctatttcattggcttgaattggggaaccttctggaataatctaagttgtggtacatccttttgatgttgtctggggtgcctcttccttcgcgcttggttcaatgtcatccttgtttcttcgcaactaatctaatgtgcattgtgtttttgcatgaatatggtttttgtgtccagttgatccatcttgtgcctgattgttatgattttgattctaaactatggctccatctattaactcgacctattactgtttgtttctctcttcatgttgcgagggatatatgctagtaccctttaaggactaccttcatttaactgtttttgctttcgagattattcacatgctcttttttatgtgccaattatgttccttgcggtgctattttgtcatcctgagtttttagtctttctaggatttctcgcaaacttgggattgctggtgttgctgtgtcattctctttctgggtggtggtattagtttcttgttcttggttagcgctattggtatgtagtttcacgatatcctcttcttcgtttgtcgtttcaagctttttctaaattcttcatgaatactgatgaacaataaaaaaaaaacatgaattttggatgca

SEQ ID NO: 329227 - DNA, 1140 bp, Cannabis indica
ttttactgtttcagtgattgtttatgtactaaatcatgcttcccagactttgatatctaccaaatcatgtccctcaaactttgaaatgtactaaatcatactccttgaactttcatccatgttaggatttgtttactaaaattagataaaattctttaaatctaacaattttaatagtttagaggaaattttttaacggacaaaaaaagttcagggggcatgatttaatacatgtcaaagttcggaaggaaaaattactaattagcctatttttaatttctttaagaatatgagtgatacataggtgttcttttacaaaggactacaattttgagtatatatataaacaaggttaataagatatgtcatatttatatcagttattataagttattttatctaaaagaatgctaagatcatctccaaatatgatgtaaaagatttaagtttgatataaaaaaataagtaaatgttacatcgtgcacaacttttgtaattatgctttgctagattgctatagtaaattaatatgtaaattgacataaaaagtcattatgaaatatatattttttaaaacatggcaatacgtacatattataattaaaaatatgtactaacgtcactcatgatgtatatttcaaaaaaaaaaagtcacatattatgttaaatggcaataatctaaataaatattataatcgtgctaagtttggtagaatggcataatttgttcaaaatttacacaaattttgaacatgtgcaaaatttcacacaatttttatcatgcatgccattggatttttattttatttttgtaatttttatgaactgttatatttttactgtatatcggtatgaataatatttatactgaacatataatttttatactaattttttttttttatttctttttatatagacttgtcactttaggtttttttttttctttatcaatcacacgttacctctatttgacattttattcattttatttttcttatatttttatcatcatcttcatccttaattcttcgtctctctcctctgttcatcttcttatttatttttctttttgtgtttacaaatctatattttttttttgtttataaatctatacttctttattttttttttttattt

SEQ ID NO: 329228 - DNA, 1210 bp, Cannabis indica
tttttttttttaaaagggcccaattttaaaatttcgcacgaggcccccaaaatgttggggccggccctgctactaacacaaacatgctttgattcaattgagtcctaatatctccaaatgaaataagactaaaatctcatgccatgaatgaataaagttctactaccataacaatagcaaggtggtgcaacaacaccgttattgaaaataaaaatatataaataaacaaaacatatcaaattaagataacatactaagaagattaacactaacgaagatccaatccttgaccaatggacaactcaaatcttcgagacacacttctaaagaaagaagacggagaagagaagaacactgtaatgactgcataattagattatgaattagtaaagataattagcattaattattgatattttatagttatatatatgattttatatttattgtggaccctatttttagtaatggacattagagttattgtaatatctcgaaaaatataataatatttaattggacatattttattaaatatgtgattatatggatattagaataagattataatcttacttaagttaattatgagttgattggtgtaaaattcagaaaataaataaataaagtgtaatttattaattatggacattttatcagattatgtgggtattgtaaatactattttcgaaataaaatattttcaggtttggcagtcgtggaaactcgacgaagtggtcagaaatgtcacggcgataaaagttgagttatattggaattatgccagactagttaagaaagttgatttactagtttattctgaaaaattagaaatgaccaaaatatccttacttaattttaactttaattgttaaaagaggggtaaaatagtcttttgtgcggttggattttttcttatatggtattgatttaggctaaaataaaattaataaaaggtttatattattttatataattatagaaattgaaagattaacctagaaactaagaaatcacaaaatatcactctctcatttccttcatccctttcgaaccctagagccagtagctacaagaaagatttcttcatcaaattcttcaatttctagcataatttaacctaatctaaggattatttaagctttgatcataacatatttaatcataattgaatctctgaagtggttctatataggtacctataaatgat

SEQ ID NO: 329229 - DNA, 685 bp, Cannabis indica
gtagttgtcttcattaatggtattgtgatttctttcaattcaaaggaaacatatgagagacatatttggatggtgctgtaacatctctggaagcataagttttatgctaaatataagaaacgtgagttttgatgaccccaaatttgctgtgaaggttagagtattttttttggaacttaacatgatgctatagaatatttgttgagggttttctgtgcccttagtggaattaaattgaaaggattgaaacagaggtcaaccattgctccagtgttaacattgcctgtcagtgaggagaaattgtgatttgatgtgacactttcaaacaaagattagattgtattttgctacattctacgaaagttattgtttgtgcttctaaatgattgaaaagtgtgagtaataatattccagttatgatattgaattgatagcagtggcttctgccttgggagtttggtgcttttacctatttggcaaaagtacgaagtttatacaaatcataagagcctcaaataccttatcatttggaaagatttaattaggaggcagcaatgattgttagagctgattgaagatgagaacagtgtaattccctactttttgtgaggaaaattagtagtggatactttaaaccaaagaggtctaggacaagtttgtataacgaaaagatctcaccaaaggt

SEQ ID NO: 329230 - DNA, 1015 bp, Cannabis indica
agcaccacccttgtagactaacacataatgcctagtacttttcgaatatttcagaatatgcttaactgcagtccaatgttcctctcttgggtttgtttgatacctgctcacaattcctactgcatagcatatgtcagatctagtgcataatatttcagtgaatcttcttatattgttatttatacgtaaagccttctacaactctcaatgaaagtactaaaattttgaccgagatttttggcaattaattaataaaagctgtgaaaataattagaagagagttaatgccaatatttttacgtggttggggaactaatgagccttagtccatgagacactgatatttaatatggaggaatttctttatagagaatattctactctattttttctgatccccatttcaaatgtggtttggggtatttatagtcttcttcaaagaagaaaaaggcttctattgtctcaagtgttcaccttgggtttatacaagttccaaaattcagataatagggtatgcatgtctgcatatagtaggttacatagggcttaggtgagataaacccttatccttacttgattgacgtgatagttcattatgtagctgtcactaatctcctcggttaaagcgtaatcgtcatagaatgggtttaatgcgtctgacatgtctttttcatattcgtccgtagacgtttcctccatgtcacatttaatgtctttgaatagctcatctccggaactctgagccagtcgagaagactttgcctaactcccgggggaagagaaaaacattggtccctccgttccaatcataactctaggagggacccctcgaatatatccgctcaacccataattttacttaagatattcctaaacactttcggatcttaagccttaatttcacgtggccaatcataaaactgtcatgtatattgggaaaaaaagcatggaaacattaattataataatgcagaaaggttttttgagacgatattcaaatttgacaaaaaaaact

SEQ ID NO: 329231 - DNA, 729 bp, Cannabis indica
tcttcatgtatggccctcccctcttcatttcaagctttgactttcagtctttgactatatataacactatatatcatgcattttttaatataattaatttattattaatggtcaagaacagaaggtgtagcatgagaaaaaagagcctgtcaaattagccaaggtgactgcctcaaacccattaagggttttcttaattaattatatatatataaaaaaattatacattaatttatatatgaaaaataatgaaaaacctcttaaaaggaggcaggcaagtcatccttggctaccaaacgagactctttatcttcatgttagacctctcttcctatatacatatatttaagtatttagatatatatattatgtcttgaaaatggtctctatttatagccatgtgtatatattttgagttaaagatatatatggaagaagaataatatagagagagaaattaagataaagaatcatcttgtctgactagaagattagttttgcctatcatgaaccagccaacctattttttttattaattaataaaataatatatattttttttatctttttaactatttttgtcatacttttttcttggatttaatttatggtttggcttcccataatggaatatattctttcatttgttgaagggaccatataacattataatgtagtataaagctatatatataaaaaaaaaaaaaaaaaaaaaacaaaaaaaacgac

SEQ ID NO: 329232 - DNA, 819 bp, Cannabis indica
gtataaaacttataaaaatacacagtaaaaaaataagaaatattgtctggaagtatttttgtaataaatgataaaaagtcagtatattgtgtaattttccccttcttaaaagcaaagctttaaaaaccaattagacttttaattaaaagggagaaaaaacataagaatacttttaaccattgaataatcacccataatgagaatagtaataaaaagtgaatggaactaaatttaaaatgcataaaaaaaaataataaaagattattaaaaaaatttctcattttgcattggaaggtctttccttacatttcaaatgacaatcattctactagaacaatagaaaaatcatgtaaccaaataaaagaataaaataaaaattatttaatttctattttattttatttcattactttcaaccaaatgtcacattaagattcgtttggtatattatattgtattatataggaatagattatattgtgttgtctttcatatttttacataatgctacataaaattttgatttatatcaaaatattgtacgtagataaatactaaatataaaatataaaataatttaatataatattatatcatataatacggtgcatcaaacatccttaaagagcttaagagttaatctacaaataattaatcaacatactttggtataacttttataagctttagtcttattttgagtttccggagcttcaatgaatgagcaggtcccagctgaaaggtgcaattctgaagaggaatccttaaataggtccatggaatgcatgcttttgagtatccaagcttagccaaaaaatt

SEQ ID NO: 329233 - DNA, 832 bp, Cannabis indica
atttattgttctttattcaaataatctcacctaataactaataatgttttttctttaattttttattgtatcactttcaaataacatagaaaaaaactagcataaaatttagtatacgtgcctcgcacgtagtttttgctagtatatatatatatatatatatatattctccattgaatcataaaataagatgtgagaacatataagaataccataaaaaaaacagagcaataacaataaaagaaaaagaaccaaactaacctttacaacttaaatttttggcaatatacacagtcttgacttctcagtttggctcttcggttgtcttcggaggtcgtcttctccgtcaaaggtaatggttgtgcttctttagcgtgtataagacgaaacaagagaaactgttcgtttccctcagctagtaatatcattgttttatgtgtaaaatgatttttcataattaaaacaaataatgtttaaaatcatttaaaaattaataagtattaaaattagggacaatttaatcatactaaaaatttgaattcaataaattaagaaagagggtaccacatgtgtagaatttgtaaataaaaggtactagttgatcattattaaaaacataaggtaccaagtttgtattttcacaaaatataaggtatcaaataagtatttactctttttactgcaagcatacaatgttgttataataaagttttgatactaaaaaggttgtcgaacccacagggattaattattatattttactaattattatactttttgttgttgaaggaatttcacaacaccaaaaataaataacaacaacaacaacaac

SEQ ID NO: 329234 - DNA, 898 bp, Cannabis indica
gtttgtttttggagctgcctgatttaaggtggcttagattgtatttggtttgtttattgattaatgaagcatttttctttttgataaaaaataatttattttttttatttatttttaaattttgtgagaatgtcatttcattttttacattatttattattttttatacaatctatctatatctatatatttatatatttatataaaggaaaacacacaagtgtgtaggtggctctttataattttctctttctatttttctaattttgtgagaatttcatgttaatgtgaaaagcatgattagtcactaatcttagttttgctaataatcaatcttacccaattaattagttgtaattttttaaatttatataatctataatttgtattattataattattataaaaatatataatttttcattctattttttaattttgtgagagagttatttttttaaaaaaaaataattaaatgattcttttataagttaatttttatgataatctcataattgcgagtcttcacatatgtattataaataaattattttttttatttgtcttaattaattagttataattattgaaacacatctattctatagtttataaaagaaagtgtaaacgagtttaaataattttttatattattttttatttcgttttaaaaaaactgtaaagttttatattttgtcccaatagaaaaaggttatttgattccttaattactttacttttgaaaaaaatatggcatagtttataaaatgtgagatttctacataaatactataaaataaaaataaaaaaaaattgtttattgtatttgtccaaatattagtatttttttttagaaatttttacatgaaaaatccattttacacaatttattacaaaa

SEQ ID NO: 329235 - DNA, 1086 bp, Cannabis indica
ttatttacgtggaccaatattatagtgtcatttgtgaattgtgtcgttgtggacaataccctatgtacatatggatagctaacctggcagttaaccgccaaaactagatgaaaaggggtaactgttaagagaacacaatttttgggattttttccatcaaaatttaaattttggggattaaattgctagaaaagtgaaagtattgagggttatgttgtaatttactcattaaataaatttgattttttttaaatatcaacatcaatataacaaatacaatctgaaaaattcattcaacaaattaaacataagctcacaaaaattaattttcctactttataacacaaatttatagaatttatttatatatatatatataaataaaagagatagagaataacaataaataaagaaaattttcttaacaacagataatgatatccagtctaaatctcttctttgaacgatgcctattttatttagaaccttcatgaaagagttgttgtggtcgatatagagagtgaacaaaaagaaaaataaaaacaaaaaaaaacattattaataatatgagataatatctaaatggaaatatatatgtatataatagagattatttcagaattatctaaaaataactaaaaatttacattttttttaaggaattttgagttttttgatatatacttttacacatttttttccttacagaccgttgtttatacgttgttctaaacaaatcgttgtttacacgttttcacattgcgaaatatagtatgacgttatgacaatataaaaataactgaaaaattgaaaaaaaaaatgtaaataaaaaaaagtttataaaaatgtaaaagaattctatttttaggtatattatgtaaatttcttaatataatacatactaatacttgaaaaatatagtaggtggacaaagaagagattctcagttggtggagagtggtggagctaaatcaaaatgggtggagagtcgccttcctccgtcgaacccttgcttctgccaagcccctttgaatcctgacaagcccaatcgagtttctcttcatcacacattctctctctctctct

SEQ ID NO: 329236 - DNA, 761 bp, Cannabis indica
ggggttagtttgagcaaaaactttccatcatactttagggggttttgccgcaaataaccctatattttatatttgatagttgtaacaaaatgatatgtatgtattaaatatttttagttaactcaaggttctaatttagaaaaagtattaagaatataagaaggttcaatagagtctaggctcaaattaaaggagacatggctgaattaaagttagagttaattttatatttaaaaagaaagatcgacatacttgtatttgatgatgtatgattaaaaatgtattaagtaatcaagactaactattaaacacattaagtaataaatttgaatttttctttttgatggcatatgattaagaaactaattttatagtcatttttagatatttaaaatgtgtgtaaagaaaatgtttaaaattcagaatgaaatttaagattgagattgagatttcggaaggacaatattagtgactacagatgagttacggtgataacaatagatgagatgaccacgtgtgagatacaatgagacaacatgtgagatacggtgagacaatgaaataacgggtgagatacggtgatcaacatacttcaagttttccctacacaatcttatttatttattttataataatattttttttaatagagtaatttaaacttctatatatatgggtgcactcttaatgggtattacccataaatgggtaacattaaatttttttgagtttttatgcttaatttttctatttaatttaaa

SEQ ID NO: 329237 - DNA, 768 bp, Cannabis indica
aaaatccctcctaaccaaaagaaaaatttttctccatgactgacaattgggaaaattataataatcaacctgaagagactactcactgcgctggaaaagagccagcaggctcacagaggcctcccaattcacaaataacacgatttatacggtcaacacgttcaagataaagccaacatgaaggtcaccgaaacccagaaactgggaatgaagtgcccaacacagaggctagtggctctcttgggactaggggtgcctatgaccccaccaagtatgtaccgttggtggagttggaaaaccgccaactcaagcaacatttagaggaagcaaaccaaaaaattactgagttggaatgagaggaagccgctgccagggtggcttaggaaaataatgctcaaaaccaacctgatcctagggtaaggaggccacgaggcagacctcgtggctcacgaaccagtaggcaggagacaactcagggggacccttagaacactcaggaagaacaggctagggaaactgaggatgcccatgaagatgagcaaccaaatgaccaaacacatcatcaagaagtgcatcggaggccccaaggatttacaacccagggcaatggaaaccgtgatttaccagaatcctctcacaagaggcaaccccggactagggaacaggagatccctcatggtaacgagaaagatcctgggactgaatcaggacaggtgggtttccaacaagacaccgttaacgtctttctcgcactgatagggaaggggc

SEQ ID NO: 329238 - DNA, 547 bp, Cannabis indica
  modified_base (507)..(507): a, c, t, g, unknown or other
agtcccctccctaactctataaatacatatagtttcatcacaattgtatacttttgataatcagataaaatgaaaattgtctttgatttaaagacttagggagaaagtgatagtattatattatcaaattaaggtaattattatggaacaatcaaatacgcatatttaattattataatattattatagtattttatattatatacaaaacatataacaatgctcataaatatttattattaatttatcaaacattcaaaatgttttttaaagtcattaaatatagcaatgatgctcataaattcaatgaagctaagctagataacatgccataatgagctgagaagcctgagattatacatattaattctttatatatttactcagaattgtcttcttttgagtgttttgaatggagaattgagagagcaaagtctatatgtctaaaccctaaaagattacaaggaaaatagaaatgaaaatttgtttagtaattgaaatgatccnttatggtttcaaactggcatctcgcccatagtacttgaag

SEQ ID NO: 329239 - DNA, 608 bp, Cannabis indica
attaatcatattaactgataatttccaaattagctaagcgggctttacactgcttgtctgtgattgaccgaattatttgtatgttggaatgtgattattgttcttacatttcttattgagtctttgtcactcatatgtgctttgtggtgtaagtaaaggcaagggttaattggggcagtcatgagtcagcaatctttttcggtaaatgtatatatcgatctatctggcatacagagccgagttgtcaagaaatgttttgatgttgtatctgcatagtattttgtttacaaacttaatactaaagtttttgtaacaggggattcctaaagcaaaatagtattttattaaagttttttttaaaaaaaattattaatttattattataaactaattttaaaaaaaaaaaaacacgtaccttttgcatccttaaaagttaaggtgttataatttattttaaaaatatgattaaaaaaagtaaataagaaggaaaatttgacaatatatgctaaaaaatagcatatattgttttaatatactaggtaaaaaaaataaaaaaaataccctccaattaactttaatcccaacattaccctccccatttcaaactt

SEQ ID NO: 329240 - DNA, 1154 bp, Cannabis indica
ataaaaaattataaaacaacaaaaaaattattattttattaaagatatatttttataaataaaatttttaaagcctaaatatatataaaaaaaatggtattaatatatttttgtaatttttagtttatgtaaatttttttttttaaaaaaaaaatctattacctaatgacatgaccaaattggtcaaagtgacatgtgtttgctgacaaagaccttctcttttttaggggaatagaatagagaatagaatgttactcaaaacaacgcattctccaatatatactttttaatgatgagttgaatatatattccaaagaaaaaaggggcattcatcctagttagttaattttcaaattatttggatgaatatgaaaattaattgggagagagagactcatcaattatggcatttcatttcaatgattttttttatattttatttttgtcaaatttaatgtcatgtcaatgatacagcgtgttgatagtaatgaaatcttttgattagtttggactcaataataaataaaaataaaaaagggtcaaatcgttccactaatcatggtccatggacccctcaacacatgtcattgatttgcatgcttcatcatacatctttaacgttcacaattataaattgaacattctatattgggcgtaagtggtgttgaatacgttttataagtgacaaatattttttaaaaattattttttttaagttatatatgatatgatatttaattatattaatagtaatataataccaaataaaatattaacaattttcttataaattatctaattttgaacctctagacaatttacttaaaaaaataatttaaagcgtagtaccacaatacagtcttattattgcattttaatataaagagtaatttgcggcataactttcttaagtggtcaagtttttgcaactaaattccaattctaaaattttggtggtaaaacctcctaaatcgaagttctgttagcacttagccctttccatccatttttagatgttgagtgccaagttggaatgtctacgtgtacacagtgtaaacgtggcacagtttaattagtctacgtaataaatatttaaaattaaaataaaaaattaattattttaaaaataaaaaataaaaaatttctttttcttt

SEQ ID NO: 329241 - DNA, 1072 bp, Cannabis indica
atacctttggattttgggttttggcaagttcattaaacaagcatggatacttactgcaaaatcatttcatcaaataaggtaattaatttattggaattgtgtttttttgtaattgataaatatatatatatatttatatgcttacttgaatttattagagagaaagtgattaaatccatggacaattctttgaagaggatcagagcaacaatcattggtatcatcatgctctttttgaacttcacagatcaccttctcatcatcagatgtttcactttcggccttctcattcctattcaattaatttataatatatagtacttattatatatttagttgtatatatatatttgtataaataaaatgtccactaaatattagctaagtacctgatgctcactagattcttcttgacgccgaattcataattagctaactccgaatactgttcttcagccattaaattttgcgctccctaatttatataatttccttctgcaaatttaagtaattacgacatatatatataatatatgtatgatacagtcaatagtttgtatacgcatgcaacaattaattacttaaacaaaatctaaataaaaaaaacacaatattaattaaccatgcattaataattaatatatgtaagagtacgtgtataatatacttattttttaaaaaaaaaattaaaataaaaataaaatgccccttctccaaccaaagtagcttttatatatataaatacttagaaaagtatatataaagaacacaaagtaaaagtcgcttacagggtattaaataataattaatttgcaattgcagaattataggagagagagatcgatatatgtttgagggcacggaatctgctctatttataagacaaattaattaactatttcattgattatatcatcacacatacgtaggaaatttataattatttgatcaatatgttaaactcgtcctcgtccacgtgttttatttcgtaataaaataaataattactatatgtggtagattttttcatttttttgtggtaactatatgtagtagaatatttatttattaa

SEQ ID NO: 329242 - DNA, 761 bp, Cannabis indica
tgaccaattttctgttaattaattaagaaaaagaagaagaatgaagaagaagccacacaaagatcaccaaagatttcatctttcttttttttaaatatacaatatatataggtctcatgatagatgtaatgatttaattgaacaaattaaatgtaagaaaattaataagatttgcaaatatgaatttaaagaaaaataattcatatgtactaataataataaatatatatttatatacgtgcctgtgctaagtagatttagatgaggaagcttaggtatgcgttgtgttgatgtggaagacacagtaacataatcttgatcacctgaagatgctgatgctgatgttgtacaactataataagtacctgacatttcaatccacttatatatatattatgtatgacaatcaacctactatgtatatatactaataataatatttatagttatatatatatatattaagagatcatgatattttggattattggtcgatttgatgaggctcgtcgaagatttatatatatatatatatatatgtatgtatactcaaacaaaaagctatatgatgatcttagagagaattaataaaagtggtaggcatttgaatctcctcttatatatatatatatatagagagagagagagagagagagagagagagagatatgatctagctagagagagacaaagtaattaagtagctatattatacatatataataataattatatagtagtactttatattatttacgtaa

SEQ ID NO: 329243 - DNA, 654 bp, Cannabis indica
agtaaattctgacctaaatataactatatatgaaaaaaccccttgaataaatgatattttttttataatgtattaaactcggattatttttaattaatgttgattgttaaaaaaaaagttattaaaaacaaaaaatagtaaaatactcaaatattgttggtgataaaaattctaccgagctggattttatttattaaaaaacacaatatatatacataaattataaaataagtatggatcgtcaataacttatatgtagagaaaattcaaattttatttggaaaaaggaaattatagataaaaataaattagggatttaagagctaaaaaaatattatttttttaatagaaaacctttttttttaaaaaaattattcaataatttctcataaaccaagaattctgttatatagccacattttatatagaatagatgttaaggatatttatgtaatttaattttttaactatttatatatacacgtatctatatagaagtgctttttataaaaatataaataaatatatgaagttttttatttagaaaagtagtaaattaataaattaaagaaaaaaatatagagttattttaaggtatcatctgactctcttatatctttcctttatatatacatagactagcaaaaaagctac

SEQ ID NO: 329244 - DNA, 1012 bp, Cannabis indica
aaaaaaaaaaaattatgaaattatctaaatctaaaataaaaaatctttgaagataaatcacaagtcagaggactcagacatcgattaggacagcttgaatgcctctttttaactttcttatttttggtacatgctactcgtttaatagcctaaattgtaaaaacctattaaaaaataaatctattttttccttttttactatttgggtatatgaaatagacctaaattatatataaatatatgttttttttaaaaaaagaaacctgtattttaaaattaattttaaattttggtaagttgttagatttttttaaggggtatgttgttaactttgttattgagattaatttttaaaatgaaattgttggaggctttcatgtgtagttggaggttacattaattttattttagcatgttggtaattatcaaggctatattaaagtattgctgagaaagaaaaaaaagtagcatttaaaaaaaatatatatatcatcactatcgttttttttttaactcaaaatatatcttttttaatctcccatgagtcgagttcaaaaaaaaaaaatctcccatgagtcatatataaaattattatcttttttttacagcatatattaaattttcaaaaaattaaaaaataaacttatattaaatggtaccgtcatatactaattccgtttcagcaattttgttttttttttttttttgctaatattcgaattaatttatttatacacatatatgttcttaaatgaaaaaaaaatcacaatatttgctatctaaaatttaagatatatttctgagtacattaatattaatattaatattaatttttctgaggacagggttggataaagaatttatgattagattttaggatacatatgacccggttagtttacttttcctatatttgcaaagatagggtaagctgttgatactcgatcaaggatgagatagttttttttagctatagctaccatattattttgccctgattatatatatatgt

SEQ ID NO: 329245 - DNA, 561 bp, Cannabis indica
ataactccaaaatatttatatttgaaaaaaaattatgtggctaagaaaaaaataaaagttgcttgtaaaggatttcatcattttgatgcttgaaaaaagtctaacatatttttattttttatttttcaaatacatgataatcaagttggtgggatccagagatattcctatttagtgtttatatataaatgtacatagatttttaagtactaagtattatatatattagatataaaataattaaaattattactatatattaattataattgcaatgttggattctatatattaaatatatatatgtatatattattgttattattaataattatataatgcatgtactttttgtagacatatgccagttaataatcttgaaaacgattcaaagactcttatcattttctttttgatgagagaatttccatattgtacgttgattgatcaaactataatgatttgtagtactatttacatcaagaaaaaaactttttataattgattaaaaagaaaattatataatatatacacacacaaataaaagatatatatatatat

SEQ ID NO: 329246 - DNA, 803 bp, Cannabis indica
aaaacatatactaattttttttagaaattttttttttttttatattttttacacttttaattttttatttttttttttacagaattccacacagaaactcttatagcaactaacggagcaacctaaatcacaaccaatattcgtatagcaacccacgtaaaaaccaccgaaataactcaaaccataaattttaaaataaaaattaaaaaaatatacatgaagtaattcctctttttttaatagcaatattctaaatcaatcgtctcatttttttttataagagcactcctttagaattcaaaaataaaatgataagtttatgaaaaattgcacgtaataatatacaaactttttaatttaagaaattaattacgaattttcttctaaatattattgcattaatttatctatatatattaggaaaaaaaaaagataattaaggaaagtttttacaatgtaaaaaaaataaaaatcaaatgatataagaaatcaagacagattatttttcatcaatattttcaaaaatactttacaatatataataaacaaaatacaaaaaaaatcaaaatttgtgggaagtgtaattaaatagttttttttttttccgaaaaacttaataatgacaataaagacatgaatattgagatgattttgttgcacatttttcacgaaatgtgtttgtgtaactattattattattattattattattattattagggttatttgcggcaaaacctcttaaagtggataggtttttgcaactaaccccctaatctaaaattttggtggtaaaactacct

SEQ ID NO: 329247 - DNA, 868 bp, Cannabis indica
ggacaaactaactaactccaacaaaattaacatccccttaactaactatgacacgtgtacactacaccttaaactctaagactaagatgcaactttgactgaaataacactccagatttaagattggggacaatttcatttatttttgtgtggtattcatgtgtttagggtattttttgtgttcataaatgagtagtattttttttttcctattctaactcattttagatcgtgagtttcaaattttagattggatgtttcaattttgatgatggatgataactattgtaggtatgatgatgaatgaagaattgttcttgggataattgaagtaatcacagttcatttgtcttttttttttttttttttgctgagaaccattgagatctaaaacatataataaaaggattttaacttttcctttttgaataaatgatctgatatttttgaaaaggaaaagcaaatttgtagattttttgttttattaatgttataattgatttttatttttattcttttattaatcatttaatgatttaaaaaaaaaatatgtgaaccaatactatattgacacgtggtatttcacttaccaaatcaacacttacggaaatagtagtgacggaagtaacacatatgtaacttaaggtatttaatccgtcaaaatagaacctctagtatttaagtgtatgaaactgaaaacatatggtattttgccgcaaatatctcataaataaataaaagaaattaacagttaataaaactaaggctttaatttcaattgtttctattgattattccctaatatgattatatgcaatagcaggtttttaaggtaatttatagtcttctcagatatataaatctcaat

SEQ ID NO: 329248 - DNA, 944 bp, Cannabis indica
attatctcacttggtaatatgccttcgctcaaattaaaagagatctccatagttaaaacacacactaacgagtaaataatagtattatttagggaattaaataataaaatttatttgttttttatatgatagaaaaatataatctttcacaaacaaaaaaaatctaatatttaaattaagggaattttttatgtatacctttataagttaatttttattcatatttatacaataaaatacaaaattattgcacaaatatactttctttaccaattatacggattcttcccctctctctcacaacacaacatgatctccttccttagaaaaaaaaatagagctcggcaaactccagcaaactccggccattatcaccatctttgttggcactctcgctccaaggtgtattgggctcgctcgattagtgttgcctccaggctccagcagccttgactgtactcgctgctccgagatcgattccgactccaggtacctttctaactccattggggtttacgagttcataagtctacgtagagccaatgatctgagggtgttcatgttcttcgagctcaaatcggttaccagagggttcagtaaggccttgttgattgggggtggagattttggctgcgtttacagaggagttgttagggttttggggttggatgttgcgatcaaacagttgaatcatagtggcttccaggcatgttttcttcattccttttcttttgggcagactatatatacagatccatttatgtttgtattgtttcatagtttggtccatttcaagaatcttatatttgcagtaacttgttcacaaatctgaataatgggttggatgttagactttttatttgggcttacattaagttttattggttttattaaaacttgggttgattggatagttctttgctgtgttagcccatgttgttggt

SEQ ID NO: 329249 - DNA, 700 bp, Cannabis indica
tttgcggccatatcattgcaatgctaaatgaaagattttgggccctctctttctcatttttatttcactgtatgttttggttaaaatgtatgagtttattgatatagaattaaaatgtatgatgaatctatgtgatatgtgagtttatgttagatttagggttgggtttggtcgaatttgtgttttggacaaacattggtttttacgccaggtccaatgcaggcctgacatttttctgttgttaaatgagtaaatgttgaagacgtaggtctgatgtaggtttgatggtggcccaatgctactcatttttcttattttatttatttatttattttaggaaaaattacggcaaaaatctttaaaaagtttatttgatgcagataaatctccaacctcaaaaaataacaacagtagtccccaagctcgagattcttgtaagtccgttagtcctctttttaacaagtctattaatttctctctataatgtcacgtgttgatatcaaattgtgacataagtttctaaaaagtttattttattgcagataagttcatcatctcgaaaaattgtgacaacatcccaaagctcaaggtcctcgttagtccgtaggtacctactttaacggctctatttgttccaaaaaatatcatgtgttgattttttatttgtccaaattataattttaatcaaaattaatttaaa

SEQ ID NO: 329250 - DNA, 880 bp, Cannabis indica
aacttagatgcgcctatgttttactataatctaatcactacccttctatgtgaaaacgattgttggatacccttcaaaagagagttttagtctaattttataattatttattatttatttttataactctaattatttagaattacttataaaattttaagataatttataatgtgaaaaataatattcaattaagtacttatcaacactataataaaatatagaaattattttacaaatatacataaattataaaaaaaaattacaaaaacagcacttatacataactttaaatatttttgtgattttaatgattttatttacagaaaatacagtccttttatgtaatacttttattatttttatctcttatttttttttattattattttgatattttttttaatgttattttactgttatttttatatattttttttattatttttcctatttttatagtttattgtaaaaaattttaaaaaaaattaaaaataagtgtttgtacgtaattatacttagaaaaataatctatttataactatgttaatattatttcctaataataaaagaaaaaatggaaatttacatggtatactaatttttgttatttttctttacaaaaatgctattacacggtattttttacttttttacttgtgtttttttataagtttcatattgcagtatactgtgttaagtttttactggtattataatggtgtttttttagtttgttctactgttgttttgagcatttttgtgttttactggtgtttttataaaaaactacagtattttttgaaaaaaaattttactgtgtgtaaagtattttttgaaaaaattttaacctgaattccagtatttttgtaagctttcc

SEQ ID NO: 329251 - DNA, 1365 bp, Cannabis indica
tttattaaataaaaattaaaaatcacctaaatatcagttcaaatattaatggaatttgttttattattattttattatatataaataatattttattattttattaaataaaaattaaaagtcacccataaatttctcaaaaaccaagaattttagttatataggcacactttatatagaatagatatcgaagatataatcttgtttagtaagccaacattaattcttaacatatttttctagacctatctctttgattatatcgtaataaccgaagacataggtattatatgtctcaataagtgcattaacccttcagtttcttttctctctttcttctctcttatcactgtgaaaaccctttagatgtcgatggtccaaagtgggtttctccaatttctcaaccgatttcttccatttttctttcaaacctcctatttttaatatcataaaaaacataagattatcaaaaaaaataatattatatttaagattttgaggttaaaggaactatctttagaaaactattttgttagtttgaaaacccacgatggatgggtgtggcgacgatcagaggtagttcttaccatttggatatcatcttctaactcctaatgaggtattaataactctaatatatgtaatttaggtatattattttattgttgtgtttataaatttttttgtgttaaatagggattgtgtattacctacagtggtggtcggattaccatgagtggtggttggaaaaggggtggtggttatcctaaaatcaagtttgtatctatacctatttgttgtaatctgagttatttatttcttaatagtgtatgattaagtgatcacgagttttagttatcaggaaaaattatgaatttaagttttattttagtttgaaaaaaaagtgattttgaattttttagtatatgtcttgaatttttgtgggtatgttaattctatttttgggatttttaaattgagaaaaatatttatactttaattatttgttttcggcttagttgtttagtttgtttccttaattgtatttttatattgattgaatttataaggtaggaaatatgactagcttttctttttatagaaagtaaggcataaatagtaagtttaatgacccaactaacttctatttatctaactgtgtatacctgatcctttgtgagttttttaaaatatttgatcaaatatcttatgaagaaaactgaagcaagccttctctatctattacggaaacgtcgcacttactgctcacgattttgtaggtaagaataatttttaaaaagtttgcaagttagttgtggtcttgttcaaaccatgtatgagttgtcaataaggtgtatattgatt

SEQ ID NO: 329252 - DNA, 572 bp, Cannabis indica
atatggcatgaggtagaaagaagggggacgttagtacgagatttcctactatatatatatatatatatatattttagtgcaaatatattttataatatattaattaatatgtaatacacttgttgatcaatatttttggtaactcaataaacaaaaggaaatgagagaaattgaagaagggaaaataaaatagtacacataagtaaacatttttgtatttttgcggtgcgattgtagtttgcatttttgtcaaacgtgtgatgcaatgcaatttacaatttgaatcaataatcgcagttttaaccacactgcattaaatattacaaaaatattaatttttacaatataacttttttttttatcatatatggacaactcatatatttacaaagtcaaatcatataattaaatttaaggaaacatttatataaattattctcttattatttattattacttctaatattattattaatatatataatatataatatataggaagaagtttcaatggttacatttttattttaaccattatgattacattttttttaagccattggattactatt

SEQ ID NO: 329253 - DNA, 837 bp, Cannabis indica
aattagtcacaatttttttaaatttagccacaaatttagttgtgactaaaagtaaaattttttgtagtatatatatacagatatgaactactaaagataaaaacatacattaatgatcttatttttcagattatataatacattattacctttaagaattgtctaataaaatatatttatttaaatatcaaatataaaaatgaaaaagtattaatatacaattacataaaaaaaatcaaatatataaaatttcttccaaaagataagtcatcattattaaaatttattttgtctaataatatatatatttacactatgcatatgaattcatttgttttcatttaaagaaaataaattataaaaaaaatgaagcttacaatgttcaaaagctagatgagatgggaagagatatcaacaaattgattataaaagacttagatctccttctttgatagtaccatatatattataagcatgagattaattatgtaataattaaaagctatcaataatatttgtggaatactaagaaattgctataataataatggtgggagatattagagaccattaataatgaatgatttgatgatgataatttattttacatggtttacactacatatatccattttcataataataataataataatataattaataatggtggtaagatttataaaaaaaaataaaaagataacatatatctattaaaaataaattgatgataactttctttttttcatttcaactgttttatttgaaaaaatgtaaaactgtcacaaaaagtaattcttttttatattatatctattctgcataaaatatggctat

SEQ ID NO: 329254 - DNA, 545 bp, Cannabis indica
aaacattaggtattaatgccgcaatttagcctaataaataaccaatttaatttttagaaatgatacattttatattttattaaaaagaatgtccaatttttttttcttcaaaaatatcatattttaaatttatatatgtactatataatgaaaatatatgatattctcaaataaaacctaactgaaatttttgtttacaaaatcttgaattatcttgttgtggccttgatacataattaacaagcatatatttgttgggtattttcatatatatatatatatatatatataatatataataataatctgtagttcttaaatatttttatggatttttttaacaaaaatattgaaactattatttttacgttaattttacaggaacaacattatacacgttgacactaaaaattggttaacactcgctcattaaattggtgagatgaaataagagatgagtagaataaatagagagacacacaaaatttatagtagttcactcttcatgttgcgatggtaatagagctacgtctactttgagtttt

SEQ ID NO: 329255 - DNA, 699 bp, Cannabis indica
agagagagagagagaatagttgaaatgagaaagaaaagaaagcattaggattttatttagtcggggttataccaacggttacttatcaaatataaaaaagtaatcatgtaataaaatgtataaatcttatttttatcattataaacgattttaaattttttaaaaaatttacaattatcctcaataaatatagtatatacaatcattaattaatatatatttgaatcttttaaagaaatgaggtgataatgtatatgagtttaactcttatttcttattttgtgattattttaatgttttattttatatcttatattattctaatttttacaataaattatacatacaatagagtaacttattattacaataaattactcacataataaagtaaattacatcaatctctattatcattaatttatttaataacttacatttatatttaacttttaatttagtttaattaattttagaataataataataaattgacaaaaaaatataataacaaattaatttatcatataaaaataattttaaacattataagtatatcttatatttttaaatatatgagtatgagcacaaatatatatatatatatatatggaagaggtttaaatggttgcatttttattgtaaccatcatggttatattttttttgagccattagattactattaaatggttgtgat

SEQ ID NO: 329256 - DNA, 519 bp, Cannabis indica
actggagaagttctttgccccaacagatactattccaaataagggaaggcctaaggcccttgccagagtcaagttatactgttccaaaaaaagaaaagttatgcagttacactattgttaatagcattaggaacattgccactaacgaaagtacaacctgaccaataacaaacattgcgcgccagataatgggtagtattgttagcagatcgcttaacataacaaatatgaatattgaccaacgaattaaacaaattcagacagtcaacaataacaaaaccaaaacagattgcattacagcattactttcaagtgaagcaccactagcgaatctgtttcaataattgtgcgctgccaacctttctttttgatccaattcaacgtctctttgacaccaattgcttccaacaaacttggttgtacaaagtcgaccttgtgtaagcaaaaggcttcaataacccatccatcatttcctcgggcaatacctcccactccataagactgtgaagtagcaaatat

SEQ ID NO: 329257 - DNA, 715 bp, Cannabis indica
aaagtagtaattttgtataaattgttattttgaataattatatcaattatgaattggataattaaagtgatatctaacaatttagtcttatatgataaaactatattagttagttaaatataatattatcttaaataatattaaagagagacaaaatatttttttttatattatgtaatatttattttaatcctaatgaaataagagattagtgagaattaattaaatattatttattggtaaaataaataataaatcttatttgtaaaaaaaattgagaatcaattttgggttttaaaatatggcccacatgtgtaggtgacatcactacgaaaatcccaaaattcttaatttacaccatcaagtatagaattctcgatactctataaaactgttccctatacgagtgtcgcgaatactaggtagaataggcaacggtggcaaaatatcggtataaaacaattcctgacgatctaaaaccgttgagctatagtcgagacttcatcctcctcgaaaccaagataggattttcaattgttcttaagatcctcaaagagtcgagctctccgacgatctgtgaaatacagaaatctcaaaaacacataaatcctaaattaaaaaaataataattaagaagttatgagaaagagtggacaaaaagagtggtggctcgtggttgtgcatttgtcatcggacgagagagagagagagagag

SEQ ID NO: 329258 - DNA, 1329 bp, Cannabis indica
taataacacaagagatataagcaaatttcttagtcagcctgaggaggaagacgagggcccctgtgttcctccagcaccgcatccagcctcttcttcttcttctcccgtaagcgagccagaacctcttcaggcttagggtaaaaatttaggcaaagattctggtcattagctgtctaggccatgaaaaccccatcgtcaaagcatttcttgcaatattgacaggtaattggggcctagagagcatccctcttcgccttagccgcttttttttcggcccgctccttgaactcgcgaagcctcttcacttcaacggtcagggtagctgttgtttgcaagtctgcctgatgcggctcctccaaagacttaagcttggcggtcagttcctagactgcctcctttgagtcccgaaggtcccgcctcgtcgcagccacaatctcatccctggccttcaacgcctcatccttagccttcaacacctcccgatggctctgctccataagggactccttctcggctttctcacggattgctttcttttgctcctccgactcctgaagactctttatggcctcctccatgcccttgaattcggacatggtgtatttatgatcaatcagcgtcttcgagagacgaccggtttctgcagcaatctagcaaccaacaaaaaatatgatattaggcaccaaaaagaaagaggcttgcaaagtctaacagataaggactcacctcagtatgggccgcgcttacgtccttgatttgatacacaggattggtagaggcacaggtcgcatatctcttcattgggagttaagtcaggccgacaacgaagtggctcattaattctgaagcgaagggagccagggtaggaccgatgaagcggctaaaccagtcagtcaagggatccaaattcaagtctcagacgttcccggtgtattcgctatgagtaaatctatcatgggcatccttacgaatcttcttcagggcgtctacctctgcgttccccttggtatactcctccgtggcataattgtttttgacaattcggagctgagtcctttcctcatcggcatggatggggttaagatgatgccaagaggcacagtatactcgtccacctcggacggaatccctgaattagaactggaaacaggagtatctacgcgcctcgacctcttcttcttcttcttcttattcttcttcttcttcttcttcttcttcttcttcgtcgtcgtcccctaaaaagttgttcgaggggaggaaccaactggaagatatataggcagagtgatccaaggggatgggtatgggaggaccggaacccatccgaga

SEQ ID NO: 329259 - DNA, 876 bp, Cannabis indica
aataataagctagtataaatgatattattttaaaacatttaaataaaaagtttatttaaaaaaagaaataaatattaattaattaacataatgtaattattcttttttttctatgtatttgcatttactaaaaaaaatactttaactgcagtccaaatttttttcaaataaaaaaattaatttttataaaaccaacaaaataatgtgaattttttaagaagtattgtgtgttttaaggtggttattgtgtattgcatgacaccataatattaaaaaggggacaaaactacttacacaataaaaaaaaataatatttatcatataaaattactacattatcaaataaaatgacaaaaaatacaaataaataaagtaaataaaccggctttagccggtataggttgtaataataagactcaaatgtgtcagaatgtattaagtgaaaaggaaaaatattgttttttattataggtgacactgcgtcacttgttccgcatgtggtacaagcagaacggaatcacttgccataatatataatatctatatatatatataattacccgttaactaaagccaatatctatccatctatttcctccttccatctatttttgattcatcttaaagcaaatatctttttaaacaaatatctatattactattttctccttccattcaatttttgggcaaacgattttgtgcccagaagtgtgaatcacggattggaatccgttgtacggcaggtaggtcccacgttagaatagtttttttttcaattatttaattaagttggcaaccggttattctaagtttgttaaccggttgtacagttgtttttttaattaaaaaataaaaaggtacaattaaattactgtt

SEQ ID NO: 329260 - DNA, 842 bp, Cannabis indica
tttgtaccttgtatggtagtagatatatgtgtctagtgtggcttgtttggtaccatttttgggtgttcgttttggatttatcctgaagtcgatgtgaagaatcagtaaaattttattcgctccatatatgttaaagataagctttttttttaaatactattattgcctttgatatctttggtggaaatgttatgtcactttgacatatctcacttgcaaggctgttatgaaggaatcacatagaattaatttatcaaataagtctttctttaaaagttcaatttgagttttttgtaatatagtttatttatttatttattgagttctttagaactcaattaatagaatgtacttattacattttgataggagtgggtttattgattgggagttagtagcttatagagccatcaaaggcggtttcattgtttaaatttttatgcttcagaagagagatcagaattagtgacatttttattagtggcatatttttttaaaaatgtcacaataatgatattttaatgacctatgttaaaaaatgtaactataatgagaataaataatattttaattagtgacattttttttaaaatgtaactattgatatattttggtgacattttgtgaaaagtgtcattaatttgtcaatattaaaatttagtaacatttttaaaaatgtcactggaataaattaatagtggcattaataaaaatgacaccaaataatagattagtgacattttaaaatgccatctaactaatcacttttagtgatatttcaaaagtgttactagtaaaaaaattagttgaattttcaattttaatttattttttgaagttat

SEQ ID NO: 329261 - DNA, 753 bp, Cannabis indica
attaaaaaatgtatgttaatatatatttagttttaataaaactaaatatttttacattcataccatattatgtacactgaatttcaaatgagatgagaataattattttaataaaaaaagtcattaatataaattatcttgctaatatatacatatatatatatattttataaaatcataccaaatatatcatttattcagttattaaaatttcattttaaatcatatttatgtaatttgttttgattaattatttttatttaattttttaatttaatttaaatctacttacacttttatttacgatttttgctaaaagttgtgtgatttacttttctaattatagtttgggcataagggtattaaatggttgggtattaattttgtaatttatttaatccttaaaataatattaatgttatattttaggtggtcaactaatttctgttatgtttttatttatcttatttaattctgtttaaattttattgatataaacataagatatttgaattttatatattttcctaattaattttggtgatattaacttatagttttgttacataaatatgataaagtattttttaatattttttattattcgtattttttaaatataattataattttttgatgagtttttttcagttttaacaaaaaaaattaacaatattacataaatattttcagttggccaaataaacaaatatacagcccaaataaaaaaaattatacaaataccacttacac

SEQ ID NO: 329262 - DNA, 1261 bp, Cannabis indica
cttatggaaaatattggagagagcttaggaagatttatgtgcttgaggtcttcagtgtgaaaagagtaaattcataccaatcagttagagaagaggaagttgctaagttggtcaactccatatctcatcattcctcatcttctcctggtgctgctgttgatcttactaagaagttgtatgctcttacagctagcataattttcaggactgcttttgggacaacatttaaagatagtaaattttctgaggagaaattgtataaaatacttgaagaagttgtaatcagtgtgggaagtttctgtgcagctgagtactttccatatgtgggatggatcgttgacaagctttcgggcttacagcgaagacgggacaggacttttcatgagatggatggtttcttccaaagggtgattgatgatcatctcagtccagggagagaaaaacaagagcatgaagacattgttgatgtgcttctcaaaatagtgaaagagcaaactggttttggagctatttctctaaccataaacaatatcaaggcagtcctccttgtaagctcttttgttctattttacaatttaagagaagaaaaaaagaaaaaaaaaaactttttgtagccatttacttttttcttccttcttcacagatagaaacataggcttcataactaccagcctttttgcaatgagctcagctcagtttcaccaatcatggcttgactactaatgtctgttgttgcaggatatgtttgtaggtgggatagatactgctgcaattactatggtgtgggcaatggcagagctagtgaggagacctaaattaatgaaaaaggcacaagatgaagttagaactttcattggaaacaaaggaaaagtctcagaatgtgacattgagcagcttcaatacctcaaaatgataatgaaagaaactcttagattgcaccctccagctgctataattgttccaagagagaccatgtcacacttcactgtcaatggttatgatattaacccaaaaacaatgattcaagtgaatgcttgggcaattggaagagaccccaacagctggaaggaccctgaagagttcatcccagagagatttgaggatagtcctattgatttcaaaggtcaacattttgagctgttgccatttggatctgggagaaggacatgtcctgccatgtacatgggaacaacatagttcaattaggccttgcaaatctcttatacagctttgactggaaattgcctgatggaatgaaaga

SEQ ID NO: 329263 - DNA, 500 bp, Cannabis indica
ttattttctatgtgggttgttcctatttcgagattaaattgttttcattttcaatatgagttgtttctatttcatatacacatatattttgaggttaaatatttctattttcaatgtaagttgtttctatttttatgatacatgaggttaaatgttgactgcttctatttcgcaaactatagttttcatttgtttccatttttatgtgagttttttttttcgagtttaaattgttcacatttttaatgtgagttgtttttattttttatgatatatgagattaagtgttagttgtttccatttcacaaattatagtttctattttaaagttaaattgtttctattttttataatatttattttcatttcacacacatatatatgcggttaaatgctttcgattttattgttctcatttttaatgtgagttttcattttttataatatatgaggttaaatgttatagttgctctgtaacaccctaactaacttaggcgtat

SEQ ID NO: 329264 - DNA, 638 bp, Cannabis indica
tttaaaaaaaaaaaaaacgaattgaaatagtgaaaaatagtgaaatgggagtaattaacgtggtggttagtggagagggtttggagtttctctggtttgggggtttttgggttggctgatcgaatgaggaagacgaagagttggggaggattataaaccccttattgcgtcatttatttgggaataaccgacaatataaggacacacgtgttattattatcacgtccttatggcgtcggttatttctaaaaactgacgtcataagaggtttacaacctttcagtagattaacaaccttatatcgtcccttattttatttattttttttttttgagtgtatatcgtcccttattttaatttctaacaaaaatatcaaattttaaagttcattgttgtagtggtgaagtaaatgattgagtctaactaattcaaataggtactaagtgtaataaaaatccttacaaattactcatgagctatcaagaacaaaataggtaagtttttattttttatttatgatatattaatagattaagggatttttttatataaatgtacaacaaaaacaacataattacaaaaaatgtgcaaaaaaaaaaaaattattttaaagaattatacattttgaaaatttatta

SEQ ID NO: 329265 - DNA, 604 bp, Cannabis indica
aaattactcttaaagtttttattttattttgtaaaatatggccacataggataattttttagtaacttgtcattgtcacgtgggcaaaattaagacttaacgaggctggacagacgacaccttgaaaatgtaaacggaacagtactttggagggtttttccaccaaaatatgaagttagatgattttttgtaagtaaattgatagttggggaattttactgcaaattactctttttattattattattttcgaaagatatacctctttgccacgttttattttccaatattccaatactaaattgaaaaagttatattcacacgtgtaatttaaattttgaaatttaagagcatctctaaaatcttgagtaattactttctttgtaattttttttaattttaaaataacaactctaacaattcataataaataccacattaaataaatatactttaataacctgtaataagtataatatatataatttacaaattatatacatataatttatgtatattgttcacaaattaaataatatatataatgactattattaaaaaaatttaattttaaaaaaataatttacggcataaatatttaagt

SEQ ID NO: 329266 - DNA, 1896 bp, Cannabis indica
gttggccattgggttttgaggcatgatgagttggcgcctcaaagcttgagtgttgaactcgtccaccaagtcatcggctttaaaaatcacagtgctcagcctttggagccaattcttgacttggttgttgtgagactgtttcttctcagcatccaaaagcacagcttggattgttgacatggtacctttgagatattcaagttcatccttcacaccccaaatcagagagatgtgtttggcagcttcagatcccaaaccaccaatgattttgtcagcaatcggagacagaatcaactcagccatggcttctcaaacttttctggtattaaagaagagttgtagtttgttgaggtgttagagagtgagagagaaagagcctataaaaatataaatgatgaatatgtggttcacatatgctggaatccaataatactattaatgatcttcgaattttcactattcatgatcatttgtcacatgtcgaacattgaccataattttactaataaaataattttactaataaaatatctgaataaatgtaggaaaatttataattttacgtactttatactacttaattatattatatgtacttatttacaaaaaaaaaaatatattatatgtacataaaaatttatttacaatgtattatacattttattaattatgagaaacatattttctatttcaaaaaagaatatatttttaattttatatttaaactatatataataaaaataaataataaacatataaatatatataaaaaataaataataaacatacattataaatttatatttaataaatacatatataatatcaacatatcatcacaaatattatcataaaaattatattaaattaataattaataaacatggtcaataataatataaacataatgtttatatataaggtcacatttaattacaaattttatttattttttaaacatatttttcaataattaatatgcataagtgttacattttaaattatttataaccttttaataaataaaataaaagtgtttattcaaataaatacaaaaacttaagtgttttatttttaaaattattatgactttttaataaacaaattatattattatcataggttatatttagcctatgtttcgggtctgtaaagtaagcattttctcgtctattggtgtcttttggagcggttttacgcttgattttcattgtttcaggttcccggggtgtcaaagttcaaattcagtcaaatggtgaaaagacgggacaaactggcaaaaaattggaaaaatctgctcgagatgcatcagtagtcgcgaccaccaatgagccaggtcgcgaccctttttcatggtcgcgactctggtcgcgacttcgagattttggcagaacctcggattttcgagttttgcctgtagtcgcgaccagcttaaaggctagtcgcgactaggtacggaaaacgcagttttgacctaattttgatttttctctcaattggaggcacacctctcatccctatataaggaatacgactcagaaggtcaacctaagcagaaaaagacctaaaaagtggatgaaggtggagaggaagctatcttgaagacccggagcgatatcacttctagtttctttcttttacccttatttctttcttttatgtttagttttgtttcagatttaatcatggatgtttttattgtttttatgagctaaatttcccattaagggaggatgatgaatgttgtttaagtttatgcctagttaataaataattgccattcctccatcttgtttgtgaatactatctatatttgtgtttaattccatgtgcaagtttgatcaccttttacatgtttaatgatctcaattcgaaatctgaaaagtgagaattgag

SEQ ID NO: 329267 - DNA, 880 bp, Cannabis indica
gcagttgaagaattcatttcttcaatcgacattcttcttcttttacactcttctctctaagttctattagacgcacaaatctcatcattccgatcccaccatgtcaaataaccaagaaagagagcatgacaatgaagctcctgcctagatcaacaatggcgataatcaaattcaagcacctgatattggaacgaatacacaaataacaagatctagaaatcctattgaggatccctctgatccttattatctacaccacggagacaatcctggaaacgtcctagtatcccaattgctcactgggtaggacaattacattgcttggtgtcgagcaatggaattggccatttcagtcaagaaaaaattggggttcttgaacggttccatacctaaacctcccatgtctgatcaaacactctataatgcttggattcgcaacaacaatatagtgatttcttggataatcaattcggtttctgaggagatttcttccagcattctctacaacgagtcagctgctgcaatatggaatgatctcagggtaagatttcagcaaaggaatggtgcacatatctacaatctcaggaaaattttgatgaaacttaaacaagaaactcagtccgttagtatgtatttcaccaagctcaaaacagtgtgggaacaattgtcaaacttcagatctagttgcacatgtaatgcctgtacatgtgggggagtcaagaagttgcaagaacatcacaacatggaatacatcatgtctttcctcatgggattgtccaatctctattcacaagtgagaggtaatattcttgttatggatcatttacctgagattaatagagtttttcatttagtcacacaggaagagaatcaaagaggg

SEQ ID NO: 329268 - DNA, 2199 bp, Cannabis indica
tctttttgtaattttcacaactgacattgacattgggacagtaacaagaccaattttccatgttgcaacttcccccaaccccgatagtagcatgtatatcaaccaacacttccattaacacaacccctcctttgtttaatccattactaacgaacagacctctgattacaactactcaaattcatacttcaacaatatacaaagaaaatgtcccacttgaaaacttaccaaaactagggttgagcataaaattcagaaaacctaaaaaatcgttcaaactgacctaccaaacactgttggaaaagaaaccgatggaaccgaaacttgaaaaaagtactaacggttaaaattgccattgaatggtcaggttttttaggtaatagaaaacgaccaaaaaaaccaaaatgatcgttatacatatatatatatatatattaatttattaaatttttttacttcatgtattgtacttactaataatatattattattttataaaaataaaaaagaaaaaaaaaaaaaattaattttgaaaaaattaatttgtatgtttgtagttgtaaaatataaaataatgtgtttattgaataaattggatcatattttaaagaaaaaaaaaagaagttcaatttgggcagtttaaactgaccaactgaggttcaaaacagtcagttggattggtcggtcagtttttagattgcaccaatccagaccgaaaaccaaattctagattttttatatagaaaaaagccgaccaaaccgaccgatgctcaaccctaaccaaaacgacaatgcgaatcactaacaatgagggaattccttaaacgttgtcgcaaccaaaattcaattgttgatgcctctcccttatcactaggagaaggtccaagtcaaaatgatttctatgatgatatggattcagatggctttattgataactctgcggagattgttttgcaatcccacgattcattataaaaattttaagttggaatgcacgaggttcgggaaatccgagtgcattcagacatcttcaattgcttgttaaataacaatcgccccatattttattttttatgaaaataaaacttcctatgaactcaatttcccgttttcgacaatctttaaaattcaataatggccttgaatcacctcgaattggtctcagcggtggtttgatgctactttggcatgacaatgttgatgttactcttcttaattataagggctagacaatattgattggatcaactcaaagattgtgagctaaggccttttcattatatagcaaaggtattacagaaatagccaaaggccatttaaaatataacatgtgtacatagaagggaatattacagaatttcatgtaacagaattattggaaaatcatacaacaataaggtcttccttgagattgcatctattgcattccatgtcagcagtgtccttttcctccatatcagcatctttataattaatttctttgacattacctttgctaggccttctcttttgaggcctcattcgataaaaacattgcatttttccgtgatggaaggacgtacggagcattctagcaaaagacatttatacatgatatgatctataaaattacatttgtatgacatcttatgtttcttacaaatacatttgtatggcatcttatgttcgcaatgcttcataaatgacaaatactaagtttaaaaaaagcaattaaaataagattaaaaagatggttgaatgaacacaaaattgtataacaaacaatccttgctcgatcgatacttccaagctagatttaattcaatcgtcaagagagtgttagaaatactgtaaactcagaatatagccctaattaattcatgagaatcaaataatagaatatagattagcggaagcgtaccggagtccatagaatcgatctttgattggtatgatcttccaattttgcatcaaaacctttgaaaccttattttcctgatgatggggattcaggaactctgtaaaaatatgatacgatgcaaaatggggacccatacctgttatattaccaacagacaaacctgttggcaatatttttgactatttctatttggcccctcatcaatatagaaattgtctaattggtatccacatattaaaatcatgacaatcatgcccttaagtcataaactttattccaaaatagaccacataaatttg

SEQ ID NO: 329269 - DNA, 1454 bp, Cannabis indica
actatatatatatatatatatatatatatatatatacataaagttagagatgagactatttgaagttataagcttaaggtttttattgtacttcaaagtatgatgattattctattagtattttatataagtgaagggatctagtaacttggggaagcttattatggtgattttgatattcttatcaagtgttgacacttaaataaattaggagagaagcttattgtctttattgtctatcaacacttttactaatctttctatgggtttatttatttatttttttttgtaatactttgtttagctctccatgtgacggaattagatttgtctctcaaaggctagaattcgatggtgacgagactggatttatgggctctatttaagcattgccacgtataggttcaaggtaatttttattatttaatatttgaattctacaattttcttgttctcactataccgatgaccatcaattgcagaaaaaagctctcaacttgtgaggccttctctgcaatgacttatttataaagtaaatccaaatatttgtttatttgtacatgaattattgattttgcttttttatctctaaataaattcgttggaggcacaaataaccttgaatttataatgagccataacaaacagtgaaagaaaaaaaaaaaactactgccttctataaatttgattaagagaaagagatggtggaaaagtgagagatgtgaatacgtatacttaaacctgttttataaatattgattagttgtgcaaagatttaattttttttttacttcaataactctctttctgtaggttacttgtacttcatatttgtttcataaagtagtattaacagttggaagaattataaaaccaaccatatgactataattacaatatttctatacgagtctcgttagcttgtgagcaatgatatagagctactttaagaattcaaatactaacactagcatattgttcacaattcagtgattaaacttttttagctaattagtacttagtcaaatattgtcattagtttattcaaacaacttagctatggagttaaggctggaacaaatatggtacaagtgagtgttttttcagaaaaaaaactttatttgaaatttgtgtggctctaatcaaacttgcttctcttatctcacttccaatacaaaagtttgataaaattttaaagttatgtttatttcattaggctttggctcccctctctctctttctatttttaatctgatattgccttttttttttttaggttttcggtggtagggtggtcgtggtgtcgcgtcgcggtgctgtagtggtggtgtcatggtgcgcggtggtgctctcccgtctctgaaaaaatttgagattgttgtaaatttgagatatgagatttgtttatgtgaaactgaaaaaaattatgtgaaattgaaaaaattcgtgtggca

SEQ ID NO: 329270 - DNA, 886 bp, Cannabis indica
ccgcccactatgcataggctttttaccattttattttttcattattttaatgccacacaattctaacctaaacctagagggcattctataaatagaaagtgttggcttcaggaaactcataactttgcacattgtttccttcagaaaaagcctacacgccactttctctctcttttcctctctacaatttcgaaacccttgagtgaatgagtagtgcccacacacatcaagtggtacctcaatcatagtatgtaagactgtggaaaatcagcatcaaagaaggagagaaagagatccagattcagatcttgattatgctctgctacagaaaggaatcaagggctagagatctgaatggaaggagtcataatattccgctgcacccaatgtaaggttttcttaaactcttatgtgtttatttcattgttttagaattcatattaggatgttaataaaacatacttggtagtaaatctagatcctggtaaaatatttccaacaggacttatattgtcttggacggtgtgcttgacacgtttcccataggttgggcaactctattgattggagatctccctgcacctgagactgttgttactgttgccaagcactccaagcctaccatggctatgacaaaacaaacgtgacgtagggcacctcctcaggaccctcacattgccaagttgatgacgagagggagggtctgtcatgtagaagaggctaaacaaccatgggatggccaggtagaggaacttgtggctgagcaacccatggtcagccaggatgaggagacctcaactggtctagatagtgagtctgaagctgagtaggctgagcctagtgctggaccaagtactactaggaggtagtgttgggttttatgccc

SEQ ID NO: 329271 - DNA, 1269 bp, Cannabis indica
tgttgatgcaaccattgataaaaactcaagaactatagtattggagctatactttcgaaaatttcaaaatagaaaatatcatagcatatcttttcaaaattaaatattaggtatgtattatatcatacatagatatcgctaggtacaatatatataccattagactatacatatttaattatgaaaagatattagtcatcttcttatagaaatttatctaattggaatatatttacaagaacaagcttgagtgttataaattattagattaaatagagatacaacaggattagatattggccgtctatctatcattgatgaagaacttgttttaaactttctattattataaactgaagggttcacacacttcgatccactcatttaatagtataatattatatctaattttaatcttttataatctattagtatacttttaatataatattaactaattttcaattaatatattaccttttctaattttctacaaattataattagctattagtaatttttttagtttaatatatttatttatacttgagtaataatcttataatctcttattcttataattatatttattagcttttaatattagtatgtttttgtattttttctttttgaaggttactttccgggggttcaagtggagtgtattgcgattatgatgcctttagattggattttttctctaagttatactattcatatagttgaaactgattgcctttcaactgtgtgtgctttttataaaagataattatttttctaatgattttggatctgtgctagatgatttggcaagtttgttgtcacgacccaagccctaggccgtgacacatttgtaatatccataacttgggtggtcaaaagtcacactttgaaccttgtaggaagataaaacttataaatgatccttttatttataacacaaaatactaatttaaaataaccggattaactcctatattaataagaaaatattagtaacaaaatcaggaccactcatcaatataaaagaacaataatatcctcacagatatgcaatcaccaaatagatagatttaataagtcaataaaataccaaaataatacctagcatccatcattcctcatttctaacaagtacataactaatttaagtcatccagactatccattttagctcaattacaaaatcagtttcattaaaagatttaagagtagaataagactaaactaataacgacttccttttccaacggtaccatcctcatccac

SEQ ID NO: 329272 - DNA, 550 bp, Cannabis indica
atagagtgtaatttcctctcaaagacccttattttagcaaattagatttacatttgggcctattgaacctattcaatccaattgtaactaaaatatgggctactttgtaatttaatatattatttgttttaaacaaaaatattgttgaatgaaatgtgggaaaaagtttttgtgatttgatgaatacaattgttacaactataattatgtttatacaatcaaattatgcataaaataattaattatgtttatcttagtgattgaaacggtgtgtttttggatcgcttggttcgccaagattgcctctcacaaataatcatagggtccattttctaatagcatatagtatgatttatctttgcggtttggattatttcgataatttgttatagattttgattgagatttaagttgttctgttggttgctatgaaagtttctatgtgaatttctgtaaaaatgcataaagaaaaaaaaaactgtttaaaaatataaaaaataaaaaaatactttaataatcaagtatctaatgacactaatctacaagtgat

SEQ ID NO: 329273 - DNA, 1148 bp, Cannabis indica
ttacccatagaaaatcatccatatatatatatatacttataattattacatattaattgcccaattccaattctaattcattcgttagctatatgaaaaatttaaaagtttaataaatatgggtatgctcttaatgggtataatagatttaaaatcattaattaaatattaaaaaattaatattttctattttgttattctctatatagttgtgcagccccatatcatttgagaaagggcatgattctgatattgtatagatatgatactacacatttaaagagggcttataatattatctatatatcaacatcttattaattagtccattacttgagaactcaaaagttaaatgtgttttatttggagtaatcttgggatgagtggtctcttcatgggaagttttctttgtaagaacatgcgagtaaagacaaaatatattagaaataccgtgttagtttgtaaacagttaaagtgcgtactcatgtataaaaatcataagtctgaatttaaggacccaataaaaatttaaaacgaggcattgcaaaccctaacttagaaattgagcatttggaagtgttccaagcaaaaatcaaactggtcaatattcatgtaagataagaacacgattgagaatgttcttgagttaataatttgcatgtagttattaattaattattcaacaaagggatatagattaaattagtaattaaatttaatttaaagtagtatatataatagtttgaaggcatatatacatatagtcggcggctcaatgtaatgagagggaatgctaagctggaaaattaaaaattggtatgatctgatcatgtgtttcgatctttaatttctctctttgatttgtagatcatatcatatacatacagaaaagccttctttaatggaaaccttttacgactatttgggggacaatttttttttattaattagcctacccattaccacatctagatttattattaaagaagttataatattattaaggacctttttaattaactggccctaacctccagtacaatcacctatttgtggcctaattttatatgaactattcctttaaatataaatatatacataatatagaaaaaaaaaaaaaaacaaacaacaacaacaacaaaaactaa

SEQ ID NO: 329274 - DNA, 1131 bp, Cannabis indica
atttaataatttttttttatgcattttaaattttattctattctattcctattccaattctcattcttattcctatttatatttctatattttcattcttcccaaccaaacgccaccttaatgtaaaaataaattataaactctctttatttatatataagttactaaacaccactactagtgcttactcttcccctaaacaaaaacactatctattagtgttacttactcctacattgctactactactatttgtttttttatagatttcaatcaaacaatattaatctaattactaaaattcattggaacttttagttccagcagcaaaaaaaattaccaaaactcattggttaaaacattgctacttttattactcactacattttagtataaataagaagaatgagcaccctctcagggctccaaagaacaaaataaaagagatggtccttttttccattctatgtcatgtgaatgacacatctcgcatgcgagacgccacaccacccactgccaccatttcttatgctaatcattcattcattccctataaacaaaccttgtgtattttggtttttctaatttattttatagtttgattgaatttttttattaacgttaaagaaatatatataaattaagagaaagagccaattactggaggtttttaataatcaataaatgagaaacaattagaaaccaagtaaaacagatttgggagacccacagtgagactagttcctagtcaaaaagcaaagcaaacaaagcatctccattctccattttccccaaacagtgaatagtgtcaatatatattgtgtgttgagttgtctttaatttgacttttgagtccccctttcttcttcccttttttatttaactttcaatgaaagatctccaccaaattagaatataaatccacaccacacgttttcaatttcagaggaaaaatttgtcaaaactgaacagattatttatgccctaacccaatcatataaattaacttaattatacgcatcaatcatctaattttttcttccatttcctaaaacatgtatatttacagaattatttcacaaatacacaaaaaaaaattaagaacatacaattttatgaaattttaaatat

SEQ ID NO: 329275 - DNA, 555 bp, Cannabis indica
gaagcttaaacccactcaaattcttttaaatccaaaattacaaatgatgctcaaacatagatctcaaaattcttttaacgtgttgtttgagcactttacattcttaaacataataatactggggatgtcatgatttttgtaatgttgttccactgttgtttggtatgtttaacaaatactagtttcaaattacacaggttaaatcaaccactgaatatttgtttcaggtaatcagaatgaaaaaatatggacagtagacctcaaagagataacatgcacgtacaacaggttattacacaagctctattcagattactacatcaagagaaactgactagcaacaagttctattcttttttatgacaaggttcattttttcttttttcttctctaaacttttatctggtaccataatttgagaccaccattgctctgccgctagggaccaccatcggagaccaccattggacaccactatcagagaattactattggagaccaccattggagacttccatctgagactaccattagagtgttggattttatgcccta

SEQ ID NO: 329276 - DNA, 993 bp, Cannabis indica
ggagatcctggttcagatctgttattactctgtgacagaaatgaacaaaggttagagatactgaaacgaaaagagccaatactatttccgctactaccaatgtaaggttttctacaactttatatgtctttaattcattgttttaagaaattcatgtttcgggtgttagattatagaatataatcaaacatacatgttagtaaatctaaatcctgataaaataacttccaacatgcctagccattcccaacattactgaagaatgcaaagcgtatgttagatttgatatcttggtgaagaaattgccttcaagataagtacaaaaagcggttaccaatgtgtaatgtgaggtataaagccagatgtaataccacgtcacaacaaaccatagtcagcacaaacccttttggataaagacaaaggcaattatagtagtttttttttttttgtatccatgtgttgtaattatgaaacaaaaggattttccatgtttcaagaatggttataaagataatatcagtggagaataacgatgacccttaaacacctttaaataaggggaaaattcccaaattaatgcacgataaatattctgaatatgaagagaatatataaaatataattgtactctgtaaactcattaattctccagaataaaatggattcgtgaactatgaagaattaacttcaaaattacttaaaaaccttattgtttagtatttattatcattattatttttgtcattctgaaatatatttataaaatttaggctcatctattagttaacgaaaattggcgttcacacatatgtttatatatatataaaggattgaaatagttatagttcatattgtattactaaaaatatattaatatatattaattttaagagaaatttacggcgaaagtccccaaaaagttcacgttgatgcagattagtccccaacctccaaaaatagcggcaatagtcctcaaggtcacaggttttattt

SEQ ID NO: 329277 - DNA, 974 bp, Cannabis indica
caaggtatgttgttattttaatttgttctagctatctttttaacatggctttcgaaaacagcaggggtcctgagcgtcatatgaaggatgtgtcttatcgacacgtaccccatctcaaatcactatctcaacatcattgtaagtgactgttcttgcatacacttcttcctctgggagagaaaataaccctctcataacaatcaatttctattaaagaaagaaaattgaacaaatgttagaatcctatcgaaaatacatcaacaaccaatcaaaagcctatcaggaaatcgatagagtacaatagaggaaagaaacacaacttgtcaatgatatcaacaaaatttaaacaataaaataataacagaaataaaatgcaaacttaacaacaaaaaatacaatactaaaccctatcgagaacctattgagaatccatcaataataagtagataatcaacaaacatgacaattaaaaaactaatttttaatcctacaagaacatgtcgacaactaagcaataataaccaatataacaacagcaaaataaaattctcactcttatcaagaaccaatcgacaacctcttgataatcaattgataataaattataaatatatgttacttaaactattgataacctaacaagaacctatcaaaaaatattcgataaaggttttctctgactttgggacatttgcgtcgagaacccatcgagaacatatcgaaaaaagcttcgagaataatacgaacacataaaatacccagaaaactagatctcattatttcagcaaaaactatataaaaactaagaaaatacaaacaacaaccacatagatctactgacaccatttttcatttttttgaattgttagaatattagttgtaaaaattagggtaaattatatttagtatagtttcctatttgtatttagtagtttcccatttagtctcctagctttgtatataaatatatacta

SEQ ID NO: 329278 - DNA, 580 bp, Cannabis indica
ttatggtagttagtgagctgtcagaagttagttagtttgttgctatttttaactgattctttctgcaacaaaattgtgttgctcatgtgtatataaatactttgtacttcttgcttttcaatcaataatattcaatttctttctttcattctctttacttgatttctctattttctcttttgtaaactggtatcagagccaagaagatcttgagctccttcttctctttctttgttctttttttgcatcctgccatggcgaagggagcagcagctcaaactcgaagcaataattacgttgaagacaactctgagaatgtcaatggatcctttgctacaaattcgaatccaagatttgatgattcgagaagcctgtactatctttcacatggaaatcatccaagtgctatgctcgttgcaaaaatactgactggatttgagaattatagctcgtggaagagatcaatgctggttgcaagaaataaagtcaagtttgtggatggtaggttgccacaacctgatgaagacgatgaagatcacgattctgttgggttttatgccctaaataaaactctatttca

SEQ ID NO: 329279 - DNA, 1137 bp, Cannabis indica
attttggtttgttcatgccatgccaccaaatatgtttttgtcactaataaaaaattttcattgaagatcgataagttggtattttgttaaaaataaatagataaattatatttttttatataatgataagataataaaaaagaaaaagtgattacgaataacgttaagtaaaataaagtagagagggaaacttctttattttttggattaaaactatgtatctctcaatttgttgtattcattaattatttatttttaaagtaaaacatatgaacgtatggtattgtttcaataaaaatgaggaattttaggaccattaatgtttttttatcacaagcttgttaagtgtcttgtaactggtgaaatttagtggtgagatgattcggaattttaaattgtattcaaaatttaaagggaatttcattttacattcttaaaaatacattatatatgaaagttaggttttctattaatttgtataaaataatttttttcttctcctaatttttactctttgtttaattaaaaaaatcaactctctctgaatcgcatctctctctctcaatcgcacttttctctccttctctatctcactcaactctctcggctactctttcacaatctctcaactccctacatctctccatctctttcggtagaggagaacccgaccattcaagaatcaagaatcattcaccctaataatgaaaaagtatttttctaacaatttcttaaatattgagaatagtatgtagtctgtttttatcgtatgtgtgcgatgtttgtttgcactgatattattttgttgttttaatgtttgaaaggttgaggtctggttttctcgtggttgttaggggttttttgtttttttgttttttttttcaatttatcgatggtttgttgataatatattgatatattatcaatgataagcaagccaagatcagaaaagaccattatcgatagtatgtcgataatttttagatagtttatcaataatttgctagaattaggttttctcattatttgtcaatagaatatcatatgtcaatagagtgtcaataattttgttaaattttttattgccaagcttcacaattgtttgtcgcatgacatttttgtcgatgggatgtcgat

SEQ ID NO: 329280 - DNA, 776 bp, Cannabis indica
ctcactcaaactaagtacattgaggatcttctaaggaaaacaatctgcagcatttgaaaccatgtccaacaccacaacaactgggaaacctctgtctattgatgatggaaagaagatgaataatccaacagtctacaggagtctcattggtgctctccaatatctatgtcatacacgtccagacataaattactctgtaaaataccttagccaatttcttaaagctccaacagacacacattggaatgcaactaagaggatcttaagatacctgaagggaactagaacacaaggcatccatatttgttgtagtgacagaatgaacatcagtggctattccgatgcagattgggccactaatcctgatgacagaaaattggtaggaggttattgtgtttatcttggtgatactcttgtgtcatggtcttccaagaaacaggctgttgtgtcccgatccaacactgaatcagaatatcgtgcccatgctcaagttagtgcagagatagcttggatagaatctctacttgaagaacttaagtttcctcagccttaaaaacctgtcacttggtgtgacaatatgagtgcaagtgctctggcttcaaaccctgtatatcacgctcgaacaaaagcacattgagcttgatatacactacattagggacaaggttctcaacaagaaattggaggttcgatatataccatctgcagaccagattgcagattgcatgacaaaggggctgtctcacgtgaagatttcagtatctcatctccaacct

SEQ ID NO: 329281 - DNA, 830 bp, Cannabis indica
aaaaaaaataatatatatatagagtaattctaaaataacccaataactattagctacgggaaagaatttattatttcttacaaatcaaccgatagatattacaatacgagaggaaacaaacttataaagaaaaagcaatgaataactagtttttttttttaaattatttattagttgcaaaaactaaaaataagaaaaatgatgcttaaatagttaacacacaacaaataattaaacacacaaattattaattatgaaaagatacacagctggtgtagaagtcaacattaaatatggggtttaaaaattgactactcaagatcccatagtttaaatgaaccatccacaaagttgtaatatccacctctaagtgctatctttttctcatcaactccacttttaacaaatggataagaatgtagatttttcagagacacattcactgcttcctgcaaattcaatgatattcaacaaattgtattagagtattaatttttaagattatcatattcaaattcaatgtcatatatatatatttcatacttaatctaataagatgacatatatatacatatttattacctcagcacatatttcacattgttcttcaaatgtcaaatcactatgctcagttttgactttgatcttagcagcttgagcaatgttgacccaattatctataaaatcactgtagatttcaacaacatgttaggtaatgaatcaaaaaactagaatatgaatttcataaacactaaatatatacacatataaatctaaactgtatatgattattcataatcaaattccgtataaaaattagaaatttttaa

SEQ ID NO: 329282 - DNA, 1105 bp, Cannabis indica
taatgatgtaacagtgtgaatttttttaaactatgaattatgtcttaattaatccctttcaattagctgaatacctcactataactaatataatatatatgctaatgcatatttagtgtgcatatatttttactcttatattatataatattatttgtaacttttcatcaactatgatcatttgagcctatttttataggacatacatggttcatgaacgatagattttcagctatttttttttaataatgtaactaaatttagtgacctaaattttatccattagatctctaaaatatatatatatatatatttatataatggtgttattatatatgaataagaagggaatttcttgcaactaagtaatctcattttcaaactacatacactaatgtacgacggcattaccacttcaccttatacatagaagacccataatctttgaattagcatatacacaaaaaaaaatattatttttttggaatggaaaggaggcattttattaaagattcagatcagccaaaagtatcataccttaattgataatgataagtaaatagaaaataatattacatgcctccatgctatgatcataacatcacacgtaaagatcataattcttatatcatactcatagaataaccataatactatgaaataaccatatcaacaccatattgtactatttatcatatcatggccattacatgcataacccgagcttatattagccctacaataacttgagcacatttaaccttaccattgctagctatggaataaggtatctcagcaatattgtcgtcgtatcatacctaccataacaatatcatacacatgaatcagacaaatttatgcagggtaaggtatctctacattaaacaaccttggtgagtccgttgtcttggtgcccaaattttgaactttataaatatgtattttgtgtgtgagagaggtatgtgtgaagaaaaatgtaagttgtgaaaaaagaaagtgtgtgtgtgtgtgtgtgtgtgcgtgcgtgcgtgcgtgcgtgcgtgcgtgtgcgtgtgtgtgtgtgtgtgtgtgtgtgtgtgtgtgtgtgtagagagagagagagaga

SEQ ID NO: 329283 - DNA, 736 bp, Cannabis indica
ggcttgacaaccgggctaaacgtttcttcaaaatcgatacctggtgtttggagatatcccttggcaaccaaccttgatttatatctatctagcgagccatctacattgagtttaacacggtgtacccacttattcccaatcacatgcataccctctcgaaatggaaccaagtgccatgtaccagcttttttgagagaaccaattttagagttcattgaggctaaccatttaggatctcttaatgatgctttgagagatttaggctcacttggaagtagggattcgggtaaggggtgcttggtggcaagataggatttaggtttgacaataccattttgagatcttgtagtcataggatgtgtgcgtataggggcaggaacaatagcaccagaggatgggttatggttggtctcattgtggctcacagaatgatcatgaaggtcatttgttgtaggacagatagatggagagatgtggggacttagagcaacctgtggggcagcatgtgagtcactggcctcaggaattggaacactggaaacaccaggctgctggtgtgtgacagcatctgcttcagaaacatcagtaatgggagctggtgcctcgtgaagatggctactagatatattttgttcagtaggcaagggagcattggtgggcacagctgctgtttgtggaagggcagatggctcagcaataggtgcagaagctattggatattattttaccaggatct

SEQ ID NO: 329284 - DNA, 725 bp, Cannabis indica
aaaatagcaattttttatagtagtgtgggagaaaattataattaatttaggaaaaataaattaaaaataattatgtattatttttttaaaataaactttatacatatatctgaagtacatattatacatatatatttcttttaactaatgtattatatcagagaataccatttttttaacgaaaaaacaacaaaaaaaaaaaaatactttcttttatatattagaaagttgaattttagtagaaaaaataaataaggaaaatatagagaaaaaatctcataaatgaaaaaaaaaaaaattactcaccaaatatgaaatatgaaaaattaattctttttttattttcaacactttttctttccaaacatatagatagagatataattaattggccgtgtagatactaacgactttaattaattttttatatatcaaatagtgtaatctgattatataaaagttacagattgtcgtttgtttagaaaattataatttggtacatgcccatttttttttaacaagtacatttcaaattttcaattgaaataatacacaaaaaaaaaaaaaaaaaaaatccacggtacgggaatgtacaaaaaatcaaacttatagtcaaacttatggttgggaattgccactactacaaaattgggctttagaggcggtttttaaggggttttggcgtcggttttggcgaaattcgctaccgacgctgttccaggtga

SEQ ID NO: 329285 - DNA, 1651 bp, Cannabis indica
aaacaaaagaatcaagcgtaaaatagtcctaaaactagaaacaaggagtgaaaactaaccaaaaatacgtcccaaaacttagactaattttagcctaacaagattaagggaaataagcaaagtgcaacttatcttagaatctcaaaagactaagttcaagagttgtcgtgaaaggctatagcgagaacaaacatcttaactagcgtctcgcagaatacgaccagctattcttgaatactgttgagagtggcgagccaaataatcccactgcccctaagagcaacaaccaggggaaataaaggacattcatgttgatagacgaggtccccagaatcagggtgccacaatctcacggcaaacgcgagcaaggggacaacaaacatctcaaagaaataataaaaatacaaataattaatcgtctaaccggtctggtcgtcctccacgtccaccacaaggacatatacacatacttgaacagaggaagattcgctaacctatttgaaaggcaaatacctgtccgagattcaccataagaatttgaggctaatcgggaaaacccatcacgtgggggagagaacacctcaatatgaatatcgcagcgagcaagaaagtatgagtaattttcaaagttaccaatccaaaagtacaagttgatcagtgagtaattacgatgataggcaagatcaacgacaaaatatgtgtgatcaacctgatttgtgagaccatataaattgaaggcgtcctaatctacactagcaaataaatagaaatacaccagaccttagagagagattaaataaaaatgctcatcaagcaaatgaacaaactaatcaacctaccgataactcaattcaacaaaggataattcagttggagatcagttcataaaatattaggatggagaataaggaaagcttccagggtatgattcagctgacgacccaaaacctttcacttgatattttgaactctcagtttccgaaaggatttaagaaccctcatgtcgcgcaatacggcagaaccacatacttggatgcacatttgaataactttaataccataatgcgagcaagtaatgtttctaataacttatgttgcatactgttccctacatccctgacaggggcagcgagtagttagtttgataagtttacaaatcattccatcacctcctgggaacaactatctaaagaattcaaaaaagtaattctaggctacaagggacagacgaccaaaggcatcatccttaacaaatatcaagcaataacttggggagtccttaaaggcatttctgagctgctttagcatgacagtatcaaaggtaaaaaacttgaatgacagtattcagttaacaatactccaggcttggataactactcacctgtctactatgggaggcgagttatggggtggtttgtaagggcaccaagtcaaatcaataaatgaatttaacgacaaggcacttatatatgttagaaaagaagaagctcggtctgaaataaaagtattaaaagatggctcggggaataaacccagctcaagaaatgcagaattggatgttgcaaacacaagcaagagccatgagccacatgggaaaaggaaagatgagtccaaggaatcatccaaagacaaaaagaaacagaaaaaaaaa

SEQ ID NO: 329286 - DNA, 1393 bp, Cannabis indica
attttcatgaagatattttttcctttcgaatactaactctcctacgtcaataaatgaattattctcacattctttactgtcttttacatgactgcctcataattcacctgaggaaaatgcaccagttccccaccttgatgcaacttcatctcatcaaaagggcattcttcgaaatgtgattgacaccaacacatatgccctaattcctgatgaagtaccatccacacctagggattcaacaaccaattctcccattacttcaaaaacaggaagaatattatccaaatctaaacatctttctaattacatttacaataccactgctattccttccactgctcaccctattaataaaaatatttcttgtaataggttaacataatactttcgacattcgctcgtcgaacccactagctacaaaatggcagccaaagaccctgtatggaaaaaagttagggacattaaaactgatgctcttgaagccaacaacacttggattatcgtcactcttcctgacgaacaccgctcgattggtagccaaaggctataattattgattactttcacacctttgtccctgttgtaaagtttaataccttaaaattattgcttgctattgcaaccattgacaattggtctatgtaccaacttgatattaacaacgcctttcttcatggagatttacatgaaaaagtatctacatatcactccccaagagatataaacctaaaggaagtattcctccaaatgttgtatgtaaactaaagaaaagtctctatggcttgaaacaagcctctagacattgatttactaaactcagcaactaccttttatccactgattttactcaatctctttaagatctcacattgttcattaaaaattacaaatgcattttcttgccattttaatatatgttgatgacattatggttacttcaaataatgatgttgctgttatttcatttaaacaacaaattaattcagttttttaacttaaggatcttggccctttacgattttttctaggcttggagattggttgctctccctccagaatttccatatcccaacgacattcacctaacaacttttgactgacacgtgttatttaggagcttctactgcttctacaccaatagaacccaaaatttggttgtcattcgatgttggggaaccattataaaacctaaaaatatattgtaacatcattagaaaaactcatttaattaaccattattcgtcttgatatttcttttactgtaaataagctaagtcagattttatctaatccagagctcctcatcttactgcatctcatagaatattacaatatcttaaaggcacctctggccaagggctattttttcactcaccatcttctattaacttat

SEQ ID NO: 329287 - DNA, 671 bp, Cannabis indica
tacttttaaaatgggcttgattagaataagagtagactcatgaatcatgattaagatattgagtgagggcttttgtgaattggactttaataaattaagcaaagtgaattaatatatgtatatatctacatatgaaaaatttgatgtttatatttgagtgaaggctttaacccacatatgggctaaagtccctccgtccctgcatataaatgatatgaccacaaatgaattttatctagggtttccaaattaatattgatttcttttccttttcttctttatatatatatttttcgtattattattttctatttaattccctatctttaagaaagaaatcaaataaccatcaaaagagtgaaaaagaaaggaaattagaaaagaaaagagaagagaaaatcaattaaataaaggaaataaattataagaactaggtatatagtcgtgtatatatatatttgcaaggtaggtacataggtttacttttacattttataatattgagttaggaaccaaagaagcaaaagttgaatgccattttattactaattatagaagtactactaattattattattaaatagcagaaattactaagaattaaagaactcaaaaaaaaaactaatatattacttttagttacacaatataattttttagtttgactaaat

SEQ ID NO: 329288 - DNA, 1405 bp, Cannabis indica
gtcataagtacagggactaaaaagttaattattcttctaagtatgcggtcattacaattatcccctcatcaaaaagatttttccctcgaaatttaatctaaacaactctagatattgaaccctcatgttggactctaatttttaggtggcttcctccaccttactattttttcaaagtatcttgattaatgctatggtcttgttccgaagaaccttatccttcttatcgaggatatgaaccgattattcctcataggatagatctgaattaaattctagggcttcgtaactcaagacatgagtcggtctgatacatattttctcaacattgaaatataaaaaaaattgtgtatagcgaacaatggtggtaaggctagcctgtacgctacctgctcggcattctcgagtattttgaatggccctatgaacctagggcttaacttgtctctctttccaaagcgcttaacacccttcattggtgaaacatttaggaaaacatgttccctacctaaaactctatgtctgtatgcttaggatcatcataactagtcttcttgcttcgcaaagcaagcatccaagctttaatcttttctattgcctcattggtctactgaactaactcagggtccaaatatttcctttccccagtatcatcccaaagaatcaaagaacgacatttcctaccatataacatctcatagggagtcatcgctattgtactctggtagttgttgttgtaggaaaattctatcaaaggcaaataattgctccgcgaaccctcaaagtgttggattttattttaccacgatctagatttactaacatgtatgtttgattaacaccctaaatatgaattcactaaaacaataaaattaaacacataagagtttagaaaaccttacattgatggcagtagaataatatgactcctttcgcttagatctctaacacttgttcctttatgtcgcagtgtaataacaagacctgagcctggatctccttctctccttcgggtttggttactaccatcttatgcactatgattgagtacttgacttgctgtctgtgggcatggtactatttagaaataccggggtattttagggtactcaagttagccaaataccttaaaaatagagatttcttagtggctaaaaaataataaaataactattaataataaagtttttattaatattattattattatattattatattattattaataatattatatatataacaaaacttttgagtttcgtttcagaatatatatattaagttttatataacaaaacgaaactctcgttcttcctctttcaataaaaccttctccctctatattcattttcttcgattttcaatctgaaacttagcgatctaagctccggtagtagcagga

SEQ ID NO: 329289 - DNA, 1125 bp, Cannabis indica
ttgtaagtttccctttatcaattcctctatccttctcctactatctctcctcttctcccctctaccaaatatagtgttaatctctcaacaaataataatatataaataaccttatctcctttatgttaacaacattatttttttaaatctgtattaaacaatatcctcaaaatctcacttttataagttgtatttagttaagtttttagcataatttaaaaaaaaaaaaaaaaactattagagtatctccaatgattaaattttagagaatatttgtttatttaacaaaatacaagaatgttgtaccattgaaataaataggtgctaccataaaatattatattgatggtattgatgctatcacttctttaaaaaaaaaaaaattaaaggtaaaagaaaactaattcactacatctataatagttaataaaaaatagtgtatatatatatatattaaagcttccattttatttataaagatatgcacctctttattttaacaacaatactatatatactcaattttcttttactggtagaagcttaaagatttttattattttttctccgtaaatactcaataataattatttatttctcatattaattgttcttctatatattttcacacattatttttctacaatttttttatttttatcaaaaaaattaaattttatgcatagttataatattcttgaaggtaataattttaaataataactatgtctttatattaatatataatttttttaaaatttagtgtggtaatatttataattagaaaatggattcgaaaccctaattaaaatggactaattgtaattgagtaatttaattgagtaattatattattatataattaattatgtaagattaatcgagaattattacatttaagatcctattagttaggggtattttcataattttttacctaaaaaggataaaattataacttttgtaatatgttgtgctaatggactatattattatataatatattcatattatcttattacaagtgatttctgactaatatatatgagaataggggtgtgcataaatcgatccaatccaatgacaaccgaccgatctaattacaaccgaccgccaaacattgga

SEQ ID NO: 329290 - DNA, 1581 bp, Cannabis indica
catgtcttgagttatgaagcccttgaactacagtcagacttatcctacgaagaacagccagttcaaatccttgatagaaaagaaaaagttctttgaaataagaccatcgccttggtcaaagtgctttggaggaaccaaaaggtggaggaagccacttgagagttagagtctgacatgagaactcaatatccagagctattcaggttagattcagaggacaaaatcctttaacagggggataattgtgatgaccgcatttataatatggattagtaaaggcaattagcactaattattgatagtttttataattatttgtgagtgtatttaattgtgagtcccattattaaaagtgggcgtcagagttataatttctcaattctggagattttattaaaatctaggagtattatttgtcttatatataaattatgttatctttataatttttgctcgacgataacagaaaatgcgatggatgtctattttattaacatgggtaagtctagaacctttttcttagtgagatatatgttggagaaaaatggaataccgggtttgagtggggttatggattttgaccattttatccctagactttaaaatacctaagtttaagcttaacggttattttagtaattttgtcaaggtgacataggtggctgtttaagatggtggcagctatcctgtgatttgtttcttagccaaaaatgaaggataattgatcatttttgagaaaaataaggaaaagccaaaaattaaagaaaaacacatttttgaactctctctatctctctttcaactgaagcaaaaccaagggaaacacttaggattttcagctgatttttgtgttttcagcaaggatttgaggaggttccaaccaaggtaagccctaaaagctcttatttcttgatttcattaaattctatttggttaaagcatgcaactttgagtttttgtggctgttagggttagaaatgtttggggttcgatttttaggttcattctaagttgatattgagttttggttgctgattttgatgtgttatgatggaattgaacaaatttgggtttggaaattcaaacataggtcattaatgacatattttgattatgagtatttttcttagttctatttgtttaaatatgtgtgtaagctcattttaggcactttggaaggtttggtggcatttggataagttttgagcaagtttggagctgtttgggaaaacctggtgcaaaccggtgaaccagtttggtaggacctgtaaaaccggttgaccggttttggcagattccccgaacaactcgttttctcaattctggcccattttagtgccttagttgggtgtttccttgtttcctaggatattttagttcctattagtaataacagacccttaaattataggtttgcggttcccagattaggcttttaacatgtgatttacccagttatgttatgtgattagggcatccatccagcacgagacttactgttcaggtcggccaactcaatcgaattcagaaagagggtaagaacagcatatgatatgtaatatatatgcgaatgtatgtatg

SEQ ID NO: 329291 - DNA, 620 bp, Cannabis indica
tcggttttgaacggtttttttcaattttctggattttatactcacccctatgctagatgaggcacccccactatttctcaattttaatggaaatctatctttaaaaaaatcaacatcgtttgactccacaataacgtgcgcattcatatcatagtacctataatctttattattaacaacataccttaaaaatacacattcataggcactttttgcttgcttaattctcttaggacaagttgaaaaactcaagttttaaaatataatatgtttggttatctatttctcaatgtctcaaaaggataaatttttctttttaatttaggcaccttattaatcacataaatattagttaaattatggaaattaatagataattaaggagttaattattattttatgattatgtgattcttagtagaaattagaacttagtgttagaagtaggccttaggaaaatattatggatatatatttgaattctagatgtaatgtatatgctatagatgaaattttacaattttcatgttttctgcccggtaatattgaaattaggggtaatcatccgatccaatccgcacttttttggtcaaacaacatccaatccgcactaagtacgg

SEQ ID NO: 329292 - DNA, 511 bp, Cannabis indica
aaatataatttattttatttaataggtatattttaataaaataatgaattaggaaagaaaaaaaaaattaaaaaacttaatacaattaaagatgcaaattttatgtaaaataaaaattattaaaatcaagttttatttatttattattatttctaggtcgatataatagacattttttatataataaaaatatgggaattgtaaattcatttttttcgccaaatattttaattttgttgacatgataaaggatctttgtatgggttggtttgacaatttagaatgtgaagctaggtagattttattttgagaatagactacgtagtcctaagaaaaatattgttttattttacaattattaatattaatgtttcatcattattttgtgaatttattatgctgtttggactttttatggtttgatttttctttggtaaataaactgattccttataggattatgaagttttttttttttttttgtaaaataggattatgaagttttgattcc

SEQ ID NO: 329293 - DNA, 1198 bp, Cannabis indica
gacatcttagtcaacgagatctctttcgccgtcgccaaaaacggtcgagtctttctgtacggagtagtgcgcgagggcttaatgcacaaggccctatgtatgcgcctcttccaccttggcgtctccgcagcgacgcttttcttggtttgatttctgggacgattgttgccgcttaggtttgtcctcgtattctttgtgcttcgtgttttgagattttctttttttggttgtggtttggtttgtaaacctttaaattccttttaggttggggacttttattgttattttctgattggcgatggtttcaagctccagattaaggcaccaggacgctaattagggctgtggtagaggtgttggttgttgtttggtgcgagtcaaggagtgagagattggatgatcgtgatgatgtggtagttttcatgtcgttggtgagtttggagactgggaaggatattgataatggggacgatgatggggctgattttgggggttagggtttcaaagatgaagaagttagagagagaaaaagaaagaggtgtgaggatagaagaagaagaaagaaaagagaaagaaaacaaaaagaaaataaatataaaaataaattttttaatttaatttttttaatttttaaagaaaaagaaatttttattttctattttttattttaaataattaatttttatttaatttaatatttattacgtggactaattaaactgtgccacgtgtacactgtgtacatgtagacattccaacctcgcacttaacaccaaaaaatggatgaagagggctaagtgctaacaaaacttaggtttaggaggttttatcaccaaaattttagaattcgagattagttgcaaaaacatcgccacttaatgaggttatgccgcaaattactctattattaaatatataaacggcatttgaccgtaaaaatcgaaaaataacactacagttaatgtaaaagaaagaaaggttaaaaacaaacgacatgtcgtttagtagatgatgtttcaatatacacatcagcatatgacgtgactaatcatataaaacagaaataacttacccttaaaccctctctctaagggccttttgacactctctttccctctcccactagaaagaattacaaaagaaatttgaaaaaccgtgtttttgcaaatgtcagttgtatataagaaaatataaaaac

SEQ ID NO: 329294 - DNA, 1585 bp, Cannabis indica
caacgaccatcactgaagagtgatgggaggccatgctgaaaagcaatggatactagatcttttacaggtccttgcacggtgaaacgttagaggaaccaattgacaagttggctagagagagtacttaccgagatgtttcctatttcaatgtttgggtagaagtaccaactctaagttctcgttgtactcgccagacttgtatgcaccttcattgttacgttgtaacatggtgtagaccttttcagtttagtctgaacatgcttgctgtaggatctttgttgtcaagagatattcttcagggatcaagcctcttacgaagaatctctttcctcgatctgtttgttgaaggacatggtaactctttgtgggcagacatattattttgagttgtcttggtctcttcttctttccctttcgtcaagggatcctgctagcaagatggggttttacctcttggttactgtagaccagaagtatgagagcagattgttggtggattgggctagccatggtacagaccaggtggccagccacgttgaagcattgcctggccatttagaggaggatatggctggccaagttgttaactctatggccagccaacttgtggaggtggtggtcattcaggttgatgattctatggtcggccagcttgttaaagccaaggtcggccagtatttcagaggcccaactgatgttgtagtttgatctcatctacactcggttggctttgccccccggcatgattccgtagagcctttgtgcactcttgccaataactattcaacctctttcttggtaacgctccttagaggtgttgttgggataccacatctgtgtgttatgctgttcagaattggacatcctgcagccatcccctaatccctactttctggaaaggtttttgtttggaggtatgttactgtaggtttatccatgttggttgtccaacatgtctatttcttttgaaatagggaggcttagttctttgaataactaatcgggtattaagtttgccttggttgtcaaggcacagctggctattcgagagagtgcgttggctatttgtcgtctttgaggacttgccttttagtacatcctttgagctgacttgatagctcaagtaggccatcatcttctcatattgagttgtatattcacctatgacataacctacgactagttaagagtcgtggtgtatgtctaggtggtcagtctgcacattgtgcgctagcttgagaccaacatttagagcttcatgttcagcctcgtttttagaagctttgaaactgacattgtttcctcgtgcatccattgccccaggtgccctgggggccatgcctgcatcgggcaagtggtcaatacacctcttgggttgagttattttgctcctgctcttgcttcttctctggttactgcttttctcctgaacttggagagatttggggagatttgcttttatgattagccatgaagctggtgagagcttggcctttactggttatgcttggctgacaagcggccttatattggccgagtcttaatggttcatgttaggttatttttagtattaattttagattaa

SEQ ID NO: 329295 - DNA, 575 bp, Cannabis indica
tttatataaaaatattatataaaatacaattcaatataatacaatacaatacgacctaatacggcgttccaaacaaaccctttatgaattatatttttattactcgatgaatttagcactatacaaagtaattatagagtagttagttagatatgaaaaatttatcataagcaattaactgaaaactagctagcactaactaactttctaactaacactaactgacattcaaaactaactttctaactaaaactaactaactccaacacagatgaaaaattaaagtaaacaaagactttgttaaactagaacaatagattcttaaatcactattttagtttttaggccctcgcaagctacttgtaacttctatctatatttaacttttaaaaactaaaataatagaatcttccattagtattttcaatttttaagaaaaagtttttatcgataggcacatagcataaaaaggtcaaaaagtcataattaactaaaacaataaaaaaatattgggtccatataatttaatataggaataattacataaggcacaattttttgtaaaatatttacat

SEQ ID NO: 329296 - DNA, 778 bp, Cannabis indica
attacttaataataaattaatttcagcatataaatgtaccattatgaatcacactccaagcctaattcgttttccagtctcattctctcggtggcttgtaacttatttttgtttgtatatatttctttctctctcaatatggagaaacttgtttatgtgatgcatgtgcattgacattcatcaatagaatagaagaccttgtagaagcttgtaagttgaagtaattatttttccttaacattcaaatttttttgacaaaaaattttaagtacatgcttaaaatagttaagcttataagttgaagctagcttctaccttgaaggtaattatttttccttatttagtttttatgtttctttattcattctaagttcatgaaatagttatattttgtattgttaaaaagaatttggatgagttaaagaaagaggtgaaggatgtaatctaaggtgattattctttttctttgttgcataaattattctactacggataaaaaaaaatatgtatcaatctgtattatttttttactttaattttttttcaacaaatcatcttaagccataaaaaattatatttctttttgaacaaaaataatacttaattctaaaatatttttaagcccaagatgatgtatataatattcaactttatagtgataataattattttttgttagggtttcatgattttgtttcttcttctttttttttttatttgttttattttatattctataaggtgtattattagtttgttaaactatataaagaaaata

SEQ ID NO: 329297 - DNA, 909 bp, Cannabis indica
agatgtgatctaattatatatcggatgtaagaattttaccatccgatctgatccaattaatttcaatcatccaattgatccaacattcgtattggatgttggattagatcggtctatccattggatgtattgggtttatttaatattttagatctagtattttttagatcggatcggatccatttaatattttaggtctaggatgtattggattagattgaatcaatctaatcaaagtaaaaagagttaaaattttaatgttaattttatatataaatatatgttttacgtataacaatataaaatttaattactcatcaaaactaaataaaaatactaattatatagttctattggatgttggatgtgttagatatttagatactctatctaacatccgattcgatccaatgaattggatattcaaaaataacattcaatccaatccgatcacaattagatatctaatatttggcggtcgattataattgaatcaatcgattatcattggattggataatttatacacaaccctagttgttacaataaaacctaaaactagcaatatgtttaccaataatatatatatataggtgtagacgtagtagctagctagtcgtgtacaggtgcttaattaattacttgatgcatacttgtcaatggattaattgcaaaacaattggagtcagtttcccactaaataacaggccatatcatgcatgttttaatttgcaagagccgctgggagcatgtttggttgattaaaattgtaatggaatcaaagttactaatgttcggtttgtgtttctaacttttataataaaattttattgttatgggctttacgctcttacatctcataaatagattataataacaactaaataataaaaggaataattacataag

SEQ ID NO: 329298 - DNA, 1573 bp, Cannabis indica
ttcacctcccatcagttcagagccttaattttgtggttaaatggttttcaacgaggtcttaaactgaataaatgcagaaagtgcatccgacttttgcttcaaagggaacaaccatgtatatcggctgtaatcgtctatgaagtgtatgtagaatctgaaattcgtgtgtgagtttatgggtgctggtccccacaagtcggtgtgtattaattcaagaactttacttgcacgactagtagaattttttaaaaggcaaacaatgggacttcccatattggcaagcatcacagaattcaagcttttcattgataactggtattacatttgaggctttcaaaacctgactcaacacgacactcgaagggtgaccaagccttcggtgccacagatctagagtagactcattggtactatttttattcaacttagacacagctaaagcaacaccagcagagggcatggactgaggtttactggtgtgataaccgtgggtttttggcagcagcttagtgttgagttggtatagcccttctttaagaactcctcgcagaaccaccttccctgtcacctgatccttcacacaacaaacagagggaaagaattcaatcgatacattgttatcggctgtgagttgtgacacactgattaaattctttgagatggcaggtacatgaagcaagtttctaagaaataaaggagcagatgagtgtgtttgtaaatggccagaaccaacatgtgcaatagataacttattaccatcaccaactatgatcttctccttaccaccgtacgctgatttgttgttcatttgaccatcttctgctgtgaggtgattactagccccgctgtccgcgtaccaactatcatcactgagggtctgtggtgttgcaacaagggcattaagctgcttgtcatgattttgttctcctggaggttgttgtcccatataactctcatcatagcgattgtagcatatggctgccgagtgaccatattttccgcatacttgacaagttggttttgaaccactaaaacggcctccacgacctcttccacggtttcccgttcttcctcgagatcctgtgttgggattcgaacctcgtccatgttgaggatagtgattggaaaaccgagagtttcctggaccaatcggcttatgagcaatgtttgctgaaggtgacccaatgttcttgtgactagggggagtggcagtgagcctttccagacgattatcaaagctcaaaagaatactctgaagctcctgccatgaggtttcagatctagcttcgattagtgaaacaatagagaggtattcaatctccaaacctgataggacattcgagataagatgtctctccggatatggttcactagccagcgccagcgagtcggcccacatccgtttgtttcaagtagtcggtcatggatgtcgatccttttctggtggtttggagtttcgtcctgagatcatcagtgtgcgctcttgaaaaaagctccgtataaagttttctaagagctgtccagagggcgaatgccgattgacatcccataacttcagatgctatgccctccc

SEQ ID NO: 329299 - DNA, 1067 bp, Cannabis indica
cctttattgttactcttgtaacatggtgcaaaccttttccgtttctgtgaacatggcgttgctgcaggagtctttacgtgtcaaggaatattcttcagggagtaggtctcttgcaaagtatttttttccccaatctattggttgacaagcctggtaactctttataggcagccatgctactatgagttggtttggtctcttctgttttcccttttgtcaagggctagcaagatgttgtttacctcttggtcactgtagacgagaagtatgacagtagattgctactggatgggactagccaaggcaaaactaagtggccagccacatcaaagcatcacttggccatttggaggaggctatggcaagcgaagccattgactttatggctggcctgcctgctacagtcacgattgggcagacttcccttggccaggtcgatggtgtcgtttaatctcttctacactcgattggctttgcccccggtgtaattgttgtagagcctttgtgaacttctgtcaatagctatttaacttctttctcagtaacactccttagaagtggtgttggaataacacgtttgtgtgttatgctgtacaggattggacaccttgcatccatcccctaatccctactttctggcaaggttttttttttggaggtatgctgttgtaggtgtatttatggttattttctagcatgtctattccttttgaaatagaaggactcagttctttgaagaactaagcagataccaagtttgccttgattgtcaaggtgcagatgactaattgagcgagtacatcagttgttgtgtcgtctttgggggcttggcttctagtatagcctttgagctgtctaaaaagcactagtacggcatcatcttcttgtattgagatgtatattcacctaggacataaagtacgactagctgagagtcatggtgcatgtctaggtggttagcccatgcttcgtgtgctaacctggggccagtatttggagatttatgtttagcctcattgttaaaagctttgtaactaaccttattgccttgtgcctcagttgccccc

SEQ ID NO: 329300 - DNA, 659 bp, Cannabis indica
accctgatacaatttatgcaacatcatttgtgtttaattatgtatattattattttgatgataataaatataattacttttttacaataattaggtaagaataagatcaagtggtttttctagtcactaatcattattccttttttttttcttctatctcagattctttttgtatttctttcgtcatttggattaattaatttttttactacagttgaataagaaataatacaagacaatagccatgactatatattatattagttataataataaattgaccaacagatcaactaaagttaattagcacagcttaattaattaattagttaattaagctcaaaacaaaagagatgagatgactaacatgttttaattaaatatagttaggtgtgtgtgtgactctgtggccagaaaaagtcaaaatagtggggataggatctcaacatgttaatacaaacttcttcaacagccctattagatcctacactattagaccctcacaactcatattgatcgatatattggttgtgtgtttttttttttaagttaataaaatgtaattaattgtgagaccaaacatggtgattttaataattgttattaagcattttgtaattctacgtggggccaagtactaggcttggattaaatcgaat

SEQ ID NO: 329301 - DNA, 533 bp, Cannabis indica
atatatacacatataataataattaatctggactgtgtatatagggaatagctagcaaaatctttggagagcaattattgcttaatataaaagttcatctaattaataaattaaaattagaggagtaagagttataagtagacaaattttttttctttgtaagttaataaattaaagaataagaaatgcatcattaattatcactctttttgtctagatttgctggctggtccttgttatcctcgtttgtctttttaactagttctacagtttctttgtccttccaaaaaaaactagtgtccaattatatggtattttatgttgtctttcataacattttttttgtttaatttttattaaaataattatatattgatgttgaaaattagctcaaacaataaactatatttggtacactaaattgatccaattgtaacaatacaactctattaaatcatataatctatggtgacactactacaatgttagcctttagaggcagttttttcaacctcatttataaaaagggaagc

SEQ ID NO: 329302 - DNA, 690 bp, Cannabis indica
atataatatataaaataatatatatttttttaagaaaaaaatcagattgtgtgtaaaacgtaaattgatttatgattgttattgtgtaatatgatttgtgtatgttgatggtaagaactcataactaaatttttggcggaaaaatcaaaatctatacttataactcataaatagatgaagtacaaattaaaataataatgagattttagagtaagagagaaaaatttctttctattgtttttaatatgttgattacaagattttccaatctcttctcacatttgagaagagggtatttattggctctgatggtctggtagacaatagtgatcccaagcgacatggcaatctccatggtctgtgaattgctggttttaggaggtggtctagcaccttgtacctttgtctggtgtcaagtagttcctggtagcatgagtggtagctgttgtgtaccaatggtcagactgtcaggctttctaagtacgttgcctccactactcgtacctccttgctttcagagcttgcataaggcgtggttgtacacatttcgcatgcacaccttatccttgtagtcgtacacttgccaccttccttttccatacttaggaggattttctctaattataccaagttgttgtaggagggcatgttgagtgttcatttccatggctgcagagtgaaatttgtgag

SEQ ID NO: 329303 - DNA, 856 bp, Cannabis indica
gtcctatattttggtttttttttttttaatcaaagatggtttggttttttattcaaagacaatcagtagtaacaatagttggaagaggagaaggatcatgaatctcactaaatttacaatcgggctaaaaataaaaccttttagtaatataatgagctactttatttgtagatttgtttaacaaaagttaaaaacacaatttaatttaaaagaagaaattaaaatgcgacaacctatttaaactggaaaggcataataataaagctttttatagcttgaactactactaacgtattagtctcaattatgacattagcttaatgttttctctttattcaactttaaagtttctttgattcttaattatttctgtaacttcaggttgaagtaagctaacacagctcgcaaagagggtcttaagcagacagcccaaacccaaacttgtccaatattatgaaagcttctgggttttatacagaaattgactctctcagctaaagatctttttcctatattttaattttaactaaaagaacattgctattatttattatgacgcccaccgttattataaggtaatgccttatataaatggttacgataaaataagtaggattcatattaaattatatgaggaactatgattatttctctaagtgaaataattaatttcatcatatagaatcaaaataatttatgtccaagtattaaacttttgttgacttttatgcccccatgtcacttttatatgctattaaatatttctaaaactttcataatataagagcacctccaacgacccggcataaatgtatatatgccgtggttaatggtccaaggaggcagcaattgtgac

SEQ ID NO: 329304 - DNA, 797 bp, Cannabis indica
aaatcttaaatgttagggttttgatcttttattatgaattttagattattttttgtgattctttattaatattgagattgatattgctgtgggtttcttttgaatataaattttttttagttggacggatgagttttaatttatgtggtgaaaatacagattttgtttttatcttttctggtattgatgtatgattttaggttcactttttaagaagtaataataagataataggttgtttgaactttacggatccatgtctaatttcagttttcgaaccatctggcatatattaattcttgactttagttgatatgtagtataacttttgtcttcctaattcctatgacttgatttggtattctaattaagaagagtgtcattaatcaaaagaaactctagtctatgcatatatgtgatttacaaatatatgtataggtacatatgtataatagaatccataatatatatggtgaattatatatacatataaatttatatgtgttttgtagagtattttagattaattgaaattaagacaaagttaaggttaaatatttttggattattttaagtttaaatttggcatgtactaaaatattaaaatttgtctgtcattctaaatgagttgattgaaacatgatgtcgctaaagcaacctctcttgtgtagattgctcgtgaggaatgttagatatttgtgtgtgtgtttctcatgtaagtattgatcggctcaaaggaaggttatacttattttgagtgcacatatacttgtagtgataaatgtgtgacaattata

SEQ ID NO: 329305 - DNA, 858 bp, Cannabis indica
tttaaatttaaatttaaatttatatatatatataaaaacaaattatttaattttattgatacttttaaattaaatttaaatatttaaaattattttttttaaaaaaaaattaattaaataatttaattgtaagttagttttaaccgttaactttaacaaaaaaaaaaaaaaaaccggccttgatacaagatataagagatatatatataagtacataatgtagatatatatatacctcaagatgatctccaatattaatcaaaatagcattggaaggcatataatttatgttgatgcgtttgccttgatgggatagaatttgaagccctccattgacatcttggattagggaaacaaagaatcctggatcggtatgatcaggcaatcccattgaacctttggatttaaagtttggagggtaataattgagggcaaccacatcaaaccctgacttctaagcttaaatgctttttcaatgaatgattcttccattcctagtgttttcgatatggcttttcctaaaaccatgtaccacttctcgcattcttttcttatactcttccaaagctttactgcataataattaatttatcttaacattaccataattttaatttaagacgatcaactacagttttggtaataataataagactaattgggttttttaatcccctcaaattatgactcctaaaaaattaagattgttagatttaaaaacttttattcaattttaataaaaaaaaaaagtactaacatggataaaagttcaggggcatgatttaatacatgtaaaagttcgagagatttggtatatgtcaaagtttggggaggtatgatttagtacataacaatcac

SEQ ID NO: 329306 - DNA, 1065 bp, Cannabis indica
aaatatgacaataaattgctatgggaaactgagatttagctatgaatgacatttattttcttgaaatgtgaatcttcaaaactattttaacgcatatgtcactatgtgatcactatatatatactatatttttttaattttttaattatggctgaataaattcaaatgtaatattaatttcaattacaaaataatataaatggattgaaccttgttttcatgaccataaattattcaaaaacaccttgcatattataatgataatataagtccactacaacaaaaatatcttttagctaccaaattttattggtagcaaaatgtagcttattgctaccaaattttagtagcaaaatttcttagtagccaataccaaacaaataagaccaaatatttctactgccaaattatttagtaggcaattgtgatttttagctaccaataaattttggtagcaaaatttttgtgtttagctaccaatttaactaccatatttcttaatagcaaaagatctttgtattttatcagaatgatatcagaaataacatatagatttattcatgtgaaagtaccaagtgggatacaatacatcttatatttccacattataataacatggtttgacatatatatatccaagtaaataagtactagagatactttcttattatacatacatacataattattcatcaacatgatctagtgacaatattggtgatggtgtagaagtagaaatagtagtagtggtagaagaacttctaggggccatacatattgaacccctagtagtaccactacaaatatttgggtaacaacaaggtgtaaaaagggcacaaccatcaccaacatttggggtacagagtgcatccttaacacaagtattgctgccactacagacaagcccttcacaacaaaatttcagttgccaaggtaaggcactgcaatactcagttgctatataacaacgatcattactacttgggataatagtaacactatgtgctactctaataccatagcaccacccaatattattaaccacaaatagaaaaattattaaac

SEQ ID NO: 329307 - DNA, 796 bp, Cannabis indica
atgacttttgttttgtatgccaatttatgttccgaccaaaaataataaatactagctaatttcaactttcaacatcattttggtcatcaccatctctccctgcaattttttttgaaggcaatgtgcacttttttaaaaaattaaaataaaattagatgatacattaatataacatcatttattaacaattaaaaaagcataatacatttttatatatataaaataattaatatatgatttaaaattaaactaagtgtacaactaacttatacaagcataacttcaatcttgtgcatatgcattgaacataacacattcaactaattaattaattgaattttatttaaaataaaattcaagacttaattattactttagaacttgaaacatagattttaagatagataaaataaaagttaaagaatttctatttttaatattgtattaaattaaaagatttgatttatacgtaaaaatgtgtagtgttcttattagaagatccttagtaatactacataagtagatatatgtatacgatttatttggtatgccgtataagggttgtattgtcttaaataataaataatactatatttggataaaatattatattgtattaattattacaaccataaattttaatacaaatgtgagtaatattatttaatacataaaaaaaatgacccatattatgagcttgttttataatatttactaagggggcgtttggtatgaggtgttcaaaataatttgattatagggaatattatgaaggagaatatgattatagggaaat

SEQ ID NO: 329308 - DNA, 672 bp, Cannabis indica
tcaactttgtgatgcaaattacacttaagtttttctaaaactcgctatttagtttcatctaatggacactcagtcttataacaaggaagagatttgatgatggtagttattctttggctaatgttgtcctatgtaatagtgcatcactggataaatcagatattgggagttttactactattctaaaaaatttaaccaaaagaaatagcaatattaaatcatcaccttgtctttcaagagcttattcattattattagtgttatggtatggtcttctaaaccttttattgttaaatcttggatttaaataaagaaaggacaatgtttttgtcctagtgtttgctaggtttgatcatgttgtacattgtactgccttattctaaatgaaatatgatatacatatgatatgttgtctagtgtttctcattgcttgtttatgtatcatcacttgtgataataaaagtacaataaatatccctcaaaattcatgttgactcataatatatagataataatatatagataatagatataatttttctagaattggttgagtaaaaatacattggataattacgtatcattcttgatgctctcttagatatttgtttactaaagccttgaattctcgtattaatgtgtgcaacttgggaatttttttttttaaaaaaa

SEQ ID NO: 329309 - DNA, 550 bp, Cannabis indica
attttactccgcccttcccttttcgtaattctccaatcaagtctatgccccagactgcgaaaggccagggacttgttatggagattagttcacttggtggttggttggcatacgtggctatccactaacatttgtcacactttttagcaaagtttgaagcgtctactcgtagtgtcgaccagtagtatccttgcaacattgtttttaaagcaagggaattatcccttgtatggttgccgcagatgccaccatgcacttcgcggagtatgtagtcacacgcagttccatctacacatttgagcaacggatgactgaaacttctacgatagagcctaccaacataaatgacatatcgagcagctcgataccccaattttctagcctctattttatcttcagggaggacttctttttccaagtaatccattatctgggtcatccaggtgacttctttgactgtatctacctccattacctcgctccgactcactgttggatgagttagtgttggaagttattttaccaggaacttagatctactcacaagtat

SEQ ID NO: 329310 - DNA, 504 bp, Cannabis indica
cttcatcttctacatcaatacatagtactgccaaaacctcttttactaacacaaactaaacctaaatcccaagaccccatctgattaatgaagtttttatttcattttcaaaaagaaaaaaaaatctccaagtccctatctcttcctcctctgtcacccacatttgcttgttgctcctcctttatcattctcgttctttctcctttctcgctccctctttctcacgagacatgcatcccagatttgaaaggagccatggagttgactgttcaagactcttcttcttcttcttcttcttcttcttcttcttttgtttaccctttatcaaatttggattatgtgttggatgttagacttttatttgggcttacattaaattttattggttttattaaaacttgggttgattagatagttctttgctgtgttagcccatgttgttggtgatcaattgttaatgggcttagcatctgtgtgtaaagtctaggtgaagcagaagtgtgg

SEQ ID NO: 329311 - DNA, 1350 bp, Cannabis indica
atttttggtaattattttgtttttgttgtacatttatgaaaaaagtccttaataataaagagatcgatgagtgaaaaaaaaggggaataagaataaacctcaatggttttgattgttcccttgcgtttgcctaactctaaactatgtagccttcttccatctgcaatatcaatatttagaatgagaacatataatgccaaggccagtagtactatgttactccttgtaacgactcttttaattttttcaatgcccatgatgtttgtgttgtaggaacatgcaaattaattaaagcacattacaatccattttgtctacttgtttgtatttatatttatatttgcgaatcctttctttctatattaataatcatcatatagctataatgtatataataattgatatgtttttgttaaaaaataataattaagatatttttcttttcttctcacatttgcttaagagaagaaaagaaaagaaaaaatatgtcacacattaatgtatatattcaatatttaccgcgagcttcataaaaaataaaaataatattaccatgtaatattatctctaattaaagccatttatttatttgattgtaatgtacaacaaatggtggttacatagattcgagcttgatctctgcacacttattttgcggtgttcacacataatacaaacatatatattggaccataattattactattttgaaaggtaaaaactattaataatttgatatttgtcaactaaaggaagtggtagaatattgcttgtactcatcattaatgcatgtttattttttatttatttatttgttttagcgattgaacatggaaggtggtgttaactatgttcaggatgagtagaattgctcaataaaactataacttttctgatcgtacataaaactattaacgtttaaggcacatataatatataatataatagatatatatatagagagagagagagaaatctctacggtttttttttttttttttttttttacataatttggcctattttttatgaaattcatttacctagaattgcatgttctgtattagaaagtaagtagaattaggtataataaaaagaaaaaatacaatttgtcaataaacatatgtattataagttcatgaacagataatattttttaaaagaaaaaatttataagtttttaatatatgattctataaagtaggaaacatgtctcattaaattttattaatccacttctaacaataaaaaaatagggaaattcgaggtttagaattaagttagagtggccgcttctttctatgattttgttgtttggttgtatcatgatgttgcttcgtaaacaaaaag

SEQ ID NO: 329312 - DNA, 919 bp, Cannabis indica
tttagggcataaagcccaacaaattgtccaatcacaagtcaagaaattttaatagtatatatatttttatgaaacataggtagcagattatcctcatgtagtagttggggaccacaatttcttttcaatctttctgacgcgggcacaaaggtacgtgatgcacacatttggccaaggaatgggcgtgagatgcacttgcattttagaaaaatttgagctcccttttttcaaagtttggtatcttcataaattctttggctgcagaattcattactttatattcaacacagttggatttggtttaagaaaatggcattgcaggcaaactcagatggcgcaactcacaaaaaggagtggttatgttttgacgagtgtacacgatcaacttagaatgagagtggccaaggcaaaaacaaggatcgggtgcaaatggtgattttgagttttttaaataaagtaacagagaaatatgtttacagagatttcaatcctacccatacacattcgtttgcagaagccactcataagtatttcataagggcaaatagagtgattacaggacgaaaattagctgaagacgcatcaaaactatacatcaggttcgtgggttcacaatgggttagctgtggagtctccgttggtttgtcgtggggttgttgtgtggtcgccgtctgatttcctgggctggctgcagagaaatagtctgatggagagagggtgtgggtttgctgtaaaaattgatgaacaatattataatagagagagaaaattgaaagttctttttctaaatattaatattttttttattttaaaataaatagtattatagaaagtaaaaagttgtatacatttagatgtatcataagagtatttatcttacactataataaccacacgatctaaaattaatggttaaaaa

SEQ ID NO: 329313 - DNA, 742 bp, Cannabis indica
catgtgttttataaatttcagctattattatcctactcatttatgtcttatatttatatattaaacacatttagtacaaatatatatatatacattatttgagtaatttaaccgttaccttttaaaacatactcaaaatgcaatgtttccaaaatttataataaatttttatatttactctaaaatatagtattttatttttttttatcattccacatcatattttggccactaccaactaaaaaaatactctaattaatgcaagcaaactctaaaaaatacactaaaatataatgtttagttttcaagtattaaccttttactattcttctaaaaacaaagacaaacactaccgttgctactggtaagtcgtcctgacagcacttgatgggcaacgcaatacgagccgcattggagctgtccttatgtgagtttgatttggtataatgataatgataataaaagctattacatatcagtagtgcctagtattttttataggtagcgtcctataattagctagctatattctttaaaagttattttcctaagttatataacacacaatacttaattacaccaaataatagtatgacaccaaaaagagtactggtttaggaaatgaaacgagaattaattatgatgtttgatttgttagaatgatgtttgattttacaattttgtatacattattttaattaattacaaatatgtgcaagaaaacttattatcattttctcat

SEQ ID NO: 329314 - DNA, 564 bp, Cannabis indica
atactgtcacataatgaatcattccttaaatagatatcattgatttaaaaaaatatgaaatatatattatatcatattagatcggagttataaatttgtttgagatgagtactaattattaagaccattttttattgaaattattttacaaatactttaaaaataattaaagaattacatttttttacagaatttttaatttttttcttatatttttacagttcattatttattcgttgtttttaaaaaagttattatgttcacacgttttgacgctgtaaaaatatagtatacaaatgtgtcaagaaacatacaattatattttaaaatcaattagtaatgagtggagtagctcatattcttatatatatctaaatacttttacatttaatttaattcacgtgggacaatattttctaataaaatgtaaataaaaaagtttgtaaaaatattaataaaaaaacaattcattttaagtgtattttgttataaaataatataaaataatataaagtagatgagaagaaaggagaagaagatgaagagagaaagagaaagtgaatg

SEQ ID NO: 329315 - DNA, 531 bp, Cannabis indica
tataacttttcatgtaacaatctgtaaaattaaaatagtaatttcataaaatgtagtatagatcctagcctattcattttgagttttgtgtttctgatatttcatagctgtttttatgtaaattgcttccaatagaatttgttgttgttcgactgtcgttttttttgatgaattcttttattttattcaatgtccctagttgaattggaaagtcttgttaggattatgcattgtgttgttggtttttagtgtctaaaagcttgatccaacaacaatggcgttactgatattttttttctgggcagagaataacgaaagggaagggatgatgagtgtatacggtaagatgtgagtatgtattttttgtaattaaaataaggaatacacataccatatataagtttaaaattcattgtagctgtatttttgttaatttttaaccttttttgtcagtatatgaaaattttcctaaaaaaaaggattattcacaaatacactaaaaataaaaaaaaaataacaaaataatagttc

SEQ ID NO: 329316 - DNA, 677 bp, Cannabis indica
gatcatatatatattacatttctactttttttttttaataatttttaactaaaatcgctaaaaatatcaaaaataatagctattttacaatccatacgtacactaaaaaacatgcattgagtcatgggaagaagtaaaaaaatgcaatgcaatgcaatgagtcgataaaacgtgtatagagttaaaaaaggtcaataaataacgtgcaagaataaagattgttatcaaatatattactcttttaatgtcaatacatgtcaaaatgaacatcttttgtttactgatctgttggggtttccttaattatttgtactctttattacagctagcttatggtcttcaccctccttcattattagaattaatattcaacctagttattatattaaaccaaaatatttgggacccataatgatttaccacctgttctcgtgtcccttacatatatttctctatatatttatatgagagcacatctttatcctacaaatcaaaaagtatggagaagaaggaactaaatagtgatgctaataaacttcacatagcagtattcccatggctagcacaaggccatttactcccatttttccaagtctccatgttcttagttcaaaaaggccaccgtgtttccttcatctccaccccaaaaaaccacactaggctcccaaaaaaattaa

SEQ ID NO: 329317 - DNA, 842 bp, Cannabis indica
atgcagtacaatatacttttttacctcaagttctaattcaggtatattagccgacctacttggagtacgatcgatgatctcgggccatatgtcataacaataataaactaataagtgtttatcccaaaacactgcataacagttggaaaggacaacttaggatttcctatcaaatcctgtatttgtattgtttttcttctgtttacacatatagtcatatacaatctaaaattaagtatagcttgtaaatatattaaggttaggtcatagatgctagcttattctaatattttttttcctatcattttcaaaaataaatatataataaatttataaggcattattatttactataactaatgattgaaatcaagtagagattaaaagccaagtacactttaaataatcaagagtaaatttgtaattttaatattaaaaaagtattatgataattatattagataaaaaaatgtaccacattataagtttacgaataatatttaagtatttgactaaataatatattgtacaaaataaataattttatatatcaaattttacaaaatatttccaaaaaaaaaaatgtaataatacaaatgaagcacaagttttttaaaaaataacaaaatcaaaatcacaaaataattgtacataatacattatatatatacatactagatgagagttacgtggcgagacacgtaaatattagttttatataagttttagtggtttttgtttaagaatttcagtaactaattgtaaattattttataaacgatatgttttatataactaattgttaataatgttataattgtgtatataaacctataatatac

SEQ ID NO: 329318 - DNA, 527 bp, Cannabis indica
tatatatatgtaatgtatacatctctaaataatacaaatacgtatacatgtggaagaaaataatgttatcatatcttgcatgagtatataccactaaaaaaagaagaaaaaaataataaaagtgacagaagattggagatgatgcatgaatgattaaaaccactatacatatgcatgtcactttcctaactccggccaaagtcttacgcacacttatagttacactatatctgtttgaaaaaacgaatatactccctctaaaagtaggtgtaatgatatttttttcataactttattattgggtactaacgatatctagcattatttagatgtgtcatcatcttataattagttagtgatattttttaaagattattaccttaagttatatgagatctgatacttatttataccaataatgatatgatactaaaaatagtgctaagtactacaatgtttcttttagtattttttctttttttatatgtagtgttaattttaatttttttatatgactatgtacattt

SEQ ID NO: 329319 - DNA, 496 bp, Cannabis indica
actatattatttagtttttttttttttaattcattatatttatatttaagattcaactataacttaaaaaagatggtatatattacatattttaatttattgcttcttaattcatattaaatatatatgtaattttcaacatagttatttgtataatctttttttttaaagcattgttaatttgtatttttaaaagttggggagcattaatttttcaaaattttctttgtccttttatttacttatgtttttcaatccagaagctgagtctctatttttttgtttgtaaattttatataattacaattttaattactcaacttatatgtgtaagttatttatttttttctcaacaaaaatcacttaccaattagcttattgataaattaactattaattaaaataactaataattagcttttttcctcaatatctattctatataaaatgtgattatataacagaattcttgatttatgagaaactattgggtgac

SEQ ID NO: 329320 - DNA, 767 bp, Cannabis indica
tctcttttttcttctttttattttttttcttatttttctctaatccaaacactcagtaccatcgatgaagctctaaggaccatttttcagttactgtatgacctcacgtgtcagaccattgaattcactagcgctcttgatgaccctaactcttaagagaaacctccttattcgctcaagatcacgagtcaaagttttggtgttcaaattttgaatgcatttttttggccaacttgaccccatttgacgatccatcttcactagtagactcaccttttcgaggacaaaaacctccactcagacattcccccaatttgccacttttcttagtgacatttttgtagctctgcaacttctttacaactttttagcaattacacatctcgttttaagaaatagttcacatgagtaatatctactcattaactgggtccttttgatatatgctatgtaaaaatctatcactatttctggagcatcgcgtattatatatatcgactacaagaactgtcattgtgtacgcctgaggtgagatctttgagtatctttgaatggtattatatgtcatatatcgttagactcagtttaaagagtacatcgcaatattgacaattatttattcaatttaagagtgtaggataaattgacttttgaagtgactaagctaaatggaacttaagaatcaggggcttaggaatatcccttttggacaaaatttggcgatcataagaaggtagggactcaacttgattattggacttgttttt

SEQ ID NO: 329321 - DNA, 873 bp, Cannabis indica
tggaaaggaaacaatttctatttcattcctttgtttggttgcattttaaagtattggaatgacatttcaataaaatgctctttccaccattttggtagaatgactattccattttaaaaaggaaggaaagaacattcaaatgtaacaagagaaaaaatttaatgatttttttatcaatttttattatacattttaaatttcatttcattcctattcttattcttattcccattcttattcttatattttcattcctcccaaccaaatgccacctaaatggattagttatccttcctccagcatggtcaacactagattagtgaaattgtcaagtctagtctagtccaatcctgcatgctaaacggaccctaagagaatttgtctgatttatttcagaaattaaaaattgtctataatagagaagaaattccctatcaaaggaaatagaagttcttttgaaggactatccagcaatttacatatattctttgggtataagatcaggttatgggtagctattttgtataatgtaaggagataaaagattttcaaacttttacaacccagtctcaacccggttcacaacacatagaaaagaggagaagaagaagaaattttattgaaagatcaaaaagaattacagttccaactagagtgagaactgagaaccaaaatgagaaatttaccttcttcatttcttccggagatgaatacctttactagtgtgatcaaaagctcctgttcgcagaacatattcagtactcaacgcaagagagttaacccagtgtccatggcccttgaagaatgtcacaaagccaagtaagcatcaattagggaagaaaatagattaaaaaagaatagagagagagagag

SEQ ID NO: 329322 - DNA, 787 bp, Cannabis indica
cttgctcaatcctccaccaaatgaccaacttccagaacctatacaatgcatacacaacataatccaaccagtatttcacagaaaaacatactaaatcaatttatgccattagagattaaagtttcagtttttaaacccaaacttgcataaatccaacattaaaccctaaaaccagctacaagaacttgaaaccaactcaaatgaacactaaaatttgaactacaactctacctaaccctaacagccatcaattccaaaaatcacctcttgaaaccaactaaaaacttgagaaaaacataactagagatcaactagggtttaccttaagtgattccgcctccaacccttgctgaaaacacaaaatccagcaaagaaatcccttgtccttggctgaatcgaagagggagaaagaaaggagagggtttcctttgacttaagcttattttttcttatttttctttctaaatgaaataggggtttattaattaaaccttgtctgaatgtactcttgctaggtttcaacacctagggctgccaccactctcccctatttaaagaatgactaaaatgcccctttgattaaaatttaggtatttctaaaactaggggtaaaatggtcaaattccataaccccgtctaatcccggtattttattttctccaatatatttcccactaagaaatagtgttctaaacttacctatgtgatcaaactagttatacatcacattttccgttgtcaccgagcaaaaattacaaaaatagcatatttcatatacaattcataa

SEQ ID NO: 329323 - DNA, 675 bp, Cannabis indica
aatgagaaaatagaatttcgattcaatcgggagactggcactgtcttgaagagtgcattttagtagatttatccggtctcaaagaggacccgttactctatcatatagttagtacttagtactaatgactgataaaataattacatgaaaaaaaaatagaaaaaacacttttgggcttgttgtattggtcttaagttctgccttataaatgtattaattttcgtaagttatgaatatcgtagaaatcaagattacggatccactttttgttcaatctatttttaacagggtaatgttataaacacctaatcaggcgcttaatatcgaaacatattatgaggattcatcgccatctagttttttttcacatcgccgattaatcgtgttagtgaaggctatgtaagacgaggtcgtacggtcttcatcgatggtgatgattttgactcaatcattaagtaatactcctaggcagctgtagcccccaagatcttcaattactatacctttagggcccgtttggtacgtaggattggactggactggacaagattggattatactgaaagtaatcctgtgtttggtttaagaatagactggactattttatttattttcttttagaaaaagaaaaacttaaattaaaataaaaatatataataataaataaataattcg

SEQ ID NO: 329324 - DNA, 682 bp, Cannabis indica
acactatctaactgataacttaccttttaactaagtttcttttaacaaaagaacggtttactatacctataagagcctttgctataacaatttcaccaataatactctatttttattgttattgttttaaattattattcttcttttgtattttaattaattaattaaattattttataatgtgaattttgaaaagaattttttgtttgccttcttaattttttttgttgtttaaaaaattttcttgatttattgtgtattatttaaatttaaaattttttttatcgaacttcatttaattttatgtattcggtttgatatctactccttacacttcgatgtatgccaaaatatgctcttaaattttcatctaagttagacttctctttagataaaaatttttaaattcagcaatctcaataattcaagaaaatttgttaagagagcaaacgtaacatgtatctaattatataaagaattagtagtatcaataaataagaaagaaaatcataaacataaacatacccgagtagagacacgaggtattttcagataaacactatcttcagtagaatggaacgtaaatagagaaatagatagtgtccgacgtaacatttagttgggtagaatagagtactagagtattaatagtagtaaaaaaaagcataaacataaacatata

SEQ ID NO: 329325 - DNA, 745 bp, Cannabis indica
taaaaatagtattcttttttaaaattacattaaacttaaaatttaattttattaataataatataacataaatttttatactaaccactagtaatatgttttaccatttctctataaatatatatacaacacaaggttaacttattatcctcaacattattgattatatgatcaataaataggtaggtaggtatacttattataattcacataatggacaaattgtcctatatatacctaaactttataatatatcatataccacacaggtgtatacatcaaatatcatatatatacatatatatatataaacgttttttaatttgaatttcctttgaagtataacaacaaatgcaggcgcagcctgcaatgtgtatttacattgatgtttcctctcattttctaaaaatacataaatatattatatataaaaattaaataaatataaatagatcaaaggaagtgtatattgtaatatctaaaattagtaataaattaacaaccctaataaaattaattaagaataaataagtaattatataattaattatgagaaactattagaaatttattgtatttattaaaaactccattaaagggtaaatacagattggaccctgtgttttgttaaatgacaaaatagactttatattttctaaaatagtaaaaataggaccataagcttaatttttgacaacttttttttttaatacaaccaacttgaagacaatgcttaatacgaaca

SEQ ID NO: 329326 - DNA, 832 bp, Cannabis indica
gtcaaagttcaggggaaaaaattgctaattacccaataatattgatgatgaaatatgcctagttgctgacgtttgtctgatgacgtctcacgaggctgctttcgtctacacctaatttgacaaaataaaaaaaatacttaatttattctgttttgctatattacactattgtatatcgtaccatgtatatatttattctttggtaacaaagcatatatatttgtttagtacaagagaaagacttaaaaactagctcacatagataaacaaacattaataatgaatgattgctgtagatgtaattattatgaaattaaaggggtagttttgacattttaaaacggaggcttttgataaaattatttcacaccaaccagcactctccagaattaagtgggaatgattatttggaccctgagaaatgaaatgtgggggaggaaacatatcatgtggctttgactcaaatttattttctactacaattcgctcttgtcaaattttatataatgttgtttactacaacctttcatataaaatttgactcaaacacatatcggttgttgcaccattcggagatcactaatactagtgattttgagattaaaatatagaagattgtatggaagcttcatgtccccccccaaagtgcaccaactcatgtggcgtgctttatctggctgtttggctactaaggttcaacttactaccaaacacattcctctagatcacatgtgtcctatgtgtaaccaggggcctgagggctattttccatttattggtgcgaatgctcctttgcaaggtcttgttggcatctttcgattataaattggag

SEQ ID NO: 329327 - DNA, 687 bp, Cannabis indica
tcattcttgccaatctaaagagcgggtgtgacttagaagcgtagtccagatttttgagtcaatattttggtgctttcattgagagtcagagctcaagaatgttactagcaagatggttgcaatacattttacaagtgttgacaaaggaatcccaacaactagctaattaactaggggcacgctagttgatggagttggaactggagctactcctacaccccaggtgctaggagcaggcctcggaaccagttcctataaaatcttcctccaaggccaccgaataatcccaagacttgcactaactattagaccctacatggggagcctcacatggagattaatgaccctaaaaaggtcgctcctcgggtcgtccaacttagccaaattgtggttaacttacaacaatagctgcgagactctctcaataatttgttgaaatttattttaccaggatcttagatctactcacaagtatgtttattaacaccctaaatattaactttctaaaacgatgaaataaacacatataaagtttaagaaaccttacattgggtgcagctgaattaaatgactccttccgttcagatctctaacccttgtatcctttctgtagcagagtattattaagatctgaacctggatctccttctctgaatccttgatgctgaaactgttgggttttatgcc

SEQ ID NO: 329328 - DNA, 822 bp, Cannabis indica
aattatgattggatatccgattctattggatcggttgggattggatcggtcggttgggattggattggatgactttctgcacacccctaatgatttgtgtccatgcctttgacaaaataataatcttccacaaagctgccaattttagacacgtcggtattcgtggtgccactcaacaacttctctttgatctgggagaggtagaaatacccagacctatttttcttaggaatggactttaagtcaaacaaccaattggtgtcatggccggacaaatgactccatcctgtggaagcatacaacacgaacaaggcagataagtactttatacccttaagagtgagttgcgtcagactaatgtagtaatagtttgtaatttccttgaagtacggatgtaatggcagtatcgcaccctgattggcatgaggtcttgaccacacacagaagccatctttacgatctgtggaaagctacctaggagaaggaaggaaagccttaacctttcatagaaggccctccttgcagagattggtcaatctctaaaacgtcaggacggatggtggagagacccactgagctcctcttggacccctcttgtaggggtgtccatcaaaccgctcaaattgctcaaactgcccgcaccacaccgcaccgcaaaagaaatgtggtttgagattctttgcggtgtggtcgcggtttgaatttttcataaaccacgcggtgtggtgcggtttgcagtttcgaattgttaatatgcggttcaaatcgcaccgcatcacacattataaaaatacgaatttttatatttatttaggtctaata

SEQ ID NO: 329329 - DNA, 1052 bp, Cannabis indica
gtttttatattttcttatatacaactgacatttgcaaaaacacggtttttcaattttgaatggatccaacttaaaattaataaattcttatgtaatgaatttggcgtaaataaaattgtgttttgtacttattttaatattctaaatgtttttttttttgtttttggactaaacacattgattataatcgcattgtttaatgtgacaacattaatctataaagaattagttagcaataattcaagtgtgctatgatagtctcctatttcccacataaatgatattttggttttgaatattattgatgtgtagtatttaccttgttgttttaaggatgtgtaatattactgttactttagacttaggtgtagtactcaatttaattagtaagagggtacatctatttaattatattttttaaattgaggtgagacacatatgaagtattaattggtctcgtattaactttaacttttaagaattatatataaatctgaattattcttaaagataatttgtagacttgactgttttcaaatctctctatctctgcttccttttcttttgcttgtatttttctgaaaataaagcttggcattccttctaatattaaattactaatgcactatctcagctggtgaaattgcaagataaggggagatcaataacaacaatgacatttttcttttcctcacacaatgaaattattaatgcactatctcatttggtgaataattaatgagcacactcataattttacaataaaaaagtagacatgtattcaaatcatatttaggtaagaagtattagtgtagagttatgacacatttaagtttgactaatttatatggtatatttttgtttttaggtctttttatagtatttgatatgtcatatatatgttaattaagtttttaaattccatatttaatttttttatttgtttagatagtttattgatgccggaaaatttgtcggagtttgctgtcggtgccaaaaaaaaatcactggagtagctgtcagtgccgaaaaagtcatcggagttgctaccg

SEQ ID NO: 329330 - DNA, 1448 bp, Cannabis indica
aaaaatacataaaagtaacaggataataacatctaagtaaacaacaacaaaaaataacaacaaattaacaagagtagatcataaaaatatatcaaaagaccgtattttctgtaaataaaatcataataatcgtaaaaatgattaaaattctgtataaccgtatttttgtaatttttttttttgtttttgtgtatttgtgaaataatccatttttttttatcccaaatgctaaattaatttacatcagaaaagcttatcatgggttaatgaatggtaaccgcaatcaaggctacttgaaggtgtgccgaagacggggacaatattgaccctcattttggggatattgactcgggagtaggtttgatcgaggaactcaaggaaatttccttcactacgacgaactcgaccaaggttgtcaagattggtacgaacctaacaaaggccttaagtgcatttcttgtggcttgcctcaagaaaaattaagacattttcacttggtcgcatgagaacatgattgggatcaaccccaaagttatctgtcatgtcctcaacatcgataaaaaaaattcaagcttgtacaacaaaaatgtagactccttgacaaagagtgctccaaggctctcaaggaagaagtcgagagataatgggaaaacaatttcattaaggaagctttttactcggtgtgggtatccaaccttattctggtgcccaaaccaaatggaaagtggattccccaaagattattttctgctaccccaaatcaatcaactggtggatgttatagcaggccgtgaactcctcacattcatgaacgcttattctgactgtaaccaaatcaacatgtaacaccctactagtttaggtgcactaccgtgcttttctttaattactatgatggcctttactaatcaaagtgtttattataaaatcgtgtttaattgaaactttataataataaaatattttcataaataaacataaaaaatgtaaactttttactgaacccgggatcccaaaatctattctttaaatttaaacataacaaaagtgttggtagctactaatgaaactaagctcgtgttgtcccgaagatctaaacactccaagtctaatcatccagatatgtacaatcttcactgagccccaatactcacaattatttagccctagcctttacctgcacatgaaacatatatctattagtcaacagactcaataaagaaaagtataaaacataaacatataaccgacatgtaactaggcatccatacacctactaacaagtctaaactaggttaggaatgtgttggtttttatgttgggctttgtgccctaaataaaactctatttcaatgttaatcttttctattgaattatcaataaagaaacagatttattttcattacttatttagtgtgttatttggttcatgtgatcatttatttatt

SEQ ID NO: 329331 - DNA, 620 bp, Cannabis indica
acaattaatatccaaacgaaaaaattaaatactattttaaactggatattacaaactataatagatgagatagaaccaaagacattttcaccaaattcttcttactacgatcttcaagaaaatggctatattggtgtctaacatattaaattaagtgtcaatcatgcatacttattaacaaagttattatcaatatcaattttgagaatgcgacatataagatcgaaatttgttgattagaagatttctataaatgcctaaatgagaggagttaatttacattgtactcttttcttttaaacaaattttttcagtaaggtttttaatgatgcaatttttatgaacttataagaaggagtgttataaatattattatggatgttcaaatcaatgcattaattactactataaatgcttattatattttcctttatttcattaatttaatttttttattattttagtcatatttttgtataaataagaatgggtgattctacaatgcactcccttaaaaggggtgtactgatgcacccttgacttgtttcggcatccagaagaattttttagtttaatttttttttcatattcatgtacgttatagctatttaagataacct

SEQ ID NO: 329332 - DNA, 973 bp, Cannabis indica
actcgtcttggtagtaattcaatcgctcgttttagacaatctttagatttcagccatggtctcgaatctccacgggtgggattaagtggtggattaatgttgctctggaaagataatattaatgtttcactcaatatttatgggtctacatactttgattgctgtttatctgttgatgatggccctcttttccatctaactgccttctatggtgctcttgcaacttctagcagagctctttctcagactcttcttaccagattacatgatattgcaccttctttaccatggattctcgttggtgatttcaatgaagtcctatctcaaagtgataagtcgggtggccctttacgtaatgaggcacaattgattgctttccgttcaaccttggatcgttgtttgctcaaagaattaccatatagtggggatcgattcacatggatcaaaaacataaatgcaatcaaaactataaaggaaagattagattgggtgttcactaaccattcatgggattctttttgtaaaagtcatgctgtaacacacttggattttttctcatcagatcaccgtgccatctctgctactgttacactcttaaactctactgctacatcgacacaaaagcgttctcggtttcgctttgaaaattgtggttggctgatccggagagtaaggatatcatctctagttgctggtctattgcctgaaacaatgatcccattacaaatatcatccaaaaacttgattgttgtgctaaatcactacagcagcggcacattcgtaagtatgggaatatgaaagaaaggatttctgatccccaagcttcggttactgctctcaataatgtcaactttccttcacctgaatctgctgcctctctaaagcaatcggagtccgttcttgatgatctcttagaataagaagaaatgtgaaattccgtattttaatattcccagtttgattatttaattaa

SEQ ID NO: 329333 - DNA, 743 bp, Cannabis indica
aaattttgaattttacatttctgaatttattttattgtgaaaaactagacgaacagttgagacggaatcagagttggataagaaaaatccagcccaccaagccatatgtcaacctaggcattaaatgcttatttcaaagcattcaagatgtcgttttgatacttctaaggttctagaacttaaggacgaggtctcctaccccattcttaaccattctagggagaattcttgcattagaattatcatttgaatgattgaaaccaatgcaccagcttgattgtcaacctaagcgctgggttgaactttcatgcccttgtgattgtggttttcttctcgagtttgctcgtatctctattatttatgaagggaaaaatgcccagaatactttttcaagaaactgattggaaattgccaaggttgacaatatgtcaacttaggcactgggtccagtttaaggccatttggaagttttgttttggtccccaaaaaggttgaatcttaatctttgctgaaaatagagaatatgcctgaaaaacgtatgggaaacaatcctcagaattggcccatgatgacaaaatgtaaacctgggcactaggctagccccaggtctcaacctgggcattgggccaacccaaggtgtaaacttgggcactgggtcattgttttggcacccaggatgtgttgtttcttccccaaatgtacctattttcttatttttatgaagacaaagaagatgcacgttt

SEQ ID NO: 329334 - DNA, 512 bp, Cannabis indica
tttttttattttctcaatttctcttattttttccatttttaactattttatcattttatataatataatattaatactgctaatagaaatcaatagacacaaatttttcattaacactatttatatatatttatagaatatgtctatggtaagcaccttaattttgtttctatggtaaggagaattttatagccatagataataaatctaatgatagtaaattgataggtgtacaacaataattaatatttggattgtattaaattatttttaaatattattttttttaaaaaaaaataagatttaataaatcaactaattaatatattttgactggttaattaattaatctattttttcatagtatctctctctttcttccattgaagttcatttcttcagttaccatcttaggctcaattgtgaacaacttatcacctagttgtagggatgtaaacggggcgaggcgggtgtggggattgctcccccaccccatacccgcttcttaaatt

SEQ ID NO: 329335 - DNA, 1558 bp, Cannabis indica
gcaacccaaccaaagcatgaaaatttattagaaaataaataattttaaaaatgaaaaaaatatatgttagaatgtgtcataaaaattatatcatgttaataaaaaatgtattaacgggtgcaattatggcatttaactaaattaaaatttgtgtataaataagaaaacgtgtatgaatccgagttgtatagatagtagaattaaaagtagacttaatcttatataggaaaagaagttgtataatataaaattattcttaaaaatataaaagagttgcaaggtgatcttttgaaagagaattcccttgtggatgtaattggctcgatttgatgatcaaaaaaattaataaagtaaattaattcaaaaaataattatggtagaactatgtatgtaaataaattgatggcgaaagtacttaactaattaattttgttatagttaattattagaatataaattatttttggaaattaaatacctatgtaaagataatttaaattaactttaaaaaaaataattcaaattaaaaattaataatttaaattattaatattattttaatttttaaataaaatatataattaaatattattataatatgtataaagttttaattgtatataaataattttatcataagagtatacaccttttatcataatgattatatgatttcaaattaataataaaagaaaagttttttcgctaagtcctaccatattcttactatatatatatacaaatattacacatagtaaccataagaatgaccgagaccccagaagcgtagtaaacgtagctaggaaccccaaacacctcggtcacgaccatcatcgccgtacagattatatcaatgacgaatccggcacccgagtcgactgagatatctctatatatatatatttagttattcatttgttcggtggttcagtttttctttacaggttcaagttttaatttcttagagtttcatggatgattttcagtggcaatttatttacttttctttgtgtgtttatagagatgatttggttctatattctttagtatgtgttgttcttttgtttactttcagatcacacattggaaggttctcattcggttttcagtccgatcagttttctcccatcttccgtccatcttagttgaagatagtgacacaagacggccatggctgagtgtggtagcgcgtttcagccagcggtgcgagtttcacgtcaaagttttatggttgcaaaaatctcggcataagtattttttaatttttatataatcaaatttatataatattaaattatattccgtgaatggtgggtatattaatgtcattaattattttattattatattactaattgtattaattttataattaattttttatttttattttattttatgaatttccttttatatgacgttttttaattatttatttcaaacacatttttacagcaatttattttaaattttcgtatcttaagatttcttatgtttattttatttatttttctgttttttattgcaatatttattttattttaatggtgtaatttta

SEQ ID NO: 329336 - DNA, 1493 bp, Cannabis indica
acgtaggggggtaaggatgggtttatcacagtggagaaggaatttttacacattttgttaaagtgtgatcgagctttaccacagtggtagcaatagttctggataccttcgtaaagaaacttgagccacttggtgagggaaagcttcctgaaaatgaacattcattccacgatgcagcggcttggtggtgtcaagaagaactcggacccgcataaaaggggtaacagagcgtacagagagatcaagtgaacctcaatgaggtcaccgatcgtatcagcaacaaactgagccagaccgtaggaacgggacccaaacgggatatagtgaacttgaacccagagaggaatatagcgaagttgggaggggagaatggtatcaaatccatcggggatagcaaagatcatgagggatcgatcgaaatgccatggctgaccttccatgacccttcgacggtcaccctcacaaccgaactgaaccagaaaaaggcccgagtgatattcagagaaagagaaagggcaacgagctacccaagcttcagtcatagctttctgaatccaatcaacttttagggttttgggtgataatattttgacgacaaggcagtgggattgggattgaggttcagggtggatggaaacatgatcaaagtcatgaacgagagcttcttcaggagttaactgagtggactgggagacaggaagagaggccatttttggtaggaaagaaaacacaggaagttggtcgaaagaggaaaaaggaactgtgaagaagtatgtactaaccagagaatgaaatctcaaatagaaaaagagaagaaggaaatacctggagtgaactggaagatgaggggatgctaacacaatcctatctgcagagggcctagatcctcgtctgcccagccatagggcaatgatgcgcctccacctgaagaaagagacttgcaatgaatgcatgaaatgaggggaggaagaaggatagccaaagggagtctgcataaacattaaattccttctcggaaaaggaaaaaacgaagctgcaaatagatactaacaatgattataggaaaaaaacataattaacaacattaattgaggaaagagagtaaagggagaaaggggaaaatgacggttagtctggaaaaaacaatcagagggagagagaaaaaaggggctgcattaaatattagaaatgatgatggggagaaggagattaattgctataagtgaggaaagagaagatggtggagaagatcaaagggacgagaaagagaagagacgactggataggaaaccagagaaaaaccctagaacgttccagagcagggaattagaatcgagtgcgtgcatatggacttgattatgattaaatgcgcaatttgaagactattgacgtttaggttatttatttattttatttaatattatttaatttataacagtaatgaattattaattattttttattgttttactataataaaaaaaataaataat

SEQ ID NO: 329337 - DNA, 733 bp, Cannabis indica
cccctaagactataaaaaacaactctaccattattaatgataaacaagtagttatataatatattgcaggttcttagaaacttaccgttcactaaaataagaaaaatagctcaaggaaaataaaagctcaaccaagaacgcgaagttgattggagaaaataaagaacaagacttgaagagctctgagagcgaaaatgagaaagtgtgcagaaaaggaaagaaaagttaatccacgtcaacaaatcagaaaaagaaaaaagcaaaggtctaacgatcttttttgcctataaataaaaaactctgtcattagagaagggggggcgaattcttgctcacgtcaagctaatccaaattatgtcgaaatacttttttgagattattttgagctcaggaaacaaacgaatgagagagattgtaaaagttgaaagagaattgtataaagtgacagagaacagtatgattttgtaagaaaatacaaaataattaagatcatattgtatgaataaaagtaaacttctatttaaaaggaggtattaagtcgaattgttggataggaaaaaagtgaggtttattataagagtcttgtctattgacatggttgttttgtttctctaagtgttgttgagtttgtctgctgttcgttaatttgctacgaattcgattatggaaaaccattatgattcagtgaccttggatgaggaagaaactgggggtctgtgttggaaattatttt

SEQ ID NO: 329338 - DNA, 1274 bp, Cannabis indica
tactgattgatcgacgatatcgaacgtccttgagctcctcataaattggtcttgttgttggtgacataccagcctacgccgctatgcgacttgaacggcgacagtatttttgggaaatatgacaagagattcccaatccaagattttgaaagtatcgaaatcatcaacctgggtgtcgcccgcataaagaccatcctcgtaagacttttcccacttggaaagacaagcataacgtttggtgacgtgttgaaatcggaaatattcttctccaccaatatcaaatttgataggcttgaacaaggtatttttccaatctgtttcgtcttcctcaaggggctggtcagccgaggccaagaaataccaggaataattggattgcatggtcaagtatttgttgttgtagcaataacgtatgtgaacccatcccggttttgtcttggctctttccaattcgaatttcaccaaaggactcgtaacgtcctctcctcgaaaattcacatacgtttctgagaacccttttgtgatgctctcttccttgcttatctttgtcaagtactttccattgtgcttagatttgataaccacaaatcttggcaaatcagacatttttttttctatataattatactgaatgaatacttttgtaatttggtgaattaataagttgacataagagtttgtctatttatagatacattaatgtagagagaaacagagagagttgagagatgtactaaaaagtaataaacggattacatattgaatattattaattaaatgacgaagatctccaccattattggatccaatctgaaacctaactactctaataattagactctaatagctaacattcatataaatgacacatagacgattaatgttataggttactagtgatgtactctagcatttttaggtacatgtcgctttaagatatgttaacgaaattttttagaagtagtgtatacattaaacaaaaaaatagcgatattaatacataaaaaatagtgtattaaatactacaagtatcttttagcatttaattaaaattaattattgatattgtgttaaattaatgatggtacattcttacaaaattgatagaaaaataaaaatgctctcagaccaacaatccattagatatagacacttttataacataaggatgtaattacagattaacttttggtcttaccgtatcaacattttctccggtttggtttcctataattattataattatttttatatatatgattaagtacattata

SEQ ID NO: 329339 - DNA, 1111 bp, Cannabis indica
cgaatgtggacgtaaacaaacaaattggaatgaattgaagtactcccattggccaatttcatgtcagaagaaagtaaataataaattaaaaaaaaaaagaaagtggggtttttgggtggagaagttcattggagcagaaagtacacgtcaccagtaaccccgcgttcttccctctaaaaaagaagacagtactggtcagtcagtcatcacagtaacacgtggcagtgtttgtagggctattgtcacagcaccctgaaaatctagttcactatcattggccctacacgctcctctcctctccttgtctctttccatattcttctcccccctactttttaagtaaacgttcattaatattttccaatttaaattaaacaaaatatactaaaatataaacgaaattcatgcacctttttcccctaatgaaattattattattatcatgaattgaatatggaataatatatataaaaaagccacgcccaacttcctttctccttacgtcttctcactatacataacgtacatttttataaatatctatgtatttgatcagtctcatacaccaccaattatacattgtaaaaacaaaaaagaaaaaattgtcaagtgaattttgataattagtaggtaagatgtaatgattacgtgcatgaaaataggggaaaaaataaagttaaacaatatatatgttactattattattaatttgttcttgtatgtattcatactatcatcgttattatatattggactattattagatatatgtatataatgtgaaatgtatgcatataattaaagtatgacaagctcgttagtgtaggcacaatattgacacaattttattttttacttaattagttaattaatttctttttatatataatttatatgctacctacttaattctatattgttttataccaaatacgcaagacaatattgttaattatatttggaaaaaaaaataaacggggaaggagggtatttgtacgcaagacaatattgttttataccaaggagggtatttgtacgtttttgctaattgagattttaaatgttttatttaataaaggaattatttcacaaatacacaaaaaataaaaaa

SEQ ID NO: 329340 - DNA, 1071 bp, Cannabis indica
cacgatcttttgttgtgtcctttttggttgcatgccccacatttgacctatgtttttgtttctaggacacctttgtacctttgttttcttggccgccctgctggcctcttgtgagtcgggggtagaacaatcatatcttttatatgatccggtatatcccaagttgttgaatctgctagtggtaagatactatctttatatgttgacaaaaaaaagcttttcttgtgtagtagtatgagcagtagttgtagcacgatagattccttttggttaatacagccattgcatgtgagaaaggcatttcatcatattcaaatttctgacagctgcaagttttttttccaggtttactatgtatgagtcgatacaatcatgtactttgtatacaatcaagtttgatgtttccacctatacaagtagatatattagttacatttttaattccatgtataaaaatatattagcatgtttattggtatacatccgagtatgattttggatgtgcagcaatagactaataagtttatttaataactgtatgtatatatgtttataaagtggtttataaagaaaataataaattattactgtatttaaatgattatatgcctatatatttatttgatgacttttttgttgatcttttaaagaagcattgtaggatattttgtatagttatgaactagtaagtttatttcaataatgagtacaataataaaccagtacgtttattttaaataaaggggttttttcaataatatacttaaaattgattttatttgcaaaaatactttcaacaaatttatttgcacaaataccgatgtgccacgtcagcattaataccgaaattcaaaattattaccgaaaatgaaaaaaacttgaaaattctcgctttcagaaatttcagcgtttttcaagttttaaaaaagtaactttttagttgcttttgatgtaaataatttatcaattagttactttttattcaaaaaaaatgtttcaagataattttttctcatacacatttagttacttatttttatcaaataacttgaaaactataattttattttt

SEQ ID NO: 329341 - DNA, 2243 bp, Cannabis indica
tgccccaaaatctgtgagacaaaattacggaaaagacaatcatttctcatttcaaaaataataaaaaaaagaataaataatgaaactgaagatgcttattactaatttttattttaaaacagaacaaaaaattagattgttgtatctaacacttattagacagagatcacatctctttgcatcattgtacactggttagaatagtagaatactgtgtgtgtgtgtgtgtgtataaatataagcagaacagatcaaaataatgacaacaaattccaaaagaaaacttttaatcaaaacttatcaattctaaacataaccaaaactaaaacaaagagcagtattcataacaacctttaggtaatcccaaattaattagtatgtgtatcaatgtcacaatgcaattcaagtctttttttttctttgctggggattcaaatctttagcatatttgaaagttagatcaattgttacaaacatatcataataaattaattacaaaaatgaaagtaaatacatctttgtaaactataaaagatacacatgctttgctatacaactttacaaatataaatcagcaaatccaaatttttgggcctgccaattggtgattagcaacaaaacattggctggctagcttctgaatttcatgtttaatagagcaagaagggaagcaccaaacaatgagccataacgcaacaagcaaaacctctatatttaaattatgaaagatttatattggttgtaaaagtttcatatgtccaatttctcaaaagtgaaattagcttgtatcatctcaattcacaattgtaatatagaaaccagtgagcagtaattaagtttggaaaaaaatgtcacaattagacaagcacaagtctttactgctggaatatgaggtgataaggatttgtagagtacaaaacatagcacaacacaacaaatggagccattgatagaattatataaatatatatatatataatatttatatatgtgtgtgtaagttgcacccccaaagattctcattttgtcaattgagcgaacaccttagctacattattttaccaaaagttgactacatcttacttcttatctaattgaatatactaagattaacccccccaattaagttgacaatgttaaaattatcatgtatatacatattaatagcgtcactagtcatacatctttttccattttttacatctaaggccaaaaaagaatccgaaatttgaaaatgcactactactaatactactgccatgaccagacgcaaagcaagaaccaataaagaagcaataaaactgagcttggtactgaccccaacctctacaaatcttcatataaatatatgtgtaatatatattatattgcttctaaaactgaacaattctatcaaaatccccaagggaaatactatccttatcttaatatcttagaagcaaaagtcagaaactcatttcattggacaatgtctccaactataaccccttaattaggttcaactcagcaaatatttaatacttatatataaaattaaaatgattgtactaaagttctaacagaagattccatctaaaaccaagaagaaaaaaaaaatcagtcagggagatggaagaaagtgatgccttacggaggggaaacagttgaagtggttgtttcctaaacacccattgagagagaaagagaaatgaagagaagaagaagaagaaaaaaaaaaccttgattgagactgattatgttagatgctccgcggtttgagtgagacaaatagagggagagatataaaagatgaaattacacttacatacttctttttatttgataccttttcaaaatttgatatatttttctttctttaatcattttatcaaattattttttactatcttttattttctctaatccaaattttactttaactttcttacaaacttacacatacatcttcaaagaatacaaatctattatgtttgaattatgtcttagttatgtgagtgtgtaaggaaaatttagttataatacttataaaaagagttatatttgaattaaattttatttaaaattaaatttaattaatgtataaaaaaaaatatttttaacttctcccgatataaaaaggggagttctaaaaaactgtacattcgagcggcccgacccagtccgatctatttttatgttttttttttaggaataattacataaggtactattttttgtaaaatatttacatttttacgtttaaa

SEQ ID NO: 329342 - DNA, 1302 bp, Cannabis indica
tgtccaatattgtttgagccagtaagagtatttttacatgaatggaatatcaacagttgaaccacatttcagatcatcaagcacatgagtgaggtagccagctccttaatcattcgagtttttcgacaacagatagctctgctcaataatctccttttgaagtttttgaacacatgggcttcaaatgcctagaaaggaaaggtgttgcagattttcttcaagatcaaatttcataaaaaagaacaatactggtgaagaaagaatcaatcttacttcatatttatgcttggtttagttcaatgcttatctctataattatcctctgttgaactacctttgttcttccacaacacatcatttctaaccttctaaatggcccgtcccaccatcacagcctcctcggccaacataccagacccgttccagcaggctttggcaaatgaacaacccaccaaaacatggaatatagactccgactccctatgacagagaggacaatctctagagcaacactagctggatcatttaagaatgctagtccccaacgtcgagcttttactgcaactaaaccctgcggataatatctagccttataaatatggccaacaagtggatattcatatagcaacaacctccaaccttgcttccccagtagagataaattaaaacctctaatgcttctgaagccaaggccaccaacatgcttttgtctacacattcagtctcaccccatccaactaataccacgaagaatttcgattagaaaaagaccaacaatacacaaacaccattatttccaaacttacacaagtctccaaagggaagagaaaaacagacattgcataacttttggatgagttgagccactgctttagacaaaaaacgacctttcatactttgaattattttctacatgttatgctaccccatgatacaaggcatccccaaatacaaacttctttcattagcttcaacgaaccccatcaatagaatgactattggatcctaaaactcagcttgtttttcattatttcagaatcaccatccaacgagagcaattaagcaatttaaaaatcgttttccccaactaaatttgttcatgtattttttttagatacaaaagtcaataaatgagcggaaattcttttaagcctgattacaccatgttaagaaaatcaatatgccagtcaagtcttatctgtatgctgatttcatgttagcatcagaatatgggatatttgtttgtgatcatagtctttttacatattgtcttttcactctattggctcatacccttatagt

SEQ ID NO: 329343 - DNA, 936 bp, Cannabis indica
tggacttttataatttttcaaaaatagtaaaaataggatagactcaaattttctaaacattttttttttaatataaatcaactttaagataatttttaacacgaacagatacaaaaaatgtaataatttatcataatatctcttgatcagattattattaagtttattttgataaaaaatcagttcaggtatcttatttgtacaattttagaaaatacaggatattattattattattattattattattattattattattattattattattattaatttgttgggcctttgtagaggctttggggataaaaaaaagtattggggaattgtataacttgaaatcgattctttagtttcagttcaaactgtttttagttttttgaatttaccttcctcttttggtgatctaagattgtaagctccttttagcttctttgaactttgtcaatttattttttgttaaacgttctgtaaataaagctgcttattatattgctcgtagctcttgtttatactcggatcgcagttttaatatggatgatattcctactgaatttttatatattgtaatagttgattctattgttaataaaatttctctacttaaaaaaaaaaaaaacttattattattaattcttttttctaaaaaaaaaatacaattatttatatgatgcttctgtgtttgtatatataatgagacgattattattcctaatatatctcttaatcaataatatagattcttacaaaaatatacaaaaagttataatattgatcaagggtaaatatattttggaccctgttttacaaaaattatcaattggaccctatgtttgttaaatgacaaaatagaccctgtattttccaaaatagtacaataggacctgaattgatttttgtcaaaataaagttaattataatccgatctaaaag

SEQ ID NO: 329344 - DNA, 1443 bp, Cannabis indica
gaagaagaagaagaagaaattgagagaattgaggagaaagttgctcttcttgtctgtgacgtgcaaaagtaaaaagaatggtcctcatcatttaactatagtcaactaatgactaatagtaagtaatactaataactaaccgtttcttaattttgtaattactacgtacctttgtatctaaaatttggacctctccctaaaattatgctctttactttgacaaattatcataaaattggtacaaaccacacggttttacctattttgatactactaaagagaataataaatataaaatacgatagaattagtatcattcgagaaattctatgctagagcactttaaatttgaattcaaacttaattaatttataagaattaatacaataggattaaaaaaatagcgacagtgtatcggagtctataaaattaattttgtaatggtacgatcttccaatattacagtgaaatctttctctgtaacttttgtctcttaatgatgggatttcaagagaatgaaaaaatatgatattgcaaattagggaacattacgtgttatattaccaactcataaaacagttgttatactcaaaattcggctggaggacacgtgtcaagataaatggaatgtaaatcggtgtcgtatctttttatggaataactcattaattgcgtaagtactagagtatatttgcaacacgctgactgtaaggtcttaggcgaactagtacttagtgtattaacgagaaaccatatgtcgctaaaggtgaatagcgaggcactggagaagagtaacacatacctaagcttacaataagtagaccatgtgtaaaagtcagatcggtcgaagaacaagaatgcgagaagaccatctcgctacgagaaagcttcccatagtttcatccaactaacggaagcgagactcacaaccctggaaagtcaacagatttccttatattcgcaatcgacgtaaaacatatcttgtcgatctcggatagaagaatggttccaactctccattaggatcactacaatcaagtttctgtcgagacatcttcagaatcaacaattaaagacgtatttaatacacgatatttctgacccagtaaaagcgagaaaatcacagctatatgattttcaaagtcatgcaccgcatttacattttgtaatatgtaatcaattctcacgatttaagggataatgactgtaattacattttagtcagccttgtaattaacggccactatgcaattatagatagcaacaaacaatctcaaaaaagggacgaaaaaactcttatacaagaggccctaaaaaatatactcaaaaatctgaataagattaactcgtggactatgcagagttttaactgcaaaatcacgtaaaaaacccggtgttcatattttatttttctataatttttattatttctgtgttgaatca

SEQ ID NO: 329345 - DNA, 913 bp, Cannabis indica
cctggtaaaataatttccatcacggacctgggcgtggacccgcatcccagacccggacccggacctcggacccggacccagaccccggccctggaccgagaccccgacccgaaccccagacctagacacagaccaggacccggagcccggaccttggaccctggacccagacccgggctcgggcctggacccgcatcccggacctggaccccgactccggaccctggaccaagacccggacctcggcccaaaacccagactcggacccagacccggaccccaacccaaaccccgactccagactcagactcggacccaggacgtggacccggacctggtacccgggactcgaactcgtatttggtgttgggatcgagtgtattaaaaatatattataactttacacaataagttaatacaagtcaataccaaacttttattgaattgaataatactaatacaatataatacaacacaattcaacacaatacaatacaatacattacaatacggtgtaccaaacgagccctaagataatatagaatgacatcataagaggatgatctataaaccattcatctaatgatatattatttaaacaaattcgaaatgaataagctaagaggaaaaattaggataatttcgattataataagaatcgaataatgtcccgataagtgagagtcaaagttattcttattttacacgaaatttacaactacaattaataacaaaaaataacatagttcaatataaattcacacacaattcagaaattattgagcatttagcgaataacaaagacatgtgaaaatacaaaactatcacatcttaaataaattccaaggtttctaacaaactaatacagtgtcccggtaggcgagagtcaaagtaatcattcattgaatagagt

SEQ ID NO: 329346 - DNA, 657 bp, Cannabis indica
tccttttttgtatttttttgtttttttcccttaattaaataatattataaacaattctttgacttatcatcactacaagaaaatgtggactatatctctcatacatctattccacaacaaatatagtaacatcaatttctttgacttatcatcactacaagaaaatgtacttttaccaatgcatttagtaaaatgcgacggtataaataaaatgttgaatttctactttgattcagcaacaacttttgccggtgtattactacaccgataaaagttgttaataccggtgtattattgaatatttgcgggtaaaagatagaaaataaattgccaaaaggcgtgagaatttttccatatcccattccagcgcaaaattgcgccggtaaaagtccacccaaaaatttgagagaatctttaccgcgtgaaaaatattttaagggaaaaattcctacgtggactttattggtaggtgaaagtacttttgccggcgcatcaaaagtaataatcaaaacgtttcgttttgatttaggttaaatgaaaaacttctatcggcgcattttattacgccagtaaaagtatatatatatttcagtagggcacgaagccccccttcttcccccatttttcttttttttttttttttgttgaaaaactttt

SEQ ID NO: 329347 - DNA, 842 bp, Cannabis indica
atcagtaagattgcttgcaccgaataacggacatcagtaaaccgtactaatagccattgattaaagattttataactttaatatgttgatgaatattttattcatggccaagtgatattaattctctgtacaataaaaaatacaacctcatatatgaattttatatttatacataaattattcaatataaaatattaataatataacaatcaagcatatataaaaaaatgtttaacttttatttatatacagaaatgtctttacatgattttcacagcataaattctaacaaataaaccacattatctgtgactagttttcttagttaggatttagatgaatctctaattatgattttaattttatgatttaatggaaaatttagtttcatccaatatttttcatgtgattccaccttgtttaattgttgtcatgattatgatttatgtattgttttggtttatgtgatataattagggtagattgtataatttattacttacttacacattctttattcggcactcgggagggtatattgttctaggttcttgaaaatattagaataaactagacacactaatgattaaaatcataattatattaggatgaaatcaaaatattgacaattatttttatctaattaatattggtatgaaaagcttggtaagttaaaaaaaaaaaacgagtgacgtttaaaaaaaaagagtgggagtgtgagatgaagtatatatctattttatataaagtgtgcctatataactgaattttcggtttatgagaaatttatgggtgactttttatttatattaaaaataaaataatttattattaaaaataaa

SEQ ID NO: 329348 - DNA, 510 bp, Cannabis indica
taacaataaaaaaaaattaagcataaaatttagtatacgtgcctcgcacgtagtttttgctagtatagtatataaaggcgtatgatcgtatagtttggaaagagatgtgaaagagtttaatgtcaagtgatagcaatgttcattaattaattaattttatttttttaacaaatattgttacatgttttaaagcatgataacgacacatttaatatatatatattttccaaggcatattatcaatatccgttagaattgtaccttgtgttgtgtaacattggttattcaattatatagtgaaaaatattatcactattaatatatttttatagtactgttcatttatttattattagagatttttttttcttttctcatcaaacttattagagttgaaggatagttataacatgggagctaacactgataacgcattatgattggttagaaatattttttaaaaaattattatcttataataaattatataagacttaatatttaattata

SEQ ID NO: 329349 - DNA, 853 bp, Cannabis indica
agagtgagattaagtgttacagattcagacaagtgagagttttatgaagaaaatagactagtgtctagtgagagagaggggtagtggggcatgtgagactttagagtttgggtcccctatgatcttgcctaattccctttatataatgtatggcttacaaaagatcataattcaaagaggcaaatatccctctaaaatagggaaaataactcttcctatcttttatttaaattaaaaaaggataattaaattcttataatgttggattaatatcttgagggtatattcttatctttgtgggttgtcggatatgttccgtaactgaaattaagcttgaatgttgttcaaaaaatttattgtgaacccaaccattcatttaaactccctttgatgttgtttgcacgtgttggtcggccatccctactcttagggcctagccggcacatggagcttcattagctggccaaggtcccctggctggccattttctccctagtcaaccttacttgattgccttagcgccctcgataattgatatgtcgtgcaaggtgactttgttaacttattaacatgttgtattccacgtggtctcatttttgtgtacttggatatgccacatcaagtgggcaaaaattgggacaatactttgtattttttaaggaaagaattaattattttttatttatccaaatcttatttctttctcaagaaaccgtgaacaacttgaatgtttattgtttatcgtgtttctgaaaaaccgtatttttgcaaatgtcagttgtatatacgaaaatataaaaattgtaagcgtttgcagcagcagaaagtaattctgctacagcaaaactgaaca

SEQ ID NO: 329350 - DNA, 761 bp, Cannabis indica
gtttgcattgggagacttgtcctgaagaggaccttatctctatcattatggattttaaaatattagcttccatgatataattagagataaagttgatcttgtttagtatacattttaagtccttaatgtgatgcttctttagagagtttgcatcaagatgatgatcttcacaagcttgttggataaccattgtttgaaaccatggaagaattaatcttcttcccaagattgttggacagccgaactttttctttaagaaattctacattttaagagaaaattaacctttatacccactttttattttttattttaatttttacctttattttattactctttaaataatacccagttttataagtaatatccctattatgtacattaagaactttaattctgataaattatgtgaagttatatttaggactttaattataaaagaaatatttatcaattaaaattattttgatattatatttagttaatgtataattaaaaatgatagttttcaacttatcccattatttaaactagttgtacaacattccactagtacttctagttgtacagttgcagtctcattctttttcacaatcttcacaatccaaaaaaatcttctatcaatctgaccagcattttcacaatgtttctagaagggaaattcgacattttatgctaaaaaaatgcacatggtgttattttatacacagaaaatatacatttgataattattcttaactttcaattttgttcaaaaa

SEQ ID NO: 329351 - DNA, 672 bp, Cannabis indica
cggccactgcgaatgttttgagaaacaagccttagatttatcatcattgacatcaacaagtatcatacagttaaagaggggtaaatataacacaaagaagatacaaacaataatcaaactctactccaataaccatcgggattagagtaggcgatagatttccaactatgaaagacgatcgaacgatagttatttcccgagaaaaacttgaataatataatagagcatatccattgattggagaaagaaaaaatcaaaaaaatacgagatatagaatagcaagaagacaatcgaagaaaaagcaccgaatagcttcgatatgaagggaaggattgagaacgagtgataatggaggcacaggatgatatgatatgaagatggtgtctttatagatggaattaggggttttagggattttagggttttatcaattaacggcggcgatatgttgttttagattttgaatggaaagcagtgccataatgtgatgctgggctttctttcgaaatgggctcattttgttaggtcattttacaaaaatactggatttgaggtaatacttttcaattttactgccacacggcagaaataacatttatactgtcctcccccattttttttcttttatactgtaaataccaaaacaaacgtatgagacctccatctttcaca

SEQ ID NO: 329352 - DNA, 862 bp, Cannabis indica
tttgggcataatagaaaaatggtcatatattttaaatatggggtattatgagttttgaggataaattttaactaaatgcaagtatacaaattcaaatttccctaatatatacataaatataaaatttaataataacaatacaagtcatttaatgtaaaagatcatattaattaaaatttaataataaatattaaaaataacataattataaatataaaaacataacatttattgtgatgtaaattttacatcatgttaaattgtaatttaaatttaaatcatttttttattatgtgacatatttacatcataatttggtatactattgaaatagattttaataaaaaaaaaattatattttgcatttaaatcatttatttacatctaagatgttcctataacacattagagtaatgataataaagatatcgacacttttattttcctctcaaattacacattataatgtgtaattagtttgaattaaatgtatattgttaagtggagtatcatatttaagaggctaattgattgtgtatttgataattcatgctaattggtataggtggacctacatcagagagagtttaagcccaccctcaaatttcagaatagattatataaaattaaacatagaaacaatatataattgttgcacaatataatttgtgtaggtgtttattcgttacttgatagacttagttttgaatctaattcccctcaattttatcttttatttttatttaatagaataattagcttttttagtccctgtacttacgacactatactatgatgccccttaatttataagtgtagttaaaaataccccctaaaatatatcagttggaatagtataatc

SEQ ID NO: 329353 - DNA, 608 bp, Cannabis indica
tcaatcatagtgcggaagatggtaaaataaatctcaacagttgacacattcccaagattctccacaattgactctccttcctctacaatgtactccaatatctttgttgtttaattgtggaacttcccttgcccaaatacaatacaacgcatccaattctgatctagatttaattattattattggttatatttaaaattgtcaacatgaaaagatatatatatatatatatatatatatggctgcatcgttggatttcgaaccttaacaagacggcgggtaaccaaagccagtaacacctcaacaatggtgtacgacaacccaactgcaaaaccttctgattgtcttcctcttcttcttctctttttccttcatcttctttagttgtaagactccagtaattccaactgatccctccaccgcccttggattctccacgtcaacaggcaatggagatgtcgatggctctaatttcggaaatctgacactggtttggtctttggaatcgttttgggtttcaacatccccttttgttttatttttttaattatttttaaattatatatataaaggagaagtatgatacggtgatgtggcgctctaaaatt

SEQ ID NO: 329354 - DNA, 984 bp, Cannabis indica
attaaacacagaaaccctataagctatccaaaccacataggtactctcgtcctatatcgaaatttgttcctattttcactaaagcataattgatactcacactctcagtcagattttgtatcaaaatcatagacaattaattgatggccaggcaattaaaataaataagtacaaatgaaagagcatacccaaaacatcaaagaatagggatggtaattatacccgcaggtacctgcccctaatggggtagggacagcggttgacttttgggggcggggcgggtatgggtttaaatattcatgcccaagtcagaaatggggcaagagcgggggaatagataccgccacgatatgatatatgtagatatttaagttttaaaatcataggtactacaattaaaatgacttcatgctttaagctttttattgattatactcctttttttcactatacacactattccacttaagcttataattttactgagttttatgattattttttttaattttctttgagacgtcattttttttcaaaaatatatatgtaatgggtactcgatgggaatcctttccccatcaattaatctccgccccgcccccactttaatttaaacaggtattaaggcatgtatggtggtgagtttagaaagcatgtatgggggtgggggagcaatccctgcacccgtcctgtcccatttacatccctacaatagaaccagacctaaattcatctaagtttggcagtattcaacaagggattgaaggtagctagttagccaagaggaaaagtaaaaccccagaacataattcctttaattttgatagcttttcttaattttgtgcatgcaagatttggagataggttatgtccaaaccctagctggttttgggttgttttctgggttagttttgagttgtttacttctaatttattgtaaagcccgcttagttaatttggaaattagcagttatttatgttaat

SEQ ID NO: 329355 - DNA, 1386 bp, Cannabis indica
ctacattgtagattatcctatcagtcaaactctgtgtactaataaatcataggaatacatttaatcacacaatcttgattactttccactgtgttgacaacacaataaacaagaatatcaatgtgatatggatttggatgaatttataaatcaaataaacaaataaatgatcacatgaaccaaataacacactaaataagtaatgaaaataaatctatttcttcattgataaatgaatagaaaagattacattgaaatagagttttattttggggcacaaagcccaacacaatttagtttcaattatagtttggaaattttatttcccatttaatattattgcaaacaatttattgtgatatttttgtgagtattaatttaaatttttttctttaaaaggattttattatgagttgtttttacagaattgagctttatattctatatgttgtatggcaatggcaaaatatatttatttgttaatcaagctttgatgtgttttaagtttattattgctacaaattctatagtataataaatactagaatttaaatttaatgattatgaataattttctattcttaaataattattaagattttgtttaataacatatcttatgatattatagaggtggaagaagttattgatatatgcagttcaaagatcttttatattaaactctaaattatattcgaaacaccacaagatctctataacatacatttgattagacatagatataatatacaaactagcaaactaatagaacttattctttatgttgtacatgtttcaatagtaatagataccactaaagtccattgataatagaatcacagtacattatcttagtgggatttttttttctagccccttattatttcgatgacactagtgataacttacaataatatgttcaagcaaggaacattaaaataaaactaaagaaagttaatctaaccattcacatggatagtaataacttattagaatattgaggataagataggaaaccttgcaatgtcttttagaaagacttaagcaccattcttggtccttatgaaatgttttatggtatctctagtaattacttaaccttaagcaagtattttacattaatgttaaatactagaatgcaatgttgatgacttagtctaagaggaacttattgattctagataaagataaaatgtaacaataagatgtccctaagtaccaatggtaagaagttaaatggacacttgtgaatgcattaaacaagactcctactgttgagtgggcaccatcaaagatgtaatccaacaggcacatagggagacaatcaagaaagaatctctaaaagttaactacatgttagatgaaaggggcgtatttaaaatcctt

SEQ ID NO: 329356 - DNA, 729 bp, Cannabis indica
acccctcaaaattaaataagatgatttattagagttttttttttatttaaaaattaattattgatgtaatgaagtatcaagtttcatataattttaaaaaataaacttttaaaaaaatttaactaaacaatcgtaaaacgctttctataaaagatactgaacactactagtacctaataacaattctcataactatattctttcaaaattcttgaaaaaaaaaatctcaaaattgacattttcttttttgtaggaatactaatctatattcactaaattaactctgttttaaaagttagtataatccaacttgagtgctaattaatagggaaataattttaaaggttttttttttttgctatttgaaaaccaagattaaacatagttgaaaacaatttcatactttcatgattgcctcaacaagatttatgcttcttagcaaaaattaactatctaaacaactaaaataattaaatttatatagagagatgagaaactgcaagctagtactgcattactatattttttttttcttttcaaatgtgataaacttataaatatatatataataaattaatgttaggtgcaataaatgtataattattttttttaattaacttcaattaggtgatgctaaatgtaagttcaatttttttaaattaagcaatgcattttttttcttctaataatttattgctgtcaaatattattaataattagttttatttg

SEQ ID NO: 329357 - DNA, 678 bp, Cannabis indica
aaatattttacaaaaaatggtgcattattatgtaattattcctaaaatctaataaatatgtaatttgcactaatttttttattgtaaatgatttatttattgacttttttaaattaacttgcaccaagtgtgttgctgcaaaaaaaaaaacaaaaaaaaaaaaaccaaattgtgttggatcacaaagaaaatggttttacttgctgagtttatgtgctaaatttaatattttctttttcatatcatccaatagagatggtttaatctttcacactaaatttagtataatttttagtatatgtatcaaatttaaaagcattactctttaaaatattgttggagcaatggtttttctattattatttttactcactcactcattcctcacttattatttcctctaagtgacggactctctctatcaatccttctagggttaataatgttggaaaattgttgtgctccaatagaaatgttaaaccaacaagattacaactcaatgacaaataatacaaaggataaaaatatagattaaataatgttacacatgaataacaatatatatattatatatataaattagagatgtgagagcaatctcaacaccacatacaccacaagtgtataataggggaatcacaaaacttgaacaaggttttacacctttgtccaaaagct

SEQ ID NO: 329358 - DNA, 1076 bp, Cannabis indica
aggtttataatcatatcatgtacaagacgcttgaatttgaagtcagaatagagaacccagttcttaaatcaaacacagcggttaagcaaaagaatagagatagattaaagaccttgagggccataaatgtcgaagaaattggaagctttatcgttgtcagcgatggttgaggcatcgttggagcagtcattgtcggcttcggcagcatgaaccggcgaaggcattctctctctctctctctctaacttgatgatccagtagagtaatttagagagagatttaggaagatgaagggagtaaatatgagtttttgagcaaaaaccttggagaaagggtttttcaattgttgttgtataaacttactaaaggggcaaaatgaaattagaagaaaatatagggctctttattaaaataactttttttttcaggcacttattataatacaaaagaggagtgctaccgtcaacctcctgttacaaccttcatgtccgaaaatacatgtcggaatattttttttcaattttttttttcacgggaggtgttcgttatgcttactacatcatccctgtaaaattttgaaaattttcaaatagtttacagtgtcgaaaatacgtttgaagttttttgaatgcgcgtggtaaactggaatatcaggaactttgttttcggtaatgtaaactattcgaaattttttaaaaatttacagggattatactgtaactataacgaatactgctatgaaaaaaaatatttcaaaatgtgatttcagacgtgaaggttgactaaaaggttgtaataggagattgtaattagtattcatctaatacaaaatgaggacatgtcatgattttagcattctttttttaaaagatatttcttaaagatgctttttatagctaaaatctgaaattcactaggagtatttattggaattttatataaactctgttatcctaaaattggcactctgacgtagcatcatgagaatggtgacacgtggcatctacttagagcacctggtcggatcaacatgtcgagcaggatgcctcgctggcatgtccataatggaatactca

SEQ ID NO: 329359 - DNA, 1447 bp, Cannabis indica
gatgtaagtatgggctagtcatatgggtaagagagtaacgaacaagtgaaagaacctagatagtaaaattaagctaaagcttaaccatctcagaattaagatcaaatatgtgatattgacgtagaatagatataacagtgagttcataatatcttttccactatcaatatcagtctagtctgatgtatagtcaatacatctgatacaagtctactttgctaatgctctagaaaagagattctatgtatacaagtgtaagtaaaccacatctttaactatcatgttagtgtaaatccagtgcactgacaaatcatggaactaaaatagtttgaatcatattatcaggattattttctactgtgttgacaacactataatcatgaataaaaatatgattgggatttaataaaatttatatatcaaacatatgattatgaaagtaacatgttaaccaaggaatgtacaaaagttataaaataattttttatcttttattgataagaaaaataagattacattgaaattgagttttctttagggcataaaaccccaacaaactcccactttcactaacataaaaaaattagtacatttcaactaatcctatattccatttgcacttctcgaatgcagtctctatcagtgtcttcatgaatgggccaataatattattttcagtgtcaaccttcttcatgagtacatctcctctcgccacatactcctgggtgatgtggtatttcctctctatatgtttgctactcttgtggctttaaggttctttattgttggcaatgccaccagtgttatgatagagtgtcacaagttgtttttccatatttgggataataccaagatctgtaaagaactttcttatccagaccaagtccttactagcctcagtagcaactatgtacttgacctccatagtagagtcagagattgcaaattgcttaatgcttcttcaaatcactactccccccaagagtgaaaactatccaagatgtagactttctggcatcgacacaagcctaaaaatttgagtcaatgtagcctaaagggtttaaagcaccacccttgtatactaacatatagttttttggttcttttcaagtacttcagaatgtgtttaactatcatccaatgttccttttttgggttggactgatacatgctcacaattcctactgcatagtaaatgcctgatctagtgcataacatagcatacgttagacttccaactgttgaagcataaggaattcttctcatgtcttctatctcttggggatcagtgtgacattatgttgtggtcacgcaagtgtacgtatcgttaacaagtagtaaactcaccaatagtgaggtcgatcgcacgagaattgtagttaagtacgttaaaattaaacttttacttctctttggttgaataaaaattaagaaaagattaaaacta

SEQ ID NO: 329360 - DNA, 1260 bp, Cannabis indica
tttttttttagttatacttttgtattttttttattgatttttcattaaaaatttatttattgccccccccccccaattttttacacatttccccctcactaatactttctgactccgtctctattatgggtaactctttaatattgtgtgtgcacacttgttgatgcgagccagtggcttagtttcggtgctatgatcgagtggatctagatcagtagttatcattgtgttatatgaatgtatcataatgtattatatttgtatcttatcgatacaatatgatgcataattagttttatagactttagtatttcttgagatttctgtgtgttgacactattgcttagtgagcacatattcgtgtaattatatagtccaagtaggaggatgttagaatattttatatggacttacataattaagtgttgctcacacagtgtcgatagtaggggtgttcatcaaaccgctcaagctgcccgcaccacactgcatcgcaaaagaaatgtagtttgaaattctttgcggtgcgattgcagtttgaatttttcctaaaccgcgcggtgcggtgcggtttgcgatttgcggttttgaattgttaatatgtagttcaaaccgtactgcactacaccgtatattataaaaataccattttttatatttatttaggttcaatatgtgaatgtccaacctaaaacccactaattattgtattattgaaacttaatctttttttcatatttatttttaagctttatggtatttttgataagtgttgagttttgttgtatttgtgatagtttaattattggtgatagtccaaactgcagaaactgcaaaaatcgcaccgcaccattttttacagtgtggtttctgcagttttttactttcgcgatgtgggtgcaatttgaaaaattaaaaaaaaaaatcgcatgtgagggttggtttaaaaaaatggtcaaaaaccgcactacccgcaccgcgaacacccctagtcgattgtagcacatgtggataactagatgcatggtataatatcgattatgcaattaggactataatggaatgatcggtcttattaagtgtatttgaggcacatggcaacactctaatgattataggttggcccattaacaatagtccactctcattaaagatagaggcccaatagccaattctacttcttagagtagaacatatatttagggaaacttacaaaaatattttttttttatcaaatgttttcaaaaatactgtgacacg

SEQ ID NO: 329361 - DNA, 609 bp, Cannabis indica
ttttgtaaaaaaatgacaaaagttagtataccatgtaaatttttcaaaattttaagttttgaatactcgttacgctccgtttgtgatcaaacatcaagtttgaagctccaagcaaacttttgcctaccatttgttcacttttaagaaaaatattgtgaataaaagttctaaatctttttttcagctttcaaaaatattttaaattatcaaattttaagtaatatagaaagaattatacctaaaatattatcagtcgtcacactaaatagctcgctgcccggactgcgacacttaaagggctatatcgttgcctgtctgcttttagaggctaagtaggatttttaaatcctaatttaaaaaatggatttaaaaaaagaataattacataagacacaattttttgtaaaatatttacatttttacgttcaaagaatgttttttttacatttttacgatttttcaaaaaataactcgaaaacaacataaaatcaacaagaaaacaacatagaagtaacatgaaaataacaacaaaaaaaacaacaaaaaataacatatatataacaaaaaattaacaacaaatgaataaaattacaacataaaaagaccgta

SEQ ID NO: 329362 - DNA, 595 bp, Cannabis indica
aaataatgtgaagaaattttttttaaaaaaattaagaatactttttaaaaattatttaagtttataatttttttaataatgaggtgtatttataagtttatggggtgcaaatagaactcccttatttgtaatccctctcaacattgggaaattcaagaaaaagatataaaaaaaaacatacaaaatatcttttttaccattgaaaaaataatatataattgtattaaaaataataaaaataataactatgtttggtgggaaggagagagaatagaatggatggagagtgtgggaaggatggggagtaggatcatccttccccatgtactcctaacaccaaacaaaggaaaacaaatatcctctccattcctcttaacaccaaacaacataaaggaaaataaatattctctctactcctcgtactccccatcttttgtacactctccatccatcctactctctttcctttccaccaaacatagcctaaattttgaaggtttaaaggcaggatgtcaccctcgatctctcttttccctccttcactcccttttaccaaacaagtaatttagtctctcctatcaccctcaatctctcc

SEQ ID NO: 329363 - DNA, 1163 bp, Cannabis indica
ccgagagatggagagagagaaagtgtattgattttatttgttttaggggtaaaattgtaaggtataaatgttttaagtatagtttttcataatataaagaatgctagcatagttttagtgtactctttattttttaagcatatattgtcaaatttccctttataatttatcgccatgcataactttgaagacaacaagaggagtgctatatatattaatcaagtcaattaaatattgttttatttgctttaagtataattattatttaagtagtttcgagaatatcgtgtttatatggaatgatgtgatttattggaataaaaaacaaatgaattacatttgtatatatatataagaaattaagattaatatatatgcgcatgtcaagagtacgtacgtagtaagattttaacattttttttcatgggaataaataaagcccgatcgaagatatatttatataacttttggagcattaatgtgtaggttacattagaaaacgatattattgatcagctgtgagtaaagaaacaagaggaaaagagtgtactgctgtatattgcaggtaggtggctcaattaggcctactgttctatattgatatatttataacaagaggttaatacaaaaaaaatattacagcagagggaaaaacccttgggaccacaacaggtgtcaatcaattacaaggaatatatcgattacactaacagaatagactaggacaaaatagcaaaaccgaaatgagaacctcttggtcattagcacctgattagagtgcagctaatatagtaccattactgtgttattagtttcttaacaccacccctcaaacgcagaggtaagtttgtcactcctagtttgacaatgagaaatttgaatcttgaatgtgtaagacctttagtcagacaatcagcaatttgttcatgtgaaggaacatatctgatctcaactttcttctgtagtactttatctctaattaatgaagtgaatatctagctcaatgtgctttgtccgagcatgatacacagggtttgaggcaagtgcgcttgcactcatgttgtcgcaccatataacaggcagggccggccctgactattagtgggccatagaaaaaaaattattttgggcccttatttatgaaaaaatatggtatttttcaa

SEQ ID NO: 329364 - DNA, 1166 bp, Cannabis indica
aaaaaaaaaaaaaaaaacctagtcttaaagaaactgtccaatgttgagaccttacacaaagtaataataaggcctaataataatacccttttagcaactactcacccatttacatccaatgtggtttttgcataatacaacaaataacattttttttcttgttgaattaataataattactaagtaggttcggtctagaaatttaacaggtcaaaagaaagaaaatatttttaagcgcttatctagaactaaatgtgatattttttaaaattagtaaaaaaaattatatttaaaggggaatttttttgggccctaagcacaggcctagcccacctatgccaggaccgacctgttactaactaaatgtccattttgcttcataacatgttttagagagagatataggataatacaatgtgtgatttaaggttgtacatcaatttgtttggtcagtttctaccacatttttttttaactcagtgtaaagattgggttataaaaatttatgtctaacctgcccaattaaaaaaaaaaatagcaaactgacccacgggttggtcgggttgatctgattagcccgaccaacctgttcaattttttttttttagttgtaatgtagacgatatagggtaaaagagtaactattggagaaagtcttattgagaccaaaccctgcttccttcaaaagctctattaatctcacaattatagatttaataaataaaatttatatatattcctacaaattcgtacaaattaaaatatcaatagtaaaaatttattaatactcatacaaattcctagcagacaatttcatagttgtttcatacattggtcaataagaccagtgagaagaaaataaaagagatgagagattaggaatgatgttgctgttttgccgttgccgagaaacgttgttgcaccaactccaatggaattaggttttactactacaaatgctactatttctaatggtcctaacgtttttttagggatcatcgctaaaactattaagtgagtgtttaaaaccgttgagaaaaattgagtattcccaacgacttttaagcgtgccttaataattgtgaattttttaaagggaaattatcgacaattaaaaattgtggcctatactataggggtgttcatccgatccaatccgcactttt

SEQ ID NO: 329365 - DNA, 790 bp, Cannabis indica
aattttttgtgtagactaaaagtcacatttagtcaacaaaattatttatgttgtagactaaaaaaattgtcactaaaagtagcagtttttttgtagtgtctacttatcattgtaatgactggacataattgataatctcatcaagcattagtgccttgccagtgatctacgtattgttaatttagttaattaaaaagaactcagacaattattaattcattatatatatacataaattaatctaattaatttcatatgagcttattaccttattgcactggaacaagatcttgcagaaacttcatcctctcgtttatcttttgtcttctcaattaataacaataataaaagttcaaaacctgggttaatatgaattatgaaatgatacaaaagtaggataggattatacaagtgatcaagttaagctagtatctatattgattgatttgatttcattcatttcacccataaattttcgcaattgaaccaattaataaaattatttatgtaaaattatgatattttttaccaattcaatgagacgcgctgataaaagtaacttttgctagcatattaccctattatatgctggcaaatgcaacttttaccagtgcaaaaattgcactggtaaaaagtatcaaaagggagtgctttacacggcttgtttatcccagcacaaatatgagttgcgctggtaaaaatacgtttcaccagtataaatgtgctctagtaaaactgtgaccttttggtcagcaaagttcacgagatgccactacaaaaaatcttactt

SEQ ID NO: 329366 - DNA, 552 bp, Cannabis indica
atttgatgatggtaacctgtgattaggcactttcattagtagagagaaaaagggttgttatgttaataaagttacataatgaccaacttattgtattattagaatattataagttatagggatataactaagtccacaacacaaacatatttgtacttgtgagatgagatgagacagagagagacacccttctttcttaagtttctctttggattctaattttgagtggcattcataattcaaacttgtggaatatggaaatgcttgcttgcttgcttaaatttatatatatatatatatatataacatatacatgtgtgtgtgatttaatattttaaagcattttcaagtttgaaaccatggaaactttgctgaacgtatagtgcactaccagcatcatgaatcataatgatgctcaattgctcatgatttcgaaaaattataggtcacactatataattttattctttctttaaagaaataaaataaaatacttttattctttcatgtgttattgggttttttttattgaatttttatacaaaataccta

SEQ ID NO: 329367 - DNA, 906 bp, Cannabis indica
tcattttgacctcaatatagtatatatggatatgtgaaactaagaaattaaacatcacattagtttcaactttcaacaattctaaaacaacactaaggaaaaaccaagaccataaaataaggagaccctttgccatttaatatgtagaatatataaaataatagattgaatttttttttaagagagaaaaataatggcacaatatatataagtcatgggaattgatttactttatgttatacataataatattatatagttaggagttgttgtgagttgtgaggaaaaagttccctatatatcgaagacagccaaaaacaaggagatttgcatgaatttttgtttttctatttgccgcgtagataatggtcaattttggtgtagttgaagaggacttgatgaatttaatatttactatttccatctgacaaaaataattattatttcctatatagagtttctttctagagaccattaactgtacgtgttaatggtaaaaaaaaaacatgcaaattttagtttagagttttagaccatttccaaaattgaaaattttgacttttacttttccaaaataaaattttagactaatatttcgatattactacattgaattaaatgtgcactgctttaaatttataattataatatagattataatctcttattatgacgtgtttaattatatatatgaatcttataataacatcaataatccataattacattaataaaatttaagaattcatagtattctttactttgtatttataaaagggatattggcggctaaaccccccaaacttttgggtttgtgacagttaaccaccaaaactcaaattttggcggctaaactacctgaactccaattccgttttgctctgcacacctccgtccaaaaactca

SEQ ID NO: 329368 - DNA, 595 bp, Cannabis indica
atttttgtgtcataaataattcatttcctacaaattaatgcatgcatgccatattatatgaacctttattaattatatattatatatatatataaataggactctagctaatttatactatatataatgcttagggttggatattaatggtttaggtaatacattttgttttctaaaaaaaaagtagcttgtatatgtttgttgactttattttaatataaaagcgctatatatcacataaagattattattatatattaatttattattatttgtaaagttttaaataaacaaaaaaaaaaaataatgtatatataccactcaagaaattaatattaagtgtgtgactaatcataatatttttagttattttgaaacacaataaaaaattattagcttatcaaattatttatcgtttacatagtgcaattgttgactttttaataaataatataagtgatattgcttagtaggagcactcgatgctttaaaaattttcaaaatttcttttttgaaccaatacattttacactatgaaaaatatgactcttttttcaaaactccaaaaatacccccctctatctactctgtctct

SEQ ID NO: 329369 - DNA, 671 bp, Cannabis indica
ctataaaaaaaaaaaaaaaaaaaaaaggaaaaaattgaatatgaagaaatatatatcatattagagcccttcctttatctttaattactttttgcttccaaaaaataagagccattctttatatatagacacatgaaccatatgcatcatttataaatgataaaggtgattaatatgttagcttcaaaggtagccgatggtgatatgttcactttattttctcattatgaatgcaaaatgtgtttagttttacaacttttgtagcagtgtactacattttctttcaatagtggaaaatctactatatgcactatatgtacataatacataagctttttcaaagggtgcttctgaaatataactatatgcatgcagtgacattatttttaactacacattgagttatccaataatttatatataacattgtaaaatgtaataattacatataaactcttaatttatgttattacataaatacatatatcaaaatgtaactagcagtataataagctatatatacatataaacttatttaagagtttgtaatgatattaacagaaaaattgtatcttaatgttgaagattgaacctatctgaaaaatcgtgtttatacaaatgtcaattatatatacgaaaatataaaactgtatacgtctgcagaagcagaa

SEQ ID NO: 329370 - DNA, 553 bp, Cannabis indica
gaaaaaagtaataattacaacgacacatgaaccgtgaaacgataaaaaaaaaaacaaagtactatatttctgtaaatagaagaggtcacaaattattgtcgtcataatgtatattttagaggatacaattttagtagtgttataagtttcgtagataaaatactaattattttttaaaatagtttgtgcctaaatattttttaaagagccacacgtcgcgaaagcacctgagactccactagtatatatagaagaggtttttcgatatattaaagaaagtacagttccatttcaaaaaaaaaagtatagtctttttcaaaaaaaattgctgggcaattagttattgatataatttaatctatttagtaatagtaagtttaagctaggtgaaattgaaagtatttccattaaatttacaaatcttaaaacatctataatagagggccagtttggcacagctgtgctgtggggaaaagcagctgtagctgtgctgtgggaaaaagcagctgtagcagaactgtggaaaaaagctgagctgagtgtttggtaaatt

SEQ ID NO: 329371 - DNA, 1096 bp, Cannabis indica
atattgtaattatgaattattagcttagtgtatactacttagacttatataattgaatttagttctaaaaatattttacctatcgtttttttattgtatagttctattcattataggttttttgaaattgttgtaatattattaaaaaaaaataaaacaaagtgaaagttttaagaattatactataattttactctaaatatttgagagtggcttgaagtttgtgacaactttgacgaatgcttgcataagaaatcttcacatgcctccacttccaagttggcacaatacgtgtcaaataaatatatacgtggatgagtatgagcttaccacgtggatcatcatcatcaatatataatataggtcccaccgaaaatatctcatcagagttgtagaaccgcgcgccttggcttgcagccaaacctgtgggcttgtattatgtaagcccagcccagcccagcccatgcatcatcacggataagatcaaacgctgaacataccatgcaacttacttcgagtaataatgaagccgaaaaaaagagaaataaagggcacccagttggctagtactttgttatgtgttagtattgctatttgtctaattaagtataattaagtatcgaatcctatataatttaatataataatttttagagagtattgctaaccaatcgtaacatgatatttcgagaaggtgctaaacaccactagtgtcttataacaatgctccgaaaaaaaatcaaatcattattttaaaaagtaatattacatcactctatcatctcctacttttaatgttataattttggatgttgcacatattatttattattattttttctttgttatgagatattgcacatattattatttgtattatacatttaggtttcattataaatttaggaaaattttatagtaccaaatttattttttatttttattttattggtaaaaattccttttcagtatatagagaattttataatttaatttttatataaactatattatagttataccatacattatatttgcttagcttttacaaatttacaaatgtcaaaaatacaattcaaattaattagttagacgc

SEQ ID NO: 329372 - DNA, 999 bp, Cannabis indica
tgattgagagtggtggtgtttactcttcaaatatcctttcttggtgatcttcctttttccaaatcaacttcctctttcttggattccttctccaattataattcaaaatctttcgacttgaatgcgaacatcctcaaatgcaattatgtctgtaccatacttaatgataaccttgatttcttgatatgcaattgggagcgatctcaaaaaatgatgtcatggctttcttcattagccttgtcattgatattagccaatcctacaataatcttattaaactgtcagtattatcatctaaagaaagggaagaaataattctaaaaccgcagaacatttctagaaaattaatcttactagcaattgatgactttaagtataattcttccaacttgttccatactccttaatttttctatcttctctgcgatgagttttcttcgaacactatttgacagatatatgatgatcgtgtaatacaccatctcccctatttccactttttcttctagtttatttttagccaataacttttcatctccaagaactttggagaccttctgatggactaggatccctttcaaactttctctccatagcgtaaagtccatagttccatcgaacttctctaattcgaaattgccattgatgacattaactatttcttcaagaattacagtggaaagaatcttgattctccattcttgatcgattacctagctctaatttgtggaaaaattaagactaaagtgcaaaatcaaaacaactaaaattttaatcaccaaacagttagcactgacaagattaacgaaacgcaaatagtaatcggagaatacagggattgacaaagttatctaaaatcaaaaactattaaagtagtaagacaataaaatcaacactaggatatatactggttcaagtccaatagattgatgtgatctatgactctactctagttctggaacaccaccaaatattctttattgattgagcaagaatgta

SEQ ID NO: 329373 - DNA, 481 bp, Cannabis indica
cattaaacttcctacagctttctcatatatattattaaattggttgccgaaaacctcggtcaacatttatatttatgtgttatctagatgtaatggttcaactcatgaagaatgttattttaagtcaacctatgtagccaacatcatgatttttattcttctatatatatatatattgcttcttcatatataaaaatgggtataaaaatgagaataaaataatatatacactttatggttaatatataataaaaataatatattaactttacatttttaatcataaatgatcttcaacttttcatagcactactctaatagttaatataacaaaaatgaatataaaaactagaaaaatcgagtttttgcaaatgtcaattatatatacgaaaataataaaactgtatacgtctgcagaagcagaaagtaattttgttactgcagaaacccgttttgcaatgacaaaacagaacaggcagaa

SEQ ID NO: 329374 - DNA, 505 bp, Cannabis indica
gattggattggatcggatactttgtgaacacccctatactttagtaccgaacctaacttagcatttctcatttgtaaatattaaattttcattcacagtttatgtgggactctcaaatccaaaaattattatttaaataaaaaaaaaccatcaattaacatagaagatgttaattaatcacaaaaaatatatataaaattgttcaatcctgttagaaaggttcacatttatacatgagctacgtactttacaaatatgtgataggatgcattgtgaaagatgggctgctgaactaagttgagcctagctacttgttgtcttaaatagaaggaataattaagttgattatgtttcgcctctttcttagaaaaagacaatcaaacaattctcaattatgatccttgcagattggatcatccatataatatacaaaaagaaactccaaatatttaatatctttctctttgatgaatgtactattttttataattttttttttatattt

SEQ ID NO: 329375 - DNA, 1897 bp, Cannabis indica
gacccagactcaagcagagacctggactcagaccggcaccgggacccagactgggacctaggatttagacctagattggggacctgggccccaaacccaaacctaaacctagtcctggacgaaggatccagacctagatgggggacttagacctgaaacagggccccagaaccgggaacgagacccaaaactcgaccccaaacacgagacacgggacccgaccctgacccgcaacccaggacctgactactgggacacaacttcgaacccgaacccaaacccaaacttaggacacggcccaagagccgggacccaaactggaacaagtcagagatccaagaccaagatccgaatctggacctgaggctttgacctgacccgtagtcagtgttttaatccaggacccaaactcggatctgtacccagaccaagacttggactcaaacccgatcctggatctagaatcgaaatcaaactaagatagggacaagaacccacgcttgggacagtaacaggacccaaacgtaaacccaaactcagaccagaacccataccgggacttagacctggaccaggacctgtgacttgggacctaaaccatactcgaacctgggattcaaaacttggaccctcactgggactgggattgggaccggaactcagacacgaacaaaaatcgagacctagactcaaatcgagactcaagacctgatcccgaacttgaaatgggacagagacctagacctggacccaaacccgagaccaagacctggacccaacctcacagcctaatcgagatcgaaacttggacctgaacctcaccccagtcccaaatcaggacccgaacccaaactcagatctggactcggacacatatgcaccctcggattgggtcccaaacctgaatccaaacccgaaccgggagtcaagacccaaacctagaccgcaacttagacccaaacatggaacaggactcgagacctacaattgggatcgagacctagaactgtaccctagtctcgatctcagacctagattgagaccatgaccggtagttgggacatgaaccgaaacaagactgggaaccgtgattgggatccagatcttgtcttgggattcgggaactagggcttggacaagacccatagttggtgtcttgatctaggactaggacaaggacccaaagcaagaccaggacctagacccagacccaaacatgggacccgaaacttaaacttgaaccagaacgtcaccagcaccctagaacaggacctggacctagactggcacctagaactagaccataaccaatccgcaaaactcgaggtcggacccagtcccaaactcagacttgtatctagactaggactgagactcgaaccctaacccgaacccgagctctggactcgatcgaagacccagacaaagcccctgaccgagactgggattcagatctagacatcgatacaaacccagaccaaaaacaaaataccgagctagacctaatccaagaacgaaacacgagacgtagactcagacccagatgcagacgaagacctgaacctgggacctgaactcagacctggactcagccatggatctaaaaaaacccgtacccaaactcaaactaagactcgaacccgacccctaggactaggacatgagacctgggacccaaactttgaccgggacctggacctgacctcgtcctaaacctttgccgagatcgagacacagattcacaccctgatagggacccaaacccaaatgcagaccaagattgggagtgaaacctggacccttacccggaccgggaccttgactcaggacccaaacccgaacttggacccaagactaggacctaggaaccagacttagatgggggacctagaccagg

SEQ ID NO: 329376 - DNA, 911 bp, Cannabis indica
ttaataacaatatctctttaatttccttttaattatcaaattaaattaatgtgtctgtcgtaatataattcctcataacaaatatgacttctatttttgtaccaaaaaatttaaaatgaaatatacaatatttattgaaagttattcgagacaattatttaggtatttagttttttttgtcaacatgttctttgatttagttccaatttaacaatatctctttaattcccttttaattatcaaattttcctgttccttacatatttgggaccaattacaaataaaaataaagtatgtgttgtaataatattatagtgtaatttgttacaagaattatgacttcttattttatcttaattatgtgtgttattttatttgtaccaaaaaaaatttaaaatgaaataaaatgtttaaggaaagttgttcaagacaataactttgcaggtaaaagtacgtaccccgcctataaaaaaggaagccagtctccttttctttcatttcatgttcatttttagagtttcatattagaatcgcaacagaagtaaaaaaaaaatttttggaatttaaaaaaaaattgttaaaattcgatatagaccataaactctaaatcttaacacaattatacataatgcaaacccaattattagtttaaagattagtactcttgttgcttattaagattttctcgctattttttcatattattcaatcgaacatccaaacaaacttgttgaagagttcaccaaatcaaactcaatactctaggaatagagtgggctaatattataaattcaatttggatgaatataatttagtaatcacattgtgtactcaactaatgaaatatcgtgattgagataggaaagaacacaactcacacaccacactgtgagagagtggcgtgtgtgctt

SEQ ID NO: 329377 - DNA, 519 bp, Cannabis indica
ctattccacgttcattttactaaaatacttaacttcttcaatagctaagagtttaatgtccaacatgtctggaagaactctaacaattttttaaaaagaatagatttatcaagtttttcaccaagagaaaaatattcattagctatatctgacaataattcataaaattcagatagagttttagtttcaaacattttaagatcatcaaatttagtttgaagcataataaacctaaaatgtttaacatcagaagttccttcaaattgaatttgtagaatattccaagcatctttagcagactcacatgaagatataagtttaataaaatcctcacctaatccattaaatatagtatgccagaccttattattgtataagcagatcattcaagttcgggtttataagtttcattaccaccatatacaattaatgtgtctctatattttttattttttattctttataaatattcccattgaatttcttctttgaaaattaaaagctataaaaataaaaatt

SEQ ID NO: 329378 - DNA, 990 bp, Cannabis indica
aaggaaaataagaaaattaagtgtgtacaaattaaaatatataaaaaaatttgaccacaaatatccaaattaaaaattgaaaatttatttaagtaacaagaaaataatgcatattaaagtaattatatattggtttgagtttaggtatatttggagttctcaatttctggtacattctaattaatatgccttgccttttattgattgtttacaactttgcataacctttttttattctagaaaaaatgatgaaaaacattattagtgtctaattatttttattgagtgtcatattgatattagtgcaattaaatattgagtctaatataattttatgtaataattttgtaaataatattgctaaataattataaagtgccacatttaaagtattggcagtacttaataataatttttttttttaaaattactaaaacgcactattagtatccacatattatacttttattacagtgaaattaagtatcaaattttatataacttaaaaaaaatagtttttaaaaattatgaaagttttggacactatttccaataacaataattttttttattaataatttattttaatataatgcatcctattaattccatatatttaagaggagagagaggggtatgattatgagagagagagagagaattaaaaaaacaatgcgaataaagtacttatttgtagtgtagtattaaatttccatgaagtatagttagtaaggcaattccaatctattacgtattaattaatgcaaaaagagtaaagcttattacagtagaatctctatctaagaatactctattcaagaataatctctaatttgttataaaaaaattaagtcccaatttgggctagttataaataagaataacctctaaattgtaattagttatacattttctaagtcccgtattaacaaagtatacctctatataagaataattatatcttaataaaatatatacatgtattttgta

SEQ ID NO: 329379 - DNA, 425 bp, Cannabis indica
tagtatttttttacgtgtcaatactattattagtctatttaaatatcgagtctcatataacttaatgtaataatttttagagaatattgttagtcaattaacatgtctaaaaatgctaagcactactacaaaattatataactgttacatttttttaaaaaaaattaacaaataatatattttaaagagtaaaaccaaatagtgttaaaaattcaaggataatttggcaagttggattcttcaatctctaagttggagggtcaattacaagttgtccaaagtttgcctgctggtgtcagaatttgggctacggagattgaggtgaggaaaaagcttaatgaggctttaaggcggaaagcaatttactggcaacagatatccagggtttcttggattagggatggtgataagtgtactaatttttt

SEQ ID NO: 329380 - DNA, 555 bp, Cannabis indica
attgtcttgaaatttacatttcaggataacagtctttgactaaaatatcatcatactttccatatatatacatttatattatattatattgtaaattaaattatttaagcaattaacatacattaaagctagttattttcttttctttactttttaatttaccaaaagaaattcaaaattatataatattctccagctgtctaattaaaaccgttaacttttattttctgtgcgcggcgtacgtagtgacatatctgatatattacttttttacatttgagtctgtcattggcatcatatatatatattctgttaaggataagacctaaacaaataccatattttatatattcattctatgtctttaccccacacaaaataaaaaatgtagataattataacataaaagctttctaaaatacctatagctttttcattataattatatattatattctttaatgaaatgtacgtattttaaaatatacaatatgagccctaatataaattttctcacttaccatacgtactcttgtttttttttttttttgatga

SEQ ID NO: 329381 - DNA, 733 bp, Cannabis indica
gtttcttagtggtcatttaaattgttgtaagggattgggaatgggtttattatagttgtaggaaaagtggcttgggggatttaaatttaatcatcatttgtcgtgtcgtgtcttttgtaacaatataatgaatcgatatatgagaattatattgtttttatcttattcaatttaaagagtttcaaatcatattcaagaattttcttagatcttcttccaacaatgcataggtaatatagttacaagagttttataatgcaaactcaccatttgtttaacaaagtcatgtatttttacaatgatgatcaaacccattcatcataatctccatccatggcctgtatatgtgattcaagaaaaaggacctggttggtgcatataatactacaataaaagattgacaagtgttaacacttattgcaatattaacacttattgcatgtatattctgatttgacgtaatattaacacgtgcgtgcatgatcttacaaaatattaacacttattgcatgtatattctaatttgacgtaatattataacggttgttgcatgtattttaatttgacataatattattaacgatttggcatgtaacattattctagaagtaattaatagttctgattaattattgtaataacaattgttgcaaatagggtaacaagtatcacatttttattattcatagtactttaataaaaaatttaactgccacatagtatatgagtttaa

SEQ ID NO: 329382 - DNA, 1018 bp, Cannabis indica
atataaatgtttagtttaccgtgtagtggtatttaggtaataaagttatcattttatatttttgatgtaaaaatttctaatattttttttgcacaaatacaatatctaattaactaaattaattatttggtgtaagatattttttcgcaaaattagttgatcaatcaaagagtgattagaggaagaagaagaaatgttacaatttaggttacaatttgcgttgtagctcgggtatagctgagattgtgatatagtttgatgataatttaaagttgcgatttagattacgaatgtgcataactaagagattgcaatatagtttgatggtgatttaggttgctatttgggttgtaatatcaattttgactttaatttcgttatggaggtcttgcgatttaggttgcgaataggacatggatgaaattgtaatacagttagatgttgatttagggttgtgatttgagttgcgatatcgattgcaacttcagtttgttttagaaatcaatggaagtttcacgtggtggccattctcgaacaatcacagagggaggatggaataatttagaggaagaagaagaaaggggggttgagactaggatatggtttgattgtgatttagagttgtgatatgtgttgtaagttcaattttgattttggaaaaaactaagcttcaatttctacggtggaaagtaacaggaaacaataaaaagaaaggacgagaaaaaatgtgaagaaaaatgatattatcataaaaatgaattgaaaaaacataaaattaatgtaaaattatgaaagataaagtacaaaaatagaaaaataattaaagtcctaaaatgagaaatttttttaaaagatgtatacacgtagattttctaagggtgcgtttggaagtaactgtgtaaacattaggtagggtaattactagggtggtaattacacagtgtagtaattacactatattttaaaatgaaaggtttgtttggatatgaggtggtaattacatatgaattcctaatat

SEQ ID NO: 329383 - DNA, 723 bp, Cannabis indica
ttgttcatattgtaataatgtttttttaagctaaaagattaaacatacaaactcaaaattttctaataatatagatatataaataatacgagagagaattataatttctccatttgctaaaaatacatttgttcatacaagtgtgagaccaacagacaactttgaattttttaatatattatattatttgagaatgaaatgacatagttttaatataatttttcaatttctattgggaagtacattacagagttttatagtgtacatgtgagttgcagttttactagtatatacaaaatataagaaattaatgcactcaaattcaacgtactcaaacttatggtcacacaagcaatggcatccacatgtatgcgacgtgcaactttgattatattgctgaccacatctatctacttaaatagtcagcaatgaattttgtaagcttatatattataaagtagagtgaaagaagcccataattttcttacccaacaaaaaaagcccatacaaggcatgggctactattataatgaaaaaaatagaagtttttagaaagatattagattttaggtaaaagtttacaattttaatgtcatagaataatttacggtataaatacttaagtttaactcccagttgtaaataaatacttaagtttaatttttggctgtaataatacctaagttatatttttggaactctgtaggtacttaaccgttaaat

SEQ ID NO: 329384 - DNA, 984 bp, Cannabis indica
aaatgaaatagaatttttattattttgaccaaaatgtcctttactcttttaaaataatttttgttttataaaattaccattatggtacaaataaaaaaaatgatatatatttatgtatcactctcaaattgtattttttagatctaattatcaaataataaaatataaataaatatttaatttaatagtttattttatattaaatatttaagtatcaacataatgttattcatataatttaatcatcacacatcgtttatcaatataattataataataatattgctttcctataattatgtacaaaaaaatataataaacatatcattgtaatattaaatgttgtagatatatattttaaaataaaaaaatgttatccatataattataacctttatcatttatttatgagaagggtagataaggaaaaataattttaagttggtatggaatggcttttcaagtcattttatttaggaaaagtaattccttagtttacatgaattataattcctatggaatgagttttccaatgacaataaacaaaccaaacacttgaatgatctttctttaggaataacaattccattcctacactcattcatgtaaaccaaacactacctaatcacttacaaaagtaaatacaaaattaaagaatttgtatattggaattgcaactttatacgtgtacaatatttacacactaatcacttacaaaaatataagtgtaacaaattaaaagaatattagaaggtgttccacgtttggttggaggttatgaaatagaatgaaaaggaaaataaacattttttattcctttgtttggttgtatattaaagtgttgtaatatcattctaacggaatcacctttttactattcaattttgaaatggaagaaaaaaccattacaatgtatgatgaaaacaaatttaataattttttatcaatttttttatccattttaaattttatttcattccattc

SEQ ID NO: 329385 - DNA, 803 bp, Cannabis indica
atcccccttagttagtaggtaataacctactccccttttagttgtattgataccaaagataataccacttagatcactatagtaattggatctgaagtggctctcttaagattacaatgtgaggaccagggttggcaaatctcaagtgagaatagagcaatgggcgtgtgagagagggagagagatgagatgagttgagttatcagacttagagcataaggcttagggtttgagacttagagaattagggttaggctaatgctctttatatagtagagcttacatccttaatatcccttaaaagtaggtaaataaagctatatttacataattaaataataaagtttaaatgacttaattatcccttgaaaatagggaagtggctgatatttttgtggtatcttcgtaggttgtcaaggcccaactcccagtttggcttactgtccacgaattaggactacgcatcaatgccctactaggaaaaacctggccggccatacacctgcaaggtgcaggctggtcggccacatactgtctacaggttggagtctgcccaaccatgttcttgccaggatcggtaggtcatgttcctacgagctttggcaagtgttggccaaccttcgtaggtgttggccaacctttgtagtgttggaatatattttaccaggatctagatttactaacaagcatgttgagtaacaccctaaatatgaattctcaaaaacaatggaattaaacacatataaagtttaagaaaccttacattggtggcagcaaaatatatgtctccttccactcaattc

SEQ ID NO: 329386 - DNA, 1586 bp, Cannabis indica
tgataattacataggaattatcatagggagtttttaatgattacacagtgtaattgagccatccgaattggagagtataattaaaaacccctccaaacacaccctcagattttaatcaatagaaaaacaaaaaagaaaaagaaagaaacagtagggagattcatcatacagtgtacttcaagcggttattgggcatagacctatctttgcaagtcccctttcaacaaaacactaagaacaccagtagcttcactccattgatggtaactcataagcttagtaaaaagataactcaacctactcctgttgtctttcctcaaggtcttggaacccaaaccaagaacatatgagggtttagtaagagacaaaatagctcctttagaaagactaaaaggggatttgtcctgtaccaccattgttgaagtaatagactttctcttcttggggtatggttcaataaagttagggctacaatgttgttcctcatcttcttccattataaattaatcaatacttgatttgattatgcatctgataaaacaaagatactatttttaatactcaattttttacatacattcaaacaaattgaaattgattgaggaaaattaaaaaagaatcatactctgttttttcttcaaatcaaatatgtatatatgcatataaaatactaaaacacaatattttgaatattgcaattgttcaaacttccaaatccaaattaaacacataccagtgagtcgatcaagagagagaggtatgaagtgagaagtgaatgaagagagtgaaattagcttagtttagtttagagagagaaagagcgttagggccgccgctgatgtttcgtgagagagagagaaacgttattaagtagaaagaaaaaatttaataaaaaagaatgaattttaagagtgtaatatttaaatattgaaaaaaaaatagtgaagtgctacataaaacacaattgtcaacatattattgggcttaattaaaaattattttaaaaataaatttaattatttaaaaataaaaataaaaatattaatattacatataaaacgttaaaaaaatctttctgaaaaacataatttgttaaaaaaaatcaaatgcaaaactataaatttcaatattgaagccaaaaataaaatacaaaccaactcccataaatctcatcaataaaattaagaaattctatattcaactcgaaaatctcttacccattaatatcgagcttctccaaccagatctggtcgactagagcgagggggagagagataagagaatcatggaggagcttatggtttgagaggttttgagggtcggggaccttgattatgggcagggccggccctgaaaatttatgggccaagacgaattaaattttggggccctcaaaaatatatcaaaaaaagagtgttatgggatttgaaaccatgaccttggacattatgtcctccaccttaaccaactaagctataaatatttattgcttatattacacttaaattttacttaaataaaagcctaataattttttttattttttattttggccccggtaaagtgtgggccctaggcacgggcct

SEQ ID NO: 329387 - DNA, 727 bp, Cannabis indica
tacaaatagtgaataaggaaaaaaaaatgagggaaagagaaatctaagactacctgtgtgttggatctaaggattttgggggttggggatctcaaatttaggatcgtcagtcctttcgccgtcagtctgaggtatcaaggttctttggtgttttgggattctgggttggggggttggaccctattttttctaaaatagtataaaaaaaattaattacatggatgactgagaacattaattaacaaaaaggaatacaatctttcttaacagattgtatcttggttcctttaagggttaagtatggtactgaatgattttgagctcaaatttgtaattagattgtagtttaattattcactagtgaattaataagtacttgaggaaaaagaagtaaattaaaagggtaaaatgataattctttcgttctaatttatgatatacgatacattttttccaaaccttattatacatgcatatagctctctctaaagaaaaattagggttctaaatttattagatctcatgtgttgagaatatctgataaatagagatttcccattgtgttgtgttacaagcccatactcatctttaaattgtgagattgtcgaggaagatcttggtgtgagacatcaaggattgtcatataaaaagatagcaacaagaaagaacttcaagtttaatttttttctttttcttctttttgttcaagttatatatatatatatat

SEQ ID NO: 329388 - DNA, 1547 bp, Cannabis indica
atcatgattatattccactgtgctgacgacactataatcatgaacaaatatatacacatttatatatgttatggacttaatagaatttatacaataagtataatcatgaaataaatcatgtgaaccatgaacataaaagtgatttctgatctaatataaattagtaaatctgattatattgaaatgaattttatttagggcgcaaaatccaacaatttcttgcgagatgttgcttggcttgaacccccaatttttttgtcaattcctctggctaggcctttatttttacccagagtcacgattgcttttgaaccaagtgacctagactttgaaattatgacttccaagccttcaaaatcaaagactccctaggaccctaacgtcaccttcgaggctgaactaattgagtcgagggtgcgagccatcggggattacgtaggttgtgttttaaggactcgtggcatcgaatataagagaaattgccaggttcgatcagtggcagctggcaaatttagttgttacccacctgaacgacttactcgcaaagcatattagaggaccagtggcaaggccagtacgagtggctcgacagggataggcacttggagccttgaacacatcagggctggagcaattatccccatgtgagactactttaaggacttcctcaaccatctcggaatttccccattccagttggttcctatttcatacagtatcctcgcaagtttgaaggttctgtacgaaattttaaactgggagtgccccacacctatagaaatagaacaactctactcggtgaaggcagtccctgcaaggaagaatgctgcagggggtttttattatctcgggactcacacaggcgatcgtaagatcattgttgggttgccaaacaagacccccttgaaagaggactttttcttgacaacttttctttccccaatcaacacaaccaccttctgcataattcataagtgattacttgcttaagacttgattattccatgtctttaattcttgttttgctgactttaattttgcttttgtttttgacagctatctcaaaaagatcaacccctactcccgagatggctgagcgatgcaggctcttgctaggtcatccattcgatcttcgatcggctgagttccttttgaacgaggttaacttgaggtctatggatctcctcactgacaaggagtttacttgtgattacatatatcccaagtattcttcttggtagcaggttttgatcccaaccaacgaggaatctcaagattacgtggctcaagcccactacctccagaatgccgtccctcgataagccgaagaaagagcatcctgacgtaatcaatgtcgttgataacccacagtgcttaaggtcgagcgtactactttagtgtcttttttggatagccgttataatttctatacctagaatctcctcctcatagatcgcattgcatgtaggttcgatagttggtacccagacttctacgtccaaattagatgtactaactcgtattatgggataaccgagcagtatggg

SEQ ID NO: 329389 - DNA, 1089 bp, Cannabis indica
  modified_base (487)..(487): a, c, t, g, unknown or other
cactttcttctagaacctctaagacttctttatcagctggcttagtaaaatgtacaacttaattaatcttctcttccacattaacaaaacttatatatatatatagaacatgaattttgtcactcgagggttttaatagtgatgatgaagctctatttataaggtgttatgtagcccaattaagcttataaccatggcctaattaaacctaattggcttttagatgtgagtaaaaaagataatttccttgtggatttacctgtccaaaatgtacccaaagtaaatgtacatgtacttactatagatgcatttcccgaaaacaaatatccgtgtggataaaatacaacgttcgaaggagacgaatgtatatacagtagaacctctatctaagaatacacttgggaccaagaaaataatattctaattgagaggttataactaaatagagttacacttgaaaaaaaaatcaaaaataatcaaaaaaatntacaatgtaaacaaaaatgaccaataaacaattcttaatactatattatattaaaagttattttcgagtacatataattatttatacatgtactataaatttgaaaataaaattattaattctactataaagtaaatttataaaatatatgtatatatttttttaagatgtaattattcttatatagaggtatattttataatacgggacttaaaaaatgtataactaattacaatatagaggttattcttatttataactggcccaaattgggacttcatttttttataacaaattagaagttattcttgaatagagtattcttgaacaaagattctactgtactatgatttggcgtcatttaatttctcatttaatctgttgtttttttctcattaaaaaaaatctgcatttatcttttttcctaaaagaaaaatatattaaatgaatgtagctccagggttctctctgccaatgaaagtaaaaagaaaaaattacattcatgtaattatggaatgattttttctttaattataatcttaaaataattgcaaaatacatggatccctgagagagagagagagagagagagaaagagtttc

SEQ ID NO: 329390 - DNA, 531 bp, Cannabis indica
tctcctctctctctctcgtgcagctctctagggctggtgctatggcaaaaaccagggcgaggcaggggaagcagcaatcggcagtcaagaaaacaaggaaaagaggaccgacttctacggcggatgtctggaaaactaagacgatggatgctgttctagggatagaaccaattgatttttcggatgaggaaggagaaggcgaaccagtgattcacgggcaggatgcaaagtcattcatggagccattatcacctaggtcttcactgaaagaaattcagaggcaagaagatatcagcaaggattttgcatttttcctgagtgctaatcgagaatgtgaggcaagaattcagcaaggtaatgttgctactccccctattcttaggtctggcaatgttgttcggaacttagataaatcattcaagaatacaaattctgctcctaaggtcaaaataacagtagaggatatagaagatgaggtgcatttctggagttcctcaattgtatgttatgtcctgggtgctaatccacccc

SEQ ID NO: 329391 - DNA, 699 bp, Cannabis indica
ttttttttgtctgttttttgtttttttttttattgtaaaagaacctcaagttcaattattaaaaaaaaatagatgaaaatcacagaaagagatccttccctttgatacaaagttagagtcctccctattcatttctccatccttcttcaactcactatctttctaactctttcattcctttttaccaaacataatactattaatgacactattttagtcacacattaaatttttcatgactaaattaatgatacttttagttataatacaaataattatatagaaaaagttagcactattcaaatgcaaattattactaatttttcttattgtgactaggaaaatttttaaggaaaagattaaaatttttgtgactaatatttcaattatatattttttagtacgtaagaacatagacattataatttttttagttttagtaacaaaatttattaggtaaaaaattaatcaattattattattagtgtttgtactatatatatgtgctaaaaaattgtactcataatttggatcatgtattaattttttctaacaatcattaataattacgtcagaattacatattaattgagcaaataagatatctaagggaaattcaatggtgcacttaggggtgttcaacaaagtatccgatccaatccaatccaatccaataccgcaaaatgcggatatccgcac

SEQ ID NO: 329392 - DNA, 381 bp, Cannabis indica
acctcaaagaaacaaaagacgatggttgaatatatgagtctataatagaggtagtttcaatttagtcattgcttattaagttgcattatttcatgaatccacaaaaatttctacaatttaagcacaattttcatgtctaccaactcaacttttcatgttccaaccagacattgatttaaatttttattttgttcgagaaaaagttatgagcaaatcttcaagcacaaaccggctcatgaccaagttgtagatatattaacaaagttctattactttctcagttccaattattaggaaattcttttgtctgttttctttgtccattcttagtttgagagagagtaatagagcttaaggtagttaaatttgttattagagatt

SEQ ID NO: 329393 - DNA, 1121 bp, Cannabis indica
agagcatcagctctggcaagcaacataatcaccatcgtttcatactcgtgaccaactccttcaagaatgtacatcgccaatcttgatctgaaagtttgtggccagcaccagcaagagaatcaacaagattcttcatcttcaagatgtactcgtcaatactcatggagcctttcttcgtgttctgaatagagagacaaagttgcagttgtctggctttggattgagtgacaaagaggcttgcaaagaccgtccaaatatcagcatgattcacaatgaagaacatgtccaagcattgcttctgtgagggaattcttaagctagctcgttagaagagcatgacaacgaatccaatgatcaaaaccagggttcatcgtgttcgtacctgcaagcagtggttctggctgtggagtagtgcctcgaagaattccttcaaggccatgagcacgaactgaaggaatgattaatgactgccagtaggagtaattgtatcgatccaaatggatattcaatggaggcagggtgtttggaacttgaaattgtggagcgacagcctatggttcgatcgaagcttgtggtggacgagggggagcgttgttgtgagaatcgtcaatatgataccatgtaagagttgagaaagaaagaagaaagtgaagaaacagagtgaatgggagaaaaagctcaatgaagaagataagctgcaattgtattattcactgttacattagacaatcaagaaaacgtaaagaaatgtagaaaaataagagacaccttaactactaactaactctaacactaataaattaaaatttaaaaatttaaaaatttatatgtactaaattttttaacaatatattatatagattgtatatgtattatatataaatatataacacatatatatataatatatatacaattatccacttataattttcactattataaactatacatatatatatatatatatatatcaatatactaatcattaatatttaaataggacaaaatatgactaatgaaactaaaatactgacttgttacttttgtcaccaatttccgttagtattcagtatagtttcaatgcccgttattgttctagccagcaattccaagtctca

SEQ ID NO: 329394 - DNA, 718 bp, Cannabis indica
atataattccttattaatacataattaatctagtaagggttgctaatccagttatttaaccttaaggtattacggtattgcattagtattatttaatacaatactatatttagtattaacttgtattaatagattgtgtaaaattataatatattttcaataaatttgaccccaataccaactacggtcgggtccggctccaggttcgggtccgggttctagatccgagttctaggtccaggtctgggtttgggtcagggttcgagtttggatcagaattctagattcgggtctcggatccaggtttgggtctgaatctaagattggggttgacccaaattctttgtaaatattataatacaagctaatacaaactattttttatgtattaaataacacaacttatattgtgttaaaaaattttgtagtaataattaatacaatacattactttagttaaataatactatttattatttaatacaatatgattcttatacgatgtagccttagtacattttctaaaatacatatgaaacatatatatttgttaaaagggtatgtagcaacataagtacctaaagttttattgtttgtaagcggcataaactcaatatttgtaaaattgtaatttttctctaattttgtcagtacagactctgttattgtcttaaacaaggcacatataaggcctaaattcttgatcattgggtctaaa

SEQ ID NO: 329395 - DNA, 1115 bp, Cannabis indica
cttgaacatgtgttcttgataaagttagcaaccgatgttattgatcattattaataatttattttgactatgtattgtcaacaaagttagtatatcatttagtagttattgatctcaaatatgtgttactgataaaatatacatatataaagttgttgattatttttaagttatctctaaaacatggaacttgaagatatgcagatgaaacgggagtttagatatgatgtataaaccataaatttttatattccattatatagcactattttcgtacttagtgattaattatttaaaactttattttagaaagagttgaagtttaatttttataaaatagtaaaattttattgtaaatattataattatatgggtaaagtattaagaaaattataaaaaagatttaaatataaaaataaaactattaatataaattattaaaaatggtcgtattaaatatttaatttaaatattttttaagaaactaattaattataattagtttaatataaaaacaaaattacatgagaataatatacatattaattatgatggggtttgaataatttaaattaaaaaaaggtaaacgaatccttactaacaaataaaagaataaatgaagaatgaaaaagaaacacggtacaataggtttggatatcctctagtacgtccaatggcatttctattatcaatgatgacaatttccaaatgtatatattttttttttttggctaattaggatttttgccccctaaactttaacatgtatcaaatcatacccttgaacttttctggccgttaaaaattcttcctgaattattgagattgttagatttaaggacttttgtctaatttcattcaattttactatttcagtgattatttatgtactaaaccatgctccccatactttgatatctaccaaatcatgtccctcgaactttgacatgaactaaatcaggcaccctgaacttttatccatgttagactttttttaacaaaaatctgataaaagcccttaaattcaacaatctcaatagttcatggagcattttaatgaccttaaaatttcaggggacatgatttggtacatgtcaaagttcgggggggggggg

SEQ ID NO: 329396 - DNA, 1331 bp, Cannabis indica
gattgatttggctttttattatatatgttatttttttttcatctaacgttatttaaatagggtacatatatatgatttttttttaaaaaaaaaaactaattgatgtgatataatttatgatataatatatttatatatattattttttcttgcaagaataatatatatataattaggtgtattgattttggtgcaatattaataacgtagtactatatttttttttcaatacatatatagtattggaaataaaattatgattctttaaaaaaaattgtgacaattcaaataatattaggtgtggtgctctataaatacaaaagataatacttttctattaaaaaatgaatattttctatacataatattaattattttatagttgaattaatcatagtttatagttaagtatttaatttttttttaaagaacatagataaaataatcaaataaatatataattaaaaatattaaaataaatattcagacgtagaaaaacaaataatctaaatatttcaatattcagattcagagataatatcttattattcagatatgtattcagattcagacgtctgaatctttaaaaaaacaaatgcacccttagggatatttgagttagtttaatccagggggaaatagggttagtccggttataagaattagggtttattctcaaaaatttgattagggtttttaatgagttttggttgtcgtgacataggatcgggatcgcccaacttgttttccactcaggtcggcccacacgcttgagttctgaattaaggtaagagaagtggtaagcaccgtatgtggttaaatgttaatagatgaatgattacagacttgattattatcaagattctaattaaatgtttgttgagcctcagttatgactgagggttggaagcggttattaccgttaaaagtaattaatcctgaaacttcagataggtttcttacttatcgcttgctttaccaggcaacgatagtgacatattcagctcatggttgacgagtggtaagggtactttatgaagtaccaggattgtgtaattatgatattatgtagttgtttaagtttgataatgtgagaatgaatagataaatgatatattgattactgtttattcacttttcttactgagtctctgtgactcacgagtgttgtatgatgcaggtaaaggaaaggccaatgttgggtagccatgagtttgaagatcgtagcagcaatgtacatatcagccgcgtgttacgacccaatgaacagggtgctccattttgatcgtattttgaaatataaacttacgctgtaaaagcattgttaaact

SEQ ID NO: 329397 - DNA, 1394 bp, Cannabis indica
agagaaggatgtaagcaacgtgtatgtagcttcaaattatctcaatcctatcctaccttattaagacatctaatctagaaagggttgtagtaattttgatggacttttatgtcatatttcagatctttgctttaagtgatcatgttaaaagatcattttagtatattttttatttgttctggcttccaaaaaaacttattagttcattttattttataatcatgtatattatagttttttagaactaattgaatactttacagtttgaaaaataagatttaaatattttgttgcacgtttgattttttttttatacacgtggcaagcaacgatttgaacttttaattttttttttttcaaaaattcaactataaaagtgtgtatggaagcaactaaggaattaattatagtattcacgagagtagtaactacactatattttaaaataaatatatagtgtgtttggatgtaaggtactaattacatatgaattcatattgcttcatttggcaaaacatatattattgttatgtaattaacatttgaaatgtaaagttgttagtaattacacagtgtaattacatccaattttcatggagagccatgagaattgatgaatgtaattaagacccctatattatctcaagctacatggttatcgtataattatatagtcagacaaacacgctaaatttaataattatccatgtttaccgaaattttcaaaaatcgatttataatatataaaagctaaagaaattaatcaaatataaagaaaataacaacaaggatttgtacgtggtttgagcgttaatgagtcttagtccatgagttaatattattactttaaagctagaaaagcattacggtttataagaatgtctaaactcaaaactttgcttgagcggttgaggaataagtttctaactcctttgcatgaagggtttttcttatatttatatggcccgtttggcacgcatgactggattggattagacaaacttatctgtccaatccagtgtttgggcatgttagaagtctggataactaatccaactaatctcatttgtctgggattatttatcccacagattatttatcccatctagcagggtgggataaataatcccatgcaggtgaaatttttaaaaaaatttatcgttttttttttaattttaattttatgaatatattttaaatttaactattatttaaagaaaataattatcacacatttatttatacatttttttatcataacttattcattaaaattagtgaaaatgtataattttgaattattatgcataagtttttaaaatttagaatattattaattaaataatagttacttaaattgattctaagaaaaaaaaaataatgacaataaaatt

SEQ ID NO: 329398 - DNA, 583 bp, Cannabis indica
taatttttttaagaaaaaattaattatctatttaaataattgagattattatttagtcacacctaaggcccaagccgtaacaattactctagtaatgcactcaaatcaaaactcacaggttataaaaatttcaagtactttttcaagtcttagaactaaaaaggttaaacaaaagtagctatatattttgaatgttatatgattatttattactattaaggaatccaaagtgcatatgtattagttgaaaaagtagattttcaaaagctttgctttctttataaaagaaaaaagatttgctttcttaaaacgtgatgaaatatatgaacctctcggttgtcttataattaaaattacataagtggtcaccaccgaatggtgatgatgattcacgtttcacagattcataaccttggtgtggaccatatatatgtttttttttttaatgtattatatataaggagggtttatattggtgcacactcttcttcggtgcaatacagtataaatcaattatcgtatgtcacatttatagaaaatacaaatataatctgtgtttaggggttctagctaaacatttaat

SEQ ID NO: 329399 - DNA, 768 bp, Cannabis indica
gatgttaatgaaacatacttgttagtaaatcaattgtatactaatgttagattgatttagtgttattagaatatgagttatgcatgaattttgattaagttttggttggattttggttaattttgaaggcatgaaaagttaggttttgtgttgaagtaggggatgttgacacgaccacaatttggctcgccgcggcgagctcctccaggttgtggctgctttggtgagggcattggtcgtcgcaacgagggccctattctcccgatttgtgtgttttcttatttttgccataacttttaattttgaaatatgtgttggacattcttgatatcgttggaaagctcgtttcgggctttatatgttgatatataatgggagttcaaattatgtatatgtgtgaaaatgaatttgggattaacactatttgtgaaatatcgagaatgtgtgattagaattaccggcacttgctcaagaacacctgagaattcagaatctccacatacttagattactaggtaagatagtaaactagtacatagagattggcgttgtggctcccatgtatgttcttttgtatatgctatgcgggaaactgagattagggttattaccctaaacttagcgattatgtgatctagggttattactctagaatttagatgattatgaatgcaatattatattgtatatgttgatataaagaattatgtggttaaggcataattaggttagactcggtaattaaaactgagataaaccattctaagg

SEQ ID NO: 329400 - DNA, 856 bp, Cannabis indica
agggtaacgaaatttcctttacgggggaaatagtctaaaagtaaacccgtcttagtttaatttagggaaaattttaggtccaagtttaattttactaggtttaaaaaacctaacgtagggttaaaccgttaattttaaaattacgtacggtaaattttaaaccttttaaatttttactaccaatttaaagttactttaattgggttttaaactttttcccaacgtagttagtttggaccaaactaattttaaattaaacgtactagtactacgaacgtaagttttttagttagtttaaacggggggtttcggaattttccgggtaagttttaccggttaaaatttttcggaaaaacgtacgggaccgtttaagggcctaacttaggtaagtaaaaaagttcgaaacccaaaaaaccttaagttaactacgttaaaagttagttttaaggggtacggggtttaaaacgaactaacttttcgggtaagtttacgttttacgggttaagtaggtaccgggttaagtttaaagtaaaattcgttcccgggaaaaatttaaccccccgttaagtttagtaaagtaaggttaagtttttagttttaggggacttttaattaaaacccggtaacggaaagggttacgaaaaacccttaaggggtcctttttacgtaaaaccccgtagtttaggttaccttttttcgtttcggttttaatttacttcggtacgttttaactaaaagtaaaggggtaaatttaaaaggttggttttttagtttttcgttaacctttaagtacttttttcggtcctaaacgaaaaattaagtactttttaggtttacttaaaaattagtaattacg

SEQ ID NO: 329401 - DNA, 585 bp, Cannabis indica
atcgtggcttacggaggctactatcccaccggaatagcagggtacatgcccggagtatcgccctcgggtactgccccgaccgcaactccacaagcaagtggcatacaattctctgctacccccggatatagccagggccaagccttggcaccagcatcatcccattttgacaacccgcccggagtgaatggacaagctccttcacacgaaatttgaaaaccctaaacttttttttcccacaatcatatcttttctcatatctaaatacaaaaaacagaaaaaatctaaatagggatatttatacacaaaaatattaaaaaaaaaaagaaatctaaaaaataaatgtggaaaatctttacggtatggcttttctcaacagatctgacaagagagagagaaatgcgatcaggattaggagagggtgaagagattaagagatcaggactgagagatagatatacatatatatatactagaagagagttacgtggcgagccacgtaaatattagttttattttaagttgtaggggtttttgtttaagaatttagtgactaattgtaaattatgttataaacgatatgtt

SEQ ID NO: 329402 - DNA, 583 bp, Cannabis indica
aatttataatttatactgaattatgttagtaagattataatccaaattattactttctaattaatctcataatatataataaaccataattattcagaattaggtatttgagatattactaagggtgtattgatactcgaaaatctttgaccggatatgtgtttactatgtttggaacaactattagtttaaaagcgaaccttcagaatgttgtggcgctgtcaacaattgatgcggaatatatgggcttgacggaagcgatcaaggaagcactgtggttaactaggttgatggagtagctgaagctcaatcaaaatgttattattgttcattgtgataatcagagtgcaattcaattgaccaagaattgtggttttaagggtgtacgtcggtcggtttggtcagtttatgctatattttattcaactcaatgtaaagatcgagttacaaaaataagtgtaacctgcctaattaagaaaaaagaaaatagtaaccagcccaataaaattggtcggtttggttgggttaacccgtccaaaccgaccactaatatttttttttttttaattttttaattttgtta

SEQ ID NO: 329403 - DNA, 849 bp, Cannabis indica
tgttctatgttatatacaaatagatcttgggttaattgttaatttatctaacatatatgccattcttttttgtcattaatataaatatatatgatccaggtatatatgcacgtcacaagaaacggaccttttaattttgtaagaatttaattgtaccatctactcattattttttaagaaacatcaattatatgtaaccaagtggttggctctcaaggaaaaaaaaaatgtagtattcaaaagaaaactattaaaaaaatacttataattttagaagaaaaaaacctaggttctaaccaaccatgaaatttataaacaggctctttcaatattattagaggattactgaataaataataaataaaagatgatctatattaatacataaatataaatattgtatgttagtgcacattctctaatcaatgattgtacgattaatattaatcaataatgttaccgttaatctcatatatattataatctcgtagttaaattatacatataataaataccattatatataaaagaatatttcgactaattataatttttttaaaaaaatgttgtaatccaaattttcatatacaacaatcaaataattcatatttatgaacatatatttatatattagggatatcatttaatgctagcttaaatggttggatatatataaatataagtatataaaataatagtaattgatctagtattaacttctcagccatatgcatgaatgatattaataatgtatcaattttaaatcacaatttctttttaattactttggtgccgtttggtaatacttttgtttttaattttttaattcacaaaatgaaagtaaaattt

SEQ ID NO: 329404 - DNA, 436 bp, Cannabis indica
ttcatatttaggatgttaattcaacatacttgtttgtaaatttagattctagtaaaatatttccaacaaagaaaacattaatcttaatataattgaaaacaactactaaggacgcgtgtcaatcataagcactaaaaggtgagtcaggacgcgtgtcagctgcatgcattagaagatagacaacacaactatgcatgcgaagaacgtaccatactaaaagggcaaagcctcacgtagaagaatcatatattatgacctagaagaaaaaaaaatccactaaaaatactcttgactgaaaacttgataaaaaaaagtagagtactttgcggtataaatacttaagtttaatttttagcggttataataactaagttataattctggaacttttgtaggtgcccgattgttaagtgttaagtaaattgccatgtggcaa

SEQ ID NO: 329405 - DNA, 1325 bp, Cannabis indica
atacaatatttattattaaagggaactactttaatacaataattttgttattatattcaaaaaaaataggacctaatgtattaaaaaactaccataatatcatatctatctatatctatatctatatataaatataaagaaatgttctaaagaggtttaggtggcactttctatgctttttattctaattttactcattttttaagctttcacaattttttttctttgaaaaatacatatttttattaattgtgtgtaacagtcttttttctttattattaaattaattgtgtaacagtcaaaaacttttcatttgcattgtaaaattataaaacaccttttatatatttacctaattaattatatcattacaattagaaacttacataataatacatacactataaaaaatcatcattctttcactctatatgagtctttacgaagcttcctttcccaatttttgttttttaaaaagtaccatctacatttgaagctctcttttcttcatcaccactgtcccttcctaggcacctccatgtgagcattttttttcttagaattttatcaaatatacatgattcattcccaaaagtttaacacacacatatatttacatatgtatacaatgtaagtcttttttttagagaaaatattaactaatgattttattggattaatttattattatttcatcatcaccatcaattttttggcacctatgtgagttattttttttttattttggtctagaattttcattcaaacatacatgatccattcacaaaaattttgaatatatatatattttatatataatacatacaatgtaaagtttttttgttgaaaaagtcttaactaaatgtatttgattttgttgtattaactcatttacgatctatacatatacatgtaacaaaaatggcttctccaacagtaaatgttgaaagttgcatatacatcgtatcatgtagcaatcgaattttatttgtttcttgtatatatgtatatgcatatatatatatatatatatatatatttattgtatatatataattgtgatgcatgatatgaggtagcacttttactttttaagagttttctatcctattttttgaatttcttaatttttttaatttttctcattatacaataatctattaataataattaatattaatataaactcttatttatttcctttctttctaattttttttttcattttctcaattattagtgtaccattacaaatcagttaatttagtatattttgttggaatttattttacctaggatcttagatctactcacaagtatgttta

SEQ ID NO: 329406 - DNA, 862 bp, Cannabis indica
tctgtctctttattgatatttaactaatagacattacattaaaaaagttttttatttagggcataaagcccaacatatataacctctccttatttcacccgcactcttgtcattggatcactaagggactaaacatcaaatagcacgggtgctccaccgcgggttgaacggatgctctaccatttacataagggttccacgactcacccaaatgcccctagctcacccaatggaccatgggctcgtacaacatcccatgggctcgtacaatagccttagggtcccacaacaggccatgggctcgcacaatagctatgggctcgcataccaagttttcacaattcaacagtcttagtattttggccataacgctctcgatatatatcaaaattatacgattcaggatgcgttggaaagatgagaaagagatctttgaatcttatttgtacaaaaagatccaattctgaacatgtcactacaaaaatcctcttacaattgtaacttagttagttaattaactctactcatgagttgttacagagttgacctttgagttggacggatataccctgagacttgcaagcatggattttcgagattaacaatctttaggccatattcattgactcaatcaatcttcgaacgactcctacagttgatgtctcttgattgctgggactaattgtcgacttatcttgaaaatcaaatctgtcgatttttggggttaacacatacattaacataaagttcggatccattgatagaaaatagatattaacaacttgtgaacgttatagtgtagtgtttaatgtattcttagaaaaaaaatttagaatttctatttggaatctaaaatttaaag

SEQ ID NO: 329407 - DNA, 550 bp, Cannabis indica
tttttttttcttatttcattcatcatcttcataatcaccaaaacttactgcgcactactattaccaccaccccttccatctcagcctatctttcaaatctaaatcattttaaaataattaaacccatatataaaaccaccactaaacacaacttaatagatcaaaaaaatcaaatctaaaatcaaatagtgccaccgaacgagatcaaaaaaaaaaccatatatctgataatgggtaaacaatcaaaaacaaagaagaggtctaaactctagatctgcactcctccatcagagcgagctccttcggtggaagagatcaagttcctccatcaaatatgcgctcaaaacttatatctaaaaactaccaccatcgcaaccttttcttcaccgtgaaaatgagagaaagaaagaaagagagtgtgagagatatatatatatatatagagagagagagagagagagagagagagagagagaagagcgaggagagaggtagtagttagatagactagttattacacgtactagtagtagagtagtacgtagtagag

SEQ ID NO: 329408 - DNA, 848 bp, Cannabis indica
acatggactgacttggcaatgaagttcttattaaagtttcctccagctaaagctgccaagctgcgaggggagattaataatttttgttatctcgacaatgaatctctttatggggcttgggagaggttcaagaatctcattagaaagtgtccacatcatgggatcgagaagtggatgttagtcgataatttctacaaagggttggttggtaatactcgaacaatcataaatgtcgcagctggtggggcttttatgaggaaaagtgcgaattagacttatgacttgcttgaagagaagccaataaccaataatggccatgaataaccaataatggccaatcgagagaagccaatcgaagaaagttgcgagaatccatgaagttgattccataactaagttgacagcctaaatggaggccttgagtaagttgatgactgctcaggtaaaacaggctcaagttacttgtgagctatgtggggggcctcacacatatgacaactccccggtagatgttaacagtttgccaatggatcaagctaaagccattgaaaactattcacagaacaataactatgggtataaccaatgaaggggtcgccaaaactatcaagggcagtcatcgaatcaacagtaacaaggtttccaccaacaaagaaatcaaccccaacaaactcaacaaccctcctaacaaccaagttctagtggagactcaaatatccaagtatttgatttatcgctccaattcatgatggagactatagcttctattaaaaacttagaaactcagatggaacagttggctacttgagtggcaaaacaagctcaagaaaattcacctagcactagtg

SEQ ID NO: 329409 - DNA, 545 bp, Cannabis indica
gttgttcgaggctgaaagataatctcatacaggcccaactccattgcccatttaagaaactgtccaaatgcgtcagatttttgtaatacttggcgtaatggttggtcagtgtatacccgaaacggatgagcctgaaagtagcatcctgcttgacacttacagcaataagtgagcttttttataaatggataccggccttcagcttcgatgagtcttttactgatgtaatagactgggtgttggatattgttctgttctctgatcaggtacgacccttacaacatgtttcgtgactagaaggtatattcctaactcttctccagccaaaggttttgagagcacaggaggttttgcaagctgcgtatttagctcttgaaaggatttttcgcattcctacgtccattcaaattgcttatatcctcgcaggatgttaaagaatgggacacacttgtctgttgattttgaaacaaatctactgagtgcggtgattcgatcagtcaaactttgatcttccttagttttgttggcaatttcatatccaggag

SEQ ID NO: 329410 - DNA, 569 bp, Cannabis indica
taaaaaataaataaaatttgttattttatgtaaatttacctaatctaaataattttctaattcaaatagaatatgaaggaggaatggattttataaaatcgtatataagtaagtatggttgtcattttcaatagagtcttgtacttagtataggcactagaagcaacattagtagtattaagatcctatcattcaatatagggtgtgaaaattttgataatgaaattataaatttgtcaattaaggaagatgaggactattcttcatcttattggactcttcatcacttgccttagtaattatgagaatgttaacactctcaaaatgtgctttacttcttgggtgaagaatggtgatcgttggactaagagcatcaccaaggaaggaggcttcatatttggtgatgctgtggaattggccctccaacatagctgcaaacattacaataaattatcgtgtgtgctacagtgcacggcatatatgcggtgcactgtttacacggcatactttttttcttttttttttatatatataattaattttgtatatgtttatattattaattgtat

SEQ ID NO: 329411 - DNA, 1337 bp, Cannabis indica
tctgctgcacccaatgtaaagtttcctaaccttcatatgtgtttatttcattattttagaattcatattaggatgttaatgaaacatgcttgttagaaaatctagatcctggtaaaatatttccaacaagggattggccgagaccaaagacagttacaaaagtcaggagttttttgagtttggctagttattaccatcggtttgttgagggattttctaagatttcaacgcctttgacaaaactcactaaaaagaatcaacggttctgtggacagacaaagaaagcttccaagaactaaaacaacgattgatcatagctccgtattggccctaccatcttttaaagaaaagttcatgttgtactgtgatgcctccagacagggtctgggatgcgttttgaagcaagctggtagggtaatcacttatgcctcccgttactttaaaaaatatgaatagagatacccaactcatgatttagaacttgccgcaatagtatttgctttgaagattcggcaacattatctctacagagaaaaatgtgaagcttacacggaccacaagagcctcaaacttctttactcagaaagatttgaatatgagacagaggcggtggttggagctggtcaaagattatgactgtgaaattctttaccatcccgggaagaccaatgtggtggcagatgccctaagcaggaaggatctcaggaaagtatctagcatgattttgatttcaccctagctagcaactgatatggccggatcaggtattgagtttgttgtaggcaaatttaataatttgacattacaattcgatctgttagacagaattaaagcagcacaattaactgatttagaattggtgatgatcgagaagaggttttagatggtcaagctaaagattttatagtgtcaggcaatgagatgctactgttcaaaaccagagtgtgtgtaccgaacagtctagagcttagaaaggagattctcgaggtagctcataccactccttattcattgcatctagcactaccaaaatgtattagaatttaaaacccttctactggtggtgcgggatgaagaaagatgtggtagaatttgtatcctggtgcttgacttgtcagaagattaaggttgaacactagagacccccagggttattgcagcctcttactcttcttgagtggaaatgggagaatgtcaccatggactttgtggttgggtaaactagaacaacggggatgttgttaaatgccaaaatattacatattttatagtgtaaaaatacaaaataaaattaattatttaaaatatttttaagaaattaatgcaatatattatta

SEQ ID NO: 329412 - DNA, 1378 bp, Cannabis indica
gtcaactatcatagaaacttaccccaggtcaagcacttgtgaagttctttgtgatgaactatcaagaaaataaaatgcacattattaatataggcagtaccaattaatctatttaaactctctttaattgtgtattcccataactatacagttttagttaaaatcatcacacttgacatttttcaagcgatgttgaatagcacaacttactcaattatttttctgtatagatcccgagactacttactgttacaaatttaataaaatatgtatagtatgtataatcagaatatacatattacataattttttttataattaaatatcataaacacaaaagaatacacacaatgtatttgagtatatagtgacaattaagttgggaattgccacacatgtattttttatttatagaaattgtaagtgatctaattattgaccaaagagtatttgagatgatgatcactagatagagtgaaaccattactagacatttttgttttatataaatatataaatatagtgcttattattcagtctttttagtggcattatttttccaattacaacttttttattattattattttaatataaattttcttgtcttgcttttcacttttaattagtggtcacaatccaattctaccaaaattttaatatatatatatatatatatatatataaaatatatatatatatgtggctgaaattgtcacaccccaataatatttgatagaattatcttttaaatattttatcttgtatattttgttctagaaaagaccaatatataagatagaggattcaaacttttccatatatatttagaggttggggtgtgattactattatatactaatcataataataagcttaaagtagcataaatatatatattttttcataaaataaaaaattccaattataatccattctctctacattttcctttcatgcataattaattatattagagtaattgctagttattagttctcttgtgttttgttaagtcaagtgcattgttgagtggtttggatactaagatatcacactcttgagaaagccaaattttaatgccttatttttggtggataagaattagtatgattatacattaatccattaatactataatgcatgttaatcctattttcaactaattagttatgtcaaattcattggccaggttttcagcatgtcatgttcaaaaaaaatagtttaaaatatattatataatcatcactaaaaagaatacaatattaattataagcatagtgattccttcataattataatatattaatcgaaaaattccattaacacactgttattatagttagtaactgtgtaattactaagtagggtaattact

SEQ ID NO: 329413 - DNA, 682 bp, Cannabis indica
tcttaactattattattttcactaatattgggctcatgatattattgtatttcatgttaaagtctaaattatcatttaacagcggtcatggacataggttagagatactacaattacactaaaaaggagatgcatcccaagttcaaatattttgagataaattaaaatggcatgagaaaagatttatttaaagtgtatatgtaatgtcccactatactttataaataatgtgagattattataaaaagtaaattgaataatcatgttttcttagtacatgaacatggtacttcaaaaagttagaaaaatatgaagaaaaaattatagaaagccacatacactcttgtgtgtttcctttatattaatatgtaaaaatcatgtaaaaaatgatatgaattctcacaaaattaaagaataagatagaaaatatattttatttttagggtaaatggcggcaaacctccaatactttcgttttggtttcactaaatccacacaacccaaatttctgcgggtaaactcccaaaaccactattctgttagcaatttaccctttccgtccaaatttagctgttaagtgccatgttggtttgtccacgtggacacaatatacacgtggcacaattttattggtccacgtaaataattatattaaaaaaaattaaaataaaattaatttaaa

SEQ ID NO: 329414 - DNA, 659 bp, Cannabis indica
acatatatatatatatatacatatatatacatacacatctcaaaatggcttattagatatcaaataattagtcaaactcatctagctgcgtctcatttataaaagtgtttctccattataataatccgacctatatataattaatgtatgtagtattctataaggatatccaaatatataaatatatatatatatatataaaatatgatttttgaaaaaatatgtttggtatatatacaaacatactttttggtctcatcaccggtaaaaatatctctacttttgtacatgtcgatatccagaaattataatctaaatttttaataacaatattatagctagctagatataattttgataattattaatagatctcttatgaatttaattatgtttgaaacctaaattaataatattgtttactaattactagcataacgtggctggtatgatatatatgaacatttaaatctgagcatatatatatagattcgactatatatatatatgtatagataatatgatgagaatgtgtgcgcatgcattacgtacgtagtacgtatgtacatgcaagaaatgcatgcatgcttaaggcacgtgaaatgaaccacatgaataatacgtttttaaaatagtttttgttgtatatatatatatat

SEQ ID NO: 329415 - DNA, 972 bp, Cannabis indica
attaatttgattaattgcatagttttgtgttgaacgttttaatttactgaaattagttataatttcaaattcacctgttctcttggaaacatatctcaggttaacataacctattaatggtcaattaagaaaaatacaataattggatatttgacacaatatgttactatctttcatcaaaaaacacaattcaaacattattgattatgtaatgttgaagctttttttattataagtttaatccttgttatatatagttatttctaaccctcgaataaatatgtaaattatatgcagaatggtgttgtgtatttataaaagttcaaagtagcatgaagagaaaactgtgacactcccatatttattactttttataattagatcgtagttattcagtcattcatatctcttattcaaagaaaataaaaataaaaaaaattacatactatattaatttaatatttataacacccgcactaaggacgattgtgttaattagttaattaagatatttcttatttatataaagaaatggaaaaatgtgtgttagattaagttagaaaagaaaatgactcaaattgatgccactttctgtcgtatcttctgatacggtctgtttttgttctttgacatgttcatcagtatttttttcagtgcctgagttttgattttgtctgtaagatttttctccgagtttttgttgttctggtatttttgtctttactctgttctttatttcttgttatggcttcggctagtaatagtcctggcatagaagatcaggctgctggaattaccctggatgatgaagagatcgggtacagctttacaggaggggaagaggaagagccttttgatgtacgatggtgtttactaggtagattcctaaatgttgggttaatggactttcaggcaatgcagaatatgatggcatttttgtggaagcctttgaaggggttatacgttaaagag

SEQ ID NO: 329416 - DNA, 1006 bp, Cannabis indica
aattccatttccccaataaaaaaaattgctactgatattgtacaagctagtagtagtactatctaattttattgatatatagtttcaatctcctttgaaatttcgatttacttttaaatttgtcacattttacatgtccttaaattattagaactagaatatatctcgaggattgattgtcttatattgtaagtaaagaagaagatgagacagaatttatctataacaaaagcagtagctagtatgggtcaaagatatataataacaaacttacatctatataatgaactttttatcacataaaactattcaaactaaccaaatagtagttggacattttaaaaatacatatatataaaggaaattggataagtatatctttgtgaatgttacacgatgccatattaactatatatcaagttttattaatgtctctctaatcattcaaatcatgtgccttacgttgaccctgcattataaaatttctcatttatttattaattctaattgatatatattatgtaacaaattaatatatacattacttataaattattcatgatattattcgataataatcctaactaaaattacttaagtgatggagggattattatatataagatctatatccaatcattgcagttcactccttggttggatggttcagatcaatgacaaatgtctcgatcaaattttgccagatagcttgttttttaatgtgattatagtaattaaaatggaataacattaattgaaactaggaagaattaattatacattattattgtcattttgaaccaaataattattatgttactacttcatattttggaagggtacttgtttggtaagaggttgtgttgaacatgtacttttcgcactttctttcaagtgctcttgttgaaaaggaggaaaagtggataaaacatatcaactgctatatatgtatataactgctatatatgtatatgtatatattctttgaacagtgatcagcaattat

SEQ ID NO: 329417 - DNA, 412 bp, Cannabis indica
tacatggacaagtccatttgttttgaggactcagattgggcttggcatgaaacgtgtccagtatgagttcattgaagagaagtatggaccaaagagtgacttgcttcttaagtccaacccagtccacaagaaagtcccagttctaatccatgaagataaacccattcctgaatccttagctattcttcaatacattgatgaagtttgggcctcatctggaccctccattctctctcctcatccatttgatcgctccgttgatcgtttttgggccacttatattgatcagaaggtagatataattgtttattacaccgtatgtattttattatatagtattagattaaattatgttatatcatatttctaagggaaatttacatgttatactaacttttgccatttttttaca

SEQ ID NO: 329418 - DNA, 1754 bp, Cannabis indica
aatatactccttaacaatatacagtataccaattcactctgtaccatatccctacaagtgttggtagtgtaacaaacatataagcatgcatatacactcaacatatacatacattcgcatattcgtattacatattatacacagttcttacctcctttctgaactcaagtgagttggccgacctgaacaaaaagtctcgtgcttgatggatgccctaatcgcataacataaccgggtaaatcacatgtcaaaacccttatcctacaactcaaggttctgttattatcactagggacaaaattatcctaggaaagaggaaaacacccaactaaggactgaaatgggcaagaattgagaaaacgggttattcggggaatctaccaaaccggttaattagttttacaggtactggcaaaccgattaactggtttgcaccaggtttccccaaaaaaaatcataaccttctcaaaactcatccaaatgctaccaaaccttccagagtacctaaaacaagcttacacaatatattccaaccaatagaaaccagaaaaacacactgaatcaaaatataccattgatgactcaaatttgagttttcaaactcaaacgtggtcatccacctcaataatcactaaaaatagcaagaagaacttaaacccaactcattttaagcttagaaatcgaatcacacaaactttaaaccctaaaagcccctaacttccaaaattgcatattataaccaaatagaacttaaggaaatcaatagacaaggacttctagggcttaccttcgttagaacctcctcaaattcttgctggaaacaccaaaatctagtagaaattcccttggttcttgctgggttcgaagacagagaagggaaagagggagaattatttgattttttggcttttcttttttttttccctctaaaagaaataagggttaataaattaaacctttgtgtaaaataaaataactaggtgtcacacccctaggcagccactgaacctctcattgggaaattactaaaatgccctttttcttataacttaagcaaaataaagtctaggggtaaaacggtcaaaaatcataacctcgctcaaactcgatattctatttcctccaatatatatcccactaagaaataagattctagatttacgcatgtgattaaactagccatcgatcgtattttccgttgtccccgagtaaaaattacaaaaataacataattcacatataatacaaataatgcacctagagtttaataaattcttaagaattgagaaataataactctactacctatttctaacaataggacccacaaataatttaattccacaaatactataaaaaataccaatacttaatgctaattgcctttactaatctatataataaaatgcggtcattacaactatcccacattaaaaggatttagtcctcggaatctaacctgaatagctatagatattgagtcctcatgtctgacactaactctgtaacactctaactagcataggggtgtttacgtgatttttaaacgtactgtgcagctcgttgctaatcaacaaggtttatggaaaatgtgattgattaaaatttttcttctttaattaaatactcataatatttcatacaaaatacttttggatctcctttagaaaatactttacaaaaagttcactgtctattacaaaattcttgtcgcccagcgactaactacagaagccttgatgtcccgaggatcg

SEQ ID NO: 329419 - DNA, 851 bp, Cannabis indica
attatatttgactaaaatataacaattaaatgtaaaaataaaaaaaaaaattaatgatgggtttggatgagttattttcgtttttcttaattggacgagttgtacttaaattttcgtaatctgatctttacattgaattaaataaattgtaacataaaccgactaaaccgaccgacgtacacccctactagagacatacctcttttaacatttcttaaccataaaatactcatgttatgaatgtgtatcgttgctttgtgccaccgcagcccttttcctaaagctcctctcctcgccaccccaccattgctcatcctgttccccacgccctaatcactacctcacacgtggcttcttccatcacaagcacagagacatatcattttgttatcaataatatcataacctttgagataatggattaatacaaaaacattaaataacaaatacataaataaataaatatattttttttgaaaaaataaataaatatatcacagattcaattaattactacattgtaaaatttgtcacaaattcaatgctaagattattaaaatttaattaccaatctaatagtgcaagatttattattattattattattattattattattattttggcttccacttgaccatttacatatggtctggccacgattgagaaactttttataattctgcgttgaaaacaaaaaccaatgaaatgcacactgtcaaactgcttcccattatcttatataattttatgtggaagtctaaaacgacacacgatgtttttaattacaaagtccaaggcctttttggaggtgaccgtgttcataggttctgcttctacccatttggtga

SEQ ID NO: 329420 - DNA, 954 bp, Cannabis indica
aaagttgtttaaaatgcctcttgtaattattgagattattagatttaagaacttttatttaattttagtaaaaaaaaaaatttaacatagatgaaagttctacattttaaattatattttattccactccttatttgtaatttcatttatattctcatatttttattctttcaaaccaaacactaaaaaaatgtagtaataagaatgagaataaaaataaaaataagaatgtaatggaataaaatttaaaatacataaaaaaaattattaatctttatttcatttgcactaaaatagtcttttcttcctttgcaaaatggaatagtcaatataagagtagataaaactgtaaagtgtagagacaaaaccactacttaaaagtgattttcaaacaacttaaaacattcgatcgttacaaaatagttgtcagcccaaaaatgtctaaatttttttattctgacaataaaaactatcaacaacactattattgagtttttttttttttatgttttttaattttagctaaataaataatatattcacatctgtacaatataaacaatctataatctgcaccaaaaaaaaattacaaacttcttacataaaaataaaaatctttaaatatttataatatgaacaataagagcaatatataatacaaatacaaaaatactagacctatatacccaaaaaatctgtatatatacataataaaaaaaacataacaataaaagaatggtctttcgtcttctctgggtgcccttgagatgagggttttgtttggctttaagagccccaaagagccaagatttgggctatagctccgccgaaattacgaccctgtaacatcctcacttcaagcctctattgggcccttacacccacggactcatggctcacacgagtgtttccagcgtgctttgtcctcactcacacgcatcctgggaaaacttc

SEQ ID NO: 329421 - DNA, 1125 bp, Cannabis indica
atttaatatttataaaaccgtcccacaatttgaccttcaaagttaatgcaaattagaaaattagaaacaaaattaataacttaaaaaaccttaaattatagcatgatcaatttttctgagttgaatataaattataaactaattttaattttttattatgtatattatacatacagaatttaaaatcatacccaataatatgtatataatataattattcttctttaaatgataataataaaaatttgtaattaaatttaattaccttcagtttcccactttttgtgtagcactgtaacttctcatcaacagttgaataaaaataattgatcagatcatcaagaacatatcaatgaatatatatatatatatatatataatttatatttatataaaaaaggtgtactacttaatatggtgatgggtgataattgaagttgaagtaagaaagagatatcatttctttttttttaaaaaaaatttgtattaaataaagactttataatattatattggtggtgggaagtatttcttatgagtagggatctacatgggacgggaaagttggcaggagagtattttcttattcttattctcgataaggattttaatctttttttctttgtttatttttcatttaaggatgggtagaaaatcccttaataggggtaagggcgaacaatctcctaataaaaaaataaagtttataataaaaatttaaatatataaaaatattaaattatataaaaattaaaatattacacattaattattattcaataaactaattattatccaaaataaaatttaaaattcataaaaagatactaatatactataaaaattataagttataagatattattagaaatataagaaaatactaaatggagctctgtcaagagtgtaatttatgtccttacctgtttaacattcgaagataaaaaataatttatgtccccatcccattaggggcgggtcccatccttatagaaaaaaatgtgtattattacttatgagtaggggtgttcattggatcacatccaatgtttttaggcctatccagatccgatccaatcatatattggatgttagattttaccatccgatccgatccaattaatt

SEQ ID NO: 329422 - DNA, 534 bp, Cannabis indica
aaggagactaagcagtttggcaagggcgagtacggacttctttaagcacttttggggtaaattaccttactttgagggtgacttgcttagatccctcagttggttcctccttggtggcgacctcgtgaaaagtatttttagcttcattctctacccacttctcaaatgcctcaattatttcttccatggcctcatcgtcggatgacccattttcaggtcatttgataccctcctcttggtaataacctccttcgcatgaggaacgctggaagacctacctgattgctctttttggtgcgggccatggcaggtaacatgctaagcaactgtgcggtggttatagcaatctcaacaaaggtaagctcctggaatgggtatataggcacccctactagaatagtgatctcacccgaagggagtatatacatccacttgcggggcaagtaagattgtatcccttttcttagctccgagatgtgcctattgtacgcttcaccacctatcgtctctcgataaaggtgttgggttttatgc

SEQ ID NO: 329423 - DNA, 989 bp, Cannabis indica
aaaaatgagagtattttttttaattagatagaaaaactaaacataaaaactcaaatttttcataaatggataatatcctttaagagtgtactcatacatatatataccaaaaatactagctatttgaatctaactgatgttttgaattagtaattttttttttttaagaaaatgaatacacaatacattaataaatatataaaaatcttactgcatgtatgtataaatttctttaaaaattgtaacgtgttttattttttttctctcctaaaaaaattgtatgtttctgaaatagtgttggttcaatctttagtgtgaccagagtttatctctctctctggggtattctagtaggcatgcgaaaccgtgtttcctgtgcaatcttggtcccgagcatggtggttcttgtccaccctaaccagttaagtggtggtttaccttcttcttttcactcctactgtcgatttgggtctcctttattcattaattagagcatttattactctgggtagtattatcttttcaaacaatcccatctcatttattgtaaaaacactatctatatttcttctatttctttctcctcgatattgttctttcctggtcttttaatttgggatcttttgcatttaattctggctttccatatctctcaccatcatttcactcttggagatagtaaaataggggcggaggtctagttttttgaagataataagtcctttgtcatcattgtggctcttctagtggaagctagggatgtgacgagggactcttcgagaaagcatctcagagggctttggctttatctctataaagtgcggctgaggtatgtttcttttcatctttctccttctttggttgttatctgctttaagtgttctttctctgtgtgcttatgggttttccttttcttgagaatggaagtgtaataccctagaattaagaaatggattagcaaaaccctaattagataattatgaataatt

SEQ ID NO: 329424 - DNA, 895 bp, Cannabis indica
ataaaaattgggtgagattgttatgtacaagttgtaattaaattttgaaatgaatttttcgagttcagttgtgaaaagttatcttttaattattataattgaagttgatttactaagaaaatatgataatctaacagaaatgattagtttaataattttttttgttattttcgttaaacttaatatttagaactaacaccgttacaaataataaaacaaaacataataataataataataataataataaataataatgaaatattaggttttagtctgtcttaacctaattcatcatgtgacttttctagttcgatatagtctcctatatctctgtcacaaacctattcctccaataaaaccagctacatagttagatttttctttgatttttagtgatttacatgctattttcctaatgttatatgtttatttctgaaaaagaaacaacaaacctagctactttagtaatttttttttacaatctctagattgaggaagaagatttcaatgagaagagaaaatagttaactaatctttaattttataattgttattacattttaaactattttttaatttaatttttcaattttttttttacaaaattattaaataacttgaactaattttggattgacacatacacttaatgatattgaaattaagattgagtgtaaaattacttctaattagaggtggttctaactattttttattagttaagattgtgtgtttaataattttaaaatataataagttttgttacaaatattttaattatttaaacgtttaataaaattaattgctaaaagattttaacaagtatcaaattgaataaaattaattaataattattattaatttaattttaaatataattaattttaattaa

SEQ ID NO: 329425 - DNA, 1474 bp, Cannabis indica
acattgaattggagttttatttagggcataaaacccaacaagtactcacctagaacttgattcacagtcaattgtgagtaactatagcacataagatttttgactgttaatgtttcagccattcttaaaccaacaaacaaagcttcatattctgcctcattgttagaagtgtctaattggaatcttaatgcgtagtgaaatttaaagttacttggcgagatcattataactcctgcactcgagccatttttatttgatgctccatccacatataatttcaaagtttctgtattgtgttttacgagtggatcttcttcagagactatccattcaattaggacattagcaaaaggttgaattttgattgatattcttgggtgataagttatatcgaactaccccagctaaattgaccattttatcaatcttcgtgaagcattaggttttaataaaatttgtcttaattattgatccatcaagaattttatgggatgttcttggaaataaggctgtagtttttgagatgcattaattatgcacaaggcaagtttttcaagagggggatatctcgactctaccccaagtaaccttatactaacatagtaaataggttgctggtgttttctgtcttctcgcaccaaggctgcacttattgcactttctgagacatataagtaaaggtataaagtctctccagttattagtttgacaaaaactggtggtgttgataaatgtttatttatgcctttaaaagcttctttgcattcttctgtccattcaaattttttgttgcctcgtaaaacattaaagaatggtagacaattatcggttgattttgaaataaatctgtttatgctgccattcttcctgtgaaggcttggactttttttggcttcgtgggtgatggaatctctattaaagccttgatcttttcaatatttgcttcaatgccctcgcattaactatgaaacccagaaattttcctgaagaaactccgaaagaagacttttttgggttgagcttcaaattgttctttccgagtacattaaagcatactgcgaggtcttttgtatggtcttcatattttatcgactttaccaacatatcattgacatagacatccatgtttctttcgattttcttttcaaacattccattcagtagttgcagatatgttgcgccagcatttttgaaaccaaaaggcatgagtttataacaataaagtcccatgttggttacaaaacttgtatgtcctttatcagggacgtgcattttgatatggttatttctagaatatgcgtccatgaatgtgttaggctatttttagcttaagttttgggtcacattttatagttgtttttcttctttattattatttttggaatagaattacgcttgttttctttggtttcaggtttctacacttgggatgtataaatttgacaaatttcgaaaaatagtgatctataaaata

SEQ ID NO: 329426 - DNA, 658 bp, Cannabis indica
atatatataattaaagcaatatatataggtatatttttaagtatataattatataaattaataaatgttttgacttagatcaatgcagccgatcaaggtgggttctttacaaagtggaaaattattcaagcttcgtttccctagctattacaatgtttttgacaaagtagagcacaaataaattaaattgatatttaattaattaattttttcttctatttaaattataattgttttcgtctcatataagcttccactacggtagatatcaacatcaaccaccacactctatctttatttcataatataaatgtatatatccaaaactatatcgataagataatagtatcgtgaaagcaatgaaaacctcacacacaatgacacaaacaaataaatatatatttatatataaaatatatttataaacataattaaatatgtatatatagttttagttttatgattaaaaaggcaacgtttttagttgcgaattttgttgttgaggttaggaaactactctctacacttaacatttattattatggtgcagccaacggctctcttatgactaccacgtgttcctcatattatttaatatatatttataaatacatgaaaatttcattattattattattaggttaattaggaatttttt

SEQ ID NO: 329427 - DNA, 1056 bp, Cannabis indica
tcaaattaattaaattgggaaaagacaaaagttatcatgaaaaaagacacacccttgtattaattaagacaaagggaggcgccacatgtgctgtgtccaaacatagtgcatctgccacctatattaggtcctcactagttttgtctttgggttaattaattaattaatgcaaaagataaatatttgaatttgaaaagtagttgagatattctctcaagttattgatagattctctcacttggttttagaatataaatatatgtaataaaattccgttatattatttatttaaataattaaatatgatttaataaatagatttgaagttaaataattaattaaataaaatatttattgtgtttatttaaatataccatataaatcaaattctaaacaaagaatagaatagaagaattttcatattattttgaaagcctaaaaaagattaatcagtaaacttttttgtctccatcactacaataagattgttcttgctcatgtgttgagaatacaataacttcatatacactattatcctactagcccacactagaccttgtgtgtggtggaaaatctgaaagatcaaggtgtaagttttgtaccgtttcgaggatacaacatacgaaaagacttgaagatatcctaataggcttcgagaggtaaatattttttttcatctatttacttctagtttaatatatgtacatatggtgatcttggacatatggtacaataataatcagccacaattattctgttgtatacctgatttagtaccataaaaccaacataaaatggatgaaattttttacgtggttcatgtatcaatgaactttagtccacgggtcaatgtattggcctaagaaggattgatgtattacaaataggtctcacaatttgaagaatcctaattcctactattgtgtttttccctctgggcccgtttggtacacaggattggactggattggactgaaaaggattggactggactggacaagattggattatgctgaaagtaatcctgtgtttggtttaagaatggactggactatt

SEQ ID NO: 329428 - DNA, 613 bp, Cannabis indica
tccagaactgttctaaataccccaaagaacaattccaaagcatcaaaacaacccagtaagcacagatacgaaaaatgccattaaagctccaagctttgagttcaaaactcaagcttggctaaaccccactaacatgcatccatagctgatttaaactactcaatcaagcataataaaactgtagaaaccatccccaaactcaaatagcatgcacagaaactaaactaacactaatgagccaattagtttgtgtttaaaactccaaaacttgctccaacaacaaaacagccaccaaactaagcataaatcaacatgaaaactcatgaacaagcctgtgaattcaacattaaacaaccacaataaccacaacaagtacaacatgaaagcatccaaaaattcactttcataacattcaagaacacaatgtaaaacttgaacaaaggttacctccactagaattactctaagcttgatggaaactacttgaattagcaaagaaaacccagccctagcagctcccaagcaaggccgaaagagagagagagagagagagagagagagagagagagagagagagaggagaggagagagagagagagaggagagagagaga

SEQ ID NO: 329429 - DNA, 1023 bp, Cannabis indica
tggtcaggagcacccggggatttggaatctccatgtttgcgggacatcaggtaagacggtagttaacacgtagagttatgcgcagtggcgcttatattgaaaatgatatatgtgaataataaggaaccgggattagggttattaccctaacatgagcggtttaatggcctagggttgttaccctagtgattattaatgtgtaaatgctataccatgttaaatatatgtgtatattgagatttaggattatgcgttcaaggcataatcgggttggactcggtaactagaaatatccgtttgtgactataccgcgccaacatgtcgagaaggtgctaggcaccactggtgccaataacaatgctcttttcaaatcattattactcatattaaattaatagttgctgaaaattttgatcaacaactataatgtacacgattagaaaaaatttggactaaaaagttattttaaatgccaaaacaaatttaagatgcattttagaggagttcattataaaataaccctaaaaaatttgatttttgtagcaaaattatgtatttgatttttaattattgaaataatatatatttaaaaaaagtttgaaatggatgcttattttgagagagaaagagaagtaatggttgttttggagaatctgattgagatagacaaaggaacttgcgtgtttttaatggtgtttttgaaaatggtaaactttttcttataaaaaaaaaggaaaatggtaaacttgtcttaatttcgcatatttaaggtgcgtttggaaagccacagtgtaattggatttgtgtgtaattagaggtaattacataatttgacatgtttgtctgaccatgtaattacactgtaactgtgtaattagaagtaattgaggggttccaattacactctccaattctcatggcccccatgagaattgaatgtaattacactgtataattactaaaaactttccatattaaacattagctattaaaaatattattttcccatgtaattactaacta

SEQ ID NO: 329430 - DNA, 898 bp, Cannabis indica
atgtgtgctccgagttctccgccacgtgatcggtctcggtaccaaaaaaagcgagagacttccccttctaacaggccgattatgactatgggagaagcctcaaagattgtttcggctgttgagagaaaccgagttcgttactctggccctacactagaggagttagctcctacctcagttttagaggctcgagaacgtgatgaagaactggcttccaaggccaatatgaaagagaaggctcccgtggttgctggggttcattcggaggtgaccgggtctgaattgggtaggctaaatggtgatcctatggtgtccgaggaggtgcttttgccttcttctgcaccttcggtttgtatgccggttgtgggtttggtgatggtcgataatgctagtgggaaggagcagtaaggtaaggtgtcttcttcggatgtggatggtggttcaactagtggaaaggtggatggtgtgggagagttgagtgaccaccgaaagctaaaggtcactaaagaccaaaagggaaagggtgtgcttgttcattcggatcaagatgagctctcgtttcgccaagcactccaacaaacatttgaaccgataattcaagcacaaaaatcgaagacttggaagcgtcttaattctgtaaagggtcgtggccctcatggagtgtctaaggtggccacttttcctattagtcctaagttgtctcatgtaattgttgcaaatgccaaatgtaaggtgagtcctaaggttggtgggggtgggaaacgcaagatggagatggatgttaattctgaaagtgtgaaaaagggacgtttggaggagcaatctgacatggttcctgagcatgagaatattgtattggcgaggcctgcggagcaggctcgcccagagcaatgagtct

SEQ ID NO: 329431 - DNA, 511 bp, Cannabis indica
attaggttactttcaggttacaagttatttataatttatttttatttaatttccaaattaatcacaaccatttaatagtaatccaatggcttaaaaaaatgtaaccatgatggttacaataaaaatgtaaccattgaaacctcttccatatatttatatatatatatataaattggtctcattgacatctatacatatataacaactatgtgattattggtgaacgatttttttatttattaacagtactagatcgttttttttaagatggttacaacacagtcggaaattatcagtcatccttaagataaaatgactcaatcgaaatattcacccaaaaaataaagtgatcactgttagacttttatttgggcttacattatattttattagttttattaaaacttgggttgattggatagttctttgctgtgttagctcatgttgttggtgatcaattgttaatgggcttagcatctgtgagtaaagtctaggtgaagcagaagtgtgg

SEQ ID NO: 329432 - DNA, 1453 bp, Cannabis indica
cttaattgtgaagaaaagatattttagaatttatttgttaagggaaattggattatatatgcatactaatggaggaaattgtttccctaaacttatgcatttaaaattaaaaaatataaccactttacattaaacccaaaaatacccctctcatttttcaaacctcaactctctctcttcctctatttctctcgttgttctctcaccgtctcaccctcaccaaatcaccaccaccgagcaccaaatcaccgcctacccagaccaccgaccaccgtgagacgcgactccaacgctctaccaccgagcttcgaacggagatgtcgaaggtaagcctttggatctttttttttattattttcgccgaatgtgatttgggcaaaatctaggtttggggtttgatttcatcgagctcgatgcaacccgatgcaggcccgacaccggtccgatggtatcacaggaaaattgaggaagacaaaagcctgataggcccgatgggtccgatggtgggcccgatgggcgatgctgtgtaaaaaaaaatagaatttgatatgggcccgatggtgggctcgatgggcccgatagtgggtccgatggggcccgaaggcttgacagtgtagtgaaataaaagagagaagaagagacaggagggtaaagtaaatggggggtattttagggatattataaaatgtgtcatattccataaatattaaatattatgagtttagagaaaaatttttaagtatatgtaagcataaaaaatcaaatttccctttgttaattaagagacttagtggaatttaattaataaataagataaatgacaattttatttgataattaattataattattaaataaatagttttggtatttataaaattaaaattgaaaaatatggcatttgtcaaatgaaagataaatggttgaaaaaatgacaaaattataattagtggggccatctatatggccagccacttaaggcttatttttgctattattttatcattttttattccatataatttaaatcttaaccctaggtgaaatagtataaggaataggatggtctcattatccaacaactcttataacctagtttacatgctttggaggactgcaattttagcattattatgggctgtgtggaatgagagaaatagcagaactttcaaaagggtggagaaatcaacagaccttgtttaggagagaactaaattttggacagcctcttgggtctttaaaaccaaacactttgaggttttttcttttctagacttaagcagggattggagtgttttgctgtaaaattctgagatctttttgtttgctgggtcactcatagttttattacactgtatttgttttacattttgtataccacgattttcctctgccacaagtgaggctttaatctttgcaggggagacctgtcaagtggtctccttctcctttt

SEQ ID NO: 329433 - DNA, 1217 bp, Cannabis indica
gtttcttagatgaccagcagatgagattcaagccaagatacacgcaaaagccagttgtggaccgtctgtcatcaatgtcagacgcccaatccgcatcacagaagcctaccagatccagagatgaggagtgagacacgtcaagaccatagtcaagagtacctttcaagtaccttagtatccgcttgactgttttccagtgggactcgagaggagaatgcataaattgcggcaaaatcattataaggagtctaagtttctttttaagttcattactttgtatttgttaaaaatgtgactaatgaatcttttctctggtcgtggcccgtagactaggagcaatctgcaataattgttgataccatatataaaatatcacctgtcattttaatttttgaaattttacttttagaaactattattctgttctataaggttggagtttttaatagaggaaatttttgattctgttcaaataattttacaagagttctacattaattaattttttttattaatttttcttcataattatagaaaacggattatcagacaggctactactactattactacaataggagaaaatttgtcacgtggagatatattccatgtctaagttgatgaatatatatatatatatatatatatatttatatataattataatattatattgattggtagttgaacaaacgggattcacattacttactctccacccttgttaacgactttatgataaggctctttaactattttcatgaaaagtgattattgtttcattatatacatatttatctgcctattctatatatttattgttttctttgagtcccgtccaacttaagctgagagagtcattttctttttaaaatgtgtgcctccaaatgaaatgagaaaaaagtgcaaaataattggtgactgtcactttggtccatatattagtatacgaaaccaaccacgaactatttgaccataaatgagcaactttgacatttaatactccaaagtaacaaagtctccagatgcataatagaaaagtcgctaggctttccgttcccgaatttcggtcgtatttactataacttttgggtcactaaaaagggttcttcaattactacacaattaaacctattaagagttagtcccacattgctaatgtgtggaaataaattgtgatatataagatgaaagggctactcctcccattgccaatt

SEQ ID NO: 329434 - DNA, 1183 bp, Cannabis indica
acaactatcataataaccggcaatggagattggaagaaatgaagaaaagagttgataaggattttcgaagtcactggcagattattaactctgaggccaccaaaaccagcaactgcgacggtccttctgagactcgatggatgctccctagaccaggaagaatacgtgtgaatgtggattatgcttgcaacactgagaatggagcagttggaattgtagtaagagctcatagtggcgatgttttggccttgtttgccactaagattgctgctgcgtcgcctatacacggtgaactcttggcgacctactggggtgcaaagacggtgcagtacttgggattacagtcagctgatttatacactgattgccaattgctggcttcagtaatatcagcagctaaagccccacactggaacttgcatttcatgtttggtaaactctgtcaactccttttgagtgctacgatttctacttactgggttcctcgctctactaaccaagctgctcatatgcttgctaagtggggactcaatcacaactgtaatggtttccttaatttctgggaggtgagtccccatgtactcaccaagttactttctgttgatgataaataaagtggttgttttcatagcaaaaaaagtagttgatgtataaaaaatgataagttgacacgaaaaggcgataactcaatataagatagagctaaaattattttacataaaatgaaaataaatcatattagattgactaattcaatatgccaacttacatagcatgaacgaatataaatatgcatatcgggtcaagccaaaaataaaatttagatttatatacacaagctagtaaaactaaaatcaaaaactataactaacataacaactaactatataaccgatatctaactaactatattgagctaacaaacattaactactagatgttagctcagctggcttaggttcattaatagactcccttaaacttaggggggtgactccaacactacaaaaaatcttacttttagtcaaaacaaaacttgtgactaaaaagtccgtgactaaaagtattagtcacaaaattacaatttgttgtaactaaaatgtatttttagtctacaataatattttgttgttgactaaaactaaattaagtgacaacttgtaactacagactatattttagt

SEQ ID NO: 329435 - DNA, 1356 bp, Cannabis indica
cctctgtacacaataacattatcattgtctttcgtcagaaaaagaaaaaaaaaatgacgtgtgtgttcacaagacgggtgatgtatattgaatgggctccctcaatatgggcctttcttgagggcccatcagaagatggccctacttgagggcccataaaagtacaaaactgagcattccagtctacagaaccacatcaggttatccacattgaaaaataacaaaaaaaaaaaaaaaaaaaaaaaaaagaaaaaatatacttcaataactctaaaatttgtcactagtcccacatcattttaatgacacttttaataaaagtaatttttataaaaaaaaaagatatgtgatcatggttcttataagcaataattaacataaaattaaacacaaaatttaaatcacattgtatatatatgataaaactactctaataaacaaccattgttaagatccttttatagacacttggtaaacggtacaactaagacttatgaacattacatgtaagacaaaataagccaaattaaggtacatacataaggatacacatgcgtcgaggaatttgcagagagtgcttccgctattcccaaattttaatctccatcccttccctgcaagagacggaacgagaaatacactaatgtaaaaataaaatttattttaaaattttaaatgtataaagttattaaattatataaaagttaaaatattacatattatttattatttaatataataattattatacaaaaatacaacttaaaaaattataaaaattacactaatatactaaaaaatacaaacacattataaaatatgaaatattaataaaaatgtgcatcactagtcatactctaccttgggttgacccattggatcttaactatgggttagcccaaccttcactgtaaatgaaatctgacttttggttcacaactctatatgctaccaaaaatattttcgaattgtaaatattatcattttaaaaaacaagaactgcgcaaaaatcgtgtctttattctctttatttgttttttttttttttgaaaaaattgtttattttcaatttattattttcctttccaaaatatatatatactagatagatgttaagtgctaagtaacgtatgttaattttattttaatttttaatttttttaatatcataattttaaaattaataatattcaatgtattgataattattaaaatttgaaagcataaaaataaaaattactattatacttcgtaatagtaattaataaaaattattattcgtcctaaatttatctttgcaattaatgaaaatacttatggttaaactatcaaaatttaaatttaatttaaaataat

SEQ ID NO: 329436 - DNA, 1734 bp, Cannabis indica
aaataaaaaaaaaattaactaataacagtgatatctttcttggagacaagcacttaaacttctaacccttttttttttcaacagctgtaattaatttagctcatctcaataaattaaatcaactttcaactatttccttttctgacaaagtttcatggttttttaattttttattttagtttttttttttgggtaaagcatctagaagaacatattacagtaggcttaatttgtttggttttatttttttttaaaaaaataataatatatatagaaacatcttataaaaaggtttataaaaccattgattatacgtggcatgtgggggcaaatgacataaataagaatatgactaatcatctttttatataaattgaagtgagttaattgggttttaaaagcactttattatttatactttcttcttttcttaattattttcctttttcatactacttttattttttatttgttacaacaacatttgatatacatagcttcaattaatcttgtcgaaactacttttgaaaagctcatgattttcatccatgtacaattgctaaagctcaataatacattctatatataattaatataagcttgttatatattatggggacaaatatccaataaatccaggataaaagatcacttttcccaaacgcctatatcttgttcaattttagatggagtctcttttcaaaaacttataaaaatgtaataatccaaaaaaaaaaaaaaaaaagagagagaaaaagaaaagtgtaaaaagcaattgaatagaatactatcaaaattacccccaaagtattgtatagagccttgcaccatttatttttacctttttcgccaaacttgaaaagaaagaaccctaatctatatattttatcttcttcttagttcttatattttaacaaaattgaactacttatataaagaaaaattattaaatacacttttttaaatgactacactacataagtacaaattatttatgttttttttatttaaaatatatattatataatcaaatttatatatacatattgtgactagagtttttccgttcacccttaaaaataaaaagaaaaagaagagagagatcttgtgttcaaaaatacatgattacattaatttttatggcatgtttattattgagcaatggaaatcaatagtaagagagtcatccttttacatttgtttatttaatttattcaatttaagaaaatgagattaaataagagaaaaaaatgaagaattttccctttaattttctaaagaatgtcattaaaggtaataactattatgtatttttattttactttttaatattaaaattataatgataattttatctttcaaaatatgtcttacaaaataattatcatatattatagtttaactcaaaagaataatttagttaatttaaacattttgattaggttttctgataaagtaaacaaaataaatcattattctatttccaaacaatttaaaaaacaacatattataaatattgattcgattattatttatttattctgttatatttttctattaatttatttcgattctgaatactaaataaatagtatatgtatgattaaaaatctaaatactttgaagtatatattataataaagagatggtaggtttactcccattttctatgtaatcgtttaactttgaatgaattttgattttaaaaaaaaaaaaaaaaaaagaaggctattt

SEQ ID NO: 329437 - DNA, 1552 bp, Cannabis indica
cattgcatgattagcttcacaaactttggagggaattgcaatccttctagcatttcttcgataaactcccattcaattatatcatatgccttctgaaggtctagtttaatcaagcagcttggtttgtttgccttcctcccatagtgtcgaaccaagtcttgacaaatcataatggtgtggccaatgaacgtccctttaataaatcctccttgcgaagaaaaaataagagagggaaggatagcttttagcctgaagcataacatcttagttgcaatcttatagataacattacaacaggctattggtcaaaagtcttttacagtgttaggacattttaccttgggggcaagggtgatcacagttgagtttatctcctttaggatcttgccgtattcaagaaaggagatcacaacttgggacactagctcaccaatggtatcctcgttatcttgataaaagaaactagaataaccatcaggacctggtgctttcaatccgaatatgtcaaacacagccttcttcacctcatcttctcaatatccctaatatcacacctctcctattctccatttcagtgccaagtagttgcttataatagtcaatgaaagcatcttgcaccaactgggggttatgaactctctccctatcttgttgttcaatggataaagttctattctgccttagtctttgccttatacttgcatgaaacaatgatgtattactatctccatctcggacccacgccacctttgccttttgttgtaaaaaagaattgtagtctttgtgcaccttaacatatgtctccctagcctccttttcatgcctctgtatatcttcattggaaggaaaaccttgcaacttagtttgatctcttccaatctgactttggcctcatggacaaccccctgtagatcagaaaaatcgtccctattgatgtctttcagaacagttttcaagcttttcaatttcatcaccaccaaaaacatttttgatccatttacttgccttgaccagatgtctaacaaaatactttcaaacttagaatgggacttccacattcgaaagtatttgaaaggctttagaccactagcaacagtcggatataaggagattacagccgatgagtgatctaacaatccctaattaagaaagacaacttcagcattcttatacttattcaaccaaccttgattagataacactctatcaatcttggagaaaatccgatcttctccatgttgtttgtttgtccatgcgaaaaagtttccattgctctttatgtcttccaagttacagcaattaacacattgcaagaaatccccatcaggccaactagaaacccgaagccctattctttcttccttggctaaaatctcgttgaaatctcccataagacaccatctttgacttgtattcagttcataaatatccctccaaagccttttcctttctaacctcttatttgaggcatatatcacagtaacaaggctgtcaaacataccatccattgttgatatttttagatgcagaaattggcttgtgcacctaataa

SEQ ID NO: 329438 - DNA, 728 bp, Cannabis indica
tgcgttgacaaacaaaactcgaattatttagattgagattaatctttcttgtgcaagtttcgctttactacaagacatacctaatcatttgtaatggttgtttctttaatggattttattttcaaaaaataaaaaaataacttcacaaaagtaaaaaatatatatatgtaataaaaaataaaattataatatatatattgcataatctattgtgactatttgtatttttggccacaacaaattttataatcactaaataataagatgtgactataactacgtaggtaacaatttgtgacaatttttttttaactaaatatttattagctttaatcttaaaagatctaaaaaatattgtcggtagaatagtgtgaagttttagagcattattaattcctatttcttcatgtatagggatgaagaagtttcaaataaactacacaattagaaaataagaaggtttataacaagacagaaactttttaaggtggaaacattaattgattatattgagatatttgcagagaaatcttttttaacatttgtaattgtcacacttacacatatatgccctattaagaaaacagtttttcgttattatgattttgttgcactgactcattaatttttgaatgttatgggctcgtttggaatgtcgtattacgttatactgtattgtattgtattatattaaattggattatatatcatatttttatataatacta

SEQ ID NO: 329439 - DNA, 619 bp, Cannabis indica
tatttggtgtaattttcactttaaaaaaaaatcacacccttgctttccatacactttcttcaacttatttagttacctttttttttccttaacaccttaaattttactacacgttttttatgagtgaacattgttaatatttttaagctatccaaacacacatattatatgttaatcatcattactcataatcactaaataagatttatattttatttagagcatcccaaaaataaaaaatacacataccttccatattggcatttttcattgtagctatcaccaagatcctccaatgtatgcacaagatagtagaagaggagcttatgatagcaaaccctttttcttatcaccacacccacatacatcttactaaacacacattaaccttttttatatatccaacacctaacccctaagggatttattaggcttattgggctaatgtacataattagtggtggactataatttaatgggctaattatagtttaagggtgctctcatgtgcctctaatacatttattaattattaaccatcccattatggttgttgacaaatattggggctacatagttaatgattgtgtttatggtattaaacttatgattatattag

SEQ ID NO: 329440 - DNA, 1099 bp, Cannabis indica
ttataatttctttgtggtatataattttattactacggtatattaatttttattattacgatatatctaatactgctgtatatatttaaatgatctaatatatttatttatttttgttacaatataataatatgcaatactaaaaaaattatataacttaatttattattatatatattttttaaaaaaaatatgtgataaatgtatttttataatttttattagctaatttattagatttgaccattttttttaatttttttaaaaagtggacatttactaacttagttcctaaatttaaggcaattttgcatctcccaccaacacacacaaagtaaattaaagaatgtaaaaaaatcgacaaaaataccattattaactgtgaggatttaatataattaaaaaattaaaaattcgagaactaatttattaaagtaaataaaatttgaagactaacttaataaaatatagtttaagaactgggacacaaataaaactaaaactaacaattgattacttcataaataatcacttgtggctgttagtgagttgatttggagttatcctgtagtggatcaagagttctatcttcaggaatcatttattgatgatgaagatgataatggcataataatgttatcgagtggttgttggatcgaaaatatgtgaaatagaatagcttgaattataaagcattcaaatgacatatctcacaaataattcttaattacaacagtgttaggataatatatgtaaagtgcatactttgattctggcccttgtaattctccttttttttcgttgttcctaattaatcatgataaattatatatagcttgagactaggggtcttcatcaaaccgctcaaaccgctcgcaccgtactgcactgcaaaaaaatacagtttaaaattctttacagtgcggtgcggtttgcggttttgaattattaatatgcggttcaaatcgcactgcaccgcacattataaaaatacctgtttttatatttatttaggtccaatatgtgaatgtccactccaaagcccactaattattgtattattgaaacttaattttttttatatttattttcaagtctt

SEQ ID NO: 329441 - DNA, 788 bp, Cannabis indica
ttaagagtgtacccatatatatttatgccaagacttaattactttgttcgcactagctttgatctataagataagtgcatcgatatggggtactaaggtacttagcactattatgaagtgacgctttataattagttagcaattccttataatctttattaaaataaaatatgtggaatctaatattgaattgcatcaatctaataatgatattacacattacaagagtgctagacaccatgggtaccttaattagcattactatattgggcaccatttgtgcctagcacattttataggcggcgccgtacgattagttaacgatattttctaaaagttattgtcttaagttatatagaactcaatacttaattacactagctaatagagatatgtcactggagctattggtgtttggaagaatttatggagtttaaaagttttccctaaagtcagcaacttcttatggacgacggcttcaggctcgttatcaacttgtgttcaattagaaaaaagacatgcatgtttcagttaacccaacatgccccttgtgtctcactacaactaaaactatttttcatgcgttagttgggtgtgttcatgctcgtgcctgttggaacaggacaagtgcggatgtcagcgataatatggatgacgatttcagcaattggctgctggagctgcaatgccgaggaagagaaggcgagttggaggaggcggctatggtcagctaggccatctgacgtgccagaaatgactttgtttggcagcaaaaaagttggactgct

SEQ ID NO: 329442 - DNA, 1068 bp, Cannabis indica
caacttgaaaaacaattcataacacgaatagatacagaaaatgcaaacagttttgttataacacatttagatcgatttattactaatttattttgacaaaaaatcagttcagggtctttttttatactgttttggaaaatacaaggtctattttgttatttaataaaacaggtggtccaattgataatttttgcaaaatacaagatccaaaatgatatttatcctaaaaaattcaaaatagaaatatatacactttttagttttattccttttatgctctctctctcttaaacgaagatgcatcgtggattgacgtatagtgcgacttgttagatatattgggtcatatagtatttttttcattctcttccccaattaagatatccttcatttcattcaaaaaaagttgattgaattatcaaaaatttagaacgtgaaatgtaatgaagtgtagttaaatatattttttaggagaatattcaaattaatattagcaatttaaataatttatagttggcttgattagactaatgaaatgaaatatccagctccatttataaataaaataattagtaatatatctaaaatttctatttagatgatcatatttttttttttgctttgttgtcactattttaaggattattaaacaaatgtgaaggtctaagaagcttataagttataagaactatacatatggttatttgggctcaaaattcgtaaagcaaagccactattcatacaactataagtttataataatatgtaatttttttatttaatttacaataacaacatgattatttttattgacttgcattaactaaataaatttgacatttttttaaaatctctcacatttgtttttgtttttgttttttttttttgtttttttttttttaatcctcgtttttaaaagtaattttttagatactaatgattttgataagaaactaattaattacttttacatataaaatttcatttttatatcatatcatataatttgagatatattttgattacctctaaaacttatttatatacatcttagtaattaattaatta

SEQ ID NO: 329443 - DNA, 1014 bp, Cannabis indica
tttttgctatgtcgaccaaatttacattcattttttggcacaccattagagacactatttttgtttaaatgagctatattttagctttttgaccactttatttacaattccattggagatgctcaaatgcacaacagaatagatagctctccattttcatttttccttgccttttttttttttgttggttttctttatagcgtcatttagctaaacgacgtgataaatatttttataatgtcgttttgtaaacgacacctctattttttgcacactattcacgtcaattaactttataaatagtaacgttgaccgatgcaaaaattaatttttatagtagtgattaaaatgtcctacaataaagaaaaagtgatggctatagtaaaacatttcaatacatttacatataattataggtaaagtaaactttcaaaatgttgatataataaaggtaaggtcaatgttaaataaactaggtatgaaaaatacaggagaatcttccataaaaaataaattaagaaaatagaggacaatcaattaatcggtggaaatttttaacaaataaatcaaaaagcatgtcttaacaactccactaattatctgtagttataattatagttaaacactatatatatagtcaacatgtgacaaatcattttcctaatactataactaacactttctttaatttatatatttctttcggtaaaagaaatatagaaatacatatataaatgtgtatatagttatagtagccaatatacgagggggtgcatgtgaagaaaccttataaaaccattaaataatatttgaaaattgatgatatggtgaagtcatgattattagatcatggaaaaattaatttataattttaaagttttccaataattgcattccacttggcttatagcttcattattattattaggttgattaagatttttatcttccgaattttaacatgtactaaatcatatataccttctaaatttttaaggttgttaaaaatatccc

SEQ ID NO: 329444 - DNA, 864 bp, Cannabis indica
taataatctcaaaataattaaaacctaacttttcttaatttttgagaaaaatgtccttcaaacttctagtggtcgaagtctgcagcattgcatgacgccaaccctgaggggtagaggtgttggcttcggccactagaagcttgaagtctgaagcaccgcacggcgccaaccctaggagtagaggtgttggcttaggcaaacatgcaactttctgaggtttcatgaaaagcaccatttcacttggcttacagtccacgttgcaaacaattgtttttttttttttatttgttatctccatatattagcttgatgaataaaaaatataaaattgcattaaattataataaaattttaaaagatttaatttgaaaatctaaataacaaattaaatcattttcgtgactaaatcacatacaaacatagaattacacatcaaagtaaaaagatataaaaaatagtgtaggttcctttttgaaattagtataagaatgatattaatatcaaagagaaatattactataatattaataatatatatttgttttggaattaagagaaacatcactaaataatgttaatgttagtagtttaactttggataaaaataaataaatattagataaataaaaaatataaaatagcattaaatcataataaaactttaagagatttaattaggaaaaatctaaataacaatttagttcattcttgtgactaaatcactcacaacatagaataacacatcaaaataaaatataaagatgaagaaaaaaaactccaggttgatctcctaggtcttcttctctctaatattttcaaaagtatttttgctcttaatctcaaaataattaaaacctaattttt

SEQ ID NO: 329445 - DNA, 3353 bp, Cannabis indica
acccccagaacactcaagaagagcaaattggggaaattggggatgttcctgaagatgaacaaccaaatgaccaggcacctcatcaagaagtgcctcggagaccctggggattcacatcccaagggaccgaaaacaatgatctactagagtcttcttgtagaaataagaacagaaggcaaccccaaaccaggggataggagatcccttgtgctaacgagagaaatcctgggactcaaccttggacaggtgggttaccactgagacaccgtcaacgtccttctcgcactgatagggaggaggagtatacaaaccccaacaagggccatgtatcaaacctttcccagagttgaaggcatgtatgtgatgaggcaatatctagttcaggacgtatgagatctcgagatcacagtcgatctacgcgaggaggagataggtctcgccataataatgatcgagaaagtatgagtcatacaaggagtagccaatctgagagttactcaggtacaaggtcaacgagcaactatgattgaagacgtctagatctttgtgagcaattaaatcggaggaaacccgatttatgcaaacaactcaattcaaaccaaaagtaagaggatcgaatccaattgcgaatcagcgagttgggaaacaaattcaagaaatatcaagatgggaatctgcctgattatgattcagatgaggagctcgaatctttccatccgaacattatgagcgctaatgctccctagggatttaaaaaccctcacgtctcgtcgtaagatgggactacggatccagctgctcacctcaacaactttaatacaataatgcgagccagctatgtcacgaataacttacgttgtattttattccccacctcactgactgtggcagcgagcagctggttcaataaattcacccatcactcaattacctcttgggaacagctatcttagaatttcaaaaatagtttcgggaatcaagagaaatgcgacctgaagtatattccctttccaatataaagaagcaaatatgcgagacacttaaggcctacttaagtcattttagtacagcagctggtagggttaaaatttgagcgatagtattcagcttattgctcttcaagcagggattacgactgacctcttggcagcaggaggtgagctgtggaatgacttacagggtcgccctatgaataacattagtgagttcaatgaaagagcccaggtgtttgtacaaaaagaggaagcaaggaaagagatgaaatctataaagactggctcgggaaataaacccagcattgtctcaccaagtaaagtctcgacgaagactgacaatccaggagtctctagcactaagagaaaagatgactatacggaatcagccaaagattaggaaaaatagaagaaacatgataagtaagtgctaatttacattatttataccaagcttaatgaaactcaagaaaatatccttctcgcacatgagcacagggttgcattttgcaaacctaaaaccatgagacatgcgaggcacaaataggatgcaacaaaattctgtagatttcacaaggacatagggcatacaaaagacgaatgtcgttacttgaaagacctctcaatatttataaattgaatcaatatttataaattaaaatgataaaaaaatcttattttattggttttatttgaaattttagatataattttttatcttttatgagtgcggaaaccttctttttgtatacttattcgaatccaatttaaaatggatataatttttaacaaaattaagattattagagctttatctcgcatggttactttcaacaatatgtaaagcgacaaggcaatggacaaaaccatccaaataggcaaccaaatattacaacctcctcctgtagaaggagaggatatcttggtcatcttaggagggccacatctcgctagagaaagtagtaatgccataaagagatatgtcaaggaaattaagaatgagcggtcagctttcgctctaaaactgtcaaagtaagctaggactgagaaacctccaattgtgttttcaaaggaagacacaaaacacgtgaggtacccacatgtcgacccactcgtgattataatctagctcgccaacaagagaataaaaggggtgttggtggataatgaaagttcagtaaatatcctctacaaggacacactgaagaaaatgggactgcaaaatgcgaagttaaaaccttgcatggtgaatttatgcggattcactggggacagtgtcgccagtcaaaaaattattgagctcccgttaactctgggcaagccacctatatccacaacattgatgcaagattttctagtcgttgacttaccattggcctataatatattgttggggggtcctacactaattggactaggggcagttagttcaattaaacacctatccttaaagtttcaaacactgacaagagtaggtgtagtgcaaggtgaccaactactggctcgggaatgctaccacatagagctgcaaaataaaatagccagccatcagttaatgtcaatcataacggagaaaggcgagaaataggataaggatctagatccttgacttcaagatgaaaagaacctgctaaaaccaattgaggaattagaagaagtttttttagatccagaaaatccgacaaagtgtgtattcattgggaaaaatctagatgaaaaactaaaatagcaactaataagttttctaaaggcaaactaggatcagtttgcctggagccattcagatttgacagggattgatcctaaagctatttgtcaacacttgaatagacccaaattacccagctaagagacaaaaaagacgacccttggattctgaaagataaggggcactcaaagatgaagtggataagttgttgactaacaactttatacgcaatgcattttacccctcgtggatatctaatcttgtccttgtcccaaaaccaaattgaacttggagaacttgtatcgactttttagatttaaacaaggcatgttcaaaagattgccttccactaccaaggatcgaccagttagtggatgtaactgctggacacgagcttatgatgttcatggacgcatattttgcatataaccagattaagatgcatgtccctgatcaacaacatacaagtttcgtaaccaacgtggagctttattgttgtaaagtcatgccttttggtttgaagaatgctggggcaacgtatcagcgactagtgaataaaatgtttgaaaaataaatagcaaggaacatggaggtctacgccaatgatatgttggtgaagtcgataaaaaatggagatcacacaaaagacctcg

SEQ ID NO: 329446 - DNA, 640 bp, Cannabis indica
aaggcacaaaaacctgttcaatgagagagctcctcattagagcaacctgacgttgtagctgatttttgttcatgatgtttagcttaacttggaaaatgagaagaaaatgaccacaaataaggataaggaaaaaaaactacaactctgaaaatgcaactgtatagatgggatgggtgtagttgtattttttttttacatatatataacaaacattatggtaagccaaggtttatatagtagtacagagagatattgtagatggtgacgagaggaaaacaaataaaagcaaagggtgtacgtgtcaatcttatggatcgcattgcctatctattttggttgatgttgtgggagatattatagtgaatcaaaaacataagaagatttttttttttttcattattcttattatttaaatataatcttttttacatcgttgcattttgggttccctggattacaacaacacaaaataactttcttcatcttcttgagaagggattctctataattccagtgaaagcacttaagaaaacttcccgaagataatacgaaagaaaaattggtgtaaactattgttagagagtctcacattgataatgtctggaaagataatagaatatataagaggaataggctactc

SEQ ID NO: 329447 - DNA, 1697 bp, Cannabis indica
aaaaaaaaaaaaaaaaacctaataattacaattacatgtttaatagccaaaataatatcactataatggtagttcattaataaattttcacataaagttgtcaataatattcaacataatttctttatgcaaaaaactaaaaactctactatatcaaaatatgtcaactattgtcgttgattcataaaatgtgccaacacaatttaaaactttctccggtgaaggatatgttaaaaaaaatatacattatatttattaaaataatttaactttttagaaaatatatagtattaaaatatttaaataaagtatttttatacgaaagagtaaatgaattttcaaataaaaaattatttaatgaattttaattcgtgttttatttcgtgcttacatgttgtgttttcgtgctaagaaatttgtatttttgtgtcgtgctttcgtgattgttctgtcgtgtcgtgctcaaatctatattttttgtgtcgtgcctaggtccatatttattcatattgtgctgggctcaaatttatattttttttcgtattgtgttgtactcgtgtaatttgtgctcgtgccgatttcatgccgtgttaaaaagctctaaatgtacagttttaaagagaggtaaaagcacattattttgttatatcagtttgttttgcatacattttacaattgggattattttatataaatgtagacaaaattctacacttgtagggtgtactgtttttgttatatttttatagattttatattttttataaaaatagggagtattattttttttattatttttgaaatatttttattttaatttattgttacgagaaagcaatatgatttttcttacaataatatagagtgttgttttcacgttattgttacggaaaaaaaagtatttttctctaaaaagaaaaaagaataagtgaaatcttgtaaaaaaaaaaaaacagaactcgtaaaatgtaaataaaaaaattatgtattgtgtaatttttcttaacaaatagtagaagttatataaaaaaaaaaaaagtaaggaaaaaaaaataggagttcttacatcaaatactgtaatttttttaatttttttacttatttacagtggggtgaatttcttttaaaaaataatgagtaattttatattgggtactgtgttaaattttcactgttgttccacggttgtttttagttattccactgttatattaattgttctattttgttgttttacgattactttataaaagacagtatttttgtaaaaaactctgtgtggtaaacttgtaaacttttacccaaaattcagtatttttgtaaaaatctcaaaataatataagataacttacccttaacagttatttattgatttattttaaaatttgggtaaataccattttataccctgtgttttacaaaagttaccaattagaccctctgttttgttaaatgataaaatggaccctgtatttttcaaaatggtaaaaataggacactgagcttaatttttgacaactgtttttttaatataaccaacttgaagacaattcctaacacgaacagatacagaatatgtaaacagttttgtcataacacatttagatcggattattattaagttttattttgataaaaaatcagttcaggatcctatttgtacaattttagaaaatatagggtccattttatcattt

SEQ ID NO: 329448 - DNA, 728 bp, Cannabis indica
acctgtttcccttatctcagaccttttcagcaacacaaaatggccatgaaatcagaaaaatgcatcttcgtgggatactcgtttcagcataagggttacatgtgtgaatcaccaacaggccgagtttatgtcactcgaaatgtcgtgtttaatgaggaagaatttcctgcactccaactatccactacacaccaggtaaattctccaacatctcaagtttatgctactgcaacatttaacacagcacctaatcctttgtctccttgtgtctctgaggaacaacctgctgtcatgctgtctgcagagccacgacatcaatccacttccagctctcaccctatacctgctcctacaacaatcttgccatctgtcttagcaccaatctcagcacctgtttcagcacccaacacctcatcagaaatatgcaccacctgtcctaatccaccactcccacctacaccaataaccaacttacattctatgcaaaccagggcaaaatctggcattcacaagcccaaagcctatctagctaccaaatatcctctacccgaatccctcttacccaaagaaccaacctcactcaaacaagctttagccgatcccaagtggaatggtgctatgactgatgaatttgtggctttagttcgaaatgggacttggactctagtcccatatcaaaatggaatgcacgttgtaggaaacaagtgggttcatagggtcaaattgaa

SEQ ID NO: 329449 - DNA, 1191 bp, Cannabis indica
aaaaaaaaatattttttgaagctttaaataaaaaagaaaaaaaataaatatggaaagtataaatgtaaaattacattgtcaaagtataaatgtaaagtttttagaaaagttagtatttggtgtaactatttctaatctccaatggtggtgtataatgttgtccaaatttgacacgtactaaaagttgtgtcaaatttagcacaaaatataacataggtcaaattttacaccacaatataatacaaaagactgatattcccctcaaaaataggtattttccatctactttattaggttgttaaggcccaattcgcagtctagcttgtagtccacgtgtaaggctgtggaccaaaatcctgccaggtctagtcctatccggccttacactagcaagatgcaggctagccgaccttgtgctgtccaaaagctggctggccatagggctagccaagggtggtcagctagcccctttgaggtggctagtctatcgctcgtcatcccatttgagtgtcgggacccctgttggctaaggtgctgacttaacctcctaattggtgagatgtactaccacgtgacgttgatattgtccacgtaagcatgccacgtcaggtgggtaaaaaattaggataatatttaccccctaagtctctatgcagacgtttgtgtagatagggacttactagctaaattggaactgatgtagcgtttactaaataaatattgatgcattttttagtctttgaaatacctgctcttgactgtcttatctcatttgttgcaataacttgactacttcacacttctacatgtcttttagttgagtactgtgtggcaagtgaaggagttgtcccagagaatccatttttagtcttttggggggaaatttctcttcatttttcatcttccattctctcactagaaaagaaactttgaagaagctcctctttctctcgagaggccaaacccacattgctccatctctcaggatttttgcatcattttgacgatccaagcttcccatcttcttcaacaacagtttcttattgtggataagctttctattctcgctattcacttgatttaggttatttttccatgaatgcatgaaccttgttcttcgctgtgaatgtctcttgatttccaagttagattgtaattttttcggtattttgatctgcatggtagtcttag

SEQ ID NO: 329450 - DNA, 1424 bp, Cannabis indica
agatcctggtaaaataaattccaacagtttcaagggcctaactggtccaaaaccgttagaccttgatctagaaaggtcaaggggatcaccgttcttagcatacataaatgccttgcccttgcccaagttcaagatttcagtatccaggatgtatactaggcgagaagactcattggcacacatcaaatactttgagatgcacctcgaccgagcggacagctttatcaaactagaagaagctgttagacaagcccagataggacaagttagcaataaacattcacaaggtatcctacaaactgatgacttgccaagcgcataggcacgtactagtaactctggccaatcctctagtttcgagaacactaagagcaagcacaataacaacaacactagaagaaacagcggcaaaaaggggaagtttaacacgtctctcatgccacaaaacaagaaggacaaggaggagaagtatatatgcttcacccacctgacagagaatcttgagaccatctttatggccactcatggagcaatcccatacacaaagccccctctcatcaaaagagagttgagcaagagggacatgttgaagttttgtagtttcacaacaactttgtccatgacacaaacgagtgtcaaaatttaagaagggagtgaattcttcataaggaagaacaatcacgaattgcgtcattttgtgcagaatgaccagactcaggcccaagatgcctaaaacagagatataatgccaccacaagtggtgcttcacctaggggtcatcattggcggaccccatattgcaggcgagactagtaaagctaaggagtgctatgctcgaacactctgtcataagcccaaaagcaatatcatggctttagaagaaaggggctttaagcaaccaaagcttggagagcccacaatctctttcacaaaggagatgttgtccaagttagtttcccgcacaacgaccccctagtcatcactgctcaaattaggaatatgactgtggcaagatgcatcgtagataatggatcctcctccaatattcttttcaaatcaacatacaaaaagatggggctccaacttactgatttggcaccctgcagtcaagtgatgtatgggttctttggctagggcatcccacccatggggtatatctgattacccagcactgttggagaaaatccaaccaccagaactctgatggtacagtttgttataattaacattcactctccctttaacgccatgataggccgactagtcctatacgacttgaaagcggtaaatccatctaccacttttgcctaaaattgccaacaaagcttgtgtactctcagacagaagaggagcatgagttacatcttcagatggttttgcaacggctttgggaacaaaagctttatgccaaattcaagaaatgt

SEQ ID NO: 329451 - DNA, 698 bp, Cannabis indica
ggtgtagtgggactgcggtggtgtcgacgggagagacaatattttgagagagatagaaagaaaaaaaaggtggtggtgtttggtggtggagatagtggtaaagatggtggtggagaatcagagaagaagaagaagaaaaatggtgaaggagaagaagattcgacctaatatattaaggaacttttactgacgcatttcgttacgtcgttaaaagatatttttagaaaaatagatgagatttttattatctaaacttatgtgcacaactgaaaatgaaaggccatatatataggctattaagattgacaattactataaacattttgcttgatatatcttcgagtcggtaatattaaactaatggtaatattctttttatctatcttagtagaggaatagcctagagaggaaatttagaaagacatttttgaaacaatagatcagatttttatcatctgaatttgtgtgtacaagtaaaaatgagaggccatatatataggccctccacgaacagaaaatgttaaaaactttaattacatccttccctagaaagggaatttctggcattccagactctttttttttattattattcataactacaaatagataaatttttcagttgaccagaggaatctctgtcgtttgaataattctttgtcttcagttgtcattttgttatgagtaggaatctttat

SEQ ID NO: 329452 - DNA, 516 bp, Cannabis indica
atctcactttctttcgtataatatctacttaatttcttgtaatacaacataacaaactatgaactcatctttattccatttccaaggattatccatcttcggcggccacagtttctgaagaaaacattattaattagacatataattttttaaatatatctagcatgaaatagaaattaattatttacacaaaacttatataattaattaaattaatgacatgtgttaattaacgaaaacaaaaaaagttttacacttaatattattacaagtatcaaagttctggttttatttagtctcctattatatttaaataattcttaaacaaaattagtgaacattaatttaatatcaactaaactaattatatgtttattcaataagaacgatgatatatctataaccctcaatttaatatataagtacactatgtcaatatatattattccctaattatatatataaatatatttatataaatattaaagggctcgtttggtaacgcgtactagtcgt

SEQ ID NO: 329453 - DNA, 1204 bp, Cannabis indica
tcatcttctttgagaaattttaaagagtgaatcaaaaaactcaatgcacacaaataggagttcatgtatactcatgatttagactgatctactaatgatcatcattgtaatatgaataactatttcatggtaaacgatacgttaatgaaagatgttattacatatcagtccagtcatgtataatcaaattatacacaatacctttactacatgtctatctatatatgtgatcagaatcaaaatcacacacattagagtatagtgtatagtaaactgaacttgataattctatattaaagatcccttactttaatacactaccgacttgttttattcatattgtataatattaattctcttgtacgaccttacaagattatacaatcttcatatgaataaggaacttttaaatatttattaattataattctataattaatgtattcgtttatcttatacttgtatttcatatagaatctatagtatattaaccattaaatacttatttttagaacatgaatcctaagatggtggcaacggtggattcagacaggtggcttgataaatgctctatggaaagaagaaggaggagggaggaaaagaggtagagaaagaaaatgagatagagggaaggaaagtgattcaaatagtagaggtatttttagatcaaaggaagataggcatcaatgaggatgttactttgggttatttgtaatgtttgcctaattatattcattaaaagcaaatttctcttctttgaaaaaagcaaatttctcactgtaaatgactatttattcatacttaagatttttttttttcatattaagtaataagaatatttaattgtaatttaatctgatcacccaaagattcacttagggttttctctttacgactaggtttttttctagtactgttctagtcaccatcgttgccgctagtttttcttttctccctcttcaaccaagattcaacgacctttttctaggctttgcttgaggccatagtcgggggtttgttcttactttgagtccaagtacaatgacttctctacaatttctctttcgtccatgtgttatgctcttcaaaatttgattcctctttggcttgttcgggttatggattatggggtgggtcgtcatcgagagtcttgtcgagtttcaattgggcgctagggctagtttcgtttgctcgttaaggggct

SEQ ID NO: 329454 - DNA, 811 bp, Cannabis indica
ttttttattactattatttttattctcattaaactaataattttataaataattctttagtaatttatttttttatatttagtactaatttgttctaatatgtatttatatgtatatatatttcatatttgatactaatttgttctaattagcttggtcaatcaactgtaaaaaaaataataaataaatgaataataagaatatatactatttctttattccaagttaatctgtacatagtaaaaaaaaaaatcttttagatatacaattgaagaaaaaagttaaatagaactataagagtaataacctaacaaaaataaaatgacaaattaatctatacacaagagatttatacaaagatttggtcccgtgatgatggtaatagcctactcccttttaagttgtattgatttatgagacaaagaataaagtatcctctctctaaagctcttataatggatctctgagtaattctctcttagattactatttctctcttgattgttctttctggatcaattctcgtgtcactgaatagtgagattaaatcactatttattgggttcattacatgaagaatgatttcccttaattataatgaataaaatatgaaactagtttaattccataattacaatgtatagattggggaatctagatttattgcctttattctttgaattaattccacgaatgtagggttcattttcgtgacatgcaagcttggaaaaaacgacgtccatctctgaaattaccaactcatatttcttgactggttgttaggttatttttagtattaattttagattaa

SEQ ID NO: 329455 - DNA, 396 bp, Cannabis indica
aaaaaaatacttcataaattttaaaaatacgaaaatttagaatcatatgtatcgatcagattgaaggtttttacgtataaattatattaaaaaatatttattatattatgtataaaaggacggcaaaaaaaaggatattttaatttaggggccttgtacaatgtcataagcttcctaatgcttgggtgagtagtttcattaatcttttgaggacaaaaattttttttaacccccaactattatatttgtagattcttgttctttgaattatttgcttggcaaaaaggatctccaaattatagcacttgcaacagtttgctaatgtgatggttaaacaagtactattatagttgaaataaaaaactcaaaaactcaaatcaatcttaacaagaaagt

SEQ ID NO: 329456 - DNA, 805 bp, Cannabis indica
agtggtgcttatgaaaatgtctttcatgctttatggggatgtagagtgaattgtgatgtgtggaaactgactgggttttatggtaagattaagagacaaggtaaggaggatgttcttgctttcttgatgagattgtcagggagtttgccgaaggaagattttgagttctttctagttctgtcctggaatatttggtatatccgaaactcggttaaccatgggggacacaaacccacggctgctgcaatgattgaatggtgcagcaaactccttgctgaatttcgaggggctacggtttcgcagcagaatggagcagcgagggcggctgcttgttgggttgcaccagttcggggatcatttaaaattaatgttgatgcgggcgtgaaagagaaggcaggattagtaagtgttagttcggttgtgcgtgatcacaatggttgtattagcagggcggctgtcaggattgtgggacaagcactatctccactgcatgctgagcttcttgcgattgcagatgggctcacggttgggttgcagcagaagctgtcttctttcatggtggaaactgattgtcttcaggctgtgaatctggtgctgaaggatgatgggggttgtcgagatgttgatggacttattgctcatattagagatttattgcaagatgtaagggtctatgggatatcttttgtgtatagggaagcaaatcaagttgctcatgtattagccaatgatgctttgattaacaaagctagtgccatgtgggttggggttgtccccccttgtgcgagacgagcagtccagctcg

SEQ ID NO: 329457 - DNA, 872 bp, Cannabis indica
gtccatcattaaaaatgctttaataatatgtcaatcatttgattttttattgttataacatttattttatttattaattgtgatcgtgtgacattttcctttttggggcagtctttattactgattctcgcttgaaattctccacccaccaaatctctcatcttaccggtaacactttttcattttttatttttgttaataatgtatatatataaatatattttattctatatatagaagacaataaatctatacatatataacttaatatagcttttaggtagcttggcacgtggcttcttaaggcatctttaaagtttgaggattttttttgagtgttcttttaaaacaatagatcgatgattatttatctcatcactatctttgttgcatacttgcatatgatgaaaatggcggctatatataatatatataaactattataactatatataggtaactgttagcaggaaaacatatatatatataatatttattttgattgacaagtaattatcaagaaattgtgagattactttttctaattcatgcgttatatgatataaaaattgtacggaaacgaataatagattgttaattaacattgcatgcatgcaatatgattaataaattatatatatatagagcgagagaggtgtaggacccgtacttttattttatgaatatcatgacactactatatatatactcctaatatataacacatatatatattcatattctccttctttcaatttgatgaacatggaatggaaccaacctttcgtatagccaacggtcactggcgatactatatagtatcagggtcggccctgaaaatttataggcctatgggatttgaacccatgacc

SEQ ID NO: 329458 - DNA, 566 bp, Cannabis indica
aatgcatctaatggttagaaccgatccaatccaatacatctattggattggatcggatgactcaattcaactggattggatcagatgaaaaaaaaattcaatatccaataaataattagattggattggtcgggtccaaattttttggatgtagtaattagtataattacctaattaataatgtggtaattaaattataaatatttattattcttgttataaagtattataaatttgatatattaaaatatatatagcaaagtaattatttataatatatagtggtatgtaaatttccctacattttatcaaggagaaagagagactaaatataacttatttaaaaaaatgactttttagtttgcaacttaaattttgattatcttttgttatcattatttaagttttagttttccataaatacagtatttttctttctttctcgaaagggaaattgggtttttgttgaaaaaaataaaaaagctaattagtaatttttctccctgaactttcacatttactaaatcgtgccccctgaactttttttgttcgttaaaattcccctg

SEQ ID NO: 329459 - DNA, 455 bp, Cannabis indica
aattataatcggcttgaattattttttgttatttatttttattcattatgttatagaaccggttctatttttatttatatctgagacatctacttctagtgacttttctaataactttttcggagacggtgacttttctaacgactgttttggcattggcgacttttttggtcttttccagcgctggtgacttttctggtgaaacttattattacaagttttaccaaatttatttattgttttttcccatattttaaactttaataattttttaatttcatatttttttgcattacttatttatgtcatataaaaagtaaattctattacattttcctatatttatgaaaaaatcccaaaaatatttgtgttagacttttctttagaaaaatattcgtgttagattttaaggaaaaaattacactgtaaacttactttttattttttattttaat

SEQ ID NO: 329460 - DNA, 2314 bp, Cannabis indica
tatatttaatttaaaatttcaattaatttaataattttaaaattctatcatagtatattaattttgattcaatccaatcaccataataattcaaatccaatcaatttcacaaatgtgcatattgaatcagttattttttattggttactttttaatattgaattacttaaattttttaaattttttccacataactaacaacgaaataaaataaattattgttgttttatgtctctgttatacccatatttcgagtaacaatatggtgttgacacgtgtaaaaaaactaactcgttataaagcaattaatgcattcaattaactcgcctagaaaaatacatgtggtagaaatattcaaactcacccttttaaagataaagacgagctatgaataataactacagattgagaagattagcgagatgaacgattaacttagaaggttcatctcgggaaatacagaatacacaccaacttgaaaagattagataatgaactatttacagagtttttagctcattgactcacatactcgcgagaatgctaagagactaaaggtcacattcccagcatgattcatctcaaaattatcatactgtgatggtgtcttgcacttgcttcgcccaacacttatgaaaggacgtaagaagtattacttagacatatccaatgagagatgcaaaagttgatctatatattttgtacaaataatggttttgtgatatttttgcatcaacttttactattatactccaatgtataaccgtaaattttaatgcaaaaatttaatatgtaatttaatgctcgtataataatttattaaaaatataaaataataataataatcatacaatagtaaatataaatgttgaccgaggttttcaacaaccaattaaataatgtataagaagagctgtaggaagtttaatgcatgagatttttacgtggttggggcattaatgagccttagtccacgagtcttttgtattaataagagtatttattacagagaatgttcttggtagaattctctcctattttctctcttcgattccttaaaacgaaatcattcgacccatttttaatctgtttgtgggggtatttatagtgtttttctgaggagatccctacgaatgaatcacttgtccttctatgttagcttcataggggcacatattctcggcaaatacgaaataggaaatacatgacctataccgtaggtatcttagaagttaggtggatataatcttttatcccctcttgactactgttattcctcataatgtacccgtgactagactcatcgattgtagtgtaatcgctgtaaaaggggggcttacgccatctgtcatgtcgtttatggaagtttcaatacgtcttcccccattcaacattaaatgagaagtgattgttcaagtaatctctataactcccggaactgccttagcatggctctagcctcccagagaggaaagatgtgccttatgctctcctccgggaggcaccttccttgaggtgttccttttttgtctaagacttagttgattttcatgagcgatggttcttccaggtccacgtgtcacctttatccgcgtccacgtattttgggaaaaatctagggcaacaataaaataataataattatgaaagttttttaatacaaatgagcatgctaactaaactttaataataaaataatggtaaatataaatcatagtatttattgtgatataaattttgcatttctatattgtgatttaaatttggatcactttttgttatgtgagatatttgcatcacaatttggtataccattggagtagacttttgacaaagtgagttgtaacaccctaatgctaaggtacgctacagtgcattttcaattacagtactgtctttgctaatcaaagaattttcttaaaaaaacgtgtcaaattaaaacttttgtattgattaataaactttataatttacaaaactatttacaagttctgggatcttgtatttaaacttttaacataatacttcaaaatacataatattcatgtcgcacagcgactacaaaatacaaccccagatgtcccgagaacgactccaggtcgtgctgcctcgacatgtacaacctcatctagctcagattcactcctgttcagctttcgccttttctttacctacacatggaagcagaactgtgagttgacatactcagtaagaaaagcatataatatatcatataatttccgacttgtatttaggcgctcatacacctatttacaaggctcaatagatgagtaagaacgttctactaaggata

SEQ ID NO: 329461 - DNA, 1339 bp, Cannabis indica
atgttttcaaaatgtgtatatgtaattaattgttttcaattatataattaaaagtaatgtgatattcacttgaaagtaatatatattaagtgaatgcattgcatatcagtatgtgtaaatattatacaggttaagtgtatctatctaatattactcatggcaagaccatgtgagaaaatatatcctaaaaataataattaattaatttttgataaaaccacaccaaaaataatatttatttaattactaaaattttataataaatttaatccataattaattacataaagattttaagttttttttcttttgttgagcaataattaaactttaataaatggtctgggccaatttatagaagatcacatgtgttgcttaactatataaagaagctgggtactgagtgactgaatataatgcatatagtgtggccataattgaaaaaaataataatgcatcttggtgaggtaatattattataatataacaaaagttgttctaacaatatatgcgactggagccttattacaatatatacttagcttaaaatatatttatgtaatatatatatatatacacattataaaagagtacttatatatcttcatcatatatagtgtagagtagtaaataaataattaataattaattattagcctttgtattttgtatttcatacaaaaataaataaattatggtgctaattaattaaaaatctatttactctgtgtcttgttaaccacctcctattggatgatgacatgtggaatacgtgggttaggagtcatatatagagccatgcaaagtttgtgtattaattaaaataaaatagtatatgaaattctcaatagcccgccctttgaattgaggtttcacaccttaaaagttttttaaggtaacctcatataatttgttagcattttcttaaattattattaaaaaatatatatgtggactaatagtaaattaaacacattaataatgatattatttttcctttcaaaaaaaataatgatattattttttgtaataaataattatataacacttcataataaaaattttagggcatacctatagcatttttcttattttatatatgataattatttatgttttaattatatataacaaaataaattttgaataatttggtaaacatatataattaaaacatattgtctatttttctttttcaataaaacgatttgaatattctttagagtaaattatcaagaattgtttggagaataagagcttgtttggttgtatttttaaaaatgagaataaaaaacagttttttagtcattttaaatatttaatggagtttggcacaaat

SEQ ID NO: 329462 - DNA, 822 bp, Cannabis indica
aagaaagagaatgggcaaaacaggtaatatggctctcaaattagatatgagtaaagcgtatgatagggtggaatgggcttttcttgagctaatgatgattaaaatgggattctctagctaaattgttgcattgattatgtattgtgtatcctcagttacttacaagattactcatggtggtaaagtttttggctctattgttcccagtagaggtattaggcagggagatccactatccccctacctatttttgatttgtgctgagggattctctgctctggttaacttgtttgtgcgtaaacattggttaacagggttttgtgttgctagaaacgctcctgttatttctcatatgttgtttgcagacgatagttatattttctgcaaagctagtgagacggaggttgctagtgtactttggcttcttgctatctatgaaagagcttcgggacaaaagatcaactttactaaatcattattctttttcagtaataatgtggcttatgaggatcggactcacctttgtcatcttctaggcatggctcctgcttctgacaatagcacttatttgggtttgccatgtactatgggaagaagtaaaaatgctatcttgggttttcttaagaaagatgatcaagaagattcagagttgggaagctaaatttcttctaaggctgggaagaggttttgttgaagtctgtggcccatcgctcccagtatgccatgagtgtattccttctcactaaagaaatatgctctgccttgaggggttaatggctaattttggtggaaatcacaggtaaggttgtctaagggagtcag

SEQ ID NO: 329463 - DNA, 637 bp, Cannabis indica
ttttttaatacacaataaataacataatatgaataaaatattacactattagaaaattagattttatttttagttattatgctggtttatttttggttaaaaaaatctcgctaccgaagactattaaggcgaaaacgtaggtccaaaaaatactaaagacatacaggtaggacctatatcttcagttagttaaaaataaccgaaaacataagtccacatttttttctttctttttctccttaatccttacttttgtctctaagttttattttttctcttataaaaaaccgcagttcaccatttttctaatagtgttatttgatgtactataggaatatattatatatgaaaaaccagcatcttgtttaaaacaaattcatctatgattttactataattagaatgagcatatccatgcattttgtgcatatgtacacataaattatagtagggtcactagggaaataaaataagtgaaactttaatattaaattgtattagtaacggtataacatctcataaggtattgataacatatcataaatgaaccatttgaggctagctcaagtggccataagtgggtgtgtgagtgttggaggtcctgggttcgagagtcccaggtaaaacatggttctaa

SEQ ID NO: 329464 - DNA, 763 bp, Cannabis indica
tgttttactagtgttctactgttgtttagagttgttctgttttgtgttttactggtgtttcataaaaacacagtatttttgaaaagatttccgtgtgacaatatttttgtaaaaattaactcaaattctaatatttttataagtttcccaatataattgacacaaacgtattaagtcgacacacgaatgcaacacgtcgggtaataaaggttcagatttataaacacaaaatatatagaagttgctgggttgggagtgaccagttaaaagtaagataattacatttattttatttaaaaaaaatgttttatgccttattattttaaaattaagaaaaaatataataactatattattttcaatgattttgtagtggccagctgataatatattgtattataatgaataacttttactcaaagtcttgaatcttgatccacatggagatggaagtctactttttctcaatccttcttatcatatattttatttttctaagatatcacaaaatcattttccaatgtgggtgagtgacacttttgctcttgctctgttaaataatataggtacgtgtccattttcttctttaatatagttccttcatcatctatgataagtgtgcctacatatctattctatataaagtgtgcctatataactgaattcttacgtttatgagaaattcatggataacttttttttaaaaataattttctattcaaaaataatatatttttttattaagatatattttaatattaat

SEQ ID NO: 329465 - DNA, 406 bp, Cannabis indica
tgtgaagagaaagaagagaaaatagtaactagttaaatggaagggcctcgccgatgacgagatcagctgggagaaggcacatgacttgcagcagttttgtagaagactgaagaccatgcagcagattcgtcgaggatgccaaataattaagtggtggagaatatggagttctgccccatagcacacccacaaggggccattttgtaagatgagcatgccttggtgcttgatcattagttaagtcctggaccaagtacctcattgggatggagagacttttgtgattagcctttcttttgtaattccattcacatatgtatgaagagctaaaatcatatatgttcttcgaaatcccttgaaatctcattatgctctttagggggggttgttggaaataattttacca

SEQ ID NO: 329466 - DNA, 2405 bp, Cannabis indica
aattaaaatttctttatataaaaaaaagatttttttgaaatatatgtaaaatgtaaaataattacaaaaataacttcataaatcttaattataatagtgtcttgccacgccaaaaaaaaaatacctcaatttcaaaataatatacttgaataactaatcccgaaattcaataattttttttttattattattttgcgttataaaagtaactttttggttacttatgatgttgataataaatcaataagtaacttttttataaatatatatatatatatatattacttttacattatataatttgaattttgagatacattttggttacctctaaaacttacatgtatgcacaattatttaggttatattaatatatttgagtaactttcaagtttatttttgaaaataataaattgtcatctagtaagttactattttagtaatttgtattttaaaaaatatatatcataaatatttaagtcactcatattttttaaatgtaaattaatatatacatttttattagttaaataaagaataaagttacaaataacttttaaatcattacaaatacgatatttttttgggactaattagttatacttgcgataagataccaattgattacttttgataaaatcatcaattttaaataaaaaaaatagatgatcagacaaaaaatcctacaatgtctatactcatatatgtcaaataaacttattagtttattttggcatgttgtttactttggcatattctgtttacatttttcttatagcctaccattgtatatgctaacaaatctattagtttattttggtatattgaaacaaattttcattcttcttttcgtattttagaacaataatttattttattttatatagtctaccattatatacgtcaataaatctactaatttctatttattggaacaacattttattttttttttcaatacagagtaaaagcataaacataaaataattttatttagtatagttcataatttgaatattgtttacttgttggtaaactaaatataaaaaaacttttgaaaaaaaaaatctgaaagaaattaaaatttacctttgatttcggctagcgaaaaaacatatgcttttctgtatcgaaataatcattttaaagagtagatcataatcaggggcggagccagaacttaattactaaggggccaactattaattattttttcatcccttcactaaaaatcttttcaatatatttcctatcaattttggcaactaggaaagcttttcaatctaatatttttttttttattatcgcgtacatgacaattttcacagaccacttgaaacttttttaaaaaattctaaataatttataatgctaaaaataaagttcacaaaattacttatcacgcgtataaaaaaaaaatcacgcatacaattaaattttttaaccttatttttagcattataaacaaattagatttttctaaaattttacaaatcattccgaataactagaatgtgcataataatgaaaataatttggtgtaaaaaatctatcctagatggaagaaaaagttatagggtgtaccgaaacgaccctttaatagaatgtactatagaattacctaataattaatttgcgaaacatgtaatatacataaaaatatcttgtttaatatatagtacactccttaaaaaatagttattatggcacacctctatctgtttcagtatccaaaaaaatttgttgttctattttgtttttatgttcgtgtacgtttgtaattatttcgtatcacttgtaagttttttaaaaattccaaattatagtgtcaaaataagatttaaattttttattgcactcataattatttttttaatatgcgtgataaataattgtgtgaactttattttcagtactgtaaattattcaaaaaatttaaaatcgatggttaaaaaaataaaaaagatattttgtagttatagtagaaattacaaaagaaaaattataatattgtgatctaattttagtaaaattaaatatttaattgtatattttaattgagaaagataataataagtggctaaagataataataaattgctaaatatatatatatatatatgaccgtacattatattgatttgttatatctaaattaatatttatttataacagtagttaattgaatttagctatacatatatattattgattgatttttttgaaaatttcagggggcccagggccaccctatctggtaaagtacgtccgcccttgatcataatggtgtaatttttgcgaccaaataattattagtgtagctaaaaaaaatctttttatatataaaaaaaaaaagtgaggaaatagaaaatattttgaatctaaatatttatcacatatatgta

SEQ ID NO: 329467 - DNA, 892 bp, Cannabis indica
tcttattttacgtaagtaagggcgttacatatcatcacgcccttaggagaccctcaacgtcagtgactatttcaaatattcaaatcccattaaagactcaaagacagttatcaacccacgaaaatagcgagatattatcataaaagctagacttcaactacctccaaaaattaaggagaacggttgagatagctctgcgttcgtctcaagagagaagcaccgacccttttccttatataaagggtcttccatgacctgggaaggggatccacaattttgagcacttagaaaaaaaaaaacattttctattctttacaatcaagagtctgctcttgacttttgcaaccttgatcaataaaatacaaggggagtagggcgaacctctttaaattttggtgtcttcctttacaattgttgtaatttccggtgtcattaattatacatttattgtaacgattttggtctaaatctcatttattacgactctggtcggttagctaaaaatttagtcaatatctttacaatagtttgttattagactgttagtaagtttttaaagtttttataattactaaattttaattttgaaattgtttgaaaaatctaacattcaaattattttcactactacaaaagttagaattcgcgaggggaccgtcgctaaaaaattaagtaactgtttaaaactttcaggaaaaattagtattcccggtagtttataacagtaattacaggaatagacgatgattttaattagaattcataaaatttattgggcacttataggcgacggtttaaaaccatcacctatagtataggcgatggttttaaaccgtcgggtataagagcctaataaaaaatcgttacctacttctcgccacattttccacgt

SEQ ID NO: 329468 - DNA, 576 bp, Cannabis indica
ggggtatgatttaatacatataaaagtttgatgggcatgatttggtatatatcaaagtctggggagcatgatttagtacttgaaacagtaaaattgaatgaaattagacaaaagtccttaaatttaaccatctcaatagttcaggggaatttttaacgaccaaaaaaatttaggaggcataatttggtatatatcaagcgggaaaaattactaattaggttaaaatgtaactagagaaaatatttgcaaccatttgtataatttggaaaaaaaaaaattagtggcaaaacccaacaaaaatcaagcaaaaatcctttttattattcgaaacagaccgaaggttgttgtgatagataatatgcatgacaatggcgtcaccaaacaaaaccagaatcattacaaaagggaaatttgagtttctatgcattttttatacctaaattaattatctaaactaatacttataactctttaaaaaataggactacttttacctaaaccccaaaatacccccctcattattctcaaccattctctctcttcctcctttctctctcaaatcaaacccaccaaaac

SEQ ID NO: 329469 - DNA, 690 bp, Cannabis indica
cggtggtgagtggaactttggacgcttgtgtgtgtgaactcgatgagggccatataactgcggacggtctagcacactctgttttatttatttatcatgataaattaatgttgcaattattttcatttattattattattatgtctttgtctgaaaactggccagttgtgaatattttaaagtattaaataaaaatgcgacattatgatttttcgcgattaatgcttgtaaataaaactagtatttttataaaagtacgtgcgttacactctattcctaagaatttaggagaacaaatttcagaatcaaattgggacatttctatagaaagagcaatcccaattcttggaggaaattttttaaaaccgaaaacttataaatatggtaaacctaagttttaactccatccaaatccaaaaagttaattagaaaataaaaaaaaaattatttttgccaaaaccaaacaaagcaaaacgatgattcaattggttatgactaataatatgacaaggaggaagagaataaatacttactggttaaagaaatacgcctgtgcaagggacaacattgtatcttggtttgagacgagcgacacgatgaaatctggggacgcccgagattggagaacggatttgaggaaatttgtagaaaatatgtcaacgacaatgagggcatgcaaagcttcagaaa

SEQ ID NO: 329470 - DNA, 1017 bp, Cannabis indica
tctcacctaataactaataatatatatttttttaatttttgattgtatcactttcaaataacatagaaaaaaattagcataaaatttagtatacgtgcctcacacgtcgttttttactagtatataaataaatatatatagtagaaataattaagatatcaaattaaaagaataattgagataacaactaataaaaatgtatagtaattctttaaaatagttaagtctcaaaataatagctaaaggagtgcactcccatcaccttttttactttattcttcaaaatgcttcactaaaattccatttttttttttaaatttatctcacactatacataacttctctatattttttttttataatatatttcatttatataaacaaaaggttaaaaatattaaataaaaaagaaatagaatgatgagagaaaaaaatattaaaatattattatttattaaaataacatggagaagtaatattcataatgtaaaattttaagctcatttaatgaaattcttttttaacaacatttcttcatattttaccttttgagttatagttggtttgtgtgctctatctgcagctccacaaatactttatatagagcatattcacattaaatctccacatcatatagaagactagcctttttaaatatttttaactgatattttattgttttgacttttttttttaaagactatttaaataatatattaatatttagatgaataaataatattaaaatgaattaacaaaagatataaataaatcgatataaaaaaggtgtggtaaaataaataaattgagattagtattgatttttgtaggtgaaaattgttagacttttatatgtataaactgaaacatacatgattaagtataaagtgcggaattaataaatcatatatgcactacaatttaaggattgaaatacctctagccattgattcttgagcttcaaacccatataagctttgatctgcaaaggaaactggttgatgtgggtaatcgggc

SEQ ID NO: 329471 - DNA, 1258 bp, Cannabis indica
ctttctattcttcctcccttttcttccctctacttcatctacgaacggcacaactccttcgacgtagatcgagattgagagagagttgggcagatcaggaagagagagagcaggtcaaatatgaagagagagagagggagagggagagggagagttggatagatcaagataaggagcttgagagagaagaagaagaaaagaaaaagttgatgtgttagcaatcgtcgttaatggtggcgaggataagggagaagatgggagagatagaaagggaaattgtgagcaaggaggagataaaatgagaaaggggatcgggattttgggcacgtggtcgttgatttgtgcgtttgttaagctcgtcatgacgcgatgcagctccactggagctattaaggatgtcacaccaggaactgagagatggtgttgagagagtttatgaagaagcttttttcatttgggttatgatttttaataattttgaatagaaaaaaatatttttcacctatgaaatgaagaagacaataatgttttttgattttttattattaattataaaatgattaataattttaaaatgattgtttcattatttttaaataataatattttatgatataaatgtaccacgtgtataatagtatataaataagttgtccatgttggcaataaattattgtaaatggatgacatcttaaagtttgctaatgcttcagcaaaaaagtttttctaccataatttaaatttaaaagattaaacactgcaagtaaaataataattgggagaatttaaccgtcataagtactttatatattacactcataactatgctatctcttgcttagctagtaccttaaggtgttcttaaacatttctctacttaccgtgtgttcaaacttcaaatttcaaattagttgaaggcatgataatgaattgatgattcatgatcgtcttcaaaagcatatttggttgtatatttttagttggtaaggaaaaggaccctataatatatattacattgtgctatatgtgtaaatggtccacgtatcagttcaaatttcaaactcttttggtggtgtttggttaggggaataaaaatataggaataggaatagaaatgagaataagaatagaatggaataaaatttaaaatgtataaaaaaaaggataaattgcggcataaatgcctaatgtttctgattttatacacttaaatacctaatgtttattttttgtggcaaaaatacccaatgttacaatt

SEQ ID NO: 329472 - DNA, 596 bp, Cannabis indica
ttgggtctgtaagggatggcaatttcagtaggatactcaatttctaaatcttctggatgataaacttttgagccagattgggaccttgctgcaaggaggaagcaatcccaattcctggaagaaatttatcaaacaagaagttagtgaattggagattctagaaaacctacatactgtctaaaccctaacatttacccgaacacaattcagccctaaaaatagctaaaaccaaatgagatgataacgatgcggaccagtaaggcaacaattaaacccagaaatacaacataacaaacttgtaagaaaataagaaggaaggtcacttactatttaaagttgggtttcgagacgatgagaggctctacaatttgcgaatcctcagacgccttgaagatccctccgaatgcttgaagttaaaaatgccaatgacgatgatggcatgcaaggtttcgaagtaatctaggtgtgattctttgtagaaaaactctaaaaatttccataggtttttaaaaatggcgaaagtaattcaaaggtgtttcctttttcctttatatactcttgggttaatctccattagatcaaaaagatgattaatc

SEQ ID NO: 329473 - DNA, 862 bp, Cannabis indica
cactacgtggcttggcacgtaacaatcacctaatatatatatatataccattattactttcaattatcatgaaaacatcttagaaaaagtgaaacaaagtcaaagagatcgaatgagatccgaaattcgtatatggagtattaattttttttttttaaaaaaaatagtagtatttgttataattttaaaattataacttaatttaaataatttatcatgttaaaaataaattttttcatattttaatttaatatgtatgtttaaaatactttaaaatatttttaacacggtaaattatacaaaaatttcatcaatttataaaaataatattgtaattataaccatagctaaaaataataataaaataaaataccttgagaaatattttcagatataaaaattaaaaaaaaaaatataattaacatccttctaattttgtggtatgcataatttaatagtttcatacttattttcacaaattttagattcaaatctcctttcctaaaaaaaaaaaaaaaaataaaaacctaaaacattcttctaactctacaagttaaattaactcatatgaattactacttggctcagtcagaacatcttcttcgccaccaacgattaaatatgatatattcatttactaaagtcttctagaagaaggatttcaaacaaataaaaatatatattcttcttgaagaatatcctaaaaaaaaaaaaaaaatctccagtcgttggagttagtaaagatgattcattttttagcaaaaaaaagtaaaaatcattcatcatccgaataacgttcactttgacttaaactacatactataaatttgtgtgttgtgctactccctgccacccatattac

SEQ ID NO: 329474 - DNA, 1496 bp, Cannabis indica
tcatgaaataaaatccttaactttgtaactcaaaaatgtaatttaaaaacgcttctctaataaaaaaaattgttcttcattataaccacaatgctcctaggatcctataccaatggcaaaagacattagtggtatatagtcaactgcgtgaccaaaatgtacacacgctttctgtatagaaaggctttaaaaaataaataaagtatagttacattataacataaaaaaaaaaatagttggatacaaaggtgggaccaatatataattgttttttctatatgaaatggataatggatatgccttgctagttagaagccaaacaaaattataaaagtaaagtaggcatcttctcttaacattcttgttatcctccctttattcccattggttaatatcattatctctccttaaaaaaaacacgtgttttcagttttcattcttttggttccatatttttgctcttgtaaataaataaataaataattgtagcattaacattaacgtataccttgaattattcaaaaacacatattccttctattttctttttttttggggaagaacttctatttttctttattaccttcaattattctaacaatgcagtttggattggatatgcctaattagaaactaaatactttctataaaatgtatgattatacattttttagttctcgtaaaaatgtgttaataacaaatgtataattagtaaaaatataaaatatataattatattgctactaatcatagaatcacacctactccttttaacttaaattgaagatgtataatccaatttaaaatcataatacattgccaatttaagttaaaaagaataagtatgatttctacacatatatttaagtagtattcggtaacaattaaaaatttaattcctgattaattaatcaaatcaatgaacaaatacaaattttgttaagagaaattgaaaaaaaaaacaaaaattagaaatcaatcacattattcaataacaaaacgtgatcatagtatcatttttaaagaatatatttaatatataatctaaaaaaaaaaagcaaatatcatttaatcttaattctaagaaaaaaaaacaaaagcaaaaaacgtaactttaaataatactaataaaaattaaaataaaaaaataaatactcaataatacgaatcaaatactcatttttaaatataaattttggagttacaaaactaataaaaatttaaaaactaaaaattaaagagagaacaaataatgctaattgaagagatcttagagtgacatgtcactacctcatatctctcctttatatatatatatagataggatatgagtgttcataaaatcaagacaaggtagtggtcctgttggtgtgttgacaacaatattaattttcagcggcagcaacgttgttggaagtaggcatcgagtagcgacataaagggcacagatgattaatttttagccaagaaacaatacaattcttgtgaaaaagatg

SEQ ID NO: 329475 - DNA, 631 bp, Cannabis indica
agtttctttagtgcttagagatatgagaaataaacttttggacaaaaatgtaagtcaaagtcatgttgatccctactaatctacactcaaggttggttgtgagtaagtgtatatatatcttctttttcttgatattatattatatattgtatattacatgtgttgtaatttatctcttctatcttttttatatttataatatagtgtatatgttgtatatgtgagtgtaatgaattttttattttaattcttatattatttttataattgagttgtaatttaatttatcttttattgatatatgaaatttttaagggagttagtatttttgtaaaaatatatatatagtaaaaatatttatattaccgtgttgtattatcaatattaattttaagtagttttaggctaaaattaaaaaaaaaaatctcataaaaatcatttgaggttaatttaagtagctatagtggagatgcgtgtgtaggggtttattgaatcgaatctaaacttgtgtaattcaaaaaatatttttataagaataagacgcttcgataaaaagaaaaaagaaatttgcggtaaaaccccctaactatcaatttacttgcaaaaaatcatccaacttcatattttggtg

SEQ ID NO: 329476 - DNA, 1363 bp, Cannabis indica
attaattatttcttaaaataattgtgcttcaatatttttattagaagccaatccacgcgcatgcagcaatcccagcaatcccactattgtgtgtatatacatttatatatataaaaataatacggtgtgccggactagctaaatagtaagtacatccatatttatatatagagtagtaaaaaaaagacaaactgaatatttatagataaatataaaaaaaataaggacatgtatgaaagattaaaaaaaaggagattgatgacaatgacaaaaataaataattgtctcactgtttatgatgataacgatgaccgtcatacgatcgatctgtctgtagacaattatagaaaatgatgatatataaatatattgacaatgaagatgatggtgaacttgacaatgaagttttcgtacttaaacacttatgtgtgtcatccaatggtgacttaaggaataatagtagctaatttgaccacgataagtgcgttttgcaactagttgatatatagtattatatatacatatgtattaaaaaaaaaaagaatttatttgcatttatatatatagcttctcataaaagcctattgttttcaaatgattgaatatatatagtcaaagtaatatagaagcatatattacatgtaaaaaatgagattagaataaaacaattaataataatcatggcataaaataattaagctacgcattatgagattctctcattatatatattatgaataaggagatcctaagaatccatcttcccttttccacaaaattttattcggtctagctagttgattgttaaactttctattggatttagaatcaagatatatatggagattatcattttattaattatgttctataggttattaaacaatgaataagaagctttaggccgtagttaaacaagtaattaattaagaataattctactagagggaatggtgctttctatccaagatattattctgaatctcaaacgttattactcaacaatcacgaattaaaatttgatccgatctagaaagttgttatgtgctgacgaaagtgatgatcaacatttcatatatatattatatatattatactaattaatataactaatcttatatatatttcaaacacatgattctcgcgaagtttttggcttttgtttccaatcttatgcttatttggttgatttattagaatttaaaaatgttgattaggtcgatgacggatcaaaatatcaaagtttattcaatacgagttggtctaaattagccaatcaatcactaaagtaagacttagtttagggaagaaaaataataataataataataactagggtttataattatattatatatatata

SEQ ID NO: 329477 - DNA, 1080 bp, Cannabis indica
ctttgcaccactttttataaagttatttcaaaagttctggctaatcgtcttaaaaaagttttggataaaatcatttctccctgtcaaagtgcttttgtgtcgggtcgtgttatccaagataacattctcattgccaatgagctagtgcatgcggttactaatcggactgtgggtaagcggggatgggctgctttaaagttagatatggccaaagcttttgaccgggttgaatgggacttcttgagacatcttatgtttcattttaattttcctgtccacttttgtctcgctcatctttcggtgtttgaccactgcttcaatttcgttttccataaatggtcaagttcatcggtcttttaagccctctcgtggtttgaggcagggtgatcctctttcaccttatctctttatcctttgttctgaaggtctttcgactgtacttcaagattttcaaaataaggaacttttgaagggtattgctatttctcggcatgcaccatctattactcacttgttgtttgctgatgattatttttctgttttgcactggtgatcagcaatcttgtgagactttgcgtcatgttctatctatttattctaaagcctctggtcagatggtgaactttgtcaaatcttctatactattctcccctaatctagtcatgagattcgaagtctctttttccaaacttttcaactggaggaatagggaagtttaattaccaaaaacttaggccttcctcaatgtctatctcgtcgttaaataccatgctttcactttccttaaggataaggttgccaatattatcccttcctggaatcataaatggttctctacgggcaggaaaagaaactctgatcaaggctgtccttcaagctattccgtcttatgccatggcttgttatcgcattcctacaaaaatttgtaaagaaattgaatctctgatttctaaattttagtggggttcttctacagaatcacctaaagttcattggaagaattggtcaagtgtttgccagtctaaggataaggccatgcttgcttaaacaagcatggagaattggtcaagtgtttgccag

SEQ ID NO: 329478 - DNA, 497 bp, Cannabis indica
aaaataaatttccaacacttattagtgactaaaaatgaaaatttcgatgatatttggatgttaaagtcagaaaatgaggttcaagaattggagtgatcattagggtagccaagaataccaatacacctatttagaatgttaatcgtagaaaacatcaactgggtaagtcttaaggcatagttccctttggggtcagttgatggagtattataataagaattatcctcacttgaagaatgaaggcagtaatactcatttcagtttggaatgtttatcatcaatgaggtcgacgcagtggatccatcgattataacatattagcttttggtaataactctcatcattacgtgtttatgaactctggagctacacacttatatgtggcatcaaagatgacaaatcaactgggcaggccttgtgttagacacaaattaaggcttgaaacctaattacccgtggggaagttaaatatctccaagaggtaaattagagataca

SEQ ID NO: 329479 - DNA, 499 bp, Cannabis indica
gagactgccatgacagtctcttggttacatttggaattacaaaaagaaatgcaattatctaaaggctgaggttcttttgtagctagatgacactgaagttgcaaggaatgtttggaggcagatggttgagtcaacatgtataatccattcttaactctccctttgagcaacaccttccctgtgctcttgtccttaacaaagcaacaagtagtgtgaaattcaagaaagatattgttatctttagtcaattttgacacactcactagcttttggtaatattgggcacttttcagatagaattgagttttaaagggtaagaattagaggataaggaggaattaccaatatgggagatggggagttgctttccattgcaaacagcaacagattcatgtccctgataaggagcttcatagtcaaggtgttccatgcctttagccacatgaatgttagtgttgggttttatgccctaaataaactcattcaatataatcagatt

SEQ ID NO: 329480 - DNA, 1001 bp, Cannabis indica
gcggttatcaaatttgctccactttgcttcatcagtcaacaatgatgggctgatagatcaaatctacggttggtccacctcacttatttgtcataattttatatatgttacaccctttactttttttttttttttttttccctttcacaagtgcatacttcatcattcttttgctaatttcaagttcaactagttagtatatgacataagaatgattgatgactagtcttcaaaatgactttgttttctccaattttttagcggaattgttttttcaaatgtagatcgagacatatttcattatctacaatgatcattcaagatggttcactttttgtgcacagagattatataaatatatatatccacctaaatttgatagattcttatacttcaatattcaaatttttttttagtattaaataatcaaacttgattttttttttcacgcctaaactaaccaagttgctcctaaacaaaaagaaaaaaaaaaaaaagaaaagaaaaaaaattaacctatacagttagaaatttgaaacaaaattgattttaaatgatgaaaaataactaaaattacataatatatgagtatatataaatatataatgaaccttaattagtgatttcaaaaccattgtgagaaatgctaaatggcatttttagtgtctaacacttattgatgcaactcaatatcgagtcctacttgttttactttaataaacattatagaaaataattatgcaattataggaccacacttcatcgtggtgctacgcaccatgattcctcgtaacaatgttccttaactgttaataaatttaaagtatcatcaatttacctccattaaatgttaacatgaactttttatgtgtacataagtatacacatgacatgtttctattggttaaaacaacatatttgtttaaaatagtagaaaattattataaacttcaatttttttttttctatttctttttttttttttggtttttttttctttt

SEQ ID NO: 329481 - DNA, 954 bp, Cannabis indica
atacataattatataaaaaaaaatatactaaaaagctttcttgaaaaatatcgaaacaaatatagaatgtatcaaaaacaattcttttagagatacatgaaaggcttaaccatttatgacttcctataccgcctctagcggtaagaaattattttaggactcgtttgataggttttataaaagtcgtattagattaattattacaatcataaattttaattcaataaaaatcgtattatttgataaataagaaacaatatgcattaattgtattataatctttagaaattgtctaagaccaaggttagggagcccgtgaccaaggtcacgggtcgaggtctgggactagagtccggtgctagggtccaaggttgggtttggagtctgagtccaggaccgaagttggagtcatgatcaagtttatggtaaatatatcataattttatacaacctattaatataaatcaatatcaaatcataatattgtatatattgaataatactaatacaacccaacacaatactatataatataatatattaaagtaatgtttgtgaacatacactacataccaaccaaatattttagcttttttactattaaaattggcaaatttacataacatcatctcaaatggaatgttataaatgtgatgcatattttttagccatattcataaaattgagttaatttatatgtataaactgaaacatatatgattaagtataaagtgcggaattaatataacatatatgtactataactaaggatcgaaatacctccagccattgattcttgagcttcaaacccacataagctttgatctgcaagggaaattggttgatgtgggtaatcgggcttcctcgctctctcaactctctttagatggattttgctgttatgaacagaatgagtgaggagctcggggaccgagaccctatatttataggtga

SEQ ID NO: 329482 - DNA, 674 bp, Cannabis indica
ggacaaaaatcctaattaggctaataatagtaatattatatgacatttgttttcatattaaacaaatttactaccatatttggttttaaagaaaatacacaatacacctaaaattggttttttttttacaatttttacgaaccttttgatttagtctacagattctttttacaggttttcacttgtttttttcaatgaaaaaataaacgtcaaaataacattgttttgaaacaacagaaaaatatcatttcgtatttttttatttttacttcttcaaaacatttttttttggtatttttacgaaatttcacatagtatctcctataactaacaaaacaacctaaattgtaatcaaaatctacatatagcaactcacatagaaaatatcggagcaactcaaactataaatttttttaaaaaaagttaaaaaatagtatatgagataatttcttaaaataaattaagtattttttttttaaataataattatattttttaataaataatagtaaaaatatataaaaaaaaataatattttcaaaaaataaatttaaaacatttttattaaaaaaaaattaagtctagctgcttcaccttgagcaaaaaccattgagatatgggtctcataaatgtataaaattaaaagggatcatttcataaatacacaaaaacaa

SEQ ID NO: 329483 - DNA, 1097 bp, Cannabis indica
atatttttgtcaattaaatatgccaaaaatggaattaacattgttaaatgtggtgtttccttattataatttcttttatgtctttagagtcaacaatgaagaactacaataaatgaggagcttcttaaacttctatctcttcatgctgccagtgttgtcttcatgcaatacacttatggaaaatcgtatgcaatggaatttacagaggagtggtagattcatttccagaggaagggctgctcccacctagtttaacacatcttatcatcgataactttgataagcttacagctctaaacgccaatggttttcaccacctcacctcacttcaacagttggaattttgtaagttggaaaagttaaagtgcttgccagtaggacttccccagattcttactgctttggggatagtagagagaaataggagaagattggcccaacattcaacacatatcgaacatacaaatataatttcattgaaaagatactctgcaatgaaactatagaattggtataatgtgagacaatatttcttttaattttcctttctctcttgtctttggagagttcgttgaatgaggtgaggactgaggaaccattggtgtcattttcgacttgtgtggcttttgatgctgctggtgttgatgagtaatctgttttgtatttcaagtgtaaaagttgtgtgtggattttgtttgtttttgttgtgtgggatttgttaccatggtatttttctgtttaataagattggaaaacattaaatgtgtactgaatttgagtgtgtctctatactttagtagttggtttcattatgtatagcaatatagtatagtatttgagattttatactatgatgatctttttctaacaaattactctgctgacttacaacttttaatgagcaaaaataatagagtgagtaatttgttatgtacatcagttttgaataacttttaaattattagaacctgtgtttgtttgctagaaagtaggtaattaatctacttaatttcttagaaattaagtgatatgatatccttatgaaagaattttaagttgatataaatttgattggttccaaactatttataatctct

SEQ ID NO: 329484 - DNA, 1445 bp, Cannabis indica
aaataccctgacataagagagtcacatggagagtatcttgaaatgacaggggcaaaattggtacaatgtttaaaaaagaggtaaaaatgatagactttaaaaatgagggtaaaaataaaagaggacaatataaaaagggtatagagtataatttcctctaattttttttcctatgacccactcggtcctgtttacaggttaatatacccgtcaccattacctatggtcattggggcgggtatgattatataattaatctacggggatggggatggtaatttagaaactgccctagattttaaccattgtcattcctaagctaaaatgataatatcacatacatagtttttgggataattgcggcaaaagttctcaaaaaacttaaggttgatgcagattagtctccaaccgaaaaaattggtggtaataatccccaaggtgacatttttgttaagcctccactttctaacaaatccattaagctcaaataaaagtgtcacgtgtcaattttttattagtccaaaaaataatttaaattaaaaaatttaaaataaaataaataaatatattttaaaatcaaaaattaattttattttattttatttttattatatattttcttttctttgttttttttttattattttttcttgttcatcattttcatcaaccctagtcaaccacgagagatcaatcaaagcaccaccacgattcgtggcctaaaaggagaaagacagacaggcaaggagctcaagggtgtgtcggggtttgggtttcgatttttctgggttcattttgagcttaaaggatcgagaatggccggtgtcaggcttccactctctcagtctaggcgaacgaccaggcagacgggcgagatttttagatgcccaaacaaattggtagacctcatcttcttagcattctcttcttctttttctttgatctcataacctttatttagttttttttttttttttgttgcttttcactgttaatggcaaatttggttgttcgagtaacgttgtcgaggtatgatgttcgcttttggatgatgcaacattcgacggggatggggtgaggttcgacggtgttttctctctccctgcaccaagtcctcaccatggagcttcagctccagtgacatttctccaataaagatctctctctctctctctctctctctctctcacactctattttgtttcattttttgttatgccttgaaatttcacacttgttcatcttcggcattagtcgtccacgaccgcacaaccacctcattggtggtcctcgtcagtggtccttgacaacattgggctaagtgggggtggctagggctggctggggtcgactgggaatgctggcagtcaggatgtgattggggtcgtggtagtggtgctccagtttgaacttcgtggctggttgaagaagatgaacaagaaaaa

SEQ ID NO: 329485 - DNA, 864 bp, Cannabis indica
agtttttatattgtaattttgtaatatatattagaaaaatagcttattgtagctagtgcaatttagtgattcgtttagtagaagtggtattttttaaattatttaagattaatctcttttgatttacaaaaagaatagttgtgcgacttgatattagaatttcatacacacctaattttttaatttactcttttatattaataattattttaatggttatttttattttcttttaataaattaaggtttaattttttttaataatacatatctttttaattttagaggttgattggtttgtgcttataaaattgtattttgtaaaagagtgaatgtgaaataaaaatttaaatataatttgtgaaaattaatttttcaaaaggtgattaattataatgtcatttattcttattagttccaaaataattgaatttgtaattagttggtaattataaatgaaaaagtatgcaaatatttagggaacttttagaaataaagatttgaaaattgtgatgatataatatatatatatatatatatatatattttcattttagcttaaaacttaaaagtctatttggagtttttttttttttaagaagagtcaactaatcaaatattttaccaaaaaatattatcaaataagtttgttaacgattaactttacataaaaaaaaaaattagggttttttgttactaaatttaaagctatagaagattctcttctttctttggtcaggcctgccaactttccttaggtatgtgaaatttggtcgggattgtgttttgctattgcgtttcgatatttgctactgtgtattagttttatctctatgacatgcttttgagtgttttagtcttgtc

SEQ ID NO: 329486 - DNA, 1012 bp, Cannabis indica
tttctctccaacttccctctctctcccacatttctcattcacttttctctattttctctcacaacaacgagagaaatcttatatcgacaatcaaacagacctcacactttcgatcattagcatcaccatcagaggatattcttcttcttggttcttttagatctatccacttcattcttcagatctaatttttttttgtgatccgcctaagcaattaattactacccacttaatttgtttgccctctttgtgaatgttggaccctggcctcttcctattgaagacgtgtccatcatcatcactatcctcctcaacaaaaatgacatgttgagtggcaagtgaagcctgctgcaaatgctccacttgaagagccaaatcccctgtagcttcctgaacatgggtctctgccacaatttcttgagcttgggatctagagtattagcttcttgtatgggtgcctctgccacaactgttggggtacgagatcttggatcaacttctaacaggaacttgaggatcaacagttgggattttataccctaaataaaattcatttcaatataattagatttactaattaataaaagattaaaaatcattttatattgcatagttcacatgatttttttcatgattatatatttaatgtataaattctattaaatctaaaacatatagttattcatgattatagtgttgtcaacacagtagagtataatcatgattacatgtttcaaagtttaagtcccatgatttgtcaatacactggatttagactgacatgataatcggcgataaaatttacttacaccttggataagtgttatgtcctttttagggcatttacaaaatatgctagtatcggatgtatgaagtatacatcgaactggaccgatattgatattagataagatatcataaactcactgttatatccatctaatcaatataacttagttgatcttaggtcaatagatcttaattctgaaattgttaggttctggcttaaatg

SEQ ID NO: 329487 - DNA, 457 bp, Cannabis indica
aatacgaaaaaaacccaaaaattacaaaacttgctcaattcgtacccaaacttcatgaaaccttccaaatcacctatatccaacaacaaaattcaagtactaacagcaactaacaaacacagaatccaaatccaccattaatgagacaagtttgagttcttataactcaaacttgctcaacacaagaattaagcatcagaaccataagattcacacctaaaacaaccttaataaccagcaggaaactaacaaatactaacgctaatttgagcaacaccaaattccacaatttacatattaaaactcaaccaacaagcttgaaaactcaagggtaaaggttcctaggatttacctccacttgatacatgttaaaaccttgctgaaattccaaaaaaaattaaagcttggggctagattcttctgttttgtgggagcaaaacaaagagagagagagaga

SEQ ID NO: 329488 - DNA, 964 bp, Cannabis indica
aactttatatgtgtttaaattgtttttaaaaattcatatttaggatgctaaacaatgtacatggtagtaaatctagatcctggtaaaataatccccaacactaccttatcaggttactagcttccctgttacggcactccagctctgcctgatgagcctggaggataacctcctggtcatccattaacctcaagaatatgcgtctctattaggcaaaagcatcagaaccaacaacgggtggctcttcagtttggtcaacttggcctacagcctctctaagtctggcaaattcaaagtcttctcctaggtctacatgaggctcaccaattcctagtcctattttccctgcatagtaccggggaatagagtcacttgtggtgcatgggggctgttccacattggcaaaaccttctggaggtgccaatggtggatctaccctcggcagcagaggctgttcattgggatcaaccagattagcagggtcaactggactagttatgatggtcgattttgttaggcctgtcgggttggcagggttggcaggattggctacatccgtcgggttcgtggaaactctagtggtggctggaacatgaacattaggatcagcagtcatggggtctcgaggaagacccaatgaagtagaaattgtaactggagttctcctttttacagccatggtgattgattagatttgattaataacattctcaatgaaagcacccaaatgttgacctcatatttggtcaactaacagcagagccttatttatgatcgacccaccagagaaatatagtctcccacttgaaattcaatatccatatgcttccgatcgacgtagcttttctgtctacatttgtgaagcgagcgtacgagatcgaatcttttcaatggcttcactggtcctttggaccaatttaggtatgttatcccaatttttatcctcttaatgtggcatgcttac

SEQ ID NO: 329489 - DNA, 1815 bp, Cannabis indica
gtagcgtgccttagcattagggcgttacaatgaataactctgaatactgggccctcatatggaattctaactctcaagtgatttttcccaccttcttacttctcaagagtaccttaaccaaagttgtggtcttgtttctgagaaccttatccttcccatcgagaatttgaactaataactactccttataggataagtctggctccagtgctagggtttcataattttaacatggattggatctgactaaccttttcaataatcttgaatggtcttgtaaacttagggcttaactttcccttcttaccgaagtgcttcactcctttcataggtgaaactcgtactaatacgtgatctcatacttgaaactctatgtctctaccattttgatatgtataacttttctgcttgttgtgagaagcaagcatccgggccatgttcttttctataccatcactggtcctatgaggtgttggacctaaatactttctttctcctgtgtcatcctaataatttggagaatgacatttcctactatagaatatctcgtaggtagacatccctattatagcctgataactgttattgaagaagaattctatcaacgacaaagacatactccatgtacccgcaaaatccatcacactggctcgtaacataccctccagtatcttatttgtcctcttggactgtccatctgtcgaaggatggaaagttgtaatgaactttagctttgtacccatggatttttggagactctctcaaaacctagaagtgaactttagatctccatctgatacaatggactctagagccccgttgagatgaactatctccttcacatacaactttgcatattgatccaccgtgttagtagttttcactagtagaaagtgcgctggcttcgtgcaacgatctactataatccatattgagttatacaaacttgtgattctagataatccaaccacaaaatcgatagtgatgtgacactcctacacagccaaaagggttacacttactatatatatggaaatcgctaaagggcaccttattggacaccttaaaagcacttaagaggtggcaacactactacaaaaatagttttcctgatgtttttaaacaatcgtttaaaatattcccattggtttctataaatgtcgcctatacgaccgtcgcaaaacgagcagaataggcgacggttcaaaactgtcaccaatgtggacttcccgacggtttaaaactatcgcctataatagggtataggcgacggtttcaaactgtgccctatagtataggacatgatttaaaaccgtcgctaatagtatagggcccaattttgaatcgccgcgtataccctgttataggcgatggttttaaaccgtgctttatagtattagttacacggtttgaaattgtcgctaatgtggacttcctgactgtttaaaactgtcgcctataaagggtataggcgacggttttaaactgtgtcctatagtataggccacgattttaaatcgtcgcctataccctgttacaggcgacggtttttaaaccgtgctttatagtactggttacgtttttaaattataaaaaagattcagcaacaatttttttttcagtcgttagattgaaaaatggaaaaaaatagatttctacaattttcccctgcattattttaatttttactaaatcggtcatgtcacataataaactacggtaatatcatttaaatatatttaaaaattctgtaatagtcacataataaactaacactaaatgctatctaaatatatttaaaaaatctaataatta

SEQ ID NO: 329490 - DNA, 434 bp, Cannabis indica
aaccgtgaattaaaacggtcagtttttttacatttgtataatagtcggtcggttttcgaattataatcataaaaaccgaaaaccgaatttggattttttgtgtataaaaaaccgaccaaaccaaccgttgctcacccctacaaaatcgactttcactcatatttcactatgacttttacctctttatctagtttattcgtgaaagaaatcacatcaggaaaatcttgacccattgtgatctctaccaagactctagcatagcacaatttttttttttattttgggtgatttgacatgtctgcaaaacatctcaaatttgactcattatcttgaacaaaaccttttgtccccaatatataaattggggttgacctaacatcttcctttttaaatctataatcggtcccaaagcttcattatatatatatatatat

SEQ ID NO: 329491 - DNA, 533 bp, Cannabis indica
acggcgttccaaacgagccctatatgtattaaatcacaatctctatgtactatatatatgtatgtatgtagtaattttggctatatataagcaatatctatatacaataattaaggaaccatgaatgaatgcccatgcatgctttgtcattatatataaattaatatatatatatatttatacgtttgtgtgattgtgattaaagcccatgcttacatgcattattatatatccatgcaatgcatgcatgtgatgatattattctgtttaagtattatatataatatattaatatttcaagtacacgtatcactcattcattaattattctatctaataataatatattcacatatatatatattttgtaaatgtaaatggacattatatatattatatatatacacggctaaatcttaatttattaatgaagagaaaatgacatttcgaaagggcgagacttatgtatctttatatattaaaagtgtctatttaacggcattttttggtttaacattcttagtttaacagaa

SEQ ID NO: 329492 - DNA, 1218 bp, Cannabis indica
aaattcattaagtttttatttggtattattattatttatctgctagctattataacgaatgcatgcatgtttatatatcgatcatgagatcgcacgtgtattaattaaaataaatatgtattatatatatatttcttataattgtagtctccttaaaaactgtatatatatatatgaaatagattatatatatttagtaattaagagaagagctgtccaaagtattagtccaaactagcaaggcagctgtccttaattaatttgccaataataataataataataataattataaagttcagtgagtggttgtactattatatatattaattggtgatgatgaatactaaaaaaggatttgatgaaggggaaagttaggtgacatcacctagattttgcttcaaattattggtccatccaaatattaattccaaattatgaggcacatactctactactactactaataatatatatatatatataattagtactatttggatattaatattaaagttataaagtatatattccatcaacatttgattgatttcctaccatggaaaattatacagatatatatagttttaagttaggtcctgatcaaccaactcacacaaaatatataattaatatgggccacattcacacacacacatatatatgatcactctaaacagtatatatatgttattaacgcaccaatccactaattaatatatattgttatattatatatgttttttttttatttaatttgttcatcactataaatattaatgatttggtgtggtagctagtgcatgtgaatactgaatacatcatcctcccactatatatatagtttatattatatatatatatgaatagtgttttatttctaactttttcatttcaataattgtcagaaattaatgtcgacaacttatatttgagtttgagtttgtttgagcgtgagagagagaactatggagaaggggaaatccactgtgaaaacaaattaattagatccaaatttaaaaaaagtaaataaaaataaaaaaacagttatatgcatgggtccgtcggagaagatgaagctaagacacgcacatgatgccacacaaagttgcgataaatctaccggagaagatgactgaaaccagtgatgatttgaacggaaaaagccaagagattagggtgagagagagagagagagagagagagagagagtagtat

SEQ ID NO: 329493 - DNA, 774 bp, Cannabis indica
aaaagtacaataagagctctgcaatatctttctctcacccgttcatatgtagcatttatagtcaacaaattgagccaattttcgcaagctccaacaacagttcactaggaagttggtaagaaattaatgaggtatctccaaagcactataaaagatggcatctgtcttcggcctgcttcagcaacaactttacaagcatactttgatgcagattgggcaagctgcctcgatgatcgaagatcaacaggggctacttggtaggggtgttcgcggtgctggtgttgcagtttttgaccattttttcaaaccaacccgcacatgcggttttcccaattttccaaactgcacccacaccgcaaaactaaaaaaaggcaaaaaactgcaccgcaaaaaatggtgcggtgcggtgcgatttttgcagtttctacaatttggagtatcaccaataattaaactatcacaaatacaacaaagtttgagcaacacttgtcaaaaataccataaggcttgaatataaatatgaaaaaaattaagtttgaataatacaataattagtgagctttgggttggacattcacatatgggacctaaataaatataaaaattggtatttttataatgttcagtgcggtgcggtttgaaccacatataataattgaaaaccgcaaaccgcaccgcgcggtttaggaaaaacttcaaaccgcgccgcactgcaaataagttcaaactcattttttttgcgtgcggcgatttgagcggtgtgagcagtttgat

SEQ ID NO: 329494 - DNA, 1294 bp, Cannabis indica
ttgtaattgtaatttataaaaaatacttaaaagatatgtgtaatgccagtttattgtttatcaggccattaaaatccatccatatacaaatacacgaacaaacacttaatattgaaatctcaaccaaatttgcaatctttatttcatcaaaaatgacaaataaaaccatagttacttattacatcacattctacaagaggaatggatgatgtgttaacaagctaataaaataataataataataaaatgtaaatatcaatataaagattattgaaagattttcaaaaacataagttgggtgcaaatttcttcatcgacccaatacaagtatcctctctagaatataactacctcgtcaaataatttattaataactttaaatgggagaaactatataaaacatattcttgcaattattattattatatatcaatacttatcatcttgagaattttttttctccttcccttgatctccaaatatttcacgacgaaaaagtaacagaaattgggcttctaacaacgtgtttatgatcagaaacccatctcaaatatccctgagagaaatccttgttagaagtagcagcattagcagttgcagtaaccgtgattgtatacttaagcttctgattcaattgtgtgaatatgagcttattaggggtgacagttattttagttccttctgggtcgaaaacgacggaagtgtagacagagttagcctcaccaacattggtgactgttcttgtgtaggtttgaggagcagaggatttgggatcgatagttagagcaaaagaagggtaattgagttctgcttctaaaatgggtttgatttgtttgcacttaacgaattcgtcagtgatgattgagacttgtacatctgaatagttcagtccacaaagatatggtatgtaatcctctggtgtcaggtcgtagattagacctggattttgtgctaatgccggatttatgtggcctgatccagtcgcaaacacgtcggccggagcattctaaaatatataaaaagacaaatattgttaaatcagatatatgtattttttttttaaataagatctttactacaaaataaaaattaggcactttatatatgttcaatgttaagacttgctttccaataatgtaatttttgtaaaatgacgaaagagtaaatgtgtctagctatctagagatttatttttcaaaatatataacttttaccaaacactttagaaaaaggggtcttttcaatattatacctaatattgattttatttataaaaatacctttaagaaaatta

SEQ ID NO: 329495 - DNA, 985 bp, Cannabis indica
cccgaacctggacctcgaccctaaactcgaaccccgacccaaaccccaaccctagacccagacactagacgcggacgtggacccaaacccgaaccccggacctcgacgcaaaccccaacccagacccgggctcaaaccccaggccccgaaccttgacccagaccccagacctgaaccgtacactgacccatactcggatcccaaaccccgacctggacctagtatcagatctgggatccgaacattagacaccagacccaaacgccggacccaaaattagacccagactaagacctagataccgaacttggacctacaccccggacttggacaccgacccggaccccaaatcacgacctagacccggacatagaccccagacctcgacccacacactgaagtcagaccctagacccaagacctggatctggacccagactcaaacttggacaccagacccggaccccaaaccccagacctcgacccagacccggacccaatctcaaacccgaacccaaaccccagaccaggacctgaacccagactcagaccctaaaccccaacccggaccccgacccaagctttgacccaaatcccagacttggacttggacctgaacatcggacccggacccaaacccgaaccccagacctggaccaagacctagacttagactctaacttggatcccaaaccccaacccggaccccacaccccagacccaaactcgaaccccaaatccagacccagctaaggacctcggacctagccccgggttttggatccgtgttcaaattcgagttcaggtccagggttagggttcggggtccaggtcagggttcggggtcggagtccaagttcgggtctgggtctggggggtcgaggttcgggatccgaggtccagtgtcctagttcgggtttgggtctaagttcgagttcgggtccaggtttgggtctaggtccgggtcaggattcgggctagggtt

SEQ ID NO: 329496 - DNA, 554 bp, Cannabis indica
ttattattattattatttgttggaatgttatgtaaataggatcttataatttgatattttaattttggaacattatggtatcattgatagtgaaagttatataagttgagataccaatatttattgatatgacttttgaattttgaaactcaatatcacaatctcatttcatttgtacaaaaacgtgttagtgaaaaaaaaaatgaaaaaattgacatttttgtcttaataactatctttcttttttctttttgagtacaaaattatatatatcattttaattattgtttttttttaaaaaataatacaagagttattggagtggttctgcttaagtttaaatgaaaaataatgtaaaacaagtgaattttgtatcaagtcatgctagatacatgatgaaatgatataaaaatgtttatagatatattttgaaaaaaaaaatggaaaataataataataaattggtatgagacgaaaaattgtatggaaaaaaacttgattcaacaaaatttttataccaaaaattaataataattttttcatttttttatttt

SEQ ID NO: 329497 - DNA, 595 bp, Cannabis indica
atagttgataacaccatacttatattcttgcattgaattatttatgaatgcattctgactttgctactttctttttgcagacatgtcttcccggttacgaggtcttgcaggtgggcctttagatgagcctactggacgggtgagggctaaggtggccaggacctcccgtcatgtagatgctatagcagaccatcactgccttcctctccactagggcctgcactagcaaggcagcctctgatttggcatgccaacctaggtacacggaggcccaacagaggagcaagtaaaacttctggtcaaaaggttgctaattcagccactcttcatatagcgagggctatccctttcatggatgaggctttaaaagagttgggtgatagtgggcctgacaagctatactccgtcggacttcaagacctttctctagtgagttacgctttcaactctgtttgtcttcttggcactgctaggttatttttagtattaattttaaattaagtttagtatatttttaattgagttttaatagtgtttggagaatttgtacgcttgttatcttttatttttgcagatttaaaataaaagaagatta

SEQ ID NO: 329498 - DNA, 617 bp, Cannabis indica
acatatatacataaacctttaccattcttttttttctttctttttcctattaattaattcatgtacaaatcgagtacatattattttttaatgatgttttgtcaattatttttttttaatgatgtcttctaagtattatctcgatcagaattattaatgatgaatatattattatgataatttatttaacattgcaaccaccacaaaaagatatcttaaaaaaaatattaatggtagtggcatgaggtatcttttagtttgtatatatataaatcaaagcaggtttttttttttttacctctatatagtattaaaaaaaatatatgtatttatgtgattactataaactgatactccttacaattattaaattcaaatattttgataagcataaaataatcacaaatatattcaccttttatacttttttagtttttagtgtactattcactaatttagttgtaatttttagccaaaactttagtcatgataattattaagagtttatggtaaaatttgttatgctattctcctttatatcgttttcaagaaaagtgttattattattatttttattatacaagtgacttccaattttagtatattatttttttttt

SEQ ID NO: 329499 - DNA, 1327 bp, Cannabis indica
acgaaataaattcatttaattggttcaattattgtgaatttattattttttattttttaataatatttcgaataaaacattattaaatttaagaacatggatcaacaacatgagaatatgagaccaactttaacttaataagagtatacttaagatatatcgaagatgctcaaacaaaaaagtatatatgtgttagactttcttgaatcttgtgtgtatagttttttttttttttgtcgttgcatatttgattgttatgaatttgtcaaaataattaagtttaattagtaattactcaatcattaaataattttaaaataaaaatggattaattttttttttatttatttaaaggaaaaggctcaacaaactgatttaagtttgttcatcaaaactatatagataggcacccaaccaaggacttttcctattgaggatttaatttcccaaattaaccctaacttttgttgcttttcatgccacgtaattgccttttagcacccaccaaattggaagggcttatttgtccttttcacttatttcatacctatttatagataaataagaaaaggtaaatatgataacttaaaatattacgaaaaaaaaattagcatgcccatcatgtactttttatcattgtgatcattatattagaacctacatagtgataaatttcacaatgttttcacccaaaaaaaataaaatataaatggaatattattatactaaaaaaattgataatgaaaatttgtcaaaacaaatatcaacaaaattttaactaaacaaatagtttaaatttcaaaaaaaaaaaaaaaaaaacttaaactaaacaaataaccgttattcatcgcattttactcagcatcaaaattataaagtatattattgtaaggtcattattatatttacacctcaaaaatctatataggtagctcaatatgcaatctaccttaaagtaatttttaaaatttacacttaatatatttttatatcaaatttttctcatatttcttttaaataatgtacatttattaatatttttggtacactaatgaaattaaatatattttaatttttttagtctaaaatatttaatatatctattttttagtagaatgtgaaaaaataagaaaaagaaaaaagtagatataaaataaataatatataggtcatataaaaaataataaataagagtattacttttatattttataatggtatgggatgcaaatgaaactatcattatttatgcttttatatttaagaaactaaataacaaaccacattgttactaatacttaataatttttagttttttcagatacat

SEQ ID NO: 329500 - DNA, 1488 bp, Cannabis indica
taaaataatttccaacaagctcgtggctcattctcaagttactcttaccagcagcaccaggcttcgaaacgcctttcctcttcttcaccatgggaggaggagcggagtttaacacgccttaaacctgagagagttaaaaaaataaatttttcttcgctttaatatatatgtagtttatttttggtaacctatttcttttattttttgattaatttaaatttctcttcatatattaattagtttttattggtattcttttaacatttaatttttttttcaaattattgtaataatattttgtatattaccattctcaattaagattctttattaaggttttttagcattagattttaatgtccatattttattttcacttttaatgttttctatattttattgcttatttgccatttcattagtattattttattattatttattttttttacttttaaagtctaattaattatttattagtattaatatttattttttggtaagttacatattcttttgtttttatactatactttttaaaatatattatactgtctttgaacattttctatatatttatagtatttttacttttgtttttcttcgtaattataaataaggtcatataaatttttttaaagtgtattgatttttttttttatatactaaagtatattgattatatttattttgttaataatttttctttcaataatcttcataatgcttttatgatttttatgccttttacagtgccttttgtatattttatgatttttatacttattacaactttcgtggtattttttatagcttatcccaaattatttaaggtagtttaatggtacagttaatagaaaaagagaagtgatccattttgtactcatgatttttatataaatgactttaagttttaacatataagtattttaagtctttctatttatggattgttttatattataatatatattataatattgattattttgtcatctttctttcacattatctattttttcattaaattatgtagtaatatagttttatttattgttgttttgtaagtcaattttgtggagtgcctacgattacaaagattttactgataagtttaattcaaggattgtctcttctgatacctgttgtttcttgatgttgtttgtttattcatgtaatattttagtattataagccgaaactttgactcttttgctatcaacaaaggaatgatattttttaatgagttatgggtgttgtttgaggatgttataattttgtgtgattttgatcactacattaaaaaaataatcaaaaaataaacaaaattatcaaaattaaattattttttgtccaattataaattttcgcaaaatataaaatctaaataatacaatttttttttcttaaaattaaattattttttgtgctatgctacttagatgttatggtattggtaatttagtttttttttcttaataatttttt

SEQ ID NO: 329501 - DNA, 518 bp, Cannabis indica
caaataaaaaaaaaaaattgacacaaatataataagtagtataaaaaattgttttatttatactttataccttctcaattgtataaatatgtagatagatataaaattttccatagaaagtaactaagaagccatcacccaaaattcttaaaataaactaaaaaaatacaaaatattagaaaacagaataatatagtaataaaaggaaattagcatgtcacttcacctttcttttgccgacaactttttttcgccagtcgagcttagctgattcattctgttctgttgggtattcgaaattacatgagtatcttcattttacctcaaaaagttactgttgctattgataaacagattggttgcatgagtatctacgactttggtggctactatggtgcattttatttggtgcaatcaaaatagatacatctttgaaagggcttgtgattctgcaatgtttatagggcaaatcaatcaagctgatgttaaaagctagagttcaattttttttttccttt

SEQ ID NO: 329502 - DNA, 722 bp, Cannabis indica
acacaacacacactagaagtatagtgtaaagtaaattgtacttagcagttctatgttaaagatttccagaactttaatgcactacctacttgttttattcatatggtataatcttaattctcttgtaaatccttacaagattataccttctccatatgaataagaaattttctgatatttaataattaatgtattatttatcttataattatatttgatatattttctaatattttatctattaattacatacctttagagcagaaatcccaatatttatttgtaagggcatgatgaaataagagcagtgatcatcaaggtctgattgcagtagtatacatgtggaccaacatttgggaatgttttgaaattgtttgtatagagaacaaattgtttaaaaatataaggggtttatttggaaatttggatgtcataattaaaatattttttttcgattatgaacgatgtgaattttaaatgtgcacacaaaaattttgaaagtcttaattttaatgactttgagaattattaagtagttaaaaagttcattttttcttacattttttggagttgtaaaattctgggttgttactattggattttgtgccctaaataaaacccattacaatatgattagttatcaatctaagaaatttgaagtgatttatgtttgcatgaattttttatgcttatggtttaatatatttattatatgcacaaaa

SEQ ID NO: 329503 - DNA, 651 bp, Cannabis indica
tctcattattattgaactttggtgacagtggatgatttgagcggactacggtcccgtaatattggatttctacataaaaattttggtatctcacttttatgtttaatttgtatattttattttgcttgtagtgctatagttgatatttgattttgcttatattttttatgtttgataagtatatcttatttttaacatataaagagaaaaaatattgtgattaattataataaatttttccaatatatatatataaatcttggagatcaaattcaacaacatgcatatattactttgtagaaaactactcacaccaaactatgaattaattgaaaattttcatattttatgttggacaaataattaagtcgctcaattagaagagttgaatgatatagtgaattaatgtatttaaatattcaaaatgcattatgatctttactaactatcacgtggtagctatagtagctagtcatctagggttaagtaatcgtgtttattatatttaaactaagcatcaattaatagagcattgttattgggtaccagtgtttaccactttttataagtagcattctacgattagttagcgatattctctaaaagttatttttttaaaattatatggaacctgatacttaattatactaa

SEQ ID NO: 329504 - DNA, 486 bp, Cannabis indica
ttatttttttttaatataaaaaaatatataattgtgatgagacaatatgtatttatagagttatgtaagaaattaaacttaactacattaacaagttagattgggcttgctcatcaaattcaataatattttagttaactaaaaaagcccacaatgctaagcctaatattatgggctaagaattatctaatcaaccaaattttgataaaattaataaaaattaatataaactcaaattaaagtctaatataatatcaggactataaatatacgtatgtactaatatatttttaattaatctttaatatttatattgttcttatattatattttaggagttgtaatacttcattttcttgacaaaatctctaacaaaaataagataagttaaacaagtctatatatagtgttgaccgaggttttcggcaaccaacataataatatataagaaagctgtaagaagtttaatgcacgagatttttacgt

SEQ ID NO: 329505 - DNA, 771 bp, Cannabis indica
atttagagatttgattttttaattttctttttatcttaccctcatttaagtaatgtttctttaagtattggaacataaatttttagtttatttttgtattaacttaagaacatatttaaatttttttaaacactaatatattgcattcagttttcaataataatctcactttcaaataacatagaaaaaacctaacataaaatttagtatacgtgcctcgcacgtaattttttgctagtatatatatatgcatgaatgattcgatgcgttatagagtaagtacgagagagaggtcatgttacgtacggtcgacatataatgatagtaataataaagtaacatagccttagctatgaaaaaacggcccttggagtccaattgagccagtttataacattatgggcattgttaccttaaatatttatatatatatatacatctgaccttttctaccactaataacacctatcgtggccatatccaatacccctgaacaacacatatatacacacacgtatactgtacatatgcaactagtcaagacacaatatataattatatattttatacgtatattactatacctatatagattcgaaatttatttggtaatccatcaaaagtcgaaaagaacaaaagaaagttaaatggccctttttaaaataaataaattgaacaaataatgaatgatatatattttatataatataataaaacctaactactcgtatctttcgtaagtataatttacttaaaaaaaaaatttaaaaa

SEQ ID NO: 329506 - DNA, 844 bp, Cannabis indica
ggggatcaagatttgggttttgacggtaggtgaaactcatggtgtggttcgattgggccatctgtggccagagatggtctcactgggacgacaggggtgtcgcacgagaaaagtgaaaagagagtaacggaggcagtatatagtggcatgtataccgtagcacttaacagagcctattgaaaggaagggtaaagacaaacatagaagtgcaatttatgtagttatgtcgttaaaaatcagtttatgtggttaagtgtcacaaattgtatagttcagatagttttatcgccaatattcttaattattttgtttttttttttatataaaatttaaataaaatttctattttttttattattttttagaaaaaatgtattgttattatttttttaaaaaagaaaacaactactcataatttttatgaagttcttagtcgaatatttaaaactgaacaataaatttacacaaagcaaacattgcactatataattaggtgcttcacctaatatctacatttccaacctaactacatcaagtacattaaatgactattatttgaagtatactaatttttaaaacgtgttcttaattagtaatttgttgattgaattattgaaactcatgactgaattcataattttataccttattttattcacaatgaattttctctttatattttccgtcactctctccatatatatatcaatggaataggtttcaatggttacatttatttttagtcattagatcactattggatggttgtgattaatttaaaaattaaaataaataaataaataaataaataacttgtaacctgatagtaacttgaaaatttatt

SEQ ID NO: 329507 - DNA, 590 bp, Cannabis indica
acaaaacagaaatttctagccaatttcatccattttcagcaaggtttggaagaggaaagtgttagctaatccaaggtaatccttagctctcttttctttttttctttttttttttttttgattttattaagaaaatcttggttttggttaggtgattccaagagttgggttctgttagggttcgagaatgataggagctattttgggagcttgaattgagtttgtttgtgattattttatctattgttggttgttgtaattggtgttgagtaagtttgagttttgaaactcaaagcttcctcaacaatggtgatttaaattcaaaggtttgatgttacatttttttatgagttatgttcattatgctctaattaggtgttctggaaagtttagtaagatttaggatagaattgagaaaaaaaaactgaagcattggatttctgcattgaaaatggcccaccgtttccctcggcaggaccccaagaaacggtgaaccatttggggatctgggtgaccagttggggtgatttttggttaccccaattgtaaagcccgcttagttaatttggaaattagcagttgtttatgtt

SEQ ID NO: 329508 - DNA, 2007 bp, Cannabis indica
gaggagagagagagagaagagagagaagttgctaaatataggaattggaaatttcaagaaagtgaaaggacaaagcttttatataagttatgtatatacatagcaatttttagcagccaaatccataaataaataaataaataaataaataaatagaatttttgtaatatttttctaatgtaattttcttggaaagcttataaaagatattgaaatttaggtttatttttataaaaataatgtcacacggattttttttttaaaaataatgtgtttttataaaataacagtgaaacaattaaaaaataatcgtagaacatcagtaaaaacttaacactatatatagtataaaacttaaaaaaaattcgctccataataaaaaagtaaaaatattaaaaatttcagtatatggtgtagataatttatttttttgcagagctataaaaattattgtaaataatctcctatagttatattttgctcatttcgttaaataatttatttattgatataatgttaacttaattgttaatgtgattaaatttaaaagcacacaacaaatattaaattaaattttaaataatttaaaattattaaatagattcttataccgtaattatatttataataatttgtataatgttaaaggaattttagtaacgaaaaacttcataaacaaaactctacaaaaattataatttagatgaaaaaaatcttgtattcattatataataataattttgttcaaaagaaataataatgacaataaagtagacaaatctaaatatcttagttagaaaaaataaatatctatggtcaaaactatagttttattccaagtaaaagaaaaggttttttcataactaaaaataatattcttcacaattagtgtgtagaaatatacaatattaaggagttttttttttcattattaccaaataaaaaaataggaacaaaatgtacttaataagaagtcaaaggctcacaaattttgtgctgcaataaataaaaataaaataatttaaaattttgatggataaaaatttaagtaaatactattttaaattttatattttgtaaaaattatcaatttcactatttattttattaatgataattcgtaacgtatttgataatattacaaactaataccataaacttaagtttttatcaattaagttttttaatataacaacttaaagttagtattcaacataaatagacacaaaaagatcaacttcgtcacaacactttcagattattattatattttattttgataaaaataaaatttaaaaattattttgtactattttaaaaaatataatctaaattattatttaacaaaataaaaaaatttgagcgtttgatcagtaatatttttatattgtttaaataaaaatatgtaaaactagtactttttacatattaatatgtgggatccaataaagataacaatggaatgagacttttattttaagtccttagcctaatcatttgtcttgaaaattatatatagaatatttagagaaaaaaaatgttaaagactactttcataattaggacttgccaatgaaatattaaaaaaaggttgctattaattaaatcatacaaatattaatatattatgaacattgaaatattttaggagacaattatcgcatgagtgtcactaatatcttattgtagggatatacatatagtaagcatatttaatttattttttgaatttttttttaacaatttacaataaaaaaaatataaaattgaaataaaactcaaatgcaagttaatgtttaaatcttatattattctaaattttatgaaaaataattgaaatgcttggtgtaagcataaaattacaagggaaaaaacaaaaaatacaaaaaggaaaaaaattacaaaatacttaggcggccattaacattaatacagtccacatacaaatatttacaaaaataccacatgcactaagccttcagctgtacagagcgaaccatgaagatg

SEQ ID NO: 329509 - DNA, 647 bp, Cannabis indica
gtatgtttcaaataaatataaaattaaaggtaaatttaattaattgatgaataaaagaagcatttttcaacttaccccattttaaattttaatgggtgtatgtgtatcagtttcttaaaaataatatgggaaatgattctataaacatataaagaatacacaattttaaaaataacgtatttttcaaaattatgcatgaaaaaaaaaaaattaataaagcaaaaaatatatatttaatatatggttatttaagaagttttaccactcactctgaatttttttgtactttaaaaattagtaaaaatctaaatggcctaattgcaatttttctgcataagaaatcgagaccgaactaattgggtcaagtttttacgggctagttagctggtcttctataaattgggccgtttcaggatttttttgtcgttcaaaaatttcttgggcttttatctaaaaatgattgggtttggaaagcccactatcttgtagggatatttaaagtagtaacttgtttagtactacacaaacatgagtaactcatcattactatttattgtgtagttaagaaagtggaaggaccaaaaagatgaagaaaaaaaaagtggaaatgacaagtcaattttttttttttttttttattttttctg

SEQ ID NO: 329510 - DNA, 913 bp, Cannabis indica
tatttacttgaaatataaatttacaaaataaattcaattaattattgatatgaatttaattttttaataataaaaatttattaaaaaatcaaaaattaaataaaaattaatttttaatataataagttttaaaaaattaatgttaaaattataataaaatatgtggtaataattaattgaaagataaatataaaaaatacatttaatttatttataattacatagcataaaatagcataagagatcatgaaacaacataaaattttatcattcaatttatctttatacttaaatatttcatatgtatttataaaattttagataacaatcgacaaatcttggaccactttgcgaaatcgtagatgtccacaatattggaatggtctaaatgcatttttagagatggcctcgaaatgtaaagactgtgatggtagaattaggtgcccttgtgtaagatgtgtgaacaataggcttcaaactttacctgttgtgaaagcacacatattcaattggggtttttttactggttacgagaagtggacttaccacggggaagcagaatctagcaccactaatgtaatgaatgaccatgatggcgctgatgatgaccctgaaattgacgagatgattccgatagtggatgactttcttcagtcgacattcaaaatgaatgatagtcctgatgcaaatcaatggcgtgatgaattatttgaagagagccgagttgtatcccggttgtgattggatatcttctcttaactttttggaaaagttattgcatttgaaagttaggggaaagattcctaaatttatcaaaattagcttttccaaaggaaaataaaattccatcaaactactatgatgccaaaaaaagattgaagaaattagggttggggtatgagtcaattcatgt

SEQ ID NO: 329511 - DNA, 1198 bp, Cannabis indica
ttttttttattgttgttgtttatatgtgtgtgagtgtgtgtatatatgaatatgaatatgtatttatattttttttttaacaagtatatatgtatatgcgtgtatgatacaaccaattccaaccttctcagtacggacgcggaatgttacctgcccattatttatcaatagtttaatattttgggatatattgaacactaaaaaattctgaccaaactgaaaaaggttgataggtgatagacccattggtagtttttttttaaggctaattagaatttttaccccctgaactttgacatgtactaaattatgctccctgaacttttaaagtcgttaaaatgccccttgaactattaacattgttggatttaaggacctttttctaagttaagtaaaaaagtctaacatgtatgaaagttcagagagcataatttagtatatatcaaagttcgagggcatgatttggtagatattaaagtctgggagcatggtttaatacataaacaataactgaaatagtaaaattgaatgaaattagaaaaaagtccttaaattcaacaatctcaatagttcagggagcatttttagcgaccttaaaagtttagggggcatgatttggcacatgtcgaagtttaggggcaaaaatcctaattaattttttaaatataatagtactagttgtcatagattacttttaccctttacaatttttaagcttttattattatattattattgagatattattgtaattgtatgtttaatatttattttttatggtgtaaaaaatattttaaccttgagattgtgtattgttatgcagcttaattatttataacccattagggtttgtttggcataacttatacttttacttttagacagtagaaaaatagaagtaaaagtttgagcttttcatttagtgtttgaattttagttttgaaagaacttcttctccatttgaagagcttttataagtgtttggtagtaaaaagtaaaagctcttacaaataatatatatcaaatttgttaataataatagtaataatataattctttttcttgttgaaaaaaaataaatcttaaaaaataaaataaatatatatggtttgtgaagaagaatagaatggagataatttggtgagtctcgatggattaactattagaatatttctaattaaggaaataaaataatatt

SEQ ID NO: 329512 - DNA, 1037 bp, Cannabis indica
atacatcattccaaaaagcgttcattagtttccaatgaagtaacacaacatcacctgctgtaaatcttctgcagatatcgtgatctgggtacgaggtcctatgaatccacgtggtaccgaaattggaattatagcatttttcttttttattctcaaaaattcttcaactatacatcagattgacctggggagttgatccatgatctctagagtgaataattagatcagcttgatcactaccgcctttttgacaaggcatgggacctttttcctttgacatagcacgtcttgatggtggttgagcaagtggaccctatacaaaacaccataatatatcaaaatgtgtattgtataatttgtaatgattatttctaggatagagattttacctcggatattaaaattaaatatttaggccaaggaaggaacatgttcgctacttcctaacatatctacactacccctcaattaatatttgaatttcagcatcttcttgcagtatatttaaaattataacgtaggcatgtgaatcatcatagttcaaggtgtgaactttgattggaccatcatgttcgtacaaacaagctacgactactctgttgtcaatattttttgagcaagaaaatactatctcaactgccctctattcaggaaaattgtacatgagaggtggctcatataggagaacaaactcctgagcataattttgtggaacatactcctaagcatgttcttgtggaacatactcctggtgagcatgttctagtggaacataatttggagcatgttcttcttcctcatcttcatcctcattttgctcttgttcgacatcatttttcttctatttaagggatctaatttttgcttttaatttgtcaatctctctatgtttctaagccacaacatcaaaaacttccattttcttcctaccaaaaagtttatatgccttcctaatgaaataacatttttcaagtactagcatacctcgtagccttgacacgtccaagatgctctggtgtcccgagcgcgtgcgtcag

SEQ ID NO: 329513 - DNA, 941 bp, Cannabis indica
ttaagttttcactgttgttctatagttattttttaattattccattgttgttttaattattctttttattgttttacacttgttttataaaaaaaataatatttttgtaaaaaaattctgtgtaacagtaaaattatattttttactttctaaaatcaaataattttgtaaaaaccccaacttaataagtgtagaatgcttaattcaatcaatacaaattagttgatttcctcatacaccacataatttaaaattttaatcaatgaatattattttatacactttccattacttaatctatcattcatgcatgtataaattgtattaaataataagaaatataactatgaataaaaaattatattgtattaattattataattataataactgataacataacaattcatctgtattagtttgtattataatatttaaaaagtttttgacatttcccaaactcagaatttgaatctcgacttcgtacttcgacccagatgctaaactcagccttagaattagacccttaaccctggacttagacctggtctcggaatcgagccccgtacccagacctcagggtgggctttgaaagttagtcgatcataagaaaaaataataggctcttatttagagtaaaatgtggtattttttaaaattagcaaaaaaaaaaagtgtaattttaaaggggattttttcggcccttaagctaggtgggccctaagtacaggtctagcccacctatgctcaggatcaggcctaccctgaacccgagcctcaaccttagtatatttttgaagggaaattatagtaaatgaccccaaattattggagtatgttagtttatgttctcatttcaaaaaaatatagcaaatgaccctaaatcataagactatgttagtaaatatcctcatttcaattttttttttttttaagaatta

SEQ ID NO: 329514 - DNA, 544 bp, Cannabis indica
aaaaataataataatgatgaaaactaaaaaaaacaaaataatgaagaaaacccactaacctaatcggctattgttggccaaacagaataaagagaatgaaatttaaggtttgagtaaccttaaaagaataatgagaaacaataaaaagataaaatgataataataagaagaagaacccctagtgaataataataatgatgatgaagaagaaaatgcagaagaggggctgaggtagatctgtgatggattcattgataaattactttagtgtcatgtttactatacaataatcagaattggaataaattaatggagaaatgtaacagaataaatgaaaataatcggaatcaatatttgtaatatgttgtttactaaaattttttagaaatggaatagttgtgatttatcttgtttactttattaggaaacgtaatcggaatgcttaaattaactaaatttcttttttgagttaaactatattatatggtaattattttgtaagacatattttaaaggacaaaattatcattatatatttaatatt

SEQ ID NO: 329515 - DNA, 991 bp, Cannabis indica
aaaggcactttgagcgggggaaatgacgcgactgagtataggcttaagacgattaaccaacactctagaaatgattttgtaaagggttgtgcagaggctaatgggacggtagtcaatgacttgttggggatgggaatgcttgggaatgagcacgataatagtatatttattgctccgatgtttgtgtctccatttagaaagcctttagccaccagaagaacatctcggccaagaatatgccagtttttttgaaaataaaagtgccattaaagccatcagaacctagagccttgtcactggccagttggaaagcagccctcttaatttcatcgtccgtataaatgccattaagggactcagcttctgactttgagatttgctcagttaggcctaatagaatgcactcgatgagctcatcatcaggatttttactggcaaaaatttgagaaaaatagtgttcaataatgtttacaaaggagtcagtgtccttggcaatagagccatcagggcataggagagaaatgatcttgttattatcatgtcgcaaggaagcaaattggtgaaagtatcttatattttttgtctccaagcttgagccagtttacacgagatcattgtttccaatattcttcctctttatataaaagttgatcaagttctttcttacgctttcgcctaagcataagctgagcgtcagtcggctgaggacaattttgcacatttttaagacaaatttggatgtcccaaattttggagtttatggatggaccaagggtctttttccattttaggaggtgggaagagcaatgttctagtctttgaattatgtttatgattgggtcacaatcattgttgttcgaactcgaggtccatgcctgatgtaggcactcatcaaagccagattcaaacatccagagtttataaaaaaactgaagtgcggattaggattgggaagatgtgtttggtgatgggaggttcaagataaggaggg

SEQ ID NO: 329516 - DNA, 546 bp, Cannabis indica
actgaaacctgcaatacggaatctaactagataagagaccttgtaaagataagtatacttactccaatgacataaaagagatcattcatctaatattcctctatctaaatgtgtcattcatttctttttatgattcttagccatttaatatataagcttcttatctatgtatattccgaatataaaaaccatataaggtgtcatactattattggtgcaattcaatattaggtctcacgaaatttttaatttaatattaaaaactactaactacttgtaaggtgacatctcatgtggttatggtcaccttaaggtaccaaatagaaacactcttccgagtatagagcttaatgcagataaatttatgtcccttgtgaaaatggcctcttttttgaggtcattttgcactttggcctaatttcgataattctttccaacatggcatcatgttaaatcttccagatagctggtcgaaagtaagtttagacagctggttgaatttttaggctgaggtcttttgtaacgaattaccaaacttagccaaaa

SEQ ID NO: 329517 - DNA, 1174 bp, Cannabis indica
gtaaatacttttcaatctttttaaagaaagggtaaaatggatctggactatataaaaatcaaatgatgaaatcataaggccactgacaaatataattttagaaaacactctttagaaataggtgtctccatgtattgttttattttttttttaaatataaaattctattttctttttcttttataacagtttacattataggtcttcatgatattctcccaataatgtcatatcgaaaataaaagcttaaataatatgttatattttttcttattaattttattttacttacatggagtgtatgaattgtattttatatcttgtcttacttttttgaaagatatgattaatatataaatgtagactgtcttataaaaaatttgaattgacttttagaagacaaaaacagtaaagatgtgcatcaatactaggatgtatcatataaaaacagtaccctgtggcagtatcaaagtaggaagggccattatgaataaatctaaaaaggaggggcttaacaacaaatttacaaagaattatatataatttctttttatatttcttttttagggggccatgggggtgcacatggttctgcccataattaataatttatataggatttatttttaaaaaaaaaaatgtattaatttttcatttctaagttaactaaataaaaataaaaatgcttgcaattgtcatgagggtagagttccttaatttctcattaaaattaaatgtgtgtatagtctaattaagcaaaaaacactattcatgattataaataaataattattgaacttaattagattctgtatagtctaaactaatttaaatttaatcattcaaaagaaaaagagaaataatttattttttatatagttggggaattaggagtgttggttaaagagataaagacagcaatttattattggatgaagtcacaattggtaagatataggagatctagagcaaaggtgttccaatgaaagtgaaggcacattacacaagcacaactttggaacctatttttttgttttaaaaaaacaaatgttgaaagggaaatagaagggcacttggcaggtattagaacctttgtttttgtctatatatatgttatatattacttgattatttatatagtatatagatatatctatatatatatatatatata

SEQ ID NO: 329518 - DNA, 840 bp, Cannabis indica
tttatatgtgtttaatttataatcgttttagaagtttcatatttagggtgttaatcaacatactgtgagtagatctaagatcctggtaaaataattttccaacagtatctttaaccaaggaagatatgaatcttttctctgcattgcttggttatttggtacataggagcagagcgcttagagggcaagcacacgatcagtttcatgccatagtgaatttggcatccggtttctatcagactacaaattaacagaatcgactcctaaaaggcatacccattccatccaggcctctgcagtctcaacctggtctcctcccgatcctggtcacctcaagcttaacgtggatgcagcaattccttaggggatgtcgaaagttggtttcgggggtgtcattcgaaacagtgaaggcctagttgtagcagcaattgcctctccctacacaagagggggagcggtagccacactcaaagaaaaatcccttctagtttctttgcgttggtgtattgaagaaaattttcttgtaaatgtggtggaaactgactgtaaagccattactgatgctttggaccaccccaaagaagacatttcatgttttggagacctcataagtcaaatcaaggaagctttgtctcatctccctgcggctcgagtttctcatgttaaccggtcggccaatacttttgcagataaattggcaaattgggcttcggggctagacgagtagcaatctggataggcgatgacccttgcaatcttagtgcttttctctctacttagtgggcacccttgttgggttttatgccctaaataaaactctttacaatctgattagtaatc

SEQ ID NO: 329519 - DNA, 647 bp, Cannabis indica
gtctgaaagcccttacttcactattaagtaaactctaaatttagggataaaataatcataactaattacccaaaatatcctaatattataactatctataaatcttgtcctgctatttctaagatactaaagaactaaaccgtatctaggtgacactgttggccaaaacgtcgattctactgttgttgagcataaaatataaacatgccaaaatttaaaaatgacttgcattttagaatctaatagaatctttataattaagaaattatttctttaatgcttatttctgacagtagattttattttctattaatgcacatttaattataaataattattaaattattaatactctcttaattttcatgttcaattatatagtcattacaaaaaaaagtgattgtgtaaaattataggtttcttcaaccccaactttaaattttcttcaaatacctcaagcatgaattagataactaagaaacaaagaatttgaaaatgattcccatatatattttaaagagtttcatattaataaataatgtatgtaaacttaatatcacatatctattctatataaagtgtgcttatataactgaattcttgatttatgaaaaattcataggtgactttttatttatatttaataa

SEQ ID NO: 329520 - DNA, 914 bp, Cannabis indica
atgaaattaaatctgtttctttattaatatgaatagaaaagattacattgaaatagagttttatttagggcacaaagcccaacaccatcatcatcatcaacctcatcatcatcattatcatcatttcatcttcctcagattctgatgatgaggaggatgaaataatcactgtctcaagcacattattacgaggttgggggctgcacgaacgagactctacctcttcatcaatccagtactgcgctgctaaatcaccccactacaatttttttgaagaaattatcattacaatcatgatggtcttttagattgacaacaacatctgttaataaatcactgttagatggaaacacctcaaggatgcacttgtccaattgagcaaatgatggttgaggaacatgccttacgacctcctcatccagcctccattcaactacataaactagatatggcaacaccaaatatatattggcctccctataatttctaccactaaaagcatctaacaccatatgaatttcattttcctcagtaaccctaaatcccatattcaggtgcttccctgttgcttaaaaaaaataaaaaggaataggtatcccaattcttgagccatttcttcaagatggagcctactgaatccattgaaactgcaaaaatcaaagtaggaaattcgactatcctcacacttcatattgtcacattgggtgaaccaataaccaacatggaataatttcacaatgaaattattcaaatttgaacatgcaaagttaatatataagcacacgattaatcttacaggtaacctaggtaaaactaattaaacttttccaaaattttaacttaaccaccaaagccaacgaacaaacaagaaataatataaaataataataaaaaaaaacatgtgaaaatatttc

SEQ ID NO: 329521 - DNA, 1046 bp, Cannabis indica
atattgcattagaaaaataaaagattaaaaaacaaatatatttagagatttttttttttttcgagataaataaataaaagagttgaaagaaattgaggagaaatgtcacaaggcaaaattaatggttaaaataatgagaaattagtggagattggaaaagtaataaaaagtatgtagtataatgaatatttattagagcatagtttagtcaaaattaataaatactaaagagtggtgttaaacattattattattgtaatagaattttattatgaatgcaaatcgtctaacattataaacaaattcaaaatgaaaattacttttgttgaaaactcgaataggaagctctagcaaacttatgaactattttcttagtagaacgatacacataataaaaagactctgcatatacaatcaaataagtgtctatagttattaacaactaaaccaaaatgagaggtcatcattaaatcgccactaagcgatccgtctctagaaccaccatcgaccaatctttatccttaatctaactaagagcttctcgaattcccataatcttagccaactcaggcgccacattaccatactgacacatgatgcgtgcttcaataagacggtacatgtgatcatgagctaccataccaactgtaatgccctaataaaaggcacgctactaacaaccattaatataatctaatcccgtcaaactgggattactagaaaatatgaacgaaaaaatttaaactttaaatcaagtagagagtgaaaatataacttgtaactatttaatttataaaccattccaaaaggttacacatgtttcgggatcctgtaaagctttttacaaaatattataagtcattttaacatgtcgacctaagcgacaaaaactgagaatacaaaatcaattagctggtggacccaacccgcgtggtctagtgtggcccgaacatgtacaatctaccgccaagccctcgaactcatagccgatcacaaactgatttaccctttcctgtacagtagagcacccgtgagccaagcccagc

SEQ ID NO: 329522 - DNA, 533 bp, Cannabis indica
atatatatatatatgataaggcatttatatatatgtatgtataatgcatgcatgtgagacccctatagcttgttgtacgtttattatcattatatagctcataatattattatacgaagatacaatatgtcatagttattagagaattaattagggcaataattaattaataatattaaatgttgatttttataatgaaatgttttataattatataaatgtatttattaatatttgagatcgagctcgatcaatatgacactttaattcataatatatgtatatatagatatatataaagatattaataaagataacttttgtaattgatcatcatcacatgggacttatattcaaccatgcatgtgttatatatttctatacgatcagctgcccccactaatatatttgtgtatatatatacatgttaatatatattatatatgtgttatgatgaaaggtgtatatgtcattgctgagcaattatatataattgtaaaatctagtgtgacttcacattgtacatgttgtat

SEQ ID NO: 329523 - DNA, 1026 bp, Cannabis indica
ttatgagtaattactcctgaaattgcagttaggtttcttaattatcgttcgttgtatcaggcaacgatagtgacatacacagattgtggacaacgaatggtaagggtgcttcatgaagcactgaaattatgtgtttattggagatatatgagattgagtgctttgtgaagcacggagattatgtaaatatctgtttattgtaataatgaagttgttaacaatgagttgttcaactttcttatagtgcgtaatatatgtatttgtatagaggccaaataatatttgtatgccggatatgttttgaatcacaagtatacatgttatgctgtgatgtgaatatttccttttaaatgctttctgtctagtagtttttcttgctgagtcattatgactcacgggtacttcctggtgcaggtaaaaaaaagaagaatagtagttgtgttcggccatgagttagaggttctcccagcaatgtacatatcagtcgtagtgtcttgacttttgagaagcaggattgaccctttttctatggttggaaatgtaacctacttttgtaataacggttttgtaattggctgtaaaagaattttattagcatggggtccccacattacaacagtattttaaatgaaagtttttatattaaatttaataaacaatgtttaattaaaccacactcttttttttccttaaactaatagattagtaataacaagtttgtaaaagcatacacgtggcatccctgagggtcagggcgttacatataggtttaatagagtgtatttatgtgtaactttttcatattgagcatcatataattatctttaaaacttttcatttataattcttttttatttacttatttgacttcactagtaaagaggtattttttgctatttttatttttttcatagttttcttcttggttggctaataaccttcgtaaaattgtattttccatgattttatttctatattgtagcatcatattggactaattggaaggtttagaagagtgtattaatt

SEQ ID NO: 329524 - DNA, 468 bp, Cannabis indica
gtaagccctagatactttattccttgttgtctttaaagttttaagcttggttcttttttgtgatttttagaatttaggggcttagtttatttgagattgtattgtgttagagactattttaaagcttgattttagttgttcataccttgtgtttagaagtagtagcagctgtagcaaatttgaggaagtttaggttttgagaactcaatctttgctcaaccatggtgaatttcattgtatgttattttagatgcttttgagttgtggggtaagtttagattaccccaaattgctattctggaaagtttggtagcttttggttaggttgggagatagttttgggggcttaaaagttgggaattttcgaacccttgctgcccaagaaagtgcttccacgattggaaagcttccacgatcagagagcttccatgattggaggagcttccatgatcggaggagcttccatga

SEQ ID NO: 329525 - DNA, 690 bp, Cannabis indica
tgcgttggctaaaagcgaagtcaacagtaattgtcaagaaagcattcatgtgtctctattatttacaaaaccttgacatattttgacaatatcaacatcatgtggcatccacgtaagcaaaagatcaatgtctcatgggttaagctccaccagatggacccaaagtcgatatgtcatttgtatttaccccattagtaggcaaagtttatagataagaaccctaagtctataaatataagaaaactcattcatgcaaagggtgatacttgagagctaaggcaaattctaggaattgttaacttggcaaatatttgtgtaatactcaaaggcttttccagtcataataatattgactcatgggctagaggtcattaatccttaaaccacgtaaaatctcttgtattgttcttcattttttatctatttctttagctttaatataattatacccaatttttaaaatctcagtaaattttttggtgcattattgagagctaaaaaaagagttgatacccaagttgtaaactgcaacagtggtagccacaagaaccacttttggcaaattgggtgctcatgatggatgacatgaaccctcctactgtacatgcaaaagtagatgttgtgggagatacatctgaagtaactagttgtcctaccaagaaaactcaacataatgagaaatatgttgat

SEQ ID NO: 329526 - DNA, 1042 bp, Cannabis indica
cttcatcattctacctttggagattgtaaaatggggtggacgtctgggttcccaaagctatacagtcctttctcatcattgatgctactatggtgcaagctagggatgtgacaagggattactcgagaaggattctcagaaggctatggttctatctttatatagcgagattcaagtatagtcttcctcatatattttcttttctttagctttctttttgtgggttattgtgctttcttctttctaaaaatagatgattttctcaacactatctctaatgctttagtctttccacctaatgaaaataccatctttacctatgatgccagttcatctacctctttccctaccactataagtcttcttcttaaactccataccattcgatcctataatcgtccctctctcattaaaaccctttctggtatctggtcatcacagtgtaggttcctggtttctgttaccaagcatgttgatggcttatttctgatcacctttggttatgaaggtgataagggtaggattgttggttgttggtgtcgaggtttctctagcatgtcctgttgtttcaagaaatatattgaggggagtgacatgggtacgccctactcctcctataacgacctcaatagggtctattcctccaccaaaaataggaacatgaagggtcccaacgttgaaagatctagtgttgttgttcacgtttttctggtctgtagccatcttgattctcctccaaaaatcttcataaatacgtcttctcgcagatggcaccaaatgttataggatgaatttagtgttggattttgtgtcctaaataaaatccatctcaatataattagatttactaattaataaagatcagaaatcacattttatgttgcatggttcagatgatttatttcatcattatgtttaatgtataaattttattaagtccaaaacatatatataaatatgtatatatcattgttcatgattatagtgtcgtcagcacaatggaatataatcatgattatatgttcaaaagtttaattcccat

SEQ ID NO: 329527 - DNA, 622 bp, Cannabis indica
aaacacagggtccaattggtaacttttgtaaaatagagggtccaaaatggtatttacccttaaatttacatattgttatttttttagaaatcgtatattattatttaattttgctaattatatttaaaatagattgagtaagcaattttattaaaaattatttaacaatttaattaagccatatagttttcttttggatgaaaaataatatagattcaacaaattttgttaaatataatataaagaaaaatgcattataattagcttttttttacgattttatctggtaagagtgtataggtaagagtgtatagtgaagaataaatctaataaataatttagtataaatccacacacattttggagacatgagaaaagataggctccaattattctattatgaatttgcaatgtaaaatgtattttgaaatatttgtatttaatattaaatcaagtttagcaatttttttttaatagttggtcttctatgattgattcctcactccgtgtatccacatatacgagctcttatagcttcggttattatccaaataacactacaaaaaatttacttttagtcacaacaaaatttgcatttaaaagtgaaaaagttgtaattaat

SEQ ID NO: 329528 - DNA, 560 bp, Cannabis indica
tttttttttaatttttttgtttcatttatttaattttacaaaaaaatttaatagtataagtttatgttgccaaggtacatgaaaaattttacatcaggattttcttgtgaattttttccaacaacacaatcaaccatttgatgttgcttgggagaaatttaattaattcgtagagagatgttatcacaatttctcaagtggatgccttactcttttcttgaataatgaattggataaagtaacaagaaaagacaattttgtgatcaatctcattactaaattaaattttcttacaaaaaatcttgatacaattgaacttccacaattaccctggagtagcctctccttgttcttagtagtttgatccagtgtcaatgcatagcattccaacttggctgataattttgaaaaatatagcatgttcacccagtataaaatctaaacccatggagttgaatccaagtagatactgagtgaaacattctccttctaaaaaattagtcctgaggtttcgtaatcaccgtgttgttaaagaaaacaaatagcccccttccaaaatc

SEQ ID NO: 329529 - DNA, 1295 bp, Cannabis indica
atgccgttaaaaataaacattaggcttaggtcgcttacaaacataaaactttgggtacttatgccgctatttacccttattattttaataaggtctgggtgggattgcagtgatgataatggttgttggtgtgacaatggtggtatagtggttatggccctagttgtaatgtccccgctttaagcctctattgggcattttcccacgaatttatggcacttatacatgaggacgtcacactggctgcttcttgaactaacgactagacctacagaacaaaatgaatatttccagcatgctttgtcctcactcgcacgcttccttaaaaaacttcttagaaggtcacccattctaaaattattccaggttaagcatgtttaactgtggagttctttcatgatggactgctagtaaacaagctgcatcttattgatataggtagtactaatcaatctatttaagtcctcttcaactctataattttatacctacaaattcttagaatcatcacacatgaccttttcgaggcgatgtgggattgtacagctcccgggtttttcccttacagatcacgggtgataagtcaatattttgtcttataaatatgaccaatttatgtaataatattcttaaattgattctttaaattattgattagagtaattataatttgttagactattttaaagaataatcatgtatttagagtcatttgaaaggatgttagcacattttggtagaaaatagtggaagccgacgagctcggttttacaaggtagagcttaattacaaatttagacgactttaaaggtagaattagacttagagctcaacatgaaagttgtatatctcgtttttagctttccaaaacatcttgaatcatccaattttgagttgtattaaagaagttatgaccaaaatactaatctgaatacgtgaatttttcgacagcaagttgttgtcgcggcgaggggaactcgtggtcgtggtgagagtaagaattctaccaaattttgaaattttatctaactaagatatttttaggagtatttatgagacttttagggtttgtttttagcaacttttgaactatgttttgatggagagaactcatgagaagaggagagtctacatctacgtctagtttttcttcttaaactcttttaattttcatttataattatgtttatgattatgtttgaaattatggagtagtcttcttttagttaagggttatttcaaaactcaagacatgaatttttaatttctattatgaatgttaatttttaatttcc

SEQ ID NO: 329530 - DNA, 619 bp, Cannabis indica
ggtaataaataaaagatttggacatccatataatattaatatttataacatgtagttatatatagtaggcattctaaataatttctgatgttgaatttaaaatttaagcatgtgtgttatcaactatttttaattttatttttaatactatgtattattcataatttattaaaaattagtataatgcttactataaatataatgtacaccttcatagatacatcttttacttataatttcttcataaaacagaaacactcttactgttaagggcaaaagtaacaccctactataaaattcgtgtatatatattaggtaatataagttcacaatagtaatgtaaattaaataagttttttcttttttcttttcctaaatctgttaagagtatttagtagataatatattagagaatatataaaatataaatatattataaataagtatattaattatagaaataaaattaatataagaaaatttcatattcatatagagaaagtgaataatcttgtaaagaagtataagagaattaatatcctattatatgaataaaataggttggtagtgtattaaagtatgaaatctttaatataaaattaccaagtacagtttacta

SEQ ID NO: 329531 - DNA, 770 bp, Cannabis indica
taaaaatatgtttttttttaaaaaaaaaaaaaaattattttatgaaacaaattcaaagggtaaccagttaccaaagggggaaaccatttagcttatactattttccctatatttttcttaattcttttctaaaattttccaataaaataatttttttgaaaaaaactcttaatttttaaaacttataccttaaaaaccataaaaatgaaaattctcttaacaacctcagaaatgatgtagttttcacatgtcactacaaaagagccgaccttcagtgacaaccttttagtcacaacataatttttttgtgattaattaatgtaacttttagtcaaacaaaaaattagttgtgactaaaatataatatttagatataagttgtcacaaatttagctttagtcacaacaagtattgtaactaaaaacacatttagtcacaataaattgtgattttagtgattaatactttagctaaagaccttttagtcacaacataatgataatttataactagctacaattttttcacttttagtcacaagttttgttataactaaaagtaaaaaatttatagtgaaccaaatctttacagcttgtaaacatattctcaaactaataatctcacaattgaaagaaaagatgttcagaggattctttcaatgccactatttttttttttttcaataccaactgtttggcacagagatattatatgttagactaagtataggctaagtgtgactttgtaatatgccacataagcaactgttt

SEQ ID NO: 329532 - DNA, 811 bp, Cannabis indica
caaattagacatatattttacaaattaaaaaaataaacatataataaacaaatataaattgaaaaaaaaaaaaacaacagactccaatatgaatagtgacacactaacagtgactgaaaataaaaaaaaaaaatatcaaaaaatatatatatatataaatataatacatatatataaaaattaatattcaactaatatatatatatatatatatatatatatgaaaagagaataagagtaataaaattatattaccggtgataggcggcggcagtagtagcaggcgaagcttcaagcgatggagaggaatcggggataaagagaagattttacagagagataagaagaagaggatgaattagggttaggtttttaaccattttttactgacgacaaagtcgttagtgatgaactttttactgacgaaaatgtcagtttattattcacgattttttcgttattgatagttttagagggaaaaatcccgccattttcaatgattttttttttcgaaaaataaaattttattagtgatgacattatcgttattaatagttaaagtggtttgttgatttgtaatttttactaaaatgaaaaaaagaaatttgtgttaattaatattggacggtgacctaacctaaatcgatctttccaaggctatataggtagggccctatgacaaagattacatttatatatatagggctagaaaatagtgtattattttcatatatagatatggtaaattagtaattttaaatcatgtcccttcaattttttttttgggaaattatatttgcacctcataaaa

SEQ ID NO: 329533 - DNA, 665 bp, Cannabis indica
tgtaaaattctggtgttgaatctttgattttgttctttttatattcaagcttaaatcaagataaaatcaatctaaatatgaaaaagataggttagacaagaacttgggcttacatgtggtacaagagaaatactagacacatgttcactggagtaatacaagtgagaaatgaatatcaatggtctgaaaagatccatgaaacttacaaaaatcatagagtaaatatttaagttgtacgctcgcttcattgagtacacaaaaaagttacattgatttaaagcatatgattatcgacttccaaatagagattttgtttttctccaagtattgcctatgaaagggatatgtacagagggaagttaaaccctaaattcattatgagctttttgatactaaagtaagtataatgtgtttttaatctccatgataagaaagtatgtatcagactcgcccctatttctgaggtatgatgatgttaagctcagacaaatttattatatgaaaaaaaacatcttgtcaaggttttcaactagaaaagaaagtaatatgtaatgagacgattccacaaagtggtatagagaaataactgttggaatttatttcaccaggatcttagatctactcacaagtatgttgtttaaccccctaaatatgaactttctaaa

SEQ ID NO: 329534 - DNA, 863 bp, Cannabis indica
gttttttttaaaaaaaaagggtaaaataggaagttcatgtaatcaatggaattaatttgtataaattagtggagggtctaaattttgatattggagattttattaggggcaaaaagtgaaatttccctttacattttgagaacaaaataatgtatacaagtttaatataatatgatgtttattttgaaaagaatgtcacatggtttatgaaccattttaagtgctatatttgtatgtgtaagtacaatattttttttctttatttttatttctcacaaaattagtatgtggttgaataaaatttttgtaattaattcaatcttggctaattagttatatatatatttttttttattttattgttttaaatattacaaattaaataaaaaaatattatgacaaatcatagaaatatattttcaaaattttaaaattaaaaaaaaaaagaatttattatgtatttttaacaaataaaaatattctattagctattttttttataaatattgtaattatggagaaaaaaattcaatatctatatagaaaatttttatagtaggtaccattgttttgttcttgtagcatagtgatattttcttgaccattgataaggatgctttttaaaagtataagataattattgtataacttaatgcattaaatcaaatatcttgatactaaaaaaactttacaaatataaaaaataaagtcataataatttataatttttataattttaatttttgataagatgttagggtatataaaaattattatgtaatataatattataatttagagaaagaaaatagagaagagatgagaaatttttttagtgttttattctaatgggtaatctccta

SEQ ID NO: 329535 - DNA, 801 bp, Cannabis indica
taagcataatacaacacatgaatctactgtacaataataatgaggaatagttttgtttgcaaataatatatgtgaagcatcttcagtaatgtaaacaatagaaaatggtccatatagggtagataacataagagaatccaatcatcctacaatgaaaaatattgacattacttacagcatagtgatgagtttatgcaagtttgaacatcattcaatattagaaattgaaaaatatgatcatgcactcttatgaagaatgaatatattattatttgttacaattgaatattgaattttgtttattttatttttattaagaattatagaaaactcctaaccattaccattttattaaattatcgtgttttatagcaatgctcaaagcccactatatatgctatatgaaatttttgggcaacatcatacacactataattgtacttttagtaattttcaatataaacataatttaaaggttaattaatgatgatgtagttataattgatctgtttacaactttttaaaaaatttataaactaaaatgtggaaatgagaaatcaaaatgtaacatgattttaaatatatttccattagatgactttagtatatttccattaattgactacttttaactactctagctcacattacatatatatctattctatataaagtgtggctatataactgaaattcttaatttatgagaaattcatgagtgacttttattttatttaataaaataataaaattttatttatatataataaaataataataaaacaaatcctattaatattt

SEQ ID NO: 329536 - DNA, 705 bp, Cannabis indica
gccattgatgatgatgatgatgccacccaacagactcagatatatatatatatatatatattttatatatgtattaactggaatgattaaattatttaaggaaagaatgaagcgtaattgtacgggaatgtatttattattgaacgtttgtaataccaaaagaaacagctcatcccattcaattcaattatttaataaaaaaattgactccaaaggttgccaaccactttcgttttgctccgtttcgtaaaatgaatatcaatggattttgattttcttctcttcacttcaccctttctttctctcttttactctctcttaattaaaatagaaaattacactagcaaagcttgtattttctttttaattttttttaaattcaaaactaacttttacaaaacaactcaaaactcgggacaagcattcgtccaactaagttcttttgtcaaactagtagtgcatgggttacatttagggtattcatccaattcaatccgtctattttactcataatttatttgattcacactaaatgtgaattttatattttaaatctgatccaatccaatccgcgttataactcaaattcaatcaatccataaaaatgtgcattggatcggttatgttgaattaataactttttaatatttatataaaaaattatcattttttttttttacataactaacaacaaaataaaacaaa

SEQ ID NO: 329537 - DNA, 844 bp, Cannabis indica
ctaagtattatatcattattgctataattaaatattggtctcatacaaattaattaaataacttttactaccaactgtaacacatgttcaattaatatatatgtgaaatagttccaatttctgctataaatactaggaaaagaatgatgatgaagatataaagatcaaaataatataataagaaaagaataatgatgaagatgatgaggttgattacagtaatgagtttggtagctggtgtgatggttgtggggtgctttgggcgactacaaccggatattcatctgaatttggtacctaattggcggtgtatgacacctggtgaatattgtcattgggcacaagacaagcaatgctgctcaggactgcattgtgaaggtgattggggatggggtgagaatcgaagatgtgtccatgatcaacactgtatagcacctggtcagccttgtgctatgcttacaaatccttgttgctaccccatgctgtgctcagctcactcaggaggcacatgtaaccctagattggccttagatgctcaacacaacaccttatcatcagaaactatataacaaggccgccacaagtactagtcaatattatatagtcatggtgtgtgttgtttgtttaattaagcaataataataataataatctcaaaagtgcatgcatgcatgcgctttgagacatttggtggcgcctggtttggtctatgtatgtgtcttataagctttgttttatttgtataattatgagtttgatcttgtttggtttcgtgtgatcttatttttgttttctggagtttaatttataaaaaaagggtttttctttttctatatatatatat

SEQ ID NO: 329538 - DNA, 645 bp, Cannabis indica
gtaaaataatttccaacagccaaaacaatatggtgattctgaaagtgccatggctccataatgagagtcattttcttatctcctgggcacctgaaagtaaccataaagagaccagtgtgatgatcagagatggtaactgggtaacgtcctttccaatggccgcacattttgatgtgaaatgttttgtgattaatttccttggaggacagtacgcgagcaaagagtgtgatatcatcatttccagggtctcttaaattgtctgaagtcggaagttcaaggacatctctctcaagatcagtaagagagatagaaggccgattagaagaagttcctttatgcatgaattcggtcattagaagtacaaagaacagggataagtcgaaggagataggatgaatgaaacaagggaaatggaataggaagagataaagtcagaaggaaattgaaaaaaactggaagaaactggagaaacctagaaaaaaactgcaatgaaacaagttagaaaaaaaaattagtgttgaaatagtagtctttgtaggagtgtaaattggtcaggtcgggtcggatctgatccggctatgatccgacctaatccaaatcatgtaaggatctacccctgccccgcctcgctagatgagatactct

SEQ ID NO: 329539 - DNA, 894 bp, Cannabis indica
caacatattaaaaaaaataaaaaaaaatgtatgaagttcacaagaaaaattaccaaattaattgattaagaccaaattaataaaactaataatcacaatcataaagaaaagaaaaaaaaaaacaaatagttgtagaaaaatgaatgaataaatagcaacaaaatcattgatgagaatccattaattaaccctttggaaggtactttatagatacaaaactattgttgacaaaattcaataatttgaccaatttacttgtaacttgtaatataatatacaataattgttggtgaccctttcaaaaaaattgaaataaaaaaattaattgttggtgatcaatctcataaattttcaaaactgtcaaaaacttaaaagttactaaatagaatatgtttggtgccataattaaaaataattttagtgaacaccataatcattgtttgtttgaaattattttcatagaacaatatttttaaaaacaaataattttgtgagagaaatttattttgtaagcggcataaaaattcagtcttttcttatttcactcagctgttttgtgatatctcgtatttaaaaacacaatttaaaaaaaaaatagaaaataataccaaacaaatcctaaaattgttaccaactaatctgctatttgaaattagtaactaatagttacctaactattgctgactaaatcaatatctattggaaaccattactaactcttcttagttatggaataaatagtcttcaaattattggtgcttaatttaattatatcttcaaaactattagtaactcacatataccaaactgttgatacaaatctaatgcagtttaaaatcattagtaactcatatagttaccaaatttttggtaaccaatttttttttttttttt

SEQ ID NO: 329540 - DNA, 749 bp, Cannabis indica
aacaatctcaatagtttgggggaaatttctaacggccaaaaaaagtttagggggcacgatttagtacatgttaaagttcgggggaaaattactaattagcctaattgattaattatagtctacgtgaaaaattaaaatagaggacaacccaattaattatccttctttcattttttttttgtaaggaaattaataatctttcttattaagcttaataattataataatatgtgattttggacaacaaatacaaaccgatcgaagctgccacagtacatgatgtcggtgtattaattaatattaatatatacatttggttcttctgtattccctgattttattttaaatcataaaatatttttgtgaacctacgtttttcgagttatcttagttttgctttggtcaagaaaaattgaagtttctccttctacaaaaagaaaaaaaaaaaaaaaaagaaatattgaagttttaaaaaatatacatatggtagatattattttgtactgtgttttctaaaagttttcattaaataatgactgtgttttgttatttttttttaatgagtatttttattggacatcaatagaacttgatattttttacaggtggtactacaaaattggttagtaatattctttaaaataattttttataaaattatatgagatctaatacaattaattacactaataataatgagggccggccctgaaaatatatgggtctaagacgaattaaattttgaggcc

SEQ ID NO: 329541 - DNA, 1759 bp, Cannabis indica
gtttccaacctagatagatggtttgccactttgttttctgtcccttttctgtcttggatttccaaatcgaactcttttagcaacaaaacccaacgaatgagcctcgatttagaatggattttggctatcaaatacttgattgtcgagtggtcagtgtacacaataaccttggtccccacagatatgacctaaatttctccatggcaaaaaccatagctggcagctctttcttagtaatggtgtagttaatttgggcatcaacaagagttttacttgcataaacaaatggactgaaagatcttgttcttccgctccccaagaatagctccaattgaaaaatcactagcataacacatgagttcaaagggcaatgaccaatcaggtgctacaatcacaggggccgtaacaagagatgtcttaaacttcaaaaatgcttcattacattcagcggtaaactcaaatggcctattttgttccagcaagctacacaagggtttagacaccttgaaaagtctttaatgaagcgcctataaaaacacgcgtgtccaaggaatcgtcttattccttttactatggtgggggctggtcatgaagtggcatttctcccaatttagcaccaagttggtttctccacatcttgttaacactttctccaaattctccaaacaaaccccaaatgagtccccataaataaagaaatcatccatgaatatctccaaaatactctcagccatataagagaaaatagccatcatacacctttggaaagtagcgagagcattgcacaatccaaatggcattctcctaaaggcaaaggagccatatggacaagtgaaggtggttttttctttgtcttccattgttatagaaatccgattgtaacctgaatatccgttacgaaagcaataaaactctttttaaacgatccaacatttggtcaataaatggaagcgggaaattgtccttccaagtagcattgtttagtttctgatagtccatgcacaccctccaactggtcatggttcaagtaggaatcaactaattattctcattagccaccaccatgactcctcctttcttaggcacacattgaacaggactaacccatgagctatccgagattgggtacacaataccataatctagccacttgatcacttcttttcgcaccacttccttcatgatagaattcaaccttcgttgatgctacagaattactacaaccagcttccaagagtatcttgtgcgtggaaatcgttgggctaataccccttatttaagccatagtccacctcattgatttcttatgcttttttaacacctgcaaggcaccttcatcttcaacttccaagtttgctactataataacttgcagtgtttcattctcccccaaatagggatactttagatgacttggcaagggtttcaactctaacttcggtggttctttgatagagggttttgaaggcttgaaattactttccttcaactccaaagattcaaagggattcttgaatttagggacaggttgcactggctccacccaagcaacttggttgtcttcatcttcactaaagtcttcaagctcatcaagagaactaatcaacttttcatttctccaagtttccttatgaaatattttagccacaatagactcagtcacacttaggtgggagcattcttctatctcatccataaatctcatagcattgaacacattaaaaggtgactttttggtcattcaccctcatagtgagct

SEQ ID NO: 329542 - DNA, 475 bp, Cannabis indica
tgaatcgtttactttacacgtcaatcaacatccaacccactcttgtgaacatccacacttccagattgaattgaattaaatagtgctaattgaattggatactatcatcaatatcaatatatcaatatatatatataaaggaaggtttaaaaccttccatgtggcagcttaattggaattttttactaatctctcttttcctaatttttctaatttttcttaattttctgatttaatatgtattttaaacctattaattatttatttattaaattttataatttattgcacttaaaaaactatcagaagaaggcgaggggaacgtttttggaacgtttttgttaatatttatgtacaaatgataaataatattgcaatataaaagaggtttagcttttactccaataactacttttaggttacaattagaatcaatatcaatatatcaatctatttatctatctatctatatata

SEQ ID NO: 329543 - DNA, 876 bp, Cannabis indica
gccagcttccgctctctctaatgaggcctttgataaggtcatggctaacgacctagtagggggtagttcattacgagattcctcgtaggaattatagagcgcataggcctcctttaagatgattggcatggttaaggtgccacattgaaatggggcgtgttgccgcttcatcaatactttctagatatcgaagcttactttgggttgtgcccgacacagcaaatgccaaagagtattaaatatctatcggtgatgtttatcttgtacaaggagctcggttagcctctgcctaccccttacgagattgatactattttgagttgaagtctgagccaaaacagagtaggactggctattttacttcagccagcttagtcattaatggctgggcgacaccaattgcaaggccatgtcaaaagtttgaaagtatgccaaaaaatactttatggcacaaggctttcgcgaaattgtgcaccatgagtttcagttggttccgctcctcggacgctccatccctaccttggaaataagggatagagaaaatcatatcctttctttgtcggttgaaaagagaaatattatctggttgaccagtgtggacaacttttggatgcatggcttgtatccccctattcttggggttgtgagaataccagctgctggtgtggcttgctctagagatgagcaaggccttgacttggatgatgaagaagcacctttgtcttgtattgtacagaatttggagaggagagagagggatctccgtaggcacctggcccaagggggtcaagttggtgacgcctctctttgtatcgggcataaaggcccagtttctgatagacctacatgccctatgcctatatctaggggcaaggg

SEQ ID NO: 329544 - DNA, 760 bp, Cannabis indica
actgccccccctcgctacaatgtgggtccgcccctgaaatcatggactaaataatgtgacaatacaaacaaaatatacacataaaatagagaatatagagatgatgaaaagaattacaactcaaaacaataagctacacataatatacaatatataaatacatacctatatatatatatgtaagagatgtgagagcaatctcagcaccacatacactacaagtgtataataagagaattaccaaacttgaacaaggtcttacacctttgtctaaaagcttatttcccttaccacaagtacttagggaaaagagaagaatggaaataactttctggatttatcaagcgtaaagtgtttctagcaatattcttttttgataaaaactagtgtcttcacaaatgaacaaaatatctctatttatagtatttgagggatcacatataaagatcaaaatttcttcactacacggctgttactagcactttaattgatgcttattaggataaaatttttggacaagagagttggaaacatgttcaataaatttatgtccatgtatggacaatatttcaaaatttgctccagatgaaggagagccgccataaaacaacttgttatcaaccataaaacaacagtttctagaaaatagttttgtaagtcctctccgagctaaatcgttctccaacgttccaatactcatttaaatgatataaatgagtattgtagtagtttttaatagctagaaacttatctcattaat

SEQ ID NO: 329545 - DNA, 511 bp, Cannabis indica
gttccaacgttaactgcaacaacgttgttttgctcttccagaatttcgtgatcatgatgatgatttgtcgttgtttcctcactactcgatgatgatattgatgatgagcttatcaatttcgattgatgatcatcatgatcatgatcccccatatgtatatatgttattgaaaagaaaaaaattaaaaaggaaaggaaaatattgaaagagaaatttataattgtaatgaatgaagaagaagaagaaatagggatataatctaatgatagttttggagtgaaaagggaataattattaatagagagaaagaaagagagagatagtagtgatgaagaagatttccaaacaagtcctcataattatttttattttaattaattatagccggctatagatatataccttctagtactacaccaatataagtcatatcttatataataatatatacatagacacacattattattcttttatttttatgtctccaatttcagcttttgttgctttc

SEQ ID NO: 329546 - DNA, 1071 bp, Cannabis indica
atgtggactaatataattaagtgttactaactcaggtactcgtatataataataattatataatcggtaatttatggtattatcattaggctataatgggatggacataatgtactcacactcggggctatgaacacactctaaaacgtctttggtcagtcttttgaagcaagataattaattctctcatattgagcatgtcggcccaattggcccataatttctcattaaaaaatgtttgtgctcttgattggtgattaaggtggaatggatgtggctatggtgtagagagaatagaagagtagtgttcattacacccaagatctcatttttccatgtgtgtagatcaaagaggtttatgaaatcaacaatggttcatagttcttgaagattcaataccaaatattaaatgaggcatgtttactaattgtaaagttaatgctctaaaattaaatgtttgatcttggttaatatgagcatgatttgttgttgattgttattgatataacatgcttcatgtgtactattcttaacaattggtatctagagttatcccatttgattttagggcttataattgggttcaaaagaaaattcaaatcattaattttttaacaatgataataatattaataaatagaatcagatattcaattataattggaacggatcggatttaaattttaaaaatccaatcaaatcgaattgattgttggattggatcgtacatctgatccaatgaataaccgaccaaaccgatctaatggtcatccaattatatttatatatttttaaaatatattttatttaaatgtatatactaattgatttcatatacatttaacacatgagattaaagaaaacaaaccttagatctagaatattaattctcatattcctaaacgccaataaaattgtcaatacgtattgaataaattttattttttaacagtattattatgagatcataagaatttgtttgattattaagttttaatgaaattaacttaaattgtagctaaatacattagatggatccaattcaatccaataaaaaaccagtcaatgcat

SEQ ID NO: 329547 - DNA, 881 bp, Cannabis indica
agtaattgtttatgtactaaacgatatctaccaaatcatgcctctcaaacttttacatatactagatcatgccccttgaacttttatccatgttagactttttttactaaaattagacaaaagtccttaaatccaacaagcttaatagttcagggggcattttttacgaccttaaaacttcagggggcatgatttggtaaatgtcatagtttgggaggtaaaaatcttaattagccttctcacttttaatgggaactacctctagcctcctacggtcagaaatttcgtctccaatccccatcattgcaggcctcgtcttcaagcctcgccgatgcaaatctcatctccaagtcctagtgccgttgtcaccaattcctacctgtcaagtacacaaaccttcttatgtcacaatctaataggaaaaataacatttcaagtttgtctcaatcattcatatgttcttaaaactatcacatgtggttcaagatttattttgttgctattaatatttgcatattaaggtttgtaagtttttttttttcttattttgtgtaaatttcatgaatataagttttgaattgattattttattttttaaaaaatattgttgctgatgtatttgtttaatattaattgtgcttatttaccaacaaattttgtgttttctcttcttttataagttgagtttttctatatatatgtatataaaggtacaactaccaatatttgttgttagtatttctaatttcttcttgatattgttctggtatttttttttgtcttgatttagtatttataatttagtatttcatttgtaaatttttaattgattttgttgatttatcgttgtttattagttgttttgtagtttcttattttat

SEQ ID NO: 329548 - DNA, 612 bp, Cannabis indica
tatacattaaacataatcatgaaataaatcatgtgaaccgtgcaacataaaatgcagtttctgatctttattaattagtaaatctgattatattgaaatgagttttatttagggcactaaacccaacaacttccacattcacaactctagttcttgtctatgtggaagacattcttgtgactggaagtgaacctactgttgtctcaaatctaatttctggggattgaaattcatcaaatgccatctggtttgcatctgtcacaatctaaatatgcccgtgatttacttgcaaaagcacaaatacaatacgccaagccattttccactccaatgaccaatggccttcgtctctcagcccatggaagtggaccaatgtctgatcctcaactatatcgctcaatagttggagcccttcagtatcttctcatcactagacctgacctgtcttttcgtgtcaataaggtctgtcaatttatgcataaacctctccctactcactggcttggtgtgaaacgcatactgagatatctgagtggcactctctctcacgggttgttgggattttttaccataaataaaacctattttaatataatctgatttgttatcaat

SEQ ID NO: 329549 - DNA, 818 bp, Cannabis indica
gataactaatcagattgtaaagagttttatttagggcataaaacccaacacatgacccatgcaagagccacccagattcctaggttaaaccctagaactggctttcccccttgacaaaaccctagaaccggccaggtcttaaataagacccctagggtcggctagggtgtgtttttgatcaaaatgtgtactttttcaactcaaacgtgttcttcatgactcaaagagtcaagaatcacaataaatgtaaaaattcaatctttttcatcaggaaatcacactacaatctaacatgaaatcaagaatgtatgaagcatgcaaacggtcaaacacaacaatggcaaattcaagaaaacaagtagagaaagggatttgaaagcttacccactagtgaaaaccgtcaaggaagctggtcgaaagcttggatcgtcgaaacaaagtgagaatcctaggatttgagggacttaggtccatcggtctcaaggggaagtgaagagcttctctcgtttccttttttaaagagagaaaataaagtgtgaaataaggagctttaccaaataaccttttatagtttttagtgtgctccactaatccaacatgcaccaaacaaccatgctacctgtaaaataaccatgctaaatattatcagttccctattgggaaacgtgagtagccaaattaaagaaaatattttataactgaaattattgtataaaacctgcccggttaagactccaacaatcaaaactaaagttggaaagttcctatccgtacaggcatctacacagggacttggggggcaaatattatcccaattt

SEQ ID NO: 329550 - DNA, 1200 bp, Cannabis indica
ctaaggcacgagaagagactgtgcccgaacaggaggctctgagcaaaaagaaaaagaaagaaggaaagacccctcctcgaaagtcaagtacctaccgagcaattatcacgaatagggaaaaccctaaaaagagactgctcgaccttccacccgagaggtaggaaagggaaaggctgtcctagtgtatcaggaacaggaaaattcttcagatgatgattctccttctctattcattcaataaaatgctccttcctacctgtagggtactttaacttactttcaaattgcattcgaatttgcttatattgtacttgtttttaatctttttattttattcatatgtagatatgtctcagaaggtgcttcaggctctgaacaagaaattggtgacaactctagccaggtaccttcggccaaacgaccaaaggtaaatgaggtgcagcccaaggagaagagttcaattgagtttcccactgagatctacgaggaggctgggttagaggtggagccactggctaggaagagctcaaaatctaagaatgctaaagggagaagcacagacggatctggactacctaaatctttaggtgctcctattgtgctgaaccctgaaactaaaaagagtaagcagatgcttcagttttaccaggaccggttccttcccgacgtgaacgatgagctgtccggaggcgatgatatgtccgtggagttgctgatgggtgggctaccaaaggaggcaactcgattaagtactttttctttggtttttatttcattattttatttgtgcaggttttgacttatctttgtgtagctcaacttgaagatggcctacacttattctcgatgtaaatacacggccttaaggactataacgaccaccacaaacttgtagaaggaggtggatgcaaccaagaaggaggtcgaggctacgaggccgaacctgggcgaggggaacaaacaacttttggccgccaacaagagagttgaggagctgcagaaggagattcaggatacaccatcatcgcccaacttgaagcggaagttgatgccctgaccaaagacattaatgccttgaaggatgagagggaaagtctccatactcttctctctacattaactcaagagatgactgatttggaagagagtgtcaggtcttggtgagtagagcgcgaagcactctaaaaggaggtggacaac

SEQ ID NO: 329551 - DNA, 1994 bp, Cannabis indica
gaaatttccctacatatccatggtaagttaaaaaattgtttgatgtgtcgaagaagtagcaacaaatcttttcgaaggtgagccttagggtttataaaatcctgtgatcaatccttagaaattttccaaaagcaaggatatgtcccttagaatagcttttaacagtaacacctcaatcatcattccacaataataagagtctaccgctactccccataagatccacatgaaatctattagcgtactttatttgtcttcgagtaccttctgcacagttatggtaaagcttactctcgtataggaagaccaagcttggggaatacttacaaataatagtctacaatgcattcaatgcatcggggttccccaaaccctgagcattccaacataaaatactcattgggcctggcaagtctacttcgcagattgcaccattaattcatcaaccaccataggagatacacctgattgagattttgcttccgctcttctcacgtccatacacatatcattatcacttttttgcttcaatccaatagaaacatagccaagagttggagctttagtcgattgagtcgcttgtgacatactaggaggattactactagtactcaacatagcttgtgtttatttatgtcgtttccaagtcttcttatgttgggctttggcaatgcattcgtaactcttctttagtagtttgcaaacttccaattcagattgtccaatggccttttccttctcaaattttttattctatcaggcaccaatggcttagttactagatcagagattcaaactaactttccaccacaatttggagagtggtggaattcaaacttacctccactgcattggtaacttgcggtcgtggggaattcacagttgctgccattgacaaatcagtaatgtcagcttggattgaaggaaactcctttggtatgtcattagcttttgagttagccaagttattttcctaacatagttcctcatccctctcccttccttcaaatactaagcattaaaatttctctgcatatgttctttgtgctagtccgatgcattgtacagtataggtgccccccaactgaccatgcagacaagtcttttggtcacttgctattcaccaagtttcacaaactttgcccaagttctgtcttgcgagggtaccatagtatgcatgtggtactaaaagaataactttaaaaagttaatttgtgagctagtggttcttagacacaataaacataatataaatattgttattattcattaattggtctttgttgctgtggaacttatgtaaattgaatctacaagcctatattacataaaattagcttctagatgtcaagtggctacccctgcttggctagtaaagcagaggccactatttaagaacagtgggagaccatgcccaaaagggtcgtgggtgctagcactttttctactctaatgttgagtagatagaaccgttaatttagagtagagttatgtaaggtggttactgatagtatttgcaaaggtgctctccattccagtatcttggtaggagaatgagctccatgttctcgttgtaccttcccagcttgtaggctcccttactatttatctttgtaagttgttaagggccttcccagttaggtccaaacactcttgctgctgagtttttagttcaggaacactcttcgtagcaccatgtctcttatgaataattttttgctcttaacatgtttgttaaaatgccttgctaccttttactagtaggcctacagctttaggttggccctgttttcttctttcttctacttcgtccagggactctgccagtagggtgctatttgtttatatttattggtcgataggttgttcttttgtgagcggtggcactgctctcagcaacattgcctcgtatccataagctagaacgaatggagttttacctagttgtgttgtgggttttatgcctaataaactctgtttcaatgtaatccaga

SEQ ID NO: 329552 - DNA, 779 bp, Cannabis indica
ttcaacccgcccaattaacagattgggcggtttgtaattttttcgggttatttcggtttgtaatttttatcggtttttttggttcagtttgggcgggttattcggtttaggcggtttacaaattttgttgtatagccctaattgtgagctagtttagtatgcaagaaagagagaaagagatattgttgtattggcctctggtgtgattaatcaaagtgtcacaagtgaagttgattgtaattgaagctatgcttcttaagtgattgtatcaagtacacataggtgatcaacatttgtaatttttttcttctagctcaataaagattggagccattggggctgttctggccgaggagtaggcaagtgattcatcatcactttgttcgaacctcgtaatttcttgtgtttgattctctctactttcttgtctaaattgttcattgttcattagtttgcatctggtttttcttactgatttgctactagtttgatcaactgattttgtgcattattagatttgcattgttcttgatcaattgtttgggttggtttatgcatgacgtacatgatcaagcattggtcacattaaatggtatcaaagctcagtcgaggggcatcaacaaaaaattgaatcaagaacacgaagaaaggaacaagaactgatctgcaatgacttttacacgatttgaagttgataaattcaatggcaccaatgactttggtctatggaggatcaaaatgaaagcttacttggtacatcaaggaattttagaggccat

SEQ ID NO: 329553 - DNA, 539 bp, Cannabis indica
cattttaatataagcaatcatctgatcaaggaaagtaggcttcactctttgcctgtcagctaacttttccctaccatttcttttatatatcttcactttttctgcaactaaccaaaaaactttaccatttagattgaagatgaccaccaaaaacatacatgcaaagttgattgagatgagtcataacaaaaatgctaaagcacagcttaatagtaataaaggtggtggcaattttggattggttggtcaatatgatttttggcatttttgaatgctcttgtgtaattgagtagtagcatttgcagtgtactataaaatatatatagatatatatatatatatcatcattagaaatcaatgattaaaagaggaaaaagtgagattaacaagaaaatggaacaagacttttatgctgatagatcatatgatcaaagaaacactatatatatactggattatgatgcagaaaaaaaattgaaatagcattccatctccctaattatgatgcagaattacagcctatatatatatatatatat

SEQ ID NO: 329554 - DNA, 1182 bp, Cannabis indica
catataaagtgtaccaaaacacttatttagagggtgtactagtgattgttcaatattatgtaacattttggtttgaggcaaaaccttctatttgatgaaaaggtcaaaatagtggtcattatttgaattgaagcattgaattaatttttatttttttcctacaagaaaagaagcaaaaaattgctctctaattttagaacaaaaaatatatgacacatactaagaaaaaaaagacaaaaagtggctttccttttcaatggcacgccaagcttgcatatatatatatatatatatatatatatttatttatatatattattggaggtgattaggagttaggatgaaataaaagtatcttatattgtaatagaaatgaattgattccatctaagcatctgccgggcaagactgaaatgatgattagaatcaaagtaagtaataaaaacaaagaatttgatatgaaaaattataaatatgaggctatgaatgcaccacgtgttatgtaaaattaccaatcaagattattatagagtaattttttgtttttatttttatgttttagattagaattattagagcacaactcaagggatctacgcaaagtaagttattggtttaattctcgtagctagtcagcttgttttgtttgttagaatatttatatacaaataatattattttaattaataatttattcatacataacataaaggctaagtgacaaatgaaatatattgtaaacaattaagtgacatcatatatgaagaatctaaaccacatgttatttgtccaataaaaatgcataatgtgaaaggatgatgtgatttgtgaagtgataatagagagttagcaaagggtaattttgtcataaatattttgaatgaagggctaaatggcaatgcaatcaaaattcatgtccctatttgtatcaatacattaactaggatgcggagattagatgttttgttttgattcgaggattgtttctcttttttatttcttgaacaatttttttttttttttagattttggaaaaattaaaatgataaaaaagagatagcttattcaggttctgttttgggtataaagggacaatgtttgtgcttagagtctacatagtttagggatttaaaaaaatttgttcatttttaaaattacacatttttttattaattttaaaaa

SEQ ID NO: 329555 - DNA, 554 bp, Cannabis indica
tatatatatatatatagatagagagagagagagagagatttacattgcccatgaatttcttgatatttttactgttgttggcgaaagcgtacatgagaacgatcggaacagagacgtagagaccgaacttggcgatttcaagaatgccctttgaagttcccacggaagacatgtttgaaacccctacgcaagttagaagaggaaggtgttttaatggagttaagagagggagagagggagacgaaggagaagaaagggaagagtttttgcagaggaagatcgagatacgtggaactcacctcagtcacacctactgcctagtattgggcctattgcttcaaacagtggccttcatcatattggcccaggcccattaatacatgggaaatatggtaaatttaagggtaaataaactctgtgttttgcaaaaagctactaattggatcatctgttttattaaatgataaaatagaccttatattttctaaaagggctattttcaaaaatatgggaaaaattattaaggttatgataaatatggcataaaaagtaaa

SEQ ID NO: 329556 - DNA, 576 bp, Cannabis indica
tgtgagtattcaaataaccaatatctagaaagattcctttacaaaaaaaaaatctagaaagattgtatttctaaaagattaaatttgaaaatgaaaaaaataataataactcggcctttggaaatttgtttctacaataatgtgattggttgaatactttttttcgtgggaagtgttaaaatttatgattatgtttgttaaaaaatactttgattagttagtcaattggaaaaaaaaaatacataaatgaatattttgatttttttgttttacaactaatagtataatttttattgataaaaaaaaatatattatcgtacaacttaaaaaatataagaataaataagggcataagtattcaagttttgaatttgtaagcgacataaacttaataattttttttttagtgtcataagtaccaatatttgtaaaattgtattttttttttattttcgtcggtacaggcttcgttttaaatttgttcaaaaaagattgggaattaactgatactaactgatgttagacaatttatatgtataaactgaaatatatgtatgtgtatataaaatgcggaat

SEQ ID NO: 329557 - DNA, 922 bp, Cannabis indica
atgctcttcaaaatataaaatgtaaaagaaaatggtaaaaatgaagagggttatggaatgaagagtgaagggtgtttgagatgaagagatgtttttgtagtgaagaggtgttttggtggtgaaaaggtgttttggtggtgaagaggtattttttgaaaatggtcttacaacactctatttataggcaaaatttagggattaaattaatcaaaatataataaataaattgattaatttaattagtgttgggaagagaagggataaatagagtatgtgtaagagtattggaaaaaattaatattttgtaaggatgtaaaaatagtgaaaggtagggtaaacataaaataggaatatttatttaggtgagaaaaattgagaaaataaaattgatatttatgtgtaaagtgtgggagaaaaatatgaatttttggattttatttgtaattttcggctgaacacatttaatcagccgtttttttcttcttttccttctgcaggtacacgctggcagtggaggcttcaaacgggatccacgcgcattaggggcagcaggcggatgtctcactcacgctccatagtctggggtgtattacacgcagggtctggtggcccttggatcaataggcggacgactctgattgggtcaaagagctgactgagattgagctttgcaaagggcctcatctgattttcttttgaaaattacacttttggctacatttctccaatatttcttcaatttaatcccaatctttttctaccaaatacacctaaaaatacataaaattaattagaaaactaaaaattaaaaataaataccacataacatattatcacaaattaattataaaaacacacaaaaacatataaaattacaataaagctaataaattaaaaaataattaaaaacttaagactaaac

SEQ ID NO: 329558 - DNA, 591 bp, Cannabis indica
cccaccaaacaccaccgatcgtcaaataacgtctcttcagcctcatcatccccaccaatcaagattccttcttcctcatcttccagacttatctgagcatactgctcattcaaatcaaaagtatcgtgactactagatgccatgaagaacaaaagacaacaaaacaaccttaaaaacttgcgagaacttttaccaacatgtcatacgacaagaccgctcttcaatcaactcttagtaccaacttcatatagaaaaattgcaaccatattgttctttttttgttttctacaaatagagctttcccatattaatgagcaattctttttatgtcccgcgtgtcctatatgagtgtagtgggatttaggggtttttatttgtaaaagaattacatatatatataaaaatagaagttgagtggggttacgtgccccacatgaccctgtttgtctccgccgatgatcttctacacaatctcacactagatgcaatagatgttaaatttgcaagcccagttctgaaaaatcagaataaaaaagtaacactcttatttttctaaaaaacgtgactgaaatttttaaaaattaaagaaaa

SEQ ID NO: 329559 - DNA, 1473 bp, Cannabis indica
ttcattttctctctgctaatatgctttgcccttgaagctctactcttggcccaagaacaccgcatagaacgcaagaataaagatcttgattcagcttctatcaatcttgccaactcaaatttcagaccaagaaacagcaaccagtcaacaaacaatcattggaacccctatgctaataatcgatctagcagcaacatgtcaaatgctccaccttataggccaccaatcccaaatggcagaggcaactcatttcaactcttttggctctgctggaaatccaaacaactcaactcgaggaacaggtcaaaacaactaaggttgtctgtcagatttgctctcgaactggccatattgcatccaaatgttaccaaagattcaaccctcaattccctggctatggatctcaaaatcaaggataccttgctgctatgcttgccactgcagaaacaatctgtgatgactcctggtacccagattctggggcaacacatcactgtactgctaattttggtaagtatcccatcagtgtaggtggtgacaagtttcactaccaaaatgaactaaccaaaggaacagttgaataatgtccatttgactggattgatgcacacatcaactatttttggactcatacactaaggggatcaaagtttcaagaagctaaagaataaaagtacaaggaacctataaataacattggcattaatttcttaagagatatgaacaactattgcacaaaaaggatcctaaataaagaaaaaagaattgagttcatcattcttaggctctctcccctgattctcagattcacaactaaagaaaactgataggtagttgcccactaacaagtggcttttacagcagaaaaagaaataatagagtgttatattgggagactaacattttcatttgatttctgtattcttgatttgtttatttcatttatgttgttctttttaattttataggttgtgttatattatttttattttatttaatattaatattaatatttttgttattgttattttatatttttcaattagcaattcaaaaaattaaaacatcaacacaaaaaaaggtcacaaagcaattcaaaaccaagacaagacgaactcatcatcatgaaagcactcaaaacttttcaatcaaaacaaatatcaacttatattcttctcctcatttgtttagtaaaatcagttcatggacaaatttctagtttatgtgcattcacaatgataaatagcttcaaccaatcctttaatacaatattagccaacaacagtccagtaattttgatatgcttcagttcagtaaccaaaaagaaataaatgaagaagattttaacaatgaggtcattagctgaaaattttgaattaaacagaagaggaaacatatactatttatcccgtcaattttattctgttttattctttttgaatttatttgcaatataaatcataaccctttttt

SEQ ID NO: 329560 - DNA, 669 bp, Cannabis indica
ttttttttaaaaaaagaaagaaacacattttatcttaggttagaaggaattaagaaaaacctagaaagctacttctctctccctcttcctctcaaattggcaagaaccagcaccaagctggaattttctcagctcaaaccagtgggtattagcaagaattagtgtgtcatttcaaggtatggaaccctagtctcttcctttttgtttattctttagtaaataggggttttgatttatgattgtagggtttctgatgttgtggtatcaattggtatttgtttagattctggaacttatctatggttatttaaggattgatttaggttatcattgtggattatattaaagttttggcaaggttcgagtttgagaactcaaactttgacctctaagggcatctttggattttgagttaattgttgagttgttttggttggtttgggtctatttgggtatttacaggtatactagagagttttgcaaagtttggttcgattttgaggtcatggggttgtttttcgggttcccagcacagaaccgaaattccggttctgggggacatgtagcaaccggtcaaccggttggtccccaggaaccggactgtcggttggggctttttcccgaaccctagttttcccgttttgtattgctgagggtgttagcatccta

SEQ ID NO: 329561 - DNA, 1060 bp, Cannabis indica
gtattgataaaaatgtaaaaaaagatgtcaattttgacatgaggtgtaaaaatctctaaaatcaatgtgttttattactactttaatgtgtcttattactattttaatgtgtcttaggcaatgcttctttaaaaaaacaataaactaatattaataatgagcaaatacatatataaccctgtaaagaattatattttaaatacaaaaaatacaagtcagtactgaagatcggataccacaaatattaatctaattctttaattgtaagtgggtccaaatcatatgacacatgttgaagaaagtacaataataggaatgacttttgtagaacaataataaacctcaatatctatatgtttactaatatattatatacagcgtaacttaatccgctgccgtctaaagcgggttggaatcgggagcctatagtatatattatatattgtatattaaagtgtatataaatattatatatgtgtgggtaagtaacatatataattgtgtaattaatatatatattatgtgtatatgatatatgatatatagatatatatgttacatgtatatgaaatatgtaacatatgaatttaatattgatattatgtgtatggttacatatgagatgttgataagtaacatacatattatattagttggcatagaattattatttgagagttataattcatgcatgggagttatatattaattttatattaatatatgagttacatagcatgataataatgttcacagtaataaaatggtgtttagtattattgtgagaattattatcatttattctgtgaataaaaaatattttgaattcttattcaatttggtggtgaacatctcactttatgagataataaaagatgacttttgagaagttacatcttttattggattataagagataattatttcatattatgagataagtaaaagtggactatgagagttacacttttattggatttgcattgtgatcataagcaagaacaatcaagatcatagtggatccaaacttgtgaaatgagtcataaattggaagagcaat

SEQ ID NO: 329562 - DNA, 790 bp, Cannabis indica
tattattccgctgcacccaatgcaaggtttactaagctttatatgtgtttatttcatcgttttagaagttaatatttagggtgttaatcaacatacttgtgagtagatctaagatcctggtaaaataatttccaacaaaaataccccaacctgctttgcttgggggtcgatttcatatcaaaaagccagttggtttcgtgcgaggatggctcgccctatccctgtgaagcataaggaatgaacatgtcagataaatatttgaggccctttaaagtgaattcagccatagcatagttgtgcttggcaatctcgagctgttgtctctcttcatcagcaggaacaggggttaggacaatgctggaaggcatagtatactcctccgcctcaggtgggatccccgagtaagagctgaggcccggagtatcaattcttctgggtttcttggtagcctcaaccgctaccatccttcctttgcgtttctggtccaccgaggtaagaatctcgccctcttcctcctcttcaacctccccgtcctcgtcaatcaagacaattttgcctaaggggacgctcgaagaggacctccaggggtcaccgtctggtccggtgcctaaggcaagacggggtcgggtctgtaggtctaggcaagagttgccaaaagctcgtccattggccttgctgcttcaagaaacaaagaaataagtgttagaaaattgacgagaaattacgcacacaagagcaaagcagtaaaactaatcctacctaaaaaatctaattcaaccctagcaaagtc

SEQ ID NO: 329563 - DNA, 1572 bp, Cannabis indica
ttattgggtgatttttttttttaaataaaaaaaataataaattataagatgttgtcacaggttagcatccatgtaattagttaaacttaaatataattaatacacttacgttgttgcaattaataacaaatttgttcatattgtttattttttttattaaaaattattttcaaattttgatatttactctaaaaatctgaagataaatagtagtataataaaatttttaaatcactattaaaaattattacaatgatcctaatgttattttcattaattccgaagataaatttaggacgaataataattttttttaattattattacaaagtataatagtaatttttgtttttatttaaatcactattatgctttcaaattttattaatgattatcactacattgaatattattaattttaaaattatgatattaaaaaaaactaaaataaaattaatatacgtgacttggcacgtaacatctatctagtatcattgtaagaaccaataagtccttttaagaaaattggtatgatcatctcatgaaattcttaatgaatcttttttgtttaataatattaagactatctaaaattaatattatattattatttttaaattattgacttgttgaccaaagtttttacaaaaaaaaatctcttctttaattatcgtgcattattttttttttttccttagtcatatagtatagtgaaattttaaaactaaacaaattttatttacttattatccccattaatgtagttttagtactacaataattaaataatatatctttcataccttttggttttggaatgaacatttttttttactttctaattctttctcaattgttacattcaaagttaaaattatacataataattattcgaacagtttgttactctcatcccctcttttgaaaaagaaacaaataatgtgttaaataatactaatacatttatctcaaaaagtaattaatataaaaattaattttacttaactaaattttatatatcatagaacaaaaaaaaaaaaaaaaacaaatttttcatgcatattttaatgttgaattaggtgtttatttatatacataatgtcaatactactatgcatgatataactataattatgttaacaactctatatactaaaaaactatatgtctattaaaattaatatataagtgaaaatagtattagaaagaatcagattacaattaatgatataatttgttaataaaaaatatcatttaaattcattcatcttttatatatacatacatatatataaattggtttcatttttaattaaagaaaagagtttctgttataaatttaattgatggaaaaaatagaatatttacataaactattactttttgtaaatcttttacacttttacatttaattttttatttatatttttactgtaaataccgcttagtttaatttagaaatcaccaattaattatgattaattatgggaaattatttatggatatttaaataattgtttatactgttattattgaattctgaaatgcattttatgtcatatagtgaatttc

SEQ ID NO: 329564 - DNA, 839 bp, Cannabis indica
gctagcttttcttgggcttaggtgtggtttggtcagggtcgtattttgctagtgcagttcgatttttgctactgtgattagtcttgtctatatggttttgagtgttttagtcttgtctctgcgatatagttttgagcatttttgtcttgtctttgtgacatggttttgagtgttttagtcttgttttattttgttttattgttggttcttccttgttcttcgatggctcgtcatcaaatcgttgttagtggtcaggaataacaagttctttgcgatcgaaagggttgttagtagtacaattacgtaccttatacaatagttgagtgctcaagttaaaatgttgaatgaacttgctggaacaatttctactgttgtgtcttttgaatgatggatgaaacagaataattgttcttaatgttaatgtgatgctgtaatcttttttatctggatttattttataatcttttttcatttgaatttattttagtttatttgttaaatgatcggagaattagatagttgatcatttatcttatttttttaattctaattttgataaaatgtcttgattagattgatgttggctatttattctgattgattattattactaaaattctattatttatttaaagaaaaaataaactaataaaatggtatataaagaccatactaaaatctatatatctatctatatatctatatatatatctatatatttatataaaggagaagtatgaggcgctgacgtggcgatctaaaatcactccaaaccatactaattattttttccttaattactctcactttttaatgtttttattagagtaaaatcattt

SEQ ID NO: 329565 - DNA, 902 bp, Cannabis indica
gttctactggtgttttttagttgttctactgctgttttgagttgttctgttttgtgttttactgatgttttataaaaatacagtatttttgaaaactttttcgtatgaaagtatatttcagtatttttgtaaattttcctaattaaataacttagaggcccagtctaaatccaaccggacacacctattgagcctaaggacttcatggacattggacactaatcagtacgtcggcccagacacccttcgatttaaaaagccatgaaacaaaatgaacggttggatttaaaacaggctggcatagaccaacctcgttgccgttcagatggaaatatatatatttttaatttcttctaaaaaataagagacaaagaaagaatctctcggctattgttttatatatttgtatgttttttttggaatttttataaaaaatactgacaaaaaatttataattttacgaggaaatttttaaaaatattattttttatgaaacaactgtaaaataataaaataagacaatttaaataatagtagaataattaaaaaataattgtaaaataaaataaaaatttaatatagtacattttaaaaaaataaaatattttttaaaaactattcatcccacaataaaaaattttaaaattttaaaatttaaatagtgtaaaaatatttttctccttaattgaagccaactcagtaatcaaagagctaaagatcgggaaaaggtcttttttttttgaatgaaagcgtcttagattaataagaaaggttagaccttacggtcattacataaaatgtttaataagatggtggataggacaggtcaaaaagtccaaaaatccgtcaaaggttttttttttaaaaaaaaaatttggaataaattgaagaatacttctttt

SEQ ID NO: 329566 - DNA, 506 bp, Cannabis indica
tgatccgtaaggaaaaatactggataatagagaaggttaataataacgaaggaatatctctgactagaatagtagtttctagacatgaagttgctcatgttaaacagattctaggtgtgtggatgaaattatgaaattatgcaataaagttttaagtgataatgaggcgtaagcagggcatgcatgtgctatgtgagttggtccatttaggtgagggaggggaagttcctcccgaacctgatggataagattctttgttagaatgtccgagggataggtggaacaccgataaagagaatgtcatcaaggtcatgtttgattactgttggaacaacttgtgatttccatgtcagaaaatttgtgcgatccaatctcacagtgagagatgcagaaagtgaatatgaacaaacagattccatgactgagctgttcgattcagaggtggaggagttgttgtcatgtgaagccatgggtgagaggagtcagtggcgattgataccatgtaa

SEQ ID NO: 329567 - DNA, 1063 bp, Cannabis indica
catcttatcccaaaattctaacataaagaaaagcttgattacctacttatgatcaaacctgccaaaacatcattacatttaaagtcctcataaaacacatctaatataaattaacttgatttaaaaagacgtataaattacattcgttaaaaccatgtcaaattagtttacttgtgtaatcacatctaaacttcatatacatggattattaaaactaagtttgaaataataaggcctcatcgaagacctcctcaacaaacatagttcaaagaacaatcctgcaattaactcaaccaaatttgcaaccactttaaatcttaacgaaaagaatatcaaacttaatataaagactaaatctaaaaacaaccatcttaaattgataccatccatttttattaacccagaagtaaataacctagttactaatatttctattatttattaaaaactattttcctaaaaacatagataatatatttgaccagaatacctcgaataaattgtgaaaatttgttgtatgcttgctgaacaattgtttatgctaaaaatgtggtgcgttttatatttatcaactcgcaagtgcacgactttttattgtagtgtagagattatgaagaataagatcgaatccatgagaattgcgtgagatcgaaaaaaaatacttatttaatataaattattaaaactctaacctagttcaaaaaataatgagggttttgataacaaaataaaataaagtatttaacgataaaaatgacagtaacagatatttttagtgatatttgggaatattattacggatttataatccacttaagtatataaaaataattatgtttatattgattctcataatataattagtaattaaagcaattattttttagcaaaaagtaaatttttcttcactttaaaattataatttctaagcattaaatgtgaaataatttaatgtaaatgtgtgatcatagttgtaaatacgtgtgtgtcgtgttagcttggtttatatttttttagactttttaaaatacggatcgtgtcgtgtcaggctataaaaaaatat

SEQ ID NO: 329568 - DNA, 783 bp, Cannabis indica
ctctgctctgtttctctgatttccaaactaaacatagtgaccgaattttcactttcaaccaaatccttattgttgattttgatcttgattttcttttcaaacgctgctcatcaaaaaaaaatgtttggttgaaagagaaaaacaatcgaaacaacaccatcaattgcaagaaaaactcattagtaaaaatcgttacccattggaaaaattgaaaacagtgtgactgaaatttagaggaagatgaacaaacttgatataatatgaaggttatatcgtcttccacaactcccttcctctatgtcgattgaaatcgatgggtaaaagaccaacccttttcctctcctccccttctccatgtctttccttccattgtttttttgatgatgtaattatgattgtaatggtaagcgtggatccaagtgagggaaacgactgaatcggaaaccctcctacttacactgaatgaagatttgcagaaaaaataaaaacgatcgtagattgaatcgtttgggtagtctcaatacaacttactcttcctactctatcggggttttttttttttttcgaatttggatgtttaacgtcgttaaccttccgtttaattttaataaaaaaactgaaaaaaaaaaagttaaaataaattgttaaatcaagaattaccgttaagtagtcacttttaatatataaagatatatgtaataacaatgagttattaagtacgggacaattccactcaataaattattcttattcagcaataacattttttattcctttctccgc

SEQ ID NO: 329569 - DNA, 691 bp, Cannabis indica
ttagataggcacttttaatatataaagatatgacaaactgcagcctatagttaatggaagaaacataattaatataaattgacatttagttagaataaatattggtgtatttcaattaacatatgaaggtcttcacaaatagtttaaaatttcaagactaaaatagtttgctttaaattttattcctttgcgttaaactattgaagagttttgaacttaccatatgaaacttataatcttgatgtttattaatttgtttttcctttaataagaaatcctacgttgctttttatttttttaatgaaagagatccctctaactctttttgatcaagtcaaatttaatttgcaaaatatatatatatatatatatatattataagatattattaaaaaattaatagtatgttaaagaactcatttttaatttcatacattttcactattcaatcaatcaaaactaaactaaaattttctcaaaagtgagagcaaaaataatgttcttatctaataaaattttgggtagttactcatatactatttttttacttttttttttctttaatttctctttgagtctctcttttttctctaatttttttttcttctttgtatatatataaatatatataataagtgtacatttttgtatctcattttttacagaaattaaacttgtttttttttttgtt

SEQ ID NO: 329570 - DNA, 1550 bp, Cannabis indica
caatattacaaaaatacttctaattggccaaataaacaaatatatagctcaaataaaaaattttacacaaataccacttacacaccttcaacccaggatccatgctttttgagcaactatcgcgcaaccacgcagaaacaaaaatcaaccaaaagagaaccaccattaatttcgacaacttcacctgagaagacaaccagaatcaatcaaaatagaagatgtttcgaattcatttaaaaaaaaaagtatagaaaaacgactacaaaactaaaattcaaccggaaatccagtttaatttgcataaactaatgtcctgactttaattttcaaatccatgaaagacagatctcaaaaagttgatctggagttctcaaacaatccaactcaagtataataataataataaaaaaatacatcaatactatagtaaaatatttatcctagtgtattttcgttgttttctaaatttctaatggtaaatttattcatattaaatcataaaaagacatgtagataaagttaagtacgtgaaaatactgttctaatttttaatgtttcacaaccgttgcattacagttgcataaaattttgctaacagttatttcttttgaaacattcctctgatgcaaccttcggccaaccacccagcaaccacctagaaactttcatctgactgaaaccttcgtctgatgcaaccttcgactaaccacccaacaaccacttgcaaccatcgtctgattgaaacattcgtttgatgcaactaccgcgcaaccacgcagcaaccaccctgtaaccatggtctgattgtgtaagtgatagtgtaagtggtattttggtaattaaaatcatataaaatgtataaatgttgtccacaccttatagaagtatttttgtaaataaagtgtcaatttatattttttatgtaataattccaaatttttatgatatatattcttaattttatttgagacattattttttttcaaaaatatataggtaataggtgcttgatgggaattcttcccttgtcgagtaatcttctcgctccgttctcgctttaaattaaacgagtattaaagcgaatatataataaatttaaaaaacgaatataactccccgcccccgtcccgtttaattcctactctttttgtatttcttttcaattaataacacaaagaccaacattgaattatcccttcaaatttttgtataaatatgataagaacatgaattaataatttaatgtcttaccatgttcttggaaattggaatacttactaaataaataaataataataataataatgaataattgactatataataaattgaacgtgtacaagagacgtgttactctatcatattatttttgtactagattctatatgttgttttgttagttcttgtaatgttgtaattcttattaagatatatattttaatttcatttcaaattatttatagatatatatatatatgcagtggtggattcagaattttaagcgagggagactaatttttttttttataaaacaggagggcaaaaataaa

SEQ ID NO: 329571 - DNA, 1027 bp, Cannabis indica
ttattaaattaaattggaaaaaatttaatttaattaactagctaaattaattttattaaagagaatatttaatattttagtatttaaaggaattacttaaaaaaaaaaagaatatcaaagttttcttattgagaaagttgagaatttgtaattatttatggaaaaagagataagtttcaaaggttgtttcagaaagctattattggtaaaatagaaagagcatatgtaagtgtcacatggtccatgagtatgttgagtttaagaaggactaaggtggtgcaactagggatcaaatcgcctcaaattccatcaattgccaagtttatgcatgaggcgtgaggagctccaagaggctcgagcctcatgctcttggaggccccaacaattgcctaaatgcacttagttttcgagagagactgaggcacccaactcctaaaccttgctagctatcaaggccttatggcctcccatactgccttacctactcaggcacctgttcctcactagctactaagccaccgaggcgctggagcctcacctgctgcccgaccgagctccatgagcatgttggcctgctccgcgcgtcaaacaacgtgcatgtatataatgctaaaagtgttagagcacatggatcatgtacatgaaccacctcagcaccaaggtcaataccacatccccttagcaccacctcgtcggtcccagaccaagctactttatcaccatttcaacgtgaccaatatgaccaacctagtatgaccaacataattaacatgaccaacgtgaccaatacgacaagcttgtaggggctatccttaaagaagcactttcgtgctagccacgttaagcactttgtgaagaagtactttcgtgctagtcatgtgtgctaggatttataaaatacttaagtaaagtaataaataatcactagatctaaatatattcctaaaagttctttaatatagaaaatcctaaatcataaatttatagaacctttgctaaattaaagaagaagatgatgataaaagat

SEQ ID NO: 329572 - DNA, 771 bp, Cannabis indica
acttggaatcttaattaatatgagtttattttagtgtaggcagtggagatacaatcatacaacaacatactataaaatatacctcgtataactctctagcaaattaatattaatactaatactaataaattgtacacgcgctagttattagttttttttttcttttttagtaacaatattttgtcttaatatagtaaataattaaataaaaacattggatatctttcaaacaaaagcacaacattcaatacaatctcaaatacaaatttatagaaataaaaaatataataagctatttatataattatttattttagttgggaaatttgatttttcatccatatataggctaataattttaaaataaacccaaattggaagactatagaaaaattagtgctcatttttcctttaatctaaaaatactcttaccatttgaaaagtcctcgttctgtccttctcgctttctcaatgagaaaaacccaactcccatcgtcgtcgtcattcccccttgcaattgatcggaggaacattttagagagttggacaagaaacactattttcgttttagttcattaatgggtaaatgattttatttaaatattattattaatcattttgataatttataatattatttaaatgcttgatctatggtttttttcgtatttttttgctaatgtttttagtaaaaattgaatttttttggtgagatttatgttcttttgggttatcagagattttttttttgtggaatgtctgatagtatac

SEQ ID NO: 329573 - DNA, 837 bp, Cannabis indica
tagtattagatcatataagcacagacctaactcgttatgtctaggctcaactctatgtgcatacaaaaataaagttaaaacatatattatcacgcgtaataagaagaaaaaaatgtaaataaatatttgaatcttattttgacattataaatcaaattaaaatttacagatgactcaaaataagtataacgtacataatcaaataaaaaaaaaaactaaaaaattctcttaaacaccgaattaaataaaagtctaccgaaatacacgtatactataaactttttctatataataattattattatttccttaaatggagccaagacaaaccttataaaagggaaaatggggaaccttacctcttgaaagggtatttatttatttatttatgtaatgagattttaaaatgaaaaatgaattatttgagttgtttgcctttgtttacctactttacatggtatggttgtaacttgtgttcatttattacttgagtgggtagatccatctaaaaatgttataatgatatctgccattttaatagttagaccagttaaaaacatttaggatattttctgctataatacaccaaacttttttttgtgtgtgagtgctgtgtttgggacctatgccatgtgatcccatttggtctttttttttatgctcttttatttaatttgcaaaaatacctaataaatatggaaaatttgtacaaattatgtcaattgtttcttcttcaaaaatccccttccatacatatctaactctcacttttagattcgatggggctttgtcaaattctgtacccacaaaaaaagaaaaaatgaaaaataaaaaatc

SEQ ID NO: 329574 - DNA, 648 bp, Cannabis indica
gtttgagatggaagtttcatacgtggttgacttccttaattaattaatattataagtaaattaattaattatttcacaatcacatggctctcttgatccattgcattagctaatttatttattttttcttagacaaaaaacacgtaattagagtcttgattgggaaatttcttagtattttcacattgtctaattattattatattaagaataattaattaattattaatcactcaattatgtctataaatacataactatatcccttgatgataaagatgtttaagtacaaaaggaagttatataagtaagcctgaaattatattgcccaagaaccttaatttacagaaaacagcttagtttcgaatactcaacgtgtcaaaccaaattctattttctttacttattttctctcttttaaaatgagaaaacctattacaaatctctttcttaattctatttacaattatatgaatcctatacattttcacatcccaataggcaatatttcttctttgtcaaattctgtaaactccaacattaataatagaggtacaaacctcctaccgaaatcgagattggcgacacctctttattcgcttcaagcttttttccaaattcaaactattgactataatatcagcctat

SEQ ID NO: 329575 - DNA, 826 bp, Cannabis indica
taaaaatctaaatttattttttattattaattaaattaaattaaagcataaataaatttaaattaaaaggttaaataaatacaaatttatattgctctaagtgtttgtatattatgtatttttttattaatattttatattttataatatgtgtttgtatttttctagtattttagtatatttttataattttttaagttatgttttatataataattagtatattgaataataaataatggaaacttttgcttttgcagctctctagagctggtgccatggcgaaaacaagggaaaaagtgcaagctaaatctctggttttaaggaagaagaagaagaagaaaggcccaaattctactgcagatgcaaagaaaacacgatcaatggaggaaattttgggtgtagaaccgctagagttttcggaggaggaaacagatctggaaaggaatttgcacggagatgatcgatcaaattccagttttcaacctctatcacctaggtcatcattgaaggaaattcaaaggcaggaggagatcagaacggatttttccatgtttttggaaaggaatcacagatgttcgactgctgttcagcaaggaataaaaacgaccccccctgttcttcgatctggaggcgtagtgaggaacctggaagcgagtttcgacaactcaaagcctgctgcacgaatcaaaataacccaagaggacattgaagaagaggtagcctactggaattcatcgattgtatgctatgtgttaggtgccaatccccctttatcagtcattgatggatttgcaaggagaatttggcaagacaaaattgataa

SEQ ID NO: 329576 - DNA, 1190 bp, Cannabis indica
aggtcccgactcccgattcgagtttgaattcaggttttggacccaatcccagggtgggtttgtgttcgagtctggatcctggctcggttacagttttgggactgggtctatgtcccggtcctggtcttgttcctgggtgctgatctgcttctagtttcggttccagtttcaagtcacaaggtatgggttcggggcgaggttcaggtccgggtttcggtctcgagtagggttcgagcctgggtcttgttttgggtttgggggttggtctaggtctcggtcccgttcaaagatctcggtccgattcaagtttaagtttcggtttttgttcccaagtgtgggtctctgggtcttggtatgtgtccgggttctgatttgagtttgagtttgggttcgcgttctggtctacatcctagatctagacaccgacaacgaattgggtccaaccatcgagtctcggatcccaggtcccgtggtgggtcctatgtccaggtttgggtctagggttaggtccccgatgcagatccaagttctatggcccaagttctaggcctagtttttgggtcctaggtcccagtccgggttcgggttcgggttcgggtcgagtctgactccaggtcccagttttggttcgagtacgagttcgcgtcccagttccagtctagctttgggttttgggtcccaggtctgagtctggttcttgggtccttagttcgaccccggtttcagggtctgggtctaggtcctagtcccggtctgggtccaagtcccggtctgggctcaagtcctggtatgggttttggtctgagtttgggtttaggtttgggtcctgttacagtcccaagtctgggttctcatcctagaccgggtttggattcaagtttgggtccgagtttaggtcgaagtacgggctcaggtttgagtctgggtttgggtcctggtctgagtctaggtcttttttcgggtccgggtcggggtcccaatctgggtcctagttaaggtctaggtcccggaccaggttctggtctgggtttcggtccgggttcaggtcttgagtttggttctaggttcgggtcttgattcgggttcgggtctcggtcctgggttccgatctcggcatgggtatgggtttagggtttagggtttaggtttagggtttagggtttagggtttagggtttagggttgatggta

SEQ ID NO: 329577 - DNA, 829 bp, Cannabis indica
aagcgatttactaattgagttgctcactatttagttaaatcatctcgatgattgcagctatatggaggtatggcttgcatgacttcacttgattttattttgaagaatattaattaatgaagttgcatattcctattgaaaaaaataataaaacaacataagtgatggttttgtgtagtttaatatttattagttttataaaaaatttacaggtatttgttttttattttaccatatctaatatataataagtctcttcgttacctccaacttgttttataattttacccttttaatatcttttatattaattttttcacaagattttattgtaattcaaaaacaactttcttatttaataaaaaattaattccttttatttatcttaattttcacatcttttacaactttacctttttaataccttttattttaattttttcactaaggattttattatagtattgttaattgtcatcctcaatactcaacacctcatgcttattcatcttacgtagattattgtatatttgtattagtttttattttcgtatattttttataagtatatgcattcacatttttctaaaacttacagcttaatattgcagaaattataagaaaaaattatggacttactatactaaacactgatattgggtcatgaactatttgttttgagaaatttacgcacagagacgaaattttaaaattaatattacaattatcgctaactatataattatgtaatatagcgttagttttttagtttttattagacacatatgcaatgtgcctattattctattttgttttcagcttttaatca

SEQ ID NO: 329578 - DNA, 857 bp, Cannabis indica
ttcaacttaaaacgaaaactaattcttacctcaagctctccctctttaatggttcactatccagcaactaacagggcttgaaccactaagtttctggttaaaaattgaagaaaaatgaatattaaaagtgagggttttgtcgcacgaaagagaggggagggtttcattatattttgaatctgatttaataaactttatatatataaacttactcataaattttaaataaataaataataataagataattataataagaataaaaactttattaataatagttattttatcatttcttaaccaataaaaaatctatatttttagggcattaggtcaaatctcaagtacctctaattaccccaataagtataataccaatttatcataatattttcaacaaaatcactagtttaatcggttatgacattttggccctcgattgagtttctaaggtcgccaaactgaaaagtatttatttaatccacaaacaactcatattatactcacacatgttatataaatctctgtaattaataaattatacttatttatccacttataaaaaatgaatgatttataataaaatagattagtagaattataatcccactcattacctgattagcttataatatatattaaaccttaattattaaccattaagcttatcagaatattacatatcttctctaaaaaaactgtaacgagtgaatcaaaaaactcaatgagcacaaataggaattcatgtatatatactcatgattgagactgatctactaatgatcatcattgtgatatgaataattcttttatggtaaatggcatgttaatgaaagatgttattacatatcagtcca

SEQ ID NO: 329579 - DNA, 432 bp, Cannabis indica
ttacatcttatgaagataattgatttctcagtatcagatttcaacatctaattccggtgactttgattaccccgatgaagacaataactctgatgacaacgataactcacacaacttctcagtgacttttcctgtggcgaggacaactccaacaactaattttctaataacttttccagcgaccattacaactcctaatgactgctccgactatatactatgagcaataattgtttttagaaatattgttaagtttatttataatattttgttggggtgtctaatttttaattcatttttcctaaaattactatattttgtgacattattgcaaatgtcagttgtatatacgaaaatataaaaactgtacgcgtttgcagcagcagaaagtaattctgctacagcagaactgaacaggcagaatataaaata

SEQ ID NO: 329580 - DNA, 513 bp, Cannabis indica
tcgagtttggagattcgactctatttttggatctcgggtcagggttagggtcgaggtctaggttggagttagggttcgagattgggtttgaggttcaagtccaggtcagagtttggggttggggtctggggtttgaggtacgggtcggggtcagagttggtgtccgaggtctgaggtctaggtcggggtttgggtgcttggatctgggttcaggaccgggactagggtcagggtcctggtccaagttcgggtctaggatatccgggtccgggtttgggcacagggttaggggttcagagtctgaggtccaagtcagggttcagttcggagtgtgggtcttagtcgggatttgggtatgggtcccaaggtataagttggggtcggagtccaaaatattaattatgaaaactaaaagttgtttaaaaaattgtcaaagtaattttctttatttcaaaattttaattctcaattaaaaaaattaaaaaaatgaaaatataattttatagaacatga

SEQ ID NO: 329581 - DNA, 554 bp, Cannabis indica
aaaccctacaaattggggctgagaatggagaaaaggggctgagaatgagctcaacataactgtagtatgatcttgagataaaaaatgaataatatgaaatttactaaaataacaatgaaaaattttacaatggaactaaaaggatgcatcgcacccttatctatttcggcatttaagagaattttttagtataatttttttcataatcgtgtacgttgtagttatttaagctatgttgcaaaattttgagacctgataattttatctgccgaaatagggtttaaacagtatgttgcaagagtgacgattttatttatacgaatgtgattaagttgttcattggatcacatccaatgtttttagacccatccaggtccaatccaattatacattggatgttggatttctccaaccgattcaattcaatattgtaggctcaacgaaccgaatcgaaccgatccaataaatcataggattagatcggttccatccaatggatgaatctctgtattggatggaatccatccaatacttttgatccaatattttttaga

SEQ ID NO: 329582 - DNA, 833 bp, Cannabis indica
tatgtcagggtattttgggtacaatatgtttcaaataaatataaaattagaggcaaatttggttaattgattaataaaagaggcatttttcaacttaccccaaatatttatttatttccaatttatgttcacaactcaaacactttggcccaacagctcacaactgagcacaactcaaaggatccggcccaattaaagacaaacactcatgaagcccaaatatgaaaggtaaacaaaaggtccctctcttcttaaaccaaaacccagatctgatcatacacgcctagctagggtttcatttttattcgtttaattgatttcagtgatcttatttcatgcttattaatttatcgaaattgaaatataaatttacattataccaaccattttctttatttcaaaattaaattaggatatatattaattaagtgtctatttaatattattataaagaatttatatatttttttctttataaaaacagaatttacgttcattttaaattaagtaattaatagcattaataacaagatatctatatttattatttaattaaataagatataagatagttttattattttatttgatttttctaaataacactaattaatacttaatattgaatttaaaatattattataacaatgatatttctatccggtacaaaacaatatctttttttttttctttacttttgttaattatgtaattaacaacaatgatattctatatatctatttcttgttggataagttaagtttaaaatttaaacgaatatacaataatcaattatatctttatatattaaaagtgtctatctaacggcattt

SEQ ID NO: 329583 - DNA, 532 bp, Cannabis indica
aactggtgtggaacaagctatcaatcacgggagaatcttcttcctggagcactgacgtgtttggtacttggagcttggcccacagatcaagcggggcacacttacccctaatgacttatttcgtggaactctgtgcgaagattggaatcactcatttctagttgattccattgtcttagaagtttctatccgggtggtacgcactatgtaagatgataaacgttgaagttccaagtcagaagaaattttgttctattatgtcgtgaagcatcaacccatgcgcaccaacaagcgcaagattgggttttacaaacttgagaaataaccagacatttgttgccctgtgagcacataatcacactctcctaacctccatgaggttgtctggcttagaaagttcttcaccagtcttggtgtagtacctggaatggaaaagcctctagtcctgctttgtgataacaatggagccatagccaacagtaaggaacctcggagccacagagaagtaagcatatagaaagaaaatatcata

SEQ ID NO: 329584 - DNA, 1306 bp, Cannabis indica
aaaaaagtttctcataaatttttagtcaagtatgttgtttgcaactaaaaaataagtaataatttagcttgtcacattactaaaaatattttttttttcaactcaaaaaagagacgcaacacactaagtgcatattggtatcataattaaaaaaatggtttttatttttaaaaataaaaaactattttttgagaacaattaaacatgtttggctatttttttgaaaacatatttcaaaaaataaaattacgaaaaataagaattttgagaataataaaatattgtttttttttattttaaaacggttactaagaatttttgtcccttaaattttagcatgtaccaaatcatgttccctaaaaattctcccttaattattgagattattggatttaaggatttttgtctaatttatgtactatactccccaaatttcgataccttctaaatcatacctatcgaactttgacaggtatcaaattatgctctgtgaactttcaaacatattagacttttcttaataaaattgggcaaaagtctttaaatcaaacaatctcaatagttcaagagaaatttttaacgactttaaaaattcagggagcatgatttggtacatgtcaaagttcgggaagtaaaaatcctaattaaccttttaaaaaataattcactttttgtcaatattatttctccactttatctcacattatatttctcatcattttctcacaatattttctctaccatcactttctctctccccactttctctttcatcactttctctctcaccattttctctctcatcaaggttgggtttaggtctgaggtctgattttgagattacgggtccaggtcagagtctcgggtcggggtctagatcgaggtcaagttttgttcatatcggtgtcttaaagtattgaagtatttttttttaaaaaaaaataaaaatgaagaatatttttagaaaacattaactgaacgcgacttgtattttgaatttttttttttttaaaaaaaaaaaacttgttctcatttctgaaaatacaataaaaaaaaataaaaaataatatcaaacatgctctaatatttttagataatctttttgacattggagataattagattcacaccatactatttggagtttgaactttgaagcatatacaagtagaacctctatccaagaatatacttgggactaagaaaataatattctaattgagaggttataactaaatagagttacacttgaaaaaaaaaacaaaatatcaatgtaacaaaattatcaataaacaattcttaatac

SEQ ID NO: 329585 - DNA, 871 bp, Cannabis indica
tccaaccttcgactgagagctaccaatcaaagaaacctccatgaattttataattattttttcaacgaattatttctactttccttctaaaatcaaagtttttactttcgtcaaacgaaaatcactttttggatctaaatcatcaggtccaaaaaattttcccaagaaaacaaacagagcttataagaaagtatgatgatttttgttttttgtatgttaatattttttttttaagtcaaagaaaaaactgagagtcgctggctatttatataatataaaaatatataaataatttaaaagctaaaattaataaagtaattatctaagggtctgagacgcgctcttttttaggtacaagtggattttcatgttgttttatactgtttttaaaaaaggactaaccagaatttgccacgtgtcattcatctgagaataccaagttgagctgcatatgtgtcatttttaactggattttaaaataataataataataattgtgatggtataattggaaaagataagtttttgtcctaatttataccaaactaaattaggtttttaatttaaaaagaaaaaaataaaaatagagcggggtcatgtgatgtgattcattgtgttgtgttaaatgctaataaactaaataattgaattgtcctttttacaattatggtggaataaaataatttaaaagacaataaataaataataaagattatcaaattgtaaatttgaatcctaggattctgaatttctgaatccactatccaacgtgtgatcaggaatccaacacgtatgtatatttcttttctcgtatattattcagaagtgtaatacactaatactgtacaaatacagtaatatttataaaaaa

SEQ ID NO: 329586 - DNA, 1167 bp, Cannabis indica
cggagctgtcgctatccaactccgaagtcacacgaatggtcggccttttagggaaagagaacaaggaagacgacggagccggagccggaaccggagctggaggaggaaggggaaggggaaggggagaggcaggaggagcagccttaaggggcggtggtggcgccattgccaagtccgccatgaatcgatttttgttttgggcacagatctttactctttactctctctccactgactgacccacccaaccagaaactccctatttctttctattttcactcctctttccttaaatatttcatgttggaaagggatcttttccttaattactgaaataattaatcaattttctttttttattatatatatatagttatataattaatcattttcaaagccatttaatttcatctatatataaatatttaattttaattatcttactattgaaaactactacacaacgtactgtaatttgtaattttaaattcatctatacgatcatatcaaatttgttcaacaaatgtagtggtggacaaaattccatacatatcagtggataaattttgaatggtttctaaggtatgatcttagtctattttaacactattacttgatagttaaaaaaaaaaaaaaaaacaaaataaaaatgatgtataccttacatgtacatgtataatttatgaagtttcttttacataatcatcaaataaacgaattattacttaaaaatatgcaagtgtttaccttttgttgaggtatcctaagaaaataaggtattgttgtttaaaattatgaagatatttatgttaataatgtacacttaaatatacttgtggagaagtattaaattaataaagaaaagcagtaaggattctatatagaatgttattaaaaagaattattgacaaaatttggtgtgtttttgtgatgaaaaaaacacagtacataacaagtaaagattaatattgtctaatagagaagtgcacaggtggatgtgtggtggtgggttgagcaggaataatgagaaagaagcgtgtgcagagccaagtcggcaatgatataaaagtatccatattttgtttttcaatgtcatttcttcactcactctatttttttgttttttttttctcaatctatataggtattattattattactattggg

SEQ ID NO: 329587 - DNA, 1671 bp, Cannabis indica
tcccaggaagcgtgcgagtgaggacaaagcacgctagaaacactcgtgttggtctgtagggtcagtcatcagaccatgaagcagccagaatggcataattgtgtatgagagccatttattctgtgggtgtaaggacccaatggaggcttgaagtggggacattacagcctatgtgtcgttgtgggtgagcatcggcagtccaaaatgcatgtgtttagcactccatttcaaattggtgcatcctcaaccgaaaataactaattttccaatatttgtgggatatttgcctagatataagaagattgttattgatatttatttatttgtaatatgttattcataaaaaagagtggtatacatgattttgttaatgagatatcccgatgtatgagggatcactaacaaaccatcgagcctatatatacatcaagtaggaggctaagaaaaggatcttctttttggcttcttctttttgagaccttttcctctctctcttttggattttctactcctagaaaattacttaaaggcaaccaagaacaccacattgattccttcatcttgttcattgagtccaccatacccaagcaatgccagaactcaaaacagcattgattcataccttttttccacaaatgattggtttattgttccgaagaactttacaacctttaatttatatcagatttatgaatatcaagtctcccatgagccttatattcataaatcttattaaggtttcatctagaaatcctttgttgtacttttatccacacactctggtgtgtcatatccaatcaataaaactacaattagacgtagccccattaccatcgtgaccttggggtgaactactataaatccctactgtctatttaatttattgtggttttattagttagattaattcaccgtggtcttcttttactttacgaccttcttagatcaattgacaaaaaattgcgtcaacagtttggtgctttccttgagagtgccacggtgaagatttgattattttccctttggaaaattcattaatttacctttttcacaacaatgatgagtaccaggaggaacaattttgaagaagatgttaaagttccaagggggggaagttaatcaacgccttggcgaaggaacctttgtcccaacacaaccacatggacagggaacatctaggggccgatagaagcgtcttatgccaccgatgccagaaattgagggacaggtccaagaatgtgaaagttcttcatcacaatctagagagctcccaccaatcagatccatgactgtgcatgatgcgcttcaagaaaataaagccctacgtgtccagttggcagaaagcttacgccacaacaaagaattctaagagcaagcgcagaggcatgtggaccaaaatcctcccaatccaccaagcataggggaccacaaacttcaccaaacattagagtacatgccagacatgcacataaccattgcatggagacggccatggcgcttgggccaaccatggaggtacccataaccaagcaaaccaagccaatgattctcttggcaataccaatttgtcattggagtacgtgcctgacacactcatgccactcatgcaccattgcatggagatagcccacatggtaaacaaaatttgtctccaaggccactccttagaga

SEQ ID NO: 329588 - DNA, 585 bp, Cannabis indica
ataagttccatattaattaacatatttttatatgacttataacaaattatacataaaatatatgcttgaaaagtagcattatatggataagatttggagagaataatattgaattatattattccaactactgatcaactattccctctcgtatgtatggataacataatatctttacaaacattgaaataatttttcgtacccaatttatattcatccaatattcttcatgtatttaaatggaaatatagaaaaaaaattatatataactttaattgtagcattgtattttctcataaaaaatgtagatgatgagtttatatatcgaaacattttcggttgattagatatagtggtcatttttcttgttattctatttacggacattataaattataattagtaatccttatattagtacaagaatgatttgactatatataggtcatgataatattggaaaatctcgaccaatatataatacgatacctaaatatataggaaattatatatctactagcaaaaattacgtgcgaggcacgcatactaaattttaagctagttttttttctatattatttgaaa

SEQ ID NO: 329589 - DNA, 1097 bp, Cannabis indica
gtacaaaaatatacacttggaaaatttttatttgtctaccttatattaatgatataatttttaaaaaataatttttaaaattaattttattttctttttttattttttttttctttttcttcttctttattcttcttcttcttttggtctcatcacttctctcttgtgcggctggaacgcccaactcccactatacaaaaacaatctgaaatgtcccaaactattgatggctgaggtgcacactggagccatcgtgcatggtggcagtcccaatttgacagtaaagatcggggacgagagccacgagatctaggagcttttgaaatagggaagtcaaagtcgaactttgtttagctcgttgggacccgaaggtggctccaacagagttgtggagcttgactccagcaagtatttcacaacaacaaaaatggcaatgagtcttcgaggtttaggttttgaggcctggaaatcatagttccatgaccctttatggatcatcgatattatagtgtgaattttttgcctagaaactcgagatcagtctcctataaaattgacacgtggatccaatcttcaagggatggatgagctattaattaatgactctccaagagttgacctcacttgaaccaaactcacgagatgatgcgaccttgacagagtctagttgcatactatgcctcacatagaataagataagcagaatcaaaagtgatttatacaagtcacgcatatattgaggcatatgcgatgactaggtagccttctcttgcgattgagtaagaaggataatttccttacataatgactagtccaaacgataaagcgtgtacggtaactcgataaggattcgtgtgtctcatgttgtcggcacatatgaggtgtccatatatgtgactcaaatagaacgcagacacctatgaggctcattagccctccttagaaaaatagaacacacccaaagcatgcgagcttatgcgataatatgaacaggcaactcgcaccctataggtcgcatacattgttgcacttattagaatagatttaaattgttcttcatttatttttttacgtttattctaatttaatattgttat

SEQ ID NO: 329590 - DNA, 751 bp, Cannabis indica
acagcacccccattcctggtttttgagaagctggaaataccctccataagactagatcaccaatttcaaacctctgaattttgactttggactggaaatgtttggcaatttttccttgatacatttggagttatacttttgactacgcacgaagttctttattagatccaaagattcttgaagtaatgtataattttgtgtagggtcataagtctctcttcaatgagaaggtattgtggtctacattaggattactgcttcacacccataggccattgaatacgggttgtgtcttgttgaggttctttctgtggttctgtatgcccagagaacttgtggaagttcctctgggcattgtcctttgcaggcctgaagcttcttcttcaatgttattttcaagatcttatttaaggcttcaacttgtccattcgcctgtggtctagccatagttgaaaaacttttgaggattatgtgtttgacaaaaaaattaatgaattgatcactatcaaattgttttcgattattagatacaattttatgtggaagtctataacgacataaaatgttttcgatgatgaagtccgcgaccttcttagtggttacggtgttcatagcctcaatttccatccacttagtaaagtaatcaataacaatgacggaaaatttgactcctccctttctagttggaagtgtgttggaattattttaccaggatctagatttattaccaagtatgtttgattaacatcct

SEQ ID NO: 329591 - DNA, 685 bp, Cannabis indica
  modified_base (50)..(50): a, c, t, g, unknown or other
ttatatataagtcatgccacggatctttgatattaaaaattggatattanaacaaaaaaaaaaaagtttgatgatcagctgatcaatatgttagacaaaattgaattaacaagctaccaggctttcataattgtttaaatactgtgtttggagttaataatttataacctaaaaaaaaaaaaaaatacttcaaaatttttttctaaattgagccagaaataaaggacaattattattattattattattttgtgtaagaaaaaattattagaaacaattattataattaatgtaaggttaaaaattattgtatcttatttttttgattgattaagttttggcacttagaatattttaatgtaattgttagccatgcatggatattaattcgcattaaattcaaaagaaacaacacaatgagaaaccctgcacaaccgaacaagatcaattaattagaaaatggaataaccagagactctttcagttttataataagagtcgatctattaattgggaaacatcagtcataaatatataaatatataaatagatagatagatgtattaattgctatcactcatattaattgttcattcctcatctccctttggtagatttatttagaataattatcttttttaccccctgtacttatgacactatactattatgccccttaatctat

SEQ ID NO: 329592 - DNA, 1046 bp, Cannabis indica
actcctagaacaggaattcactccttattactatagtggtaaaagattactccatttaaatctttatatgtgtccacgctcaccataccagtactgtatggaggtatatatatatataaataatatttgaatttcttttttcttttcatttatatattattattattattatttctcacgtacgtgtggatagcacattttcaggttatgtgtttagcttctcctttttaaatcttatttgagtgtttgttttggatagatgatctatatatcttcttcgattgggttctaatacaggattcaaaaatccctctttaatgtaattaatctgcagggagcgtgtgctaaaatgcgcaatgggagttttgggagtctggacttctgtctatggcatttgaaggaacttcaggtgtttatggactacactaccttttgcaatgccgttgatattgctgactttgttggaaaatgtcccagcttacagaaattattccttgatgtgagtatatatatatatacaaaaattattaatggttaatttatataattaattagtaatgtgtctgtttggttcttgtttatgtatatataaatatgtataggttaacaatttcaatttgattccggatctttactatgagctgcaccagaaaccattcattgaatcgttcagtacgattttcgaaaacttgaaggtgatgaagttgaaagggtttaaatttcttaaccaagaaatagatttggtgagaatgtttcttaaaaggtcacctgaaatggaagagatgattctggtgtacccaaagaacaaggaccatatgaatatgtacattgaccctggaaatgaagtcattttcaatcgcctctttcaagattggaaatgctctccaaaaatccaaattattgctcaagagaatgccaaagacaaaaccatctctcccactcatgtgaggaaatggtattgatgagctttttgatccattcattgattatggactagtaataataggagatcgagtactatctatcagtcctcaaccgatcgaacc

SEQ ID NO: 329593 - DNA, 470 bp, Cannabis indica
aacaacaagtaccataaaccattaaaaagagaaacatggttttgaagttaagaaatggaaaagaaacttataaccaactaatacgaaataaatagatgatactcaataacagacctaaaacaaactatgaaataatatttatcaaagcacaaaaaccatacctaaaagtgataaaccctaaaatatggcaagacaaaaaaaaaatgcaatacaaacatcaatcaaacgaggagtttgattcttctcctttttacaagaacaatatcaagaagaaaacgactcaacttaaagaagaagaaaatcgaaactggagatgtcttctttcttgaaggaatttcatcaaacatatggtaggtgaacctttgtatacatatatacacaaagacccagcttaaaatagaagaaaaatatgaaaaactgattctaaaacataaaaatcacaaataacagcaacacccataagaaagtta

SEQ ID NO: 329594 - DNA, 930 bp, Cannabis indica
ctttacaaaatagctgctacgtttttagatctacgtagctaacaaagtgaacaaactaccatcgcaacaaaatacaagttaaaaaaactaaaatttacaaaaaaaaaaaaacaaagccataaatttcatataaaacacaaaacctaataccattttgttacgctgcattctagcagctctggctccctttccattgtgatccttagtaattgtactcttcgctagaatcacagcacagattcaaaacttagaaaacaatcgtaccaataggtacactaataaacacacacattaactactataaaccaaatttcagtttgcgaaacgtaagatagtatccaaaaaacaaataaaccaaattcaaattcaaattcaagttctattattcatagttttgctagtgctaggtttgtaatacctttaagagaagttttgtgttcgtgacgggaagctttagaagcaaaacgagtcttgtgagctttgttgacttgatttcgcgaacctcccatggttggggcggagtacgggctgtggttgccgagagagacacgcagagtggaggaacggctagggaagttttataagtttaagttagggtgtctgtgtttcactttatgagtcgatactatatatatcaacctccatttaatattaaaaatcacctatataatttatcatttttttttatttacaccttataaaattataaatacacttcattattaaaaaatataaacttaaataatttttaaaaattattcataatatttcacattattttatattaatttcaataattattttaattttattttcaaaatttttttaactcatgtatataatttttatttttttcttaagaaaattttatataattttttatcgtaatatttaaaatataatttaattttagttaatatatatattttt

SEQ ID NO: 329595 - DNA, 768 bp, Cannabis indica
taattttttataaatatgtgtggattgtatgtgtgattgattatttttacatatcaatcaaaatctaatccgcatagtgtggatttttcaatttttcaatataatcgaatatgcataagtataaatattacacgttacatattgaattaaattaaatgatgcaaattaaattggataaagtattttatgaacaatcctaaaaattaaattattaaaaagcttcttatatttataataaggacacacatatctatattggattccaatgaacaatatttatgatttagcctttgtgatgttattgccaaacttagagatctaacaatattttatgtatactaatattagagcataagaagtttctttaagttaactaaaaaccaaataatctaattatgtgtgcaatattcaatgatctcacaactataacagcatcttttaacgcattaccctcaaaccgaagtttagttatacataccaaagtttcaaaaccacacgttaatactgttttgcttataaatcttaatttatgttagttttgcccgttaaaaacatttctacctaaaaaaataataataatataatgtgaaaaaaaatttaagaagggacatcacttttgcttctagtgtcatatttttcataattggaaaaattataattatagtagacattgtgtttgcttttaaatttttttgaataatttactatatataaaaatagcaaataccattttggatcttgtgttttgcaaaagttacagattggacc

SEQ ID NO: 329596 - DNA, 475 bp, Cannabis indica
tggcttaaagctggtgaaaaaaatactaagttttttcgtcgttttgcctctcaaagaaagaagaataacaccataaagttccttagagatgatcgagataatattgtctctgatcatgatgctatttataatttggtggtttcttatttctctgatttgttttgctctaagggttgtgatgctgaggctaccaacctaattctggattgccttggtcttcctttagaagatcttgattgtgctttcttggatgaacctttttctgttaaagaaattaggagagcccttttcaatctttctagggataaggtccctggacttgatggacttaatgcttacttttatcaaaaaaattggtccaccttggtgtttgattttgcgaatgctgtcttttcttgtcttattgagggtactgatttttttgttgttaataccactctcatttctctgattcctaagaagcaactgttggaat

SEQ ID NO: 329597 - DNA, 480 bp, Cannabis indica
gtggcagtgcttatgttaatagcggtagtgatgtggcatttatattaatggcatggcacgacaccttacattacaatgcaaaaaacaaagaggtacctacggatgttccaaagtagtaacgaaatgtatttttacgccaaaaataggactttggtatatatctactactccacataaaacttaagtatttatgctgcaaattactcctcaatttattatctaacttatgtttgagagagactcagttgaactcactgatattaatgacatatgaggctaaattagaatttgagcatctcatgtaatataatatttttctcttaattcaattcaatctaattaataattatatttaaaaaaaaaatggtttcacttaaccccaaaatttaaatttgggcggtaaaatccccaatactagtattttgttagcaatttaatattttcgtccattttaggtgttaagtgccatattggactgaa

SEQ ID NO: 329598 - DNA, 1682 bp, Cannabis indica
attaaattaaagagaaatgttgaaaggcgttgtagtacaaccaacaagctcaagcactctcttacgtgttaatattgttattggtctaattaagtatcagattctatataatttaatataataatttttagagagtatcactagctaatcgcaaggcaacacattttaagagtgctaggcactactagtgtccaatagcaattagcaatgctttaaattaaattaaatgggataatacaatttctcaactttcagcccaaaagctaaaataattgcaatacgttcttttgaaattgcgtagcaggagagacaatcatatttctcattttaaacccctacatatgctatatagtttatactacatgcacacctaaaattaaaaagaaaaaaaaagattggccgaaaactccttaataatagtatcaatcagattgaaaagatttttcaaaccagcatatattcaaagatacatctcataaacatgaaagttgtaaaaacaaaataacatataattaccaattttttggtgcaaaatcattgtatatataataaacaatataaaagaaataaaatacacaaatttaatacacatttttcaaatgcatgtgtcaacaaataaaaaatctaaaaaagttccttcaaactcttgtggaaatataagttgtcgtttggtaacaattttattttctaattttttaatcacaaaatgagtaaaattttgtttttaaaatatttttgtttttaaaaaacaaaaatacgttttcactacaagaattttggttattagcagcggaagaattagcagcggagcaaatccgccgctactaataggactaataccggcggacttctgctattaaatgttatttattttttttttgtataaaaatgtattagcggcggacccatgtactattagcggcgggggtccgccgctaatactaaaataaaaaaagtgcgggaaatttcccactcaaatattttcaaaattttttagcagcggactttttttgttattagcggcggaaacccgcccctaataataagaaatctgacaattttattattagcggcggaatcctattattaccagcggaatagtccgccgctaataatatcgtataaaaaaatgctatcagattcattttccttcattttcctttccttcatttttctttctcttctctctcaaaaatttctcctctacacccaccttcctcagcccttccccgcctccctccgcccaccctaaacccctctgccggagcaacaccaccacccttaacgatctaccagtgcaagtttttttaacagtaagttttctattttaacatttattatttatatatataaaaatatatttttaattctataaatatttttctaattttttttctaatattgttaaggtctctactatctcaaccactattggccgaaaccaaaagtgcacaaccgatgcatattttttagtaggtcagttttttcatctcttttttttccttacaacttataattttttgttaacaaaatagttatatatttgattatttttagtgtgaacgtttaaaatatatatggtttggttaagtgtgtatatatatatatttatatatatgtacgactaaaaaatctgaaaaaattagtatttttctatattaaatttatagtatatatgtatg

SEQ ID NO: 329599 - DNA, 717 bp, Cannabis indica
ttattattattattatatttgacgatgttagagctgatatttgtaaatatacgaaaaagataacatataaatcataacagactcgggagtcgagactcgctcggcacaagtcagtcgtcactggggctggccccatctctcaacgtattggtttcttcctcaccacccccataactacatgatttttcatttttgtatgtaacacgtggtaaaatgggtcctcagaagattccaccactaactccacacaaaatctattcatctacaataattaaaataaacaacaaaaatgaattctttcttcacttgttaacaagaaaatattaataacaaaagaagaaaaaaagaacacattacccatgtttgttcaaagttttgtaaagataaaccaaaatatcacagttaacttaagactgcatttacggttatgataagtaaaagtttagtttgcgtttctttctttcgttcaaaaaaattaataaataaataacgggattatagaaaagaaagcacattttaaaaagtaaaataaaaattgtattaccaaaaaagacaaggcacctaatttcatttcccactttcactctcactgtatattcctttttctattcacagttcaaaacaacatatattttttcttttttcccaaaaaccccccaaaaaaaagaaaaaagaaaatcccattatcttccatttttttttcttccaaaaaaaaaa

SEQ ID NO: 329600 - DNA, 1564 bp, Cannabis indica
caaaacaagggtctgccttgtgattttttctctctgctgggaccgaatggttctcttgctcaaagtggaaggttgaaccacttatttataatgttgttgttgttgttgtgtttgtttctgatctgagaaagtttgttgtaatctgttgagatattttcccttgaatagctgaaagttgttagagtcttgagatatttatttgcttccttttattgttaagaaataaaagacttaagcctaggaaaacagaaccgacaactctatgagttataatggtctgttgaggctttataaagaggtctaaattattttccttgtaactttatttatgggacaatagtatgggaatttatccaacactatatgtaaaacattatccaaataaaatatcaataattattaatgagaaatgataacttttttttatcatgaaaaggaaatatcttattaatcacaaataattgttatgcaagcagaaaaacaaatcctaattacaacatcctaataaaatctaaaatagttaagtctcttcagatcaaattcataatagttcttttaatcaaatccaaaatgtgtttatattagaacattaaataatccaatatacaaaattgaatatattatctagaaaacaattattttttgcattatgtcaggtcatattattttattgagaaattctaaagagtattaatggtatttagtacttttttatgtgttaatatttttgttggttcaactatatctataacatttatagaagaattttcatatagaaaacttccaataatatgtacaatttcttctgtttttttttttttaacaatttcttctgtttaatctatggattctcgtatcttattaatattggaccgaaccaaatatttgtgattaaacatatctcttataataaatagtatcagattttaaataaatatataaaatatgaatatgcatgtacaatctgatcaaatattatatatattattgatctccaacatagttctctcaataattgtcactctcaataattgtcactatatataataatataattatatttaaaaataaatattaagtgaagagaaatagaacaactagctagtatagttatatatatatatagtagaaatttttatttaagaatacatttggacaaaataaattatatattctaattgagatattataactaaatagaattacactagtataattaaccttttagttaatttacctcttattattattaatggatatcatttccaataacataaaataaataaatgacaaccatgatattagtgtcaaccatatctttctttttcctatgtaataattatatggtgaatgatctgaagagaaaaaaaaagtgatataagatatatatacttaaaaagatatgggattgaatttttggtatctccttcttgtcctcctggtaatttatataagaatattttatttaagaaaataaatttctatttaagaaaataaataaataaataattttttgataaatgaatatttaatattcattgaatctggacaaaatcaattatgt

SEQ ID NO: 329601 - DNA, 1352 bp, Cannabis indica
aaccaatctctatctatactttgaattttctttggaaacaccatgttaatttgggtcctcaagctccacttgatgtcttcaaccaattgacatttattcaccttgtttccatgcgaaatgaccctgtttctagcttgccaaacatggtaaacccctgctgctatagcagcagccagcaccaactttaaattttgagactcttgccctgccaatccaccgaaccagttgaggaagagacctggtttttgcctttcaatcaagccaatgtttgatttcatcaaagcagtaagaagataaacaacaatcaaaaaataaatgctgcttattttccatgttagagacacataaactgcagtggtcttgtgataagatgccatactttttcaacctctattttgttttcagccggttaagcattgctaaccaaagaatcacactatgttttggtgtgttcaaccgtgcccaaacctccttacaccatttcactcttggctgtggggtagtaaacagattatagccgaatactattgtatatcttccttgctaaaatgagtcacagtcggttaagttggtaagttgattcttgatggttacaagcttcttccaataccaactcgcatggatagaagcattgtaactccgccaattttgatctttgatgtagacactatgaacccatctaagccaaagactctcttggtggctcgagatagcccacacatacttactcatggctgccttgttccattcttccaactttttgatacctaatcccccttcagcttttggttggcacactctgtcccaagctacagctcctgcaccgtgaaacatggcttgccctttctatacgaatgctctacaaatggattcaattgccttcagaactttctttggcaaaatcactatttgactccaataggcttggatggctataagaactgagttgatcaatgtgattcgccctacaaaggagagattcctagaactccagctcctgattctagccgtcattttctctgctagaatttcacattccttccctgatatcttctttgcacaaatgggaatacccagataagtgaaaggaagattctgcctcatgtatcctgaaagctgcaagatcttgtttacacatctttgatccatgttgctacaataaattgcagttttacttggattaggatgaaggccagatgtgatagagaaaagcttcaaagcctgtaacatatacatcacacttttgagatcaccatggcaaaacaaaagaacatcatccgcaaaggccagatggttcaatttgagactagcacatctgtcatgaaaataaaaatcctctttgtctccaatct

SEQ ID NO: 329602 - DNA, 475 bp, Cannabis indica
ttaaaacgagaataacacacaatgtaacgtaatttaggcgttagtgaaccttagtccacgagacaatttcataagttttaagcagtggagttttatagctctagtatgtatttttcaggttgtgaaccatttgcatggaagatataatgtcatatttataggaaactatgcttatcgggccgggcaaatttgggtcgcattagagttttattccataaagcccactagtggggaaaatacatagtttaatattatattttgagctattgagcctagtaggtgagatccatttcctaaaagcagtctaccgtatgatgcatggtattgttaatagtgataggaggagtcgtgcctccttattaagaaagagaatgtcaaagtagtggtgtattccccaaataggttatctcctttttgttgtgtgcctttcttatgaagaatggttttggttaaaatttgttgaaatagcccctaa

SEQ ID NO: 329603 - DNA, 1010 bp, Cannabis indica
aaaagccatataaagtgtccatagttaattatgccatatttatcataaaaggtttaaaaaacccatactccacgtaaattctacttcattgttttcctcaaaatttgaaaaggatcaaacttgggctaacacaggttaggccccctaaggccttattagcccaatagcccaatatgtttatttattttttttgtaaggacccaaatttataaaatttaaatctaaaactatggaccaaaaatatcaagccttaatttaataggtttcttctatttagttgtctttttctcattaaaaaaaaagtctatttagttgtcctttacatatattcagagtcatataacatattgtttctatgataatatttcaaaaatataataataataaataaagctatggagatgcttttacaattatttttttagatttttgttaattttattatagtattgtacataggcatggctctatttattttattttaacatgttaggatggattatatgaatgtgataatgataatgaaagtgtcccacaatatagaaatcaaaatgtagatgtgagaataataatttactttatttattgccaattaattttgtttaaaaatatatataaattatagatcttaaacttgttagtaacaccacaaacaagatgattttcactaaatactaattattttttttaaaataatatgttaactttataataccgactaatcgtataagaaggaaataaaattcaaataaaataaaaaatttaacaaaaaaaactatttagcctactaattatgaaataagtgaaaaagaactgtaaatcacttgaataattaaataaaatacaattctaattctaagatcactctatcccaattccaactatagattataattctatctctttccaccaaattaatcacacattaatttctctttttaggagacacaaaatagcatttaccatatattttataaattaattttccatttatatatacatatatatat

SEQ ID NO: 329604 - DNA, 780 bp, Cannabis indica
acttgattttgtgattatttgtggtctctctacattgtttatacattttgataattgtgatgagtagatattttattttaaaagctaactttgcaagaatttttattaaactaagggtgtccttttgatattattagttgttttcctattaggctttataagctcatcccctattttctctcattctacaaacttagtttgatgctagtagatgaggatggtaccgttgaagaagaaagtcattattagtttcatcttattttactttattaaacttctaatgaaactaattttgtatttaaactggaatggacggtctgaatgagttaaaattagctaagtgtcacttaaaaatgaaaaatgatggatgctatagatattattttggtattttattaagttattaaatttctctattcggtgactacttaactttgggaatattttgttcttttatattaataagtggtcttgattttattactaatattttttattaatataggagttaatccatttttttttaaattagtcttctttgatatatataaatttaaggattatttataagtgttatttttaaacaatagtcaaagtgtgatcttttaactaccgatattacatatttgtcacggtctatgacacacacaatatatttatatatttaatataaattaatgcatgttctatatatctattctatataaagtgtgtctatataactaaaattcttggtttttgagaaatttatgggtgacttttaatttttatttaataaaa

SEQ ID NO: 329605 - DNA, 1060 bp, Cannabis indica
tgaacctaattaaaaaaaaactatacgtgcattacacggaacattaatataaatgtataaatttaaatgtcataatgcatactaatagccgaattaataataataataataataataataataataataataataataataataataataagttgatttctattgagaaaatgacctaaaccaaacactaggtacaatcttattcttaccctctattttgattatgacttcacccacttagatataaactatattgaaatgaagcctaaactattggagataaataataacctatcactaaattaaatttaaaagcaactcatcaacaaaaataaatattgatatatttcttatttaacattattaactaccaccagggtcgtgtcatttttattatttatatatttacatgtcagataatttgttgtgtgatgtgattaaagaaatagaaattcgatcatggaaagaaaaaaccaataatatatataagctttgttggattctaaccagaaaagctgtgagaatcatacatgagatgagtgatcagagtgagagagatatgtctatatctatatctgtagagaaatgctaaaaggtattattagtgtctaatacattttcatttgtcaataaaactattagtgtaattaagtatcagatcccatataatttaatataatagcttttaaaccacttgagactaggctagctcaagtagctagagggtgcgtgtgttggaagtcctgggtttgaatttcaaattatacaatgtaatatataaacacttaaatcaaaaagaaaaaaataatttttatagagaataactctaagcaatcataaaataacacgtctagaaagtgctaaagacgattggtgcccaataacaatgctcatgtgtataaacagagagttttgttggttgatttgtgagtggatgtgtatatctatgaatgcgtcccatttctgtagagctagatagctatagagaaagcgtgacaaagtaatattgcagtgtctcaaaaaattacttgtaatgccaaattggaaatatatataattt

SEQ ID NO: 329606 - DNA, 902 bp, Cannabis indica
gtatatttaagtattaatgattattattaactttatagctagtttacacttgtgcattagagtataaataacaaaattaaggctaaattaatactaaaatatacaccatccattggagatagtcttataaatatttcattgccaagttggcatttgttgcttgacttctaaattattgttattattattattattattattattattattattattattattattattattattattattatatacatctgaaaacaaaaagaaaaaaaagaaagaaagagaaaatgatgatcgatgaaagaatttcacaatacatcaattatttttatttttaaaatttaataatattttaatttaaaaagccaacggttaccaataattaataatttttagcctaaatacccctatgttaatctcagccatttgatcatgtaacttttcaatctaacggctacaatataatcacggattgtatatccacaaatatcataataggataaaatcgtatccctatatatatttgaagtgcgcttcctaaaaacttgtaaagatctacttttttctccactaacgttaatagtaatgttagtgtacgtactctgtcttctatatatatatatttgtatcattataggaagaacataatatacatgcattgctagcttttatatacacatatatatatacgataactttaagagaattgttggattatttattattattttgctatttttgttttcctgattcttttattgtaattagaagacctgttgaatcttgggggattactttgtaaatccttaaggacagtgtcttgtttgcacgcctcagttgttatcattttattattgtatttgatattttctaacaatcttaaggatttatggatcccaatgcta

SEQ ID NO: 329607 - DNA, 791 bp, Cannabis indica
tattacattcacacatgctatataaatctccgtaattaacaaattacgattatttactcacttatagcaaaatttaaattttatgctgaaataaattagtaggatcataatcccacttattacctgattaattcataatataaatataaaccctaattatttaccattaggcttatcgggatattacactcttgttggtgattagattatcatctacgtacagcaaccgatacaaaatttctctatttcttttttcagaaatatatacaagagtcaaacttacttctcttcaaacctatcgttgtcacataatcatcaaatctcatgttccactgtctcagagattgtttcaaaccatacagggacttctgcaacaagcacactcagtgttccttttctaacctcttcaaatccttcaggttgtttcattagaattctttcatccagatgttcatacagaaaagcattcttcacatctaattgttctagtttgaggtcttgacatgcaacaagtgccaacaaaattctaatcgatatgtgcttaacaactggagaaaatacctttattagattaagcatccaatgactttactatctttcagtattggtattacatggttggtgttgcccctgaattcgcccaaaatacgtggaccagtcgaaaagggacacgtggatcaggtaacttgtaaatatttgataagtctttgtacgccacaaggaagcaccctgggcataggtcccggagggggcatccggagtacaaggtactcccggaagctcgcatagca

SEQ ID NO: 329608 - DNA, 1090 bp, Cannabis indica
ttttttttttttttactgtaaattatataaaaactttcttttctatatggcttggctaagcaagaacattgtatttgtaccaatatatttatttaattaattattagttccttcaagaacagtttacttataagctaatcaataaaggaagtaagccctttaatttagaacaataaaaagtaagctttttaatttgagcttttgatatgtggctgcaaataatcttgcgtggtcatgacaatatcgcaagttacagtttgggattaattatataataacaaggaaacaattacctgtggacattttattggaattaggaaagaacaatttgtctacatacaaaattaatacgctaattagggttttttctctctaaattttgacatttatcaaatcattcttacttaactttttttaccgttaaaaatttcccgtgaactattgagattgttagatttaaggatttttgtctaatttcattcaattttactgtttcagtgattgtttatgtactaaaccatgttcccctgactttgatatctaccaaatcatgtccctcgaattttgatatatgctaaatcatgccctctgaaatttcattcatgttagaatttttttactaaaattggacaaaagtccttaaatctaacaatctaatagttcagggggaatttttaacggctaaaaaaattcaggaagcataatttggtacatgtcaaagttcggggagaaaaaattctaattaaccaaattaatatatcaaactaagattatagtacatcaatggtttctctcttttttttaattatatataataaagggacaaaatcaattctatatatgtatttatatatatataaaagacattcacattttttttaaggaaaaatttaataaaacatgcttacattacgtaaaaaatataacctaaactaaagttagtcactactggtagtataagtattttttatattttctcaaattatctttctcaattcaaaaaactcactaaaatggtaatgttcccacttcaagctttaattgggcccttacacccacaaaatgatggctcttatacacgagtacgtca

SEQ ID NO: 329609 - DNA, 437 bp, Cannabis indica
tatttttgtgataaatttttatttgaggactaaaatataagattattttttaaaataaaataaaataagggttagaatgtaaaaaaaaaaatataattttacactaaattgatgtaaattcaaaaattaacaccattaatgatgtagaatccgataaatcatttggtgtcattggaatgaaatagtgtaaattttacaccaatttggaaaatagtacaccattggagatgctcttaaagagttattttggtaaactcctatatggttttacatttaatagagttttttagtttttttttttttttcatgattgcattaagttttaattatttaggatcatatataaataatggtagagttggcccataaattaaaagggagaccaataaatgtaaaaaaagtatttattttttatttttaattaattttacagtggc

SEQ ID NO: 329610 - DNA, 614 bp, Cannabis indica
aaaaaaaaattaaaaaatagtatctaaggtaataatttccctaaaataaaaataatgatgtttagtaattaatattaaaataatctttattaaaactgctatatatgtgtatcttaattagtttgtactacccttttcaaaaaaaaaaagaaaaatagttcctagtacgtactgatgattaattaattaaatatataattaaacgagaggagtataaactaattaaagtaaaattaagagggtattataaatgccaactattaatttgggcattaaaatttgccaactaattttatcatattaattttaatatattatttttaaaataataatacatttctatatattttgagtaatgtgcagtctttaattttgtaaattcgatatttcctatctcacgtcctgtccaaatttctattcctaagtcctaaccacattatcatgcaaaattatggtcattattaattaattaaggtcatggattagtatatatagttaattatatatttatactttagtatgtatatctttatatattaaaagtgtatacagaatattctgttaaatttaacgattaggtttgatctcctgttaacaaataaacccaataatta

SEQ ID NO: 329611 - DNA, 553 bp, Cannabis indica
gattatgctctgctacagaaaggaatcaagggctagagatctgaatggaaggagtcataatattccgctgcacccaatggaaggttttcttaaactcttatgtgtttatttcattgttttagaattcatattaggatgttaataaaacatacttggtagtaaatctagatcctagtaaaataatttccaacaaaaacaactataaattgcctctaatatcttttagaagcgacatgtcacccctaaaaggtcgcctttaataattcgcgcctaaaagtattattaggggcgacaaaaaagtcgcatgtatgtcgcccctaaaagtaaaacacgaatttttattttttacttttagaggcggcaatgtcacccctaatacccataatatcacccctaaaaagtgttgtcaaaattgttatatctgacttgtcgccccaaaaaaattttatattaaaaaaaatatataatttatattatttaaaatattgatttttaatttattaaaaataattacaataacaaataaaattaaaaataataattaatatcaaat

SEQ ID NO: 329612 - DNA, 868 bp, Cannabis indica
cgagccatgttacgaaacctaaaatttgatcacacataataatggtagttataatatttatatatattatctcactatatctgacaaactatatgtgtataacgtgcatttggagcgtaagtcaattgcttaataatttaattaatatacataatgagaaaacacgttgacattgttcatgcatttgcaattaaataataatgacatagctagcttcattctgaagagtaaatgtgcaatagttgttgtaccgtatgtgatgaagtttatttatttacttattgagaaaagaatagaatctgtattactatacctaagataactattaatgaccgaagtatttatttatgtttgtgttaatattaatatttgaataaataatattataagaagactgcaccactctaacacgcctccaatcatcatttagttttagtggctagctcgtaacatatatgaataaatatatatatatatatatattatatattaaatgatattcatggatgtaagtcaaaggttaagaggttctttcctgctctcatgttgtgactaaactatatgtagtaccagctaagatctccagaaatagttctatattttgaaaattaattgataacgttacctggaagtggcacatacaacgtacgtatgtataggccattagcagtatattgggcgctagctttcttttaaaccccactaatcaaatttgtttagaagaatacataaatatagatttcaaatatttgtaaataatatgtttatataaacttccaatatactaggtaattgttacgtgtcaagccacgtagtgttaattttatttaatattttatttttttatttgaattaataattaaaatag

SEQ ID NO: 329613 - DNA, 930 bp, Cannabis indica
aaacaataagttaaaaaccaagtctacatagtaggagacttggatgggtcttcttggtctacctcaacctcatcttcctcattaacctcttcttttctgttttctcgcagaaagcaagcatatcttcagctccttgacccagaaagctgaagtctatctcgggattggctaaccaggcttgatagatggtgcttctggcaattctattgaccctgtttttggtatcaactttggcatcttcaagttttttgtcatcctcggcctggatggtcttgatggaattttcaagctctttgatcttcttctagttagcttgacgttgcttttcagcttcctcctttaccttagaaagctcagactctgactcgttccactttttggacatggcatctcgatgctctctagtctgacgaagctttgtctcaagcattttaactctctaatgccctctatgttgagcggcaaaggatagtagagatgcctctgaggaatgaagacacgaaataagaaagaggtacaaagacgaggaggaaaaaggaacaaaaagaaaaaaaggactaacctgatgcatgagatcataacttttttgcaccagactctcaaaattgccctttgttagtagatccagtagctggattcaaagccttgataacgctaccaaccgttggtagcatgtagcgagaaaagttgtgaaccttcagtcctagctttaaggggcaaggggcaggagggctcgagaagaaccatctccgggcgagaaccaaagaatttcacttggtgtacagacccagttgggttgttcactagcgctagtgcttgccacagtaggcacaaccttctctggagattttgttggctcaatagtgagttggctcgtggacttcttcttgttgacagttgttttagttcttttgggttctttgatagaac

SEQ ID NO: 329614 - DNA, 799 bp, Cannabis indica
cttttcattgagagttgtgggaagcattgttgaggaagcaacagtcaaagaattagagcagcaatggtggaaactcgaaacaacacacaccaacctcatccccccaaggatcctcagaacccagaaggaaaagaggcagtttcacaggtaaatgtgggctatgaggaacgagatgagacgaacgacgaggaatatgaagaaaattttgaagggtatgacgtttacgacgaaggtagttacactgaactactagtcctaaggcaaaaagcggctgatcatgaggccgaactagcctcccaaaaagaacagaataagaggatgcaagagataatggtcgccatgcaaaaagctatggaaacggctggaatacatgtgcatcccaaggccatgccagcgagactagagaaaatagaagaggaatcctcgccaagcactcagaggcccaagaccagggagccaagccctatacaaaacccttccgaggagaaccctgagaaaaatcctacttgtatccctgggagaaacaggcacaggatccgcgaaaggtccgctctgatttcccaaaagggaaaggtccacagaggggcaagctccctcgagcgagtcttggtcctcaagatcgagaggaccggaagagcgtatccgtgcaccaagaacccagggaaaaggggaggaaaagtcggaggtatcccctggctgatctaagacagaaaatcaacgagaaacatggtgacttaagaaaccatcttgaaaagaaaaacacgcattaccagtcccagaggctgttgggttttatgcc

SEQ ID NO: 329615 - DNA, 893 bp, Cannabis indica
atttatttatataaaacttaagaacttattatgaccttatatagattgtatagaaaattaaaattatatgtttatgtatttaatataacaaaattataattaaatgtacataaattattttatatcatataatataataaaattatataatatatgtaaaactataaatttttcataaactaattacactatgtattaatatcgtgttcatggtgacaaaataatattaattaaatcacaatattatttagcattataaaacaaaaaaaataaaataaaatgtttctaaggataaaaaaaatatatatatatttatatatatatatatatgtatataaatatgtacgatatatataataccgtttggacgaagtagaagaaatcataaggtataggagcaggagcaggaacaggagcaaaagcaagatcatcataaaaggaagcaataactaatagtgatgatgatagataccccattagtagaagcttcatcaaattaataaaaatcaaaactaatactcttcatgttcatcttcttcattatttaaaatatatgtatatgttaattaatatgattttgtgctttgagtttttagttctatttatagccagaaaaataatgtgatcattattgttaaataggtttcacattaataatatatattaattaatgtaaatctaaaaataggatcttatgtatatatgtaataattataatagaaaactttattattaaaaggttgtaattaatgaattgtggccgagccgacaatgtggacttaacagaacgttaaattagagtgttaaaattttagaaattttgagaatatcaatacaaatgaatgacatcaactttatatgtcgggatataaaaataatatattatgaaaaaa

SEQ ID NO: 329616 - DNA, 992 bp, Cannabis indica
agcttgtaaatggctccaaaacatctcctataactctaccaaccacaagagggtccctatctctagccatatatattatatatataattataattatacgtactgttatatatgtataatgtttttaattgaaactatatactactactacatattatactccacaccaagtagttgagtgaatccaagtttttcgtggttcacattgaagaaggatgatctatttatatttatttttttttttttgtatgtaccctttacttatcttccttttcttatccacgtaacatcactatatagattctgccttttttacttaagagaaatgctaaatgaattgtaagatacatttttgttcagatttttctaatttgtatttcttatcgagttatcaaagtttaatttgaatggattattagggttgcatatacaaaagtaaaattaatatatattatgcctccttcctctttcagacaaaactgtaaagtcaattgtagtggacccaatatttttattcgaattcatcagtttattataaatgcaaacgtcgcggttccaaagctatacacatgaaaattattcccaaggaaattattcacacgtacggtacatatatttctctttttacaaatactacttatgttcttaatgaataatgtcatatttttatttttatataaatatatatgggtggacttttaatgagtattacctatttatagataatattatgaaaatttaagtttttatgcttagttttttttatgtaatgaagaaaatctcttatttttcattatatatatgagttggggtttacataagctagaaaaaaaaaattaaaaaaaaatatttttcgacaaaaaaaaagttagagtttaacttagtattttgtatatataaacatatggctaattaataatttttccccccgaactttaacatgtactaaatcgtgtcccctcgaactttttggtctgttaaaaattaccccc

SEQ ID NO: 329617 - DNA, 775 bp, Cannabis indica
taattacatgtatcgtgtaattgtaagatttgatgttgagttcatttttttgtttgtatttaacgattgtttttttttttttttttttgaattttaatgtagatttattttatttttattttattatatataaataaaatgtgacccctgaatttctttataaactattttatttttaataataaaccattatatttttaatataaataagaagtcaccatgaatatgccggaactaaaataattttcgctccaagaattctccaagaatcttgctctctctctgagaagagcctttcctaaacggaatgcctcacacgcctgagataacgatggatgatctgcttgatcgaactggtaacctgcgaatggaagatgaagcaggatgggaggttaatgaggagaaggaagcagaagtgggaaaatcatgtttgatgggccgactctgttcgaataagagtatgaatagaactctgattcgaacaattctgggcagaatttggggattggcagaagtggattggggagtgaagattaaacacacgactacggaggcctctttcctgatcttttccttcaaaaggggagaagacctgacccgaattctgaccaaatcgccatggatgttgaataatggagtgctcatccttcaacggttcactagaccccatccaaatgggaggaggaattaaatcgatttcccttaaaaggaagggttctgaatttaccactaaatcaattacccgaaacaatatgcttcgacttgcatcaatggc

SEQ ID NO: 329618 - DNA, 532 bp, Cannabis indica
ataaataggtagcggggatgaggtgggaattgcatttcctgtacattaaccgtccaatttttgtctttaattatgacaactttagaaagtaaactaaccaaaatacatcaccaacacgtagtctataattaccttactacttttaccaataagtttaacgtgaggattaaatttgctacccacacaatgataccaccaccactaaattttttttaaagcacaatatttacatacaatgatacacacattttatcatgtttgtaacataaatattaaagcttaaattattcatctcaacccaatgaacccaaaaccaacccacatcctatattattatatacctaataggattagattgtacaataagggctggtttggaatgtcgtattaggtcgtattgtattgtattgtattgaattagattatatatcatatttttatataatactatgttaaactttaatttatattaaaatattatatatgtaggtgtctataaaagttaataccacatatagttttacataaaaat

SEQ ID NO: 329619 - DNA, 1507 bp, Cannabis indica
atgtttttgtaaatttttttagaccttctaaattatttttcgaattattgagattattaagggctcatttggtacgctgtataagagtcgtattgtattaaataataaataacactatgtttgaattaaacatatattataacctttacacaatcaactaatacaagtcaataccaaacattgtattgtattaaataatactaagacaatacaatacaatacaacacaatccaacacaatacaatacattataatacggcgtacaaaacgagaccctaaatttaaaaatttctgttcaatttcatacaattttactaacgttataattatctatgagccttgtgcctctaactttaatatgtattaaattgtacccttcgaactttgatatgtacgtatcaattgtgtaccccaaaattatcatccacatcaggcgctcgttagtaaaatttgacgaaagtccttaaatcaaacaacttcaataattctggagaatttttaacgacttgagaaattctaaaggcacaatttgatatatgttaaagttcagaagacaaaaatcttaattggacttaagaaaaatttagaaccttgtaaatttttgaaaaaaatcaaaaaatttaacgcgctaaaaataaggttcgaacattcagttgaatgtatgtctattttattttatatgtatgtgaaacttgttgaatattgctttgtatattgtaacaattaccccaaatttctaaaaaatttgcaagataataactatattatacaaaatcatgtttaaaaataaaaataaaattataattattcaaatattaaaaatacgaaaaaatatgtatcggtgcgcacctaaaactgtagaagcgcctatatatacagaaaaattcatatctatataaaagtataaaaaatttatataattttttttatataaataaaaatgagggtagttagtgtgccctccataatttatgtgggtctgccagtatttacgatgtttggtataatttagtatgttaatatacacaatcgaatcaagtaatattataaaaataaaaattattttcacgaaaattaatttaccaattaccaaaaaataatcattatttctattaggttaacaataaactgtttaaaaaattgcagacaaacaaaaaaaaaaaatttacaatctaaaagaaaataacaaaattaacaaataatttaatgaataaaaagcgtttaatttcatctttatccattctatctttgcaataatacgattccaactattcttcttcataatataatagcattaccaaagaaatctatatcaattcgtactaagatataaatatctcaatctatatgtaatttttttatatatccgtgataattaattaaatttaagcatatatatatataccattcaatataaaaatcttaaatgcaacacaaatgttaaattagatctcactgtaatatttattattacagtgttacaagatgaagtgaaaatacaaataaa

SEQ ID NO: 329620 - DNA, 1016 bp, Cannabis indica
attttaaaaaaatgtatacatttatgtaaaatgcccaagaaaatactagatttataaaggttcgaccgcttatagttggtaatagtctacttctattttgttgtattaacttgtgagcaagaataacttattctctctctaaatctcttacaataacctctaatcaatttactcttagattggggtttttctattgagtgttctctctctaaatattttttgtgtccctgaatagtgagatgaatccattatttataggaattaatcacatgaaattagtttccctaaatcaataagaaataaaatgagaaactagtttatttccacaactacagtgaaaaaaataggaaacttaggttgattgcctttatttttagaagacacgaatctatcccatgaatataaggattgtactgtgtgattcgcaagcttagagacatacaagatatatcttaaaaaaatttaactcgcattctttaaccggtgcatgcgacctacctgcttagtgaagctggtcggatgtctatccattatttggtcggacatcctgccatctatgtatgattttgagcatcataatagtcggtatggcctactaggagtagaattatttgccaaggttatgaaatatgttacacgtacatgtcacctagatagatgccacatcataatgtagaaattttgataacatttgccccataagtctgcgcgagatcttcttggtcgcacgtgaacttatttggccaagaagctgtttggatggttgatgtgtgtctagttgtcatatttgatctgatgtgacctgatcaaacgtctcttcgttatctgggggatttaatatacttcttgaaaggtgtatctcgaatggaaaatttgattttttatgcttacatatgcttaattttttttcctaaactcataatatttgatatttgtggaatatgacacattttataatatccctaaaatacccccatttacatcacccccctctctctctctcttcttctctcttt

SEQ ID NO: 329621 - DNA, 552 bp, Cannabis indica
aataaataattaaataaattttccaaaaattgggttgtacaagctttaacttttagctgtagcttttccataaatttttcaataagatattttttaactgcttattaaacacctttttgtcacaacttttttgagaagaagtttttaacttttccaaaagcagtgccaaactagcccttagactccacagaacgttgatattataggttcagtagaaattttgataatatatggtttgttataggcagttattaaacaactggaaaacaatgaatgcccacactatttacaaagcatgaatttttgtgatattacaaattgaaattgaataattctaacattgaaatttcaaaaaaaaaaaaacaaacgttaatacaacaattatcgattgagagattgaaataataagtattttggataatacatgatttagattgattgaaaaactcgagaccaagttcacatttacatctttataatttttagatttaatttacgataattagttttaatacatattttcgttaactaattaaatatttttgattgctc

SEQ ID NO: 329622 - DNA, 522 bp, Cannabis indica
ataaatatatcgtaatacataaagataatattcgccatttaatgaggacatatcgtcgtgattaattatgtttgttatttagcaaggataatcgttgggtgtaagtggtacattgatttattaaatgctgactaagtaagaaaatataagaatattctgtaatattataattaataattatattaattataattaattcttattaatcttagtttatattttgttaatcgaatcaatattctattgatggtcattattatcataatcattaaatttattactcaatttaatttcctcattaattattaatatatttcgataattaattgtgactgagactttaatgtaaaatcacttgtataaacatatgcaaagtgttaataataaagcttctggaactctctcttagggtttatccctccttctctagatctttccagtccctcatccatagtgatgtttctattggaattattttaccaggatctagatttactaccaagtatgttttattaacatcct

SEQ ID NO: 329623 - DNA, 518 bp, Cannabis indica
ctcttcatctctatttcattattataactatgctctatgtacatagagcaaatttattgagaatgatatagtaaatcagtgataactataaatgacatataataataacacagcgactttgaatataattacaactacaagtaagatacgatgatgataacaattttaaaatcataaaataagttttccatatatttatcaatttcttttctaatattttctttattataaggtttgaagatatctcttagagtaaatgattatatataagaaattaaaaaagttacaaaacatatcatttgaatttaaatctaattagatataactttatttgttttctcattattaatttgatgaactttttttggtatattttacaaattcgctcatttataaaagtgagtagttaacttattgtttgattagctttatgtatagagtaaacttatttcgaagaataatgatgatgatagagattagagacagtgatgcgactacaaatgaaattcagtgattac

SEQ ID NO: 329624 - DNA, 1248 bp, Cannabis indica
gtaactaaatgctatattttagtcacaagtaatattttattgtgactaaaagtcatatttaatcacaaaaaatttatgttgcgactaaaaaattgtcactaaaagtaattattttttgtagtgttatactgctatttactctaattattattaggaacttgagcttagttttctttttataatggtagtacactttttctcaacaaaataatgaaataaaatgcatgttactttttttcttttatatatccaagaacttggcttatgagtatgcaaggaggggagccaatctggccctggcagccagaagagagaataggctgaagagggtggccgatgaagctatccggctaggatcgccggacgcaattgtgatccgagcagatgttaaggaaattgaagattgtaaagcacttgttgaagagacagtgaaccactttggacaatgtatgagtaattacttaccttcaaacaactttttttcccttaagaaaaatgatatttttctaatacatgtattgtatccacattgactatttcttaattgtttgttattttcttattatgggacatatgcctttatgtgtgatagtggattatttggtaaataatgctggagttgtacaactgagcctgtttgaagattccaccgatcaattctcaacaatcagatcaattatggtacattatctcatttaatattagcagaacatgtacagcctaggttctgaggttaatttattcttccatacacatactaaaccaagatattaattacatatatgataatcctctctaaaaaaaaattacggcataaatattcaaaattttaaatttgtaaatagtataaattcaataatttacttttagcaacatgcatacttaatattagtaaaattgtaattttcatttagtttcgctaatatcttaaatattacatatataagactcaggtactaaattattgggtttggataattaaaaacatgtaatatcagttactttcaaattattttaataaattcaaaacaaaatctgtactgataaaacttgacgaaaattacaaatttactaatattaattaagtacttatactacttacaaactcgaaattttaagtatttagagcaactccaataataaaatctcaatttagttttcattaacactaaaaaggtattattttattactaatttttttctattccaacaacggcattaaaaaatatattctttattattttatta

SEQ ID NO: 329625 - DNA, 1223 bp, Cannabis indica
ttattttaatatttttctagaaaatctggctaaataaggtaggtgggatatgagataggtagaatggtaaaatatacaatgtgtaatttattgactgaaaaaaatagtaaaatgggaaaatgagccaaataaatgtaaaggaatagaaaattataatgtatttttgaaattagcattttgggtactttttccatgcattgtggacacttggcaggcacaaaataagcttggaatttcggctggaatgtggagacgacacttggcgagcatgggttggttgctggaaggaagcttgaaggagaggcggacacgtgtcgagcatggagaggctgtcgtgggagaagctgcatcaggagggcctcacgcgcctgaagcttttttttttttttttttgaaaatttagcgtcgaaatgcattaggtaaagaaacataattagacttcacggtcattacaaagcaggttctctggcaaggaggagactggaatacagccaaacctctcgtgggtaaaagcccacttagccacattatgggcaacatagttacaacatctactaacattcataaagtaacaactaataaaagaaggagtggatctcatacaaaaggagacatagttctcaagtgcccaatgagactccttcccattgaaagcattgatagctagtctcgagtcactctcaataataataaactttaaacctaagtcaaatgccatagaaatggctgaacaacaagccgccgcctctccgcataaagcatccgaaaagtccaactgagacgtgtggatccgaatcaccttgcccaggtggttcctagcaacaacagatgtgcacatgcttgccaatcccactctaacatcacaattcagtttgatccaatcctcagggggtggattccagctttctgtcaaaataggagatgggcatggcaccagagaagtatgtaattctgcaaaagaagtatgaataaggtcaatacattttaaaacatccgggtgattgttattgtgtattttttcatttcgcgccctccagatggtatcaaccacaatcgaagcataaagaaaaacctcctccactcggatacccctgttgttaagattccaaagaaatttcaccgtcccagacacgaatcccattgccacagaccggatatatgccccaaggagatgagcgccaaaggtgtaacgccacatcgcacgagagaaaaaggtgttcaac

SEQ ID NO: 329626 - DNA, 1333 bp, Cannabis indica
tactacttaacgatcctgaaacaaatgcaatgcgaagtcttattcagactcttattcaaactatataatctgttatcaaattccactgggcttaagtcagtgtagtcttggacagaaggaacgaagtgaatgttcaaaggagacttacaggctccggaggtacttgcatcgggggatccaaagttaggaactgggaatggaaatttgggtcggaccagagttttctctttctgtgcctcctcctaggagacccttctggaggtagcttgcgcctgagagaatacaagctcctgctcccttttgtatctgtacttgttgtatccatcctccgcggacaagataatattttccctgagcgccttctcactcccaggattctggacgttgggacagaggaccttggacaagttgaagtcatccactgattgactcactaagatcaacttgcccctattacaattacctgtcgtgaccaggtctcccacattcaagtcttccttcctgtaatcggcaaacacttgcgcgtggttcaagaaaagttgagtgggggcagtacggtgcatggggggaatcctgacctagtccgttaacaggtctaggcgctcaaaggctttgaacccagaggagaagaaaaatctatggcggtactcctttacattcttttagaagttaaaggataccagagtctcaatggccggatgggcctgaagtttataaaaaccatctttaaatttgtctcccttcttggggactgaaagaagttcgtaaaagtataagatttcggcaggaatgggcggagccaagttcctagctacctaaaaaataaacaagcccgataacaggcgataagcttgcagaatcaatcggtagggtgaaagtccgacaaaaacaaggaagtcgatgaaatagtcctggagggggagcatggctccggacatcagatgagtttgactccatgcccgaaaaccattatagttgtggtttggcgtctcctcatccctgggaaggtgatgataaaccccagaactggagggtttgatccccacgacagtgataatcttctccaattgatgggcgtaggtcaacattgagtgcagttcgtcagcctccgaaccgttggaacaacatgcaaacttcttatagatgacagggcccttcataacctcctccaaggtggctaacttatttggccccttcttcgaagatttcactccgagtggcagcggggagtcgacatggagtggacttaaacataatagaattagttacattatgaaaattattatatatataaattaattttaaagttgactgatcaaaataagcaaccaaa

SEQ ID NO: 329627 - DNA, 691 bp, Cannabis indica
  modified_base (662)..(662): a, c, t, g, unknown or other
aaaaaaaaaaaaaaagatttttttacattacacacctgggttattctatgggtggagagaaataaaaaaaaagagtatttagcacaaaatgaggtaaaaaaatagagtttgagttaaatatttttgatataaacacattttttttttatagtgcaaaccaaatattatatatatatataattaattaattaaattaaggtgtaatataatggaatggttgggctggaaaacttttacctctatacttccatggtttctgaaatggataacttcttttcaagtttagaaaacatgtgtttgcagcctcactggcagcaacatagtactatctatggtcatgcctaatcctaaatgaatcattgtgaaatcaaaagattttaactgtaatagtcctaacaaaaaggatgaaacaagaagtaaaaaataaagtaaaataactcaaatctttgttttattattgacgattgaattaaaatctaatagttgaagctcagttttcacaaacaaaaccataaaattatattaaactccaacccaatatattaaagaaatgagatcttggctacttaagtgaggatattatattgtttaagtacatgatttttttgcattagaaacattattccaaaatatatgtgtgaattataagaggttgaacttanattttttttttttttttttagtttaagaa

SEQ ID NO: 329628 - DNA, 2593 bp, Cannabis indica
tttaattgttctattttattgttttatagttgttttataaaaagacaatatttttgtaaaaaattctgtgtggcagtaagatttacaaatttttagcctaaaatccaatatttttgtaaaatcccatttttttaaatacctaaggaaattagttaatacaaatagagttattaaggtagttcacgcttagagttttttttaaatattttatatcgtctcgtaaggtttttttttttttcctaaatccatagccgcctaaggttttttttcatccgtcaaggcgctctggacctccctcggtgtaggcgcggctgggtgtctaatgttttgctactgcgattaagtttttgctacttcgattagtcttatctctgtgacatggttttaattgtcttttgtttaggttattgtgattactcttgtatacgtgatatggttttgttttattttattttgttgttggttcgtcttcttttttcttcaatgcctcaccattaaattgatgttagaggttgggactaacaagttttcttcggctgaagtggttgttagtggtgcagttacgtagcttgcacaatagttgagtgaacctggtgcaacaaatctattgttgtgtcttttgacactactagaaaaaagggtattcgtaacggtcctaaaaacatttttttggagaaccatatctaaaaaaattaagcgggtgtttaaaaccgacaggaaaaatagggtattcttgacggttttaaattgttgggaggtataggagacgatttttaaacataccttaaaatatcccatcttattttagctccatctacgtagacttggtttattatcctagcgcgcgttgagatggacagttagacacagggatggagattgtccaagcttgaagatgaagcttgaattctatctttttgaattaattattttatttctcgaacaatttaatttcaattttagtttagaaaatttacttcctatttcatattattgcagataatttattgtgacattttttgagtagtattaatttgaaattttttcactttaaaagaatttcattaggaatttaacttttatgaaattgaattttatattctataacttgtatgtctataccaatttatatttatatatttatcatgcttttatgtattttacatttattattaatacaaaatctatggtataatattctctgcaaagagataatactttataatcacttgaagttaaattaaagggttatgaataattgtcaattcttaaaattattaagattttgtttaataaaagatcttgtgatctaataggggtggaaaagttattgatatatacaattcaaagatctttgacattgaactgtagattgtattcaaaataccacagaatctctgtaacacacatattttaattagacatagatataatatacaaactagcaaactagtagaccttatttatgatcttgtacatgttccaatagtcatagataccactaaagtccccagatatagaatcacagtaccttatctttgtgggaggattttttctagtctgttattatttggatgacactagtgatgacttactataatatgttcaagaaaggagctttaaaataaaaataaagaaagataatctacccattcacatggatttctaacttatcaaaattatgacgataagataggaaatctttccatgtctattcgaaagacttaagcataatttctggtccttatgaaaccctttatggttcactaagagattacttaatcttaaaaaagtattttacattaatactagaatgctatattgatgacttagtcttgaagaaatttattgtttctaaataatgataaatgtcaaaaaaatgtctctaagtaccaatagtaagaggataaatgcacacttgtatatgcattaaactagactcttactactgagtgggagccatgaaagatgtaatcaaataaggaacattaggagacaatcaagaaagaatctcagaaaagtggcctatatatgttagaagataggggtgtatttggaatccttatatctacaccaactcaaaaattaatgtatgagatggtgattactctaggggtgaaagaataaatctggaagtgggtaaaaacccatctatagtaatagttcaactagtgaaggtaaatatctgagttactacttttacgagacactagaaagttattcaaactgaagaatgttcatgactaatttatcactattccattttggatagaattagagttgtgtcttctatacatttagatacacttatcaagcagcaaagaattaagtgtccctagaggagtaatacatataaaaaatgatgatctttaatcttttatgaatacaaaaggaagtagtggtgaacaaagttatttctagttacaaccttccaactcctgttatttgggtatagttaaatacactacacttgatatgaatgtaaagacagtagattagttgaaatgcacttctagttttatgttagtgcaagtgagagttaattgagattttatgccctaaataaaactcatttcaatataatattatttgc

SEQ ID NO: 329629 - DNA, 742 bp, Cannabis indica
gtaaaaaatttacttgttggtttattatcaacatcatatgcaaccaaaatgttacttgtgaaacgcaggaaaataataaaaaaaaaagaattttgggattagtttagtttcaggcatattattttagaattaaggtattttttaatgacgtggcaagatattattgtaattgagatttgttaagttatttttgtaattattttgtactttacgtatatttatgaaaaaatcccttttttttatcgacatatataattataattatgagttgcggtgtgacccaacgtcattacatttgaataattattattatgaaggaatatttgacctaggagaataattggaccaacattacataaaaaactgtaataactttgctaatttaatttaccccacttttattttcttttcttttcttgggtgggggtagggtgggggttgaaaaaaaaagaacataaaaaataaattcatctaaaatatgactatcttgatattgagaataatgtatatataatctcaataaataacccggatcgatctaagttcaaaatttgtgtatttgatctagaaccctcaaattttaattggtcaaagggatttaggagatgggtcaaaaataatatcacatggtatgttttgaaaacggtaacatacgatatacatgcacctttttttttcttatataattaatatttttcttttctttttttatgcccataataataatattaataatttaata

SEQ ID NO: 329630 - DNA, 1452 bp, Cannabis indica
tggtcactaggcgacaacttttgtattaaatgttttgtattatgtttgtaaataatttaaatatgtgatctcagttttgtaaaagatatttattttcatttcaagagtaattcagtaaaagttttaataaatcataattttctataaacctgttgattaacaacagattgcacaattattattaaatcacgatcacacacctaaactaatagggtgttacacagagtatcttaaggatgaatccctaagagatgttacatgatcaaaagagttgatctccaaatcattgggatgaacccagtgaaagaaaatatttgggtccagggttagtttagaggaccaaatttggatactgctttctaaagcaggtagaaaagttatgttgattctaagcgtagagatatagggcttcaggtagggaacatgttttcttatgtgtttccccagtgaaaagaggtgaagtgcttcaaaaggtaaattgagccctagatttttagggtcatttaaaatttttaagaaggttgaacaagtagtgtactgttgatttcttctacatgttgtgatgttgatggggtacatgtcagatctgactcatgtcttgagattatgaagccttaaagctacaaccagactagttctataaggaaaacctagtacaaattcttaataaatataataaagtcttttggaataagactatagctttgacaagcacactctggaaaaatagttgggtgaaggaagccacctaggagtagagtctaccatgagggctcaatatctagagttatttaagttagattttgaggaaaaaaaatccttttaatagggagataattgtaataactgcatacttagaatatggaatttatgaaatgtattatgtgattatatatgtatattatgtggtgtgggtcttattttcatgaaataggcatttgagttatgatttctcaattgttgagactttattaaactctaggtgtagtatatattataaatatgaattttgctatgcccgataatagtagaaatgtgacattttgaccattagagtcacattcatgtggtagagtatttgagaattagcagggaaagattattaaacatttagaatatcaaaattatgtggggttatagtttttgacaatttcacccttaggcttatagttttcttaagtgtgaagtaaagggaaaattggtaattttaccttaaggtttatattaattttagtgggttgctagattattctagtgttttaggatgatactaagtaaagaataaaacataatttaagttagataacattaaaaccaaagaggaaaaaatccaatttctctctctctctctctctctctctctattaggccctcttggagcagccaagaaggtgattcaagctctattttgccaaaactctagtgatctcaagttgttggcatgtttccctt

SEQ ID NO: 329631 - DNA, 600 bp, Cannabis indica
tttattatattatagatcgaaacatctatacccattggatatataacaatattgacacaaaaaaataattagtaccgtacaccaaattaaattaaaagttattaatccaagatcgctccatctttctagaaagtttacagaaaataaaaatataataattcgttggtgtataataaatctaaaacttgactatcttttatgttggatagaggtagtttatataagatgagtttccgtatataataagagttatcttccaaagagaatcactttgaattagaatagtccatccttattgggagaaatctctagtgacaaacactccttcaattccaccacaacttgattcattgttggtctttcagctgagtttatacgcacacaagctgtggcaatttccatagttttccatgcagaattgagttggaagtttcctctcagtttgggatcaactatgcttttaatttcaccattttcacgaagcatgttctcaacccattgagatatgtggatgacttcattgctacttatttttgcaatcactggtcgactagtgattatctctaatagaacaactccaaaagcataaacatcactttt

SEQ ID NO: 329632 - DNA, 1412 bp, Cannabis indica
acttgataacaactataaataaattataaaataataaaaaaaacaatttattgtttttctgaagagatatttttataaataaaaaaagttacaaaaagtaaaaatgaaaatatttttgtgttgcggtatttttgtaatttttttttttctaaatttttgtataattaaggaaattttcaaatacatcaaataaattagtcataattaaaatttatcgatgcactcaattggatcaatactgacaataaattacataaataaacatactcttgttatgtattctaagtcatatcatataattaatttattataagtcaattcaatcccaattttaaatggtataagctctaattgattgtattatttgtagttattttttttttttactttattcaccagtttaccttacatattagctcgtatttacatcttgaaaactaattggtacaactgaatgagagtgttaatcataaatataaatatctatagtttgagttaaaaaagtgaaacaataattttcttttaacttggttaaatatgcaaattaatagagtatttatttcaataattatatattagtttgttgaaatattatttataaagaactataaatatattttaataagataaaacataatgaagagtaaaatgatatttttagtctcaactcattgtaaagtactgcctatagagaatggattgataattatggttaaaaaatagaataactaattataacgtatatatattgctttactgggtgttctgtgaatttaagaatgccattttaatagttagtaattaatttatttgttatgtttacgataatttattgaaacttgattttatagacttatagtccccagagtattttggagaaaatcatctggatagtctcaattaattagtttaagtatcaattagaattgtcaaaattaactcgtttgacaatttttattaagatgtgtaaattagagaaaaaaaaaagaaaaatagaacaaatttattaattataataaattggagtcaaatatttaaataaaattacaatttataatgagttattattacaattgatttaagtatttaaatataacttattaattaattatggtaaaattaaaatagaattcttttcagatgtttatggagatctcattcatagtttttttctctatatatttgtttgtatgatctgagatctcttattattattattatttaagaatatttgtgtttcaaatttcacttctaaaaattttatttttgagtttaaaataattaaacttttatattttgagttggtttataattgacattactgttcatatgtgtcctttgagaatcgacgcaaaatattctattatacgttggttcgctaaattaacactaatattataagtgtcaatcca

SEQ ID NO: 329633 - DNA, 911 bp, Cannabis indica
tatcacagttttttcaaaaagtagcttttagcttttctaaaagcggtgccaaacgggccctaagtcacattcctcatcttccatatatgataaactaagctagtaacagcagcagctattacaagcttcctgaatttgctgattttagctttcccgagccatcgtaccagaccaacaagattgtgattttgtgttttccattgcagccaatctttgatttgttgcaaacacagccgagatgttggaaagtcaaagaataagtgagctgatgtttcagtctgcactttacacagcaagcattgttggtcaacactaattcccatcttgaacaatctatctcttgttttgagcctttgttgaatagccagccaagatacaaaactatgtttcggtgtgttaagtctcccccatatttgtttacaccaatgcactttcacctgaactggacttagcagatggtaactctgagccacagagtacttctacagcaacagattgccattcaaagcagtcttaaactgctctttgagtctcaccaaacaagtccagtaccagctagcttggcttggtaggttgtaaccccaccaatcctcattatgcaagtaaatactatttatctatctcaaccataagctatcctctttattggctaaagcatatatgtacttccccattgcagctttattccatgctgaaacaatccttaaacccagccctcaagcaaacttaggttaacatataaaatcccaggccacaagaccaggcgcttggtacaaagcatggcctttccatagatagttgctgcatatagcttaaattctttgtatcacctgttggattaaaattctatttgggcacatatgtataatgtatatgctattataaagtgtgatacaaaattaagtgaccaa

SEQ ID NO: 329634 - DNA, 689 bp, Cannabis indica
ttttattttataaaatataaaaaataattttatattgtacttttttagccaattagagaagtaatagctttatgtctgttttataattactttaataatatcttttttaagagtacataaaattaaataaaaattaaaaaaatatatatgtatacaatctctaagtatacatgataataaataaaacattacatatatttccaaccataaaacaactaaaaatatactaaatactagacaacagtgctacataataacttagacataatatattatgtcgacaatctaaaatctgcgaaaaataacataaaaacaatattaatatataaacacatatacatatctatttatttttatcttaattgagcaatttaataacaattaataatttaaataataataagcaaataattagtcaacaactttaatataaagtatcaataattaggtatcaacacattacatcaactcaagataaactcaaaaacaacacacaactaaattaaatttaaaagatactacaaaatacttgtgtaacaactgaaaagtatatgagaattttctcataaatatattttttaaaatattttatttacattttaacaattcatatttttttatttgcaaatttaatttttaaatacatttttaaagttttaaaattacaaagacttctcatttaaaaataa

SEQ ID NO: 329635 - DNA, 1209 bp, Cannabis indica
gttttgatcaacaaaggaaaggactgaataatgattaagggaataaattagttgtcatttatttaagagtgtgtgttgcaccttaacaaagtaaggtacatttttataaagaagcattagcatataacacgcctctcattacttcttaaccatgcaaacaaacaaacaagtcaaaacttagatgaaaattctaaaatttctgctcgtttttttacggcataaatacttaaatttaattctcaattgcaaataaatatcttagtttaatttttgactgtaataatatctaaattataattttgaaacttctataagtatccagctgttaaagtaaattttcacgtgataatttttaattagtccgagtcattaaatttttatattttatttaaaaattaatttaaatatatcaataagaaaataacatgtaaataatggcttgaaacttaacagacaaatacttaaagaaaatagaacttaaatattataactgtaaaaattaaacttaaattttcatctacaacgaagtaataacttaagtatttccgaccataaattttgagataaaagtctcttaataatgaccaacttgaacaattttttatgtatatatcaaagttgaggattagacttataacaagctcaataattgaagttttgattagagtagagattaaggaagatgggttatggtcacaatataaaatataatatatgtatctatatatatataaatagtttaatgggcaatttggcataacatctacaaagctgtaatgaagtcattacacgccaacttaagccaaaggataaacgtacaaacaatcatataccaaaatctaaattttgtgtaagcaatatctcaaactcaagtaaattgacatacaatcaattgttgaaatccaatacaaggctgcaccattatatttaaactaaagctcccacctttaacactaatatttaagctttggaaattggattttggtaagagaaaaaaaagagtaatttgcggcataaatatttaagtttaattcctaattgtacataaataataaatttaatttttgacagtaataatatttaagttatatttctgaaatttctataaatacatggtcgccaagtgtcatacgtgacagtatctgattagggctgatcatcggtcggtttggttggttttttttcaatataaaaatccaaaattcggtt

SEQ ID NO: 329636 - DNA, 625 bp, Cannabis indica
tcacataatataattaattaatactatttgtcaactaattaatctatatttcaagtatgtgatcattataattatacttttattaaataaaaattaatatgtaatattagatattctatttaatacatatttttataaatgaaacaaaataaattcataaaataataattttgaaaaaaaaatagtataaaataaaatattttcattcttttattttaaaaaataaatcattcttatatttaatatttaatttaaattcacatattctattaaagatgattattttaaaataattattattaattttttattcaaatttacacatttcattaaatagtcatttatcatttaaaaatttataaattgtatattatatataagttactatattaaaattatatttcaaagttaaaatacatatgagatgtgtttttttaaataaaaaaaaaagaatgagactatattaatccatctattttgtgtgataaaatagttcctatttaagaagataaaattagtaaagaaatagtattatccaatcccccttactagtcatattttgttccaaacatagaattggataattcaatccaatcccactacatcaaacatgaatattattata

SEQ ID NO: 329637 - DNA, 601 bp, Cannabis indica
aaaataatagtaaaattgtgttataattgagcttttgataatactttaacataagagaaaatatattataaaaagtagcatgacttactccttactgtattataaaatattatggtaagcttttttataatactttttttgatattataaataataatttttcttatagtaagaagtggtatattgttattagtataaattagagtgctagtttgttgttactagccaaagggtaatacctttggctttggctagttctacttaaaaattttgttgttttttagtttgttagtaatgttgagcttgaaatttgggttgtgtgttaaattttaagtttgtattttaatttttattttgaagatttccattctaatataattgtatttttttgtttggtgttattacgttatttcagtttcgctacctctgacgacaattattataatgggatggtagtttttcaatgtgacggggagctgtttgaaggcgttatagctttattgtttaaatttttggggcagttttgtcccatgtggctcgcaataagaattctgcagctcatggtttgacaaaatatgcctttcggttagacgatgagcta

SEQ ID NO: 329638 - DNA, 1108 bp, Cannabis indica
taaaaatgtacacgcatgcaacaggttactttgaatctaatttttgacattgttattttttttattttttaaaaatttttgacttaaatatactcaaaataactacaatatatacgactataaaataaagttagacaaaatattttttagatattgaaacaataaaaagtgtattggtacacccatttcaaaagagtatattgtaaaaattttctaatatatataaatgagacaaattatatttgttcatatatgtaaattgagattttaccaaataagcaaatcatggtgtattggacaatttttgttgttcaatatggtcataatgtcaactaaaccattgagagttaggacataattaatttcacctctatagggtaacatgccactattataatttatgtatatatatatgaaaataaaataaaacaaacatctaatataatttagatatggttggagtgaatgtaatattcttaccaatctaatttaggatattatttatttattaaaaaaaaaaaaaaaacaaatactagtttatcttaaatcaataaaaggttcaattattcacctctaattcaaaagtctataaacaacaactagagattctcttccaaaataaacaattacaaatgtgttaatttaatacaagttggccttaagtaaagtgtatatattaatattcacattattatatgattagtgactaatttgtcttaacactccacatgtatgaccaaaattcaaacatttcaccaattctcttagggtatatttttatatatgttaggggttagggaacacttattagtggtatgatccatttataaatgtttgtaatatataataataataataataaaatcataccataatatatagaaaaaatattaaaagatttcagagcatcattgtaaatttatattattattattggtataaataaatattaaattttatgtattttaataaataattattataaaaaatagttaattatttgtaaagggtcattgcgtagtaatattagatataataaacttttggggaattactctatatctctttttttaacttttttttttttcaaatttacggtttgggttct

SEQ ID NO: 329639 - DNA, 686 bp, Cannabis indica
aattgtataaacatctaaattctggtcgcaaccagaaaaagaaggttaacccaattattttccacctgacgtggcaccaaacacgtggaaaaaaaattattacaaaatcgttgtacattccgtgcagcttccaagacaagggcaaagacagtgatacataagtattgacaagactccggtaggatgactagaaggccaaacagcctacatcatgtagaatgttgaacatcctgcctgtagaaggtcggtcagcctacagcgtatagaagatcaggcagcctaccttcaaaaagtcgaatagcttacagcctatagaaggctggacaacttgcaaccttaagacacaccggatagcttccaaaccaggtttgctggccaacttgtgacttttattctgaccgtctgaatggattgtggttttttccatgggccttctagaaaacaccaaatcatctctagtactcctacaacttcagaatagttcaaactacccacaaaaataggaattatgtaacctccctattttctagagatatttccattattatgtattttgaataacaacttgtaaaaccctaacaatatataaagggtcataaccctgaaaagggcctgaattcttccatcaaaaatagcatttttttttgttagagtggaaaaacatagaaagttttttattttttttt

SEQ ID NO: 329640 - DNA, 620 bp, Cannabis indica
aaaatattgatttgttatattcataaaagcttggattattttgctgctaatattcatatcaaaatatatataaaactattcaaatgatgacaccaatttatgaaggaaagatctacatcaaatgccattaaagagaagaaaaaaaatattgaaagaaaatttctcactcatacatctctttcaaagacttgtacttattaattaacaacaaatgcaaatataattatataaatgtcaaatgaaacgaaaaaaggtattaaataatttgttgagccttttgaacatggaagtgtaaattttttacttttaaaaaatgtagaaaattcaaaatatggaatatatataataaattaagtttagctcattaaataatgcacctttctatttataattaattaaatattatcaaagaaatgatattcgattgatgaactaaagtgaaaatttgtggtattatatgtgtgataaataaataaatcttttaaattagggtaaatattattttggatcccgtgttttataaaagttatagattgaacactctattttgttaaatgacaaatagaccctgtattttccaaaataataaaatatgaccataagcttaattttcgacaact

SEQ ID NO: 329641 - DNA, 704 bp, Cannabis indica
ataggaaaaaatgactgacattggaagttcaaaagaagaaactccatcaacatatggacaaaatgaaggagtaataaatacccacaggacctattgaccttgattcatcaattccttcatctccaaaaaatgatgaaccaatgacagcaaccaaatcaaatgttgatagcgagaaaaatgaaacgaagagaaaactgactctctttgtctggaatcattttaagaagcaaaaaattaatgaagttgacaaagctgtttgcaactattgtcaaaaaaaattaggaggatcaagcaaaaatagaacaacacatttgcgtgatcatttcaacatatgtcctcttaggaagcatcgagatataaaacaatcaatcttaaatcctcgtaagaagaaggatggaagtacttcacttgctgctcacaactttgatcaagagtgttcaagacacaaacttgctaaaatgattattttacatgagtatccactcaatatggttgaacatcatggatttagagattttgtcaactctcttcagccattttttaagaatgtatcttgaagtactattaggagggatatattgaagatatatgagaatgagaagaccaagacaaagaactcaattactgacaattgtagtagagttgcaatcacaaatgacatgtggatatcaaataatcaaaagagagggtatatggtggtgact

SEQ ID NO: 329642 - DNA, 809 bp, Cannabis indica
ctcgaagccacaagagaagcaaacacatagagaggaaataccacatcataagggaatatgtggcaagaggggacataccggtggagaaagtggatactgaagataacttagttgatccattcaccaaagtcttgactgtaactacatttgaaaagcacaactaaatctaggattaattgaaatgtactgattattttcttttagtgcaagtgggagtttgttgggctttgtgccctaaataaaactatattttaatgtaatcttttatattcatttatcaatagagaaacaatttttttattacttatttaatgtgttatttggttcatgtgatcatctagttatttatttgatttataaatacacgaataggagcagaaaacacctcctgacataccacgtggttaccacgcaaaaggaagtaaatgccataaatatcctccgaaaaatacagttcatttggggaggtgtccatgacctctgattacaatacgtgtgcgcgatcaacattcaagacaatagcaagcttccgtgatccagagaatctcgaaagcttgggggtgaatgttatccaagttttcactaatcagacatgtggcacgatcagagagtgaacagagtttctacataaggcactaagaggcaatggctcccagaagcagcatccttcactgaggaaccctgagagcagtacaggttctggagatgttggacatgtcaactccttgcaaaatgacactccaaagatggttatacctttttctgacacaggatcagatcttgtcccctgtgccagatcatggtagtgc

SEQ ID NO: 329643 - DNA, 1584 bp, Cannabis indica
cacgtaaaaatccttctctcactttcttacagctcgataattttataatattttattagttgccgaaaatctcggtcaacaaagagcagctcgggaattttgatggtatctctatagccagatctgcccctgcaatttcacatttgctctttgctgatgatactcttatttttgccaaagctactctctcatcgtgcaatgcacttcaagctgctcttcagctttataatcaagccactggacagtgtgttaactttggtaagtcatccatcttattttcccctaataccccctctcaggtctcggatcacttttaccatgctcttgggctttctaacaggccttttttcatctaaataccttggggtgcctcaatgttttggaaggtctaagaaaacagtttcaactttattttagatcgtgttagctctaatctcagagtctggagtcataagttttttctaaagcaggaaaggaagttcttttaaaagttgtcattcaagctataccctcctctgccatgtcttgttataagcttcctgcctctatttgtcacaaaattgagaaacttatggctcagttttggtggggttcttttgggaatcattctaaggctcattggaaatcttggtcttcgctttgccaatcaaaattttttggggggctgggttttcgatccttagtccatcataaccaagctttgttggccaaggaagcttggagagtctttaccacgcctgattccatagcttctcaaattctcaaagcctgatattttcgacattcttcctttctagaagctagtaagggtcattcgccttctttctcttggtctagcctcctttggggtagggatcttcttaagaattggctcatttggaaagttgggaatggtcagaatattcgtaccctgcaggatacttggattcctaatctcaggacccttagatacaaagataattcatctcctccttctgacagagtcagtttttttattaattctagtggcaattgggacttaaatcaattatccatttactttgatcatgacactgttacaaacatccttcaagttcctattggaggtcatgacaaagtcgattgcctcatttggaaaggagattcttctggtctccttacagttaaatctgcctatcattttgccaatacttcttctttacctccctcctcttctaatactagcttctataatagctggtggaaatttttctggaatcaaagtcttcctcctaaagttaaaaattttggttggcgtactttccatcacatcttacctacagcctttaatctgtataggaagaaagttgttccctctccttcttgctcttcttgtggttgtcctctagaaactgtaactcatgcacttttagattgttccagggtgagacaggtttggaaactttctcctttataccatttttatctcttacatagaaacactgatattaaagaatttatgttatctgcatacactgatctgaaagctgatgatttctctttgttaatgtgtactctttggtctatttgggaatttagaaataaaaaacttttcaggaatgctaa

SEQ ID NO: 329644 - DNA, 777 bp, Cannabis indica
ccttatctcttggagaataaagaagcgacccactatttccaaaagctctgcagaagcagagtgttgtgcactagcaaccactactggtgaaatcacatggatccaatactcacttaatgatctccatattgaacagacaacacatatattcatctattgtgacaaccattttgaaattcatactgtaaacaaccctaaattccatgaacagaccaaacatattgaattagatttctattatttcaaagaaaaaaatcaagaactcctccatcaatctcatacaagttagcaataacctacaacacccagaagcctttactaagcctttaccctctactacacttaccactcacattggtaagatgtctatatatgacatatatagtccatcttgagaggggagggggtgtattgttgggattatgccctaaaagcaagtaattaattgtaatatattatagaatatacgaaatacaattataagataaatgagtacattaactatagaagtataattaataaatatctgaaaattccttattcatatggaggaggtataatcttgtaaggatgttcaagagaattagaatgctgatatgaataaagtgaattcgagtagtgtattagagttaaagggaaatctttaaatattagaactactacgtataatttactatacactatactctagtgtgtgtgatttttgatttcagatcacatatgttagatagatatatagtaaaatgtgtttgtaagtaaattttgatttatactata

SEQ ID NO: 329645 - DNA, 575 bp, Cannabis indica
atttatttagaaaattaaaaaaaaaaagcaaaaaaaaccttcgtcagtttggtcgggttaacccgaccaaatagatcaaactatcaatcgggttactaattttttctaaaacaattgagcggattgtacttagaatttcgcgactcgatgtttatattaaatttaaaatatgtaatataaaccgaccaaaccgaccgatatacaactttaataatatagtttttactaacaatttttaaaaaaataacacttccataatttttttttaaaaaaatgggaaaatccaagtctaaaattccacatttatataaacttagaaaatatgtattttttgctgaatattaaaagaaaaattacacaaagtaccaaaaatatttttggtacaattttaacatattacggttttcaatttttacgttttttattatttgttttaattacaaatttacagtatactataaaattaatagggaaacaataagaaataacaaaatcaaaacaaaaaattcaacaaaatatgcaaacaacaagaaattagtctatttccatctctatttatatacaaattaaaccaa

SEQ ID NO: 329646 - DNA, 556 bp, Cannabis indica
aagatgattcaagttcagtcattgctactggaacctggacttggcctggttgttttgctcctgttattcctgaagctttgagcattttcgctggcatgcaacttgcagttcgtcttaggtattctttttgtggttttggaatctaattataatactgctatcacttctattctcaaccatatagttgatcgttcttatttagggtgtattgttagaggtatccttgcttattgtaatcactctcacattatctctttcatgtattgtcttacgattactaaaagtattgcacacttaatggcaaagctaattttgtccatgtctgatcattatgtttagtgacctaactacccagattgtatatatgctgctttgtagatatactactattgattaataaattctccttacactttttttcctcttgaaatttttcccaaaaaagtgtattgttagagatataccgagtttactcttgaaattttagtgagaccatttttctaaaaaagaaaaaagaagctacaagttagtatataaaaaaaaaactaccactttt

SEQ ID NO: 329647 - DNA, 667 bp, Cannabis indica
cttttgaggtagaattgatcaagtctagagttagatccatagggtcttatgttggagaagtgttaaaatcatgtggcattaagtatggagaacgatgtcgagttaggtctattgcacgaggagaattcagttgttatcctcctaaatatgagagtccagaagaaggctataatacaagcgaaccatctaggataggcgctaaggggcttgaacctataagagtcggagcagtactccctcttaaagattattacaaggaattttgcaactaccttggtattgctccattctagttgataccaaactcatacaaattactggccaatttaaaagttttataccacattctaaagtgagagtgtccgaccccacttgaaatacattatttttactcagtaaaggcctgccctacaaggaagcgaggagaaggttgtttttaccatctcgggacccacactaatgatcaaaagatccttgtgaggctgcccaacaagactgaattcaaggataaattcttttggacatctggtctcgcccctatcaatacaactgtgtttcgcattatacgtatgtattacctcatctcaaaaacttggttttaagttttaaatttaataattgtaggcatttacttattttatgttgtattgacagcggttacgaggag

SEQ ID NO: 329648 - DNA, 1766 bp, Cannabis indica
tcttattcccattctcattcctaagttttcatccttccaaccaaacacgacctttattctctgttatataagtggattctacatattaatgcattaaaatctgaaaaacaaatatgaatataatacagtatattaaaatcttcaacttcacagccctttaattgtaattaacgtgtgtttcatcgtataatatcaagtttgggatagctttaccatagagaaaaataattatagttgtgtgctattaaaaaaaaaattctaaactcaccacaaaataagtcctgtctattgacatggtttgagtgttatgagtgtttgattttcttaaaagttcgttcaaatcagtttttttttctgtcgagtgttatggcatctagcagtggaaatacgggggaggcagtaggagatgtttttgatttccagattgaagaggaagagttggaagcctttgccgtgagtggggaaggagacaatgaatgtatagatgataggtggtacttagttgggagatttttatctaaccgaatcatcgattatgataaaatgcagaatatactagcgtctctttggcagccaggaatgggaatgttcgtcaaacaactcgatacaaatagatttctttttcaattctaccatgaagtggacatcaaaagagtcattgaggggagtccatggacctatgatcggatgcaattaatcattgaaagattgccagttggaggggatcctaagacattggagttgaatactcttgatatttgggttcaaatccatgatgttcaaccagggtgtatgacggattcgacagttcgtggagtgggcaatactataggtaagttcctcgaaagtgatccgaagaattttattggagtttggagggattatcttaggatgagaatcaccctcgacatcaggaaaccactgagaagaagattaaaagtcacacgatctgatggagtctggttttgggttacgtttaagtatgaaagggcgcccacattctgcttcatttgtggagtgattggacatacagaaaaattttgtagcaggctttttcatcagccccttcaccaagtggtcaaaccgtatggtgagtttatgaaagctcaaccatttcgtagtcataagaacattggtgctcgatggttgcgcacacgaggatggacaccacctgtggtggccggcggtaacaactcaggacaggaggaacatctgaatcctaatatggaaacttttaatggagctgacatttctgctacaaaggtggggaatgatttgggcaatcaaacaacagattcaatggagattagagaatctcaggttgttaatggggtgtcaatcaatcctatgttaaatggggaaagttttcagcgcataaatagtgcgaaagaagttattagagatttatctgatagtttgactgtttatgacagtaaaaaaaggaaagtgggtgaagaagggagcaaggggcacgtggagatgggccaggaagctagtggaattccaaaaaacttaagtttggcgggccttggaaatggggctcgcccacaattatgaaaatattgagctggaactgccatgggcttgggccaacacggaatgttcagttcctaaaagagctgattgctcgaaataggaccagtgttgttttcttatgtgaaactctgagtaacaaaaaaaaggtggatgctttgtgtaggcagttgaagtttgagagttcttttgcaattgaagcctagggacacagtggtggtattgctttactt

SEQ ID NO: 329649 - DNA, 891 bp, Cannabis indica
caacaaaatctataactaaaagttataatattgttactaattataaattattattcttatgttgtaactaaaaggttcgtatctaaaagtattagtaataaaaattacgatttgttgtgactaaaactatattgtgataaattttatagtcacaattaatttttgtggtggtaaaaagtcatatttaatgataaaatttttataattagactaaaaaattatcactaaatgtaattacttttgtaataaaaagttattttttaaaattatataagatttaatatttaattatatcaataacaagataaaaggtgttttttttagtcttaattctctatttataaatgttacatatatagtacaacatcacgtgtaacaatgaaagggagtagtagtcaattgtcacgtaatgctaatatcatttgaattagactaattaatattaattaatgacctaattaataaaactaattatgatttatttttagttgagtgggtgttttgttgtaaataaaataaaataaaaagtagggatagaaaggtgaatatatgaaagtcaaaggcataaatataaatatgtacgttgggatacacacaccaaaaagaaatgaagattttcatgtaatatcatatcaccaatcgacaaattataaaatatgaagtgacagtaattatataatatataaaaaaattaaataaaaaagcaagcctagaaaggtggttcagaggactgtagtgaagtaaaaattgactcaacccaaaaaccaaaagtaatacaataataataataaataaataaatgagaaaattgttgaaaattattattagaacataatatgttttagggtgattatataacgcaccccttaaaagggatgtattgatacactc

SEQ ID NO: 329650 - DNA, 651 bp, Cannabis indica
ttttaattatttaaaacttttaggtgcattacattgtaacaattgtatgattatggagtataaaacttatataaatggtgatatttaatttttacgtatttttcttcatatttttatgttaatattaaaatttaggtatgtaattagatattcaattaaaaaaccgatcaaatccaattagtaattagattggatttgactggattttgaggtctaatttgattggattgaatgataaattttcaaatccaattactaattgaattggatcggatgagaagaaaaaagttagattggatcggaagcccacccctattgggcacccgtggtaattagcacctctaaacatgtcgccttgcgattcactagatgtactctctaaaaattattatattaaattatataggactcaatacttagttgacccaatagcgatattggcacataagagggtgctaagcaccaatggtgccttttagcatttctctatgaataattagtattttaggccctgaattttttacatatatgattggttaataatacattttgtaagtagttctgtgatccgtaagaggaaatatcaggtaagctgtgcaatctcacatcgcctggggaaggttaagtgggatgattctgagactgtgtagg

SEQ ID NO: 329651 - DNA, 530 bp, Cannabis indica
attagggtatagatgattttggggtttgggggcggtgttcagatgaaccggatttcatcatgaatatataaataaaggactattagcggcggaacattccgcccctaataactttaaaggtcgtcgctaatgctcaacgatctcacatacataaatttcactttttcagcaaatctcaattgcgattcccccaatttcctaattaacttcatgtgttctgtttatggaattaggattgacagtaaagctgggagaaagtggaagtgagtgagtccttcaattgttgttgtatttgttgaataggagcaatttcaagttaattatgttgaggaacaagtgcattgaagtggggttaattttgattatcaaatcaaattggtatctgatgatattatgaagaaagtagcagtaggtttttctctgcaaatgaataaactgatttatttcaattggtcactgactcactggtgctatgttcttctgagtttcccactctcactttcaaatcatatatttttttttattaattt

SEQ ID NO: 329652 - DNA, 695 bp, Cannabis indica
aaatattaagattcaactatttcaaaggatcaaacaaaattttcaaaaggccaaaagagggactcaacgcccaggttgacattttgtcaatctgagctgtttctaatcaagttcagcaaaaaatgttatgggcatttttctgtcatcagaaataacgaagattcaagtaaactaaatgagagaatatatattataattacctatttttttaatcattctactaattttactctttaatttttactctctatttcaaaatctattataattacctattttttcaatcactctactaattttacccctatcattttatgatagttttcatttttctttaatcaaaattttttccaactttcccacaaacttatacatccatctacaaagaacacaaatctattatgtttgaaattatgtcttagttatgtgattgtggaaggataatttgggtacaatactcataaaagaagtatatttgaattaaactttatttggaggtaaatttaattatataaaaaaaaagtatttttcaacttcttccaattgaattagatgaatacccacggctgttgagactctgcgaaaagcccagcccaataactggtattgaaagggcattttacaaaaatattgaatttgggttaatacttttcaattttactgccacatggcagatgttacatttatactgtcct

SEQ ID NO: 329653 - DNA, 1852 bp, Cannabis indica
ggcataaaacccaacaattgttactgcttttgtacattttttttaatcttgtcttgcctctattatgatccatttaataattctcatttttctaagatatctcatgtagaaaattattggagacctgaattgaagaggcaaaattatgaaattatgtttgcgactgttcaatattcccttttgtttcagcaagtgttctacattttctttaaaaatatgtatatttcgtaatgttagaagtcttttaacacgatatcttttctttgtttgtgtgtggttttcagatcaaataaaagtttggattttagagacaataaaatttcagaatggtatatttctttatttttagttacttgtacatttactttttcattatctttcattgtttctgtagatactaatgtgtctttcctttgattggatttgtggttttgcttctctagtcgtccattggaagaagatgtaagttcatactttgctatgttgcttaataaatatgtttttaaaaagtatctttaatagtttgcaatgcttaaaatgttaatgctaatagaagtcgatcgctgcaggttgtcaagactgaggattaggaatttaatactggaccagtttctcaactgataatgagtgtacaaaaacaacacccaagtaataatgctctcttgtgattacatagtgctgtttcatttttgtgctttatatttccagtaaattgtttctaaaaataaaaaataatattttatctgttgtcaaataaatgctcattaattgtcgaaacaacaaaatgcttcttggtcaagttagagcttttgacaggcattacaacgtggttctcgaaaatatctaacgcacttaaattattagtataattagatatcagttctcatgtaatttaaaacgtcgtattaagtcgtattgtattgtattgtattgaattagattatatatcatatttttatagagtaatttgcggcataacctccttaagtggtcaggtttttacaactaaccctcaattctaaaattttggtggtaaaaccccctaaattcgtgttttgttagcagtttaacacttccatccatttttagctgttaactgccatggtggaatgtccacgtgtacacagtgtacacgtgacacaattttatttgtccacataaatatatttaaaaaaataaaaaaattaattatttaaaaaagaaaaagtaaaaaattattttctttaaaaattaaaaaacaatttaaaaaaaaaaaaaaaaaaaccctaaataattttctttttcttttgcttttgtccctccagttggcatcagacagaagcaatctctcccaacaatatcatgtaaaagaaaagttcacaattcaaaaaatttataataaccatgtcattattcactaaaatgctttctgggtgattgccatatatcatcatcatcatcatcatcatcatgttacaaatactacaataggtaaagagaaaatatatatatgggtttcaaaattgcaaataaataggcaatgttaagcacgcatgtgaatgaggaacagtgaattacatgttggaaatattttacagggatctagatttactatcatgtatgttttattaacaacctaatatgaattctaaaacaataaaataaacccatataaagtttagtaaatcttatattgggtgcagcggaatataatgactcattctattcagatctctagcgcttgatttctttctgtacagagcataatcaagatctgaacctggatctctttatctccttacctttgatgctgatttgccttcttgttgtttggattctttacagtcttacacaatataattgagataccact

SEQ ID NO: 329654 - DNA, 1348 bp, Cannabis indica
ttttttttaatttttttttagaaaacattaattctcatattattgttaaaatgattttatattgaatggaattttgaacaatcgtttattgcacacttagttgatactagtaaactaatgtacttgtgtggattaatatattattattccaagtttgcaaaaaattaagatgataataaagttgtacaagtttttgtatttaatcaatacatgacttcaatgaggctataagaaggagtcatggtccttaatattaaatttaatttcatatatataatatatatattaaaaaaaaaaaacaaataactctattcaagattacatttaggaccaaataaattatattctaattgagagcttataactaaatagagttatactataaaaaaatcaaaacaccaaaaaatatcaatgtaaaaataataataataaataatccttaatactacattataatagaatttttttgagtaaatataatatttatacatgtattacaatttggaataaaattattaattctacataaataaatgtataaaatatatgtatatattttattgaggtgtttgtttgttaacacgaaacttagaaaatttataactaattacaatttagaggttatttttatttacatctgacctaaattgggattttaatttttttataataattaaaggttaatcttaaatatattctactttattatgtataacataatattccttatatagtatatttttcattttaaaaaaattatattggtcctgtgcaactaattttatacatggctatgcgcatgcttgatttatataaatatatatacaatatgtccgatttattttattactctatgacttccaactaattactttttttgttttgtatattattatcatatattatatctatataaaaaaatattacagacctatattttttatattataaatgatacgtgacgatgggtagtgaggtaattgatgatacacccacccaccgacttattagtatataattaaaaataaataataaataaaatattactccattataaaccaagaatttaattatttataattatttttttatagaaagaatttaattattttatttatttaattaagtaccgtgtagactgtagaatgaagtggttttattaataaataacaagcaataaaattggcataatcgatcaccctcttaaaattcaaataaataattaatgaacacatgataatataaacctggacagagatcatgtttaattaattataaatataattcagattttaatcttaataattataaagtacatatttattactcaacctcctctatatatata

SEQ ID NO: 329655 - DNA, 1418 bp, Cannabis indica
actgattacagggtcccaaaccccaataattcacttcacatgcatactacataaatacatatactttattatatatacttgttgttaattatttttatttgaaattataaaacatattcatatatatattatttgatgaggacgactatatataaatatatatatttcttttttgtgttggcacatggacaaaggaaagtgataccttttagcctatgaaagctgaaaggaatggggatgatcatgtacttgaatgggcctatcttttgataaatatatataaccattatatatatatatatatatatttatataataatatcatctatgttatcatcttttggtttctttccttcccttctatatatataaccatttatatatacaccaatatgtgttgtgactttaaattattatttcttcttctttgtcgtgtaatatatggatagaaaagaaaagaaaaaagaaccaaacccgacattatatatatatttatatattacttgtatgatcatggtagtggtacgtgttaaacaaatcttaattaattaaataagtctttctttttcctactgatcattgtatcaagacctttgtaatataagatcaagatatatgtgaatacatatattaatattacataaatcacagttttgcatgcaactttaatttttcactaatatgtattatctacacattcatatagagaattgttccattaacatgttgagacacaatgtagatatgatccaattactcaattagaatttgatatatatatgtatatccaatgaaattggttgattagtttaattaataattttgcactaatattaatcctcttattaattaattaattaattaatcacaatttgcttaataaatatatatatatatataatatatgtagacatatgtaattgtgatattgtttcgtgcatatatatatgacagtactataattgatttgccactgtattattaccttaccctctaaactagaattctttacagtggtactgcacatgtgtccaaatttaattgaaatttcaccaaaattaaaatgtatatatatttatatttgactttttttttaatttctatatgtatataaaataaaaattaattaaatgtttacaggtactgattcataaaaagttcattgactttttagtctttattttttttaacttagtacctgcatatattactttttaattgagtactcactgttatacttatatatatatatagtcttcatcccttaattattttattaccaaacacacatgtacacatgaacaaaatcaggggaattagatcattattgttcacaggaaagtatatatacatatgtatagattatagatatatcactcacacatatacatatacatatacatagatatatatatata

SEQ ID NO: 329656 - DNA, 566 bp, Cannabis indica
tttttttttctttttactttttgacataatatatattaggttgatgttatacatgtatatttagattttctcttttaattcggtaacgtatttaatttttagttgttatattaaataaaattatatataatttatttaaataaataatattattatattagaaaattacatgtttgatataaatgtttaaataaagaaacatataatagcaacaatttttttttaattctacttgtttgttgactaaaattaaatgaacttcataattaataactctataatcattgtttgtttattactttcaaacatttgttctaaagacgtaagatgttttataaaataaacctcatcataaatatcgttaaggttattgaatttttatcattgaacacgtgaagttcgttattgattcattctatatagaaactaatattgcaatattattaaattcattctatgaaaactaaatgtaaccacaaacaaattctgtattgcgtaaataaaaatataggaatatgattttgtcccgtgatgtactttcacggaatgtattccgtggtacatta

SEQ ID NO: 329657 - DNA, 533 bp, Cannabis indica
tccaatacacacgcccgtagcatttcttcaagtatctaaatagttctcacagattgaacattagtctgaggatgaaaagttgtactgaactttaacttagtacccattgctcattgtaaactctcccaaaacttgggtgcaaactttggatctcgatcttagatgattgattttggagcaccatgaagatgaattatttccttaacatatatatcagcatgttgatctactgtatacgtagtctgcaccgataaaaagtgcgctgactttgtatattgatccacaattatccagatggaatcatagaacccatccaaccacaaagtccatggttatatcctctcatttccactcagaaatctttagaggttgaagtaatcctgctggtctttcatgttttgccttaacttgttgacaagttagacattttaaccgtattccactatatcacccttcatacctggccactagtacagtaattttgttgggttttatgccctaaataaaactctgtttcaatgtaatccagatta

SEQ ID NO: 329658 - DNA, 650 bp, Cannabis indica
ataatatattttcaataaactctacccaacatcaactacaggtcgggtctaggtccaagtttgggtccgagtcagggtcctgggtctgggtccggggctcgatccgagtctgggttcgagtccaagtttgggtcaaatccgaatttgggtccgggtcaaggtcctgggttcaggtccgggtctcggtctaggtctaggttcaggtctcgggtcaaggaccgggtcccggtcctgggtcccggcttcgggtccggatttcgaattcgagtctcgggtccaggtctgggtcctggtcccagttcttggtcctgatcctggtctcgggtcccgggtctggtcctgctcttgggtcccgggtctgggtctcggtcccaagtcctggtccgggtccgagtccgggtcccgggtccgggtcggtggggtcccggttccgaatccgggtcccggttccaagtctgggtttcgggtccgggtcccgctttaggtcccggtccaggtcccgatttgggtcccgggtccggtcctggtcttaggtcccgggtttgggttcgagtttgggtctcgggtttgggtttggggcctggtcgagggtcgggtgttggaatttattttaccaggatcttagatctactcacaagtatgttgtttaa

SEQ ID NO: 329659 - DNA, 786 bp, Cannabis indica
tatttagtttttaggtatttttttttatatatttaagttaatattaaaaattaagtatgtaattagaaatctaattaaaaaaaaccgattaaatctacctagtaatctaatttaattgaatttttaagtctaattgtatttgatagatgatgatgttttaaatttaattactagttgaattagaatgaattaaaaaaaatatattatattaaatagaatgtccaatctcaactgtaagtacaaaacacttagatcaatttattatattaaataattacattgagtttttaaaatttaataataagaataataaagaaaaacaataaaagcttaaaacatgtgatggatagtgcacgtgtcagcacgtggttttgaaactgcccatgcaaaaattaaaatttcacctcttatattattattattattatttattttgctatgccaagtcttaattagttttgatttatgtttttaatgatcaattaactaatgacggtcaaaatgttgaccaacctaaaaaattgagcatcttaattttttggcacatgatcaattaagccacgttatggtaaattttattacttccatcatcattgttggttttttacttttgtaatatataattaaggtttaatcaagaatcaaaacaccaccaaatgcggtgcttattttgaattaatttaagtttaagcatcttggtgtgctaaaaattctttagaaatgaaaatatatagttatatacaaatagacaaatatgatatacactaggtgaatgtacgtgccgag

SEQ ID NO: 329660 - DNA, 425 bp, Cannabis indica
tatataatatataatatatatgttagatatatataatactaggtgagtttacacgtgcaacttcatttataagaaattgagatttaatatttttaagtgaagtgaaaagtgtaaatatatattatattatacaataataattacaagttaactaaaactgagcattttaagtacatatataacgtgtcctgtataagattctcattatttaaatatactttacatagtatttataatatttgtacattatttatatatttatttatatgctcttgtagatactttaagcatcattagcagtgtttgaggtgctcgattcaccggtactttcgagcggtgagataacgttgtatttggtttgacttccaccactatatgcatccgctctcgcttttaagtaaataaaaaatttactcgttgtaaaa

SEQ ID NO: 329661 - DNA, 815 bp, Cannabis indica
attatgttaattttttatgtaatcatttatgaatttatttagttttatataaaataatttatttaataaattgaaaaaaatataaattttatattaagggtaatatggtcaacttaaagtattccgattacctttccttattgatgtaaacaaaataaaatgattctgattctgtttccggacagtttagtaaacaacatgttagaataatgattttgatttcataacaatttattcccttttatttctcccattaatttattccgatgaagattacgctttagtaaacgtgccattaaagtaaattaactctttataaagtcatatcatttcaaaaaaaaaaaaaaagaaaaactctttctaaagtcatattaatattatattatattactgttataaaaaaatattatattattagctggatcaatatttttatatattaaaagtagttatttaacaataattcttgacttaacgatctcttttattttatttaacattatcactaacgccattattgattctttttcttttatgttaaaacatatattgcgattttaccctattctctcacaaagcttagtacttctcaataatggcgttagttctctacaatccccaacctcgccttctctcctctttccattgcagaagaccttcgaattcatcggaagtaagatccggagcttcttgttaaagagtcccacattgccaatctgtgaaaagataataaaatatataagaggaatgagctactcctcccattgccaattggttttgagatggaacccatgattcttatcatggtatcagag

SEQ ID NO: 329662 - DNA, 666 bp, Cannabis indica
tgaacattttgaccgggtttgatccggacccagccaacgcatctggacccaacccggtcaacccgaacattaaaaaaattcattctattcgggcaaattttcgggttggtttaatggtcaccgagttttgggttggacccgccgcccgcaaactcggtcatatttttattttttatttttattacatataatataataatacattaaaaattaaaaaaccctatacctctttcttttcttctccttcttcccagccgcacgcacacactccttctcaacccttctctttctcttcatccaccacacagtcacacccttctctttctcatttgagcttgatgaaaagtttcaactttgagaagtcaagccattatataatttttattttatatattgtttgttgtatggacattaaattagtaattttttagtttggatattatggttatggatatagagtagtattctcgactatagactttagatttctattcatattttattttcaaattttcagtttttactttggacattatggttcgatttggttatggacatgaatttttgatgaaacttgtttggttttagatttgactttttatttttagattttgaaatttaattagtttttttttttttttttttaaaaaaattttttaaaaaaaa

SEQ ID NO: 329663 - DNA, 945 bp, Cannabis indica
acttggatttcggtttttccatagcccctgagatccggagctatacagtagtaaccctggggactcagatattgcatctggttggcccaggattgccaaacctcagggaagccatggagaaacacgatcgccggatcgtgtttcgaccccaatgtagccacattcattttgatgttgtttatctcatatatattttcagggatgtgactacaatccatttttggacctacttgtttggcctttctattaggaaaaaaaaaacctttgatgactttttttggtggaagaaaagtgttattatgctcttatatatatagggtgtgatctctcgactcgatcgatcaaattgtctagatattatattcaaagcttaattaaattatttttcatcatttcacatgaaatacattattgatgaaactattttttttttactttgttgagcttgagctgggcaccgcgccaaagactttcatgcatgttagtggaaagaaattaaaattaaaataataaagacttgactttcttaattgatcaagtcatatatataaaagactagagtttatattagatatatcatgtgatccaccaaaagaggtaactgataaaatttagaatataatataataataaatttatagaaagcttcttcttaagtggggcattactttttgattaggagtgtttcttatttttcgtagtctattaaaaaattgtattcaatatattgtggttgtaataggaattttgtccattttttagaaattttgaatattttataatatttaaaataaagttaaattatcgcacacgttaattataagagttagttttacattgtttatgtgtagaaataattgtcatagataagggtgacgtgtggtaacacttttgttttttaattttttaatcacaaaataaaagtaaaatttttgtttttaaaaa

SEQ ID NO: 329664 - DNA, 955 bp, Cannabis indica
ataacgtacatgaaatataaaaaaaattagagttaaaattttttttagatagccaaaaatagttaagagtacatcaatacacccctttaaatggatatattgatgctacctatctgtttaacatccgaaatatttttagtcaatttttctcatggtcatgatgtcatagttattaagacatcctacaaaattttaagaaattggaaaagtttaacacaccgaaaattatgttcaaacagtgtgttgcacgcgtgactattttattttatacacatgtaaaatagactgtttgaacattgttttctatattgtaaattattccgaatttttcaaaattttgtaggatatcttaaatagctataacgtacatgaatataaaaaaaaaaaataagactaaaaaattcttctagatgctgaaacaagttaaaggtgcatcaatacatccattttaagggggtacatcgtagaatcaccctatattaatttaacttttagttttatttaatctcttattagaagtttcagtttgtttaaacattgtatttatcaattatgtacacatatattaataaaaaaaaataccataaattaacctttaatttatatttttataattaaaaaatataataatatgtatcataggttatactaatattgattgagttaatttatacattttgtatcataactttatagtacctttattattttatttgcacataattatttttagttatgaattttgtaaatttaaatatttttattgtaatattttaagtattaaattagttagatattattgcaaaccgctcacactacactatacaccgcattttgttatgcggttttgagataatttgccaaaaactggatcactgggaataataagaacagttataccactacattcctcaatatataattaaggaaaattctacaatgcaccccattaaaa

SEQ ID NO: 329665 - DNA, 898 bp, Cannabis indica
ttaagttcattatttcagaatacagtttacttgttattttctttttaaatgttttatgtttgtttaatttcagagaattgaagtttttgtgtagctttaatggtggagagcttcgacgaattttaatggcggtccagtagcttcgactgagttgttcgaagagcttcaatggtggagattcgaacagtgcaaaaattctagtttgagattgtttaaatttgtttgatttcagagaattgaagcttttgagtagctttaatggtggatttagttgccagattccacagacatgattggagagctttgacgatcgatcgagttatgatttcaaagcttcgacgatagagtttggatttggttgattgaagcttttcttttatttttgttctgggatgaatatatattgctcggtaagggtgtgatgcgcaccgttttgggcaaacgatggttgcctgaaaattctgggttgccatttttttcggttggttatgagttttttttcgaattttcggtaagcatatacatatataggatgttttattttttttcgttatacgtaagatattaaaaaattacccatctctaaatctcctaaactaaccaaaactaatatcaaatctctgtagatattttctacagagatgatatcgaaatctttaagaaaaattattcatttattttgaaaaaattggtagggataacaaagcttccataaacataaccatccacacataacaataacatgtgcaagtggattgtcttttatcaaatggaaattgaattttgaaaagagaaaaaattagtattaaaaagcaaattgaattctcatgatctcacaagatagcaactccctaattatgtataaataattatgttgaataaaaaaaaaaaaaaaaaa

SEQ ID NO: 329666 - DNA, 642 bp, Cannabis indica
ggctactgcatctttcttgggggaaactaattagttggtgttcaaagaagcaaactgtagtagccagatcgagtacagaatctgaatatcgggccattgctttggccacctcagaaatcatgtgggttcaatctgttctctctgaaatcagtattccaacttctcaatctccaatactctggtgtgacaaccttggcacaacttccttagcttctaaccctgtgtttcatgctcgaacaaaacacattgaagtcgacatgcattttgttcgagatagggtcctggcaaagcaactggacattcgatatgtggacacagaaaatcaaattgcagacctgtttacaaagcccctaccagtaatgtcctttcagttctttcataacaagttgatacttggtgataaccagtatcacttgaggggggatgttagaactacacataattagttattgttagttactgttacattgttgatttgtacactaagttagttaggtctgttaatgagttagttattctgcttcctttatttttggttgtcaatcattgtaatcaattggatcttttgtctatataaataagacttctctgccaactgagttcagttgagctttccacttttcatttcatcttcttcctcca

SEQ ID NO: 329667 - DNA, 552 bp, Cannabis indica
aatcataactactacaattaaaaaaaaaacttcaagctttaggctttttattgagtatccatttttttacttccacttaagtttattgttttattgagtttttatgattattttttttttaaaatctctttgagatatcaattttttttcaaaaatatgtatgtaataggtactcgatgggaattcttcccccattaggtaatcctcgtcacgtccccactttaatttaaacggataatattggacgggtatgaggtgaatttaataagcgtgtatgggggtgggagagcaattctcgcatccgtcccgtcccgtttatatccctattcgtaaatggtaactatatgtcaccatcttattttaatttaaaataataatataagcaaatttaatccgcatgtcatattctaattcgtgtaaaacttaattttcataattaagcttatgactaacattttgagtaatgtgttttaactactcaatcttattattccaaaacaaaaaaacaaaccaaactactcaatattccaataatgaaaaaaaaaaaaaaaa

SEQ ID NO: 329668 - DNA, 540 bp, Cannabis indica
aaaagattaaaacaaaagtattttaaaaacaaagaacaagaattaaacaaacaataaacgtaaaataaacaagaaaaatagttgtataccttatcatttaaattttcagaaccaatgattatttgttgaacagcctgcggttgaaaagcatgatcaattaaagcaacaatatcctgaaaatattgatcagaacataaacaacaacaaagatacaaaaaatataaaaaataaagaacataaaaatttaaataaataccttgctttcatcaaccctctttttttttaacataaacaataggatcaacttttttatccatgatatatgaaaacctaaacaacagaaaggatacaaagaaagataaacaagtaaataagtacacataaaagattaacaataaccatatataagtaataaaatataactgccaagccacatcacaaacacataaaaaaaaactgccacaatgtggcatagacaattagtgcacccactaaaaacacaaataattaaaaaaaagtattaaaataaaaaaaataaaa

SEQ ID NO: 329669 - DNA, 1144 bp, Cannabis indica
attacggcataaaattttttgagattaaatgtgacttttagtcaccacaaaaagtacatagtatttaaatataagttgtcactaatttagttttagtcacaacaagtgttgtaaataaaaatatatttagtcacaacaaattataattttttgtcactaatatatttatccacggaccttttagtctcaacaggaataatgatttataattagtcacattttttttacttttagtcacaaattttattgtgactaaaaataacttttttatagtggtttgaggattatgttgttattcattagtgttcttcagctcttagatcaatctgattcataacagttaaaagttacgtttgatgagttgtcaagagtgttagttagtttttcagtacttacttgttactactctgtacagaagctctattgagctattgatttttttgtaagttcaatctatattctacaaagttcaacttttttcaatctctctctacttttctatatctaaagctaataaacctatccaaattatatattaaaactttgaatttaatataatgtaattaaaattatattcatttcttatattttgtgcttataatatattcgtttggtagtaaatttacatacttttcacaaagaaaatggtaaaaacctcaatttattattttaaaattaaacatgtggaacaaaaaggaaaaaaagattaataaatcacttgttttttttttctttctaaaatacacaatatgtttttactttgagctttgtgtagaataatagataaaaattgacatgtggtccctgaaactcgttatatataatggatacttgcagatatagaaattaatgtttgcacgaattaatgaaaagctaataatagcttatatgattcaaacatgtccaaaaaaacaccccttaaatccgtggtacttatgtttccttccctattttattgtaatttctttgtactttgctattttattaattcaaattaactataaattcactttttaaatctataaatataacttgactgcaatttactaattatagctgtttttattcactataaataagaactttttgtgttagtactaatcaataataataaaactttaaatcaattatcatcatcatctcc

SEQ ID NO: 329670 - DNA, 699 bp, Cannabis indica
catttttatattgtgattgattttcagatgttgaattggtaataattgatcataaagccctacgttggagttatagaaaagcaaatttgagcaaaagtatatacttactttcatgggtcattgtatggtcttttaagaccgtgtttgtatttttttttaagaaaaaaaaaattgtttttgtagtttaatgactcataaacaacatttccattttccatttattatgtaaaaagatatattatataaatatataaatatgtattaattatgtgtcgtacgttttgttgataatgatcgataggttgagaaaaacaaaaaccctaaggcgcagttgttgaaatatattattcctacatatatatgtacctacagcgaaatatatctattttattttaaaattaataagttgtaaacaatttattatacatgcatgccattaattaatagttttatttttctattaaaagattatattttttaaaattggtattgatcgaactctccaaacataaaacaattaataataataataataataataataataataataataataataataataataataataataataataaataaataaataagagcacagttatgaacagcaccttaattaaactattaagtaacaagagtttagtaagacttttatatagtcaattaatcatgtaaaaactgaaactaact

SEQ ID NO: 329671 - DNA, 544 bp, Cannabis indica
taaaatattttttttataattttgtataatattaataatattaagtataccaatatcgggacacgcgtgtaagtgtacacatagataattcatgttaaccgtcaaaagttaacaaaatttaaacttaaacaattaaatgcaagtaaaataataatttaaagagtttagcggcaaaaaaactctaaactggagtattactattgcttaacacacagtggatgtgttcacatatggttttgtttgagattttttaatttttcaaactaaatcagtattgttattttttaaaatttaaaatcaaacaagatcaattaaataaggttaattagaatttttgtcccttgaatttttaaggttgttgaaaatgcccctgaactactgagattgttgaatttaaggacttttgtctgatatcattcaattttactatttcagtgattgctcatgtactaaaccacgctccccagattttgatatctaccaaattatgcctatcgaactttgacatgtactaaattatgcacctgaactttcatccatgtta

SEQ ID NO: 329672 - DNA, 597 bp, Cannabis indica
atagtaacttgatattttatttctttagaaaatcttaataaaaattaaattactaataattattaaatagctttttacaatttgttactaagcaaggatgtttaaatataattatttttcttttgcactaaattattaatatatttgtaataatttttttatattttaaagttattacacacataacattaattaataaaaaaatagtaagaatgacctctaaatagaagtaactctacgctcaatcttattttcaatactttaaatgccaaatcagtatattagttctagattggttcaaattatttaattattttttaaaaaaaaaaattaaataaaaaatgaaaatctaataacaattataattttaaagataagttagcttttatttttctaattctcctccctcatcatcaagtcaaaaaaaatatattgaaaaaaacaaggcaaaatttacatagtaaaatgatcaccgagaaataacattgattgaggaggcggagccttgtaacaccctaatgattaggcatgctacaatgaatttttaattacagtgcgcacttttgctaataataatgtttttaaaaaaatcgtgat

SEQ ID NO: 329673 - DNA, 1144 bp, Cannabis indica
aataggaaggccaagttagcaccaaagcaaacggagacccgggtgctcaaacaggcataaagtgacaacccagctccttcacaagaattagtcggccacactggccagccgtatggttggccagccatgggactgcaccacgaccggctagcctgccctccaatagggcttggccagacaagaggtgctcttcatggtttcttgtgcacttttacacgtggacaacaattcatgggctgcaaactgggccctaaaagcccaacaatatggcttaaaaatatctagattcaagggcattttagtcttttggaattacataaaaaattatgcaaatatctagtgtttcaaactgtaatctagggtttaggcctcttatataaaggccttaacactagcctagaaacctatgttgaatctaagtctgaaggttgccgtccaaactctgagtctaagtttgacaaattctctcttcttcattacctctctcacacgcccgtacaagcatcatctctatgttgagctttgtgcccaaaataaaactctatttcagtaatttttctatacaattatcaataaagaaacagattgattttcattacttatttagtgtgctatttggttcatgtgataatttatatgtttatctaatttataaattcatccaaatccttatcacataattattcttgtttattgtgtcgaaagcataatggaatgtaatcaagattatgtgataaaatgtattcctatgatttatcagtatacagaattcaattgataggataatctacaatgtagttcacttgcaccttcgataagttctatgtcctttccaggcctgagattggtaggtcctagttcagttgcattatttctattcttgaatttatttgttaaagtccaccaaatggttcttcccatgacatataggttaaggacatggtagttcaattgagtgtgagcgctaatcatagatacggaatcaatagcttctatctggatatagaagtcaaatgatgatttcctttgagctttgcttaatagagataaatggttgactacttatttcagtgattagatttgtaaagctcgcatagtttaatttggaaattagcagttaattatgattatttatgaaaattat

SEQ ID NO: 329674 - DNA, 754 bp, Cannabis indica
attactttctgtgcttgtgtaatacatttcacccaaatttatcattacaattgaccattatatgttttaatattcatcgtaatcattacaatgaatcacttttatacaaaaaaaaaaaaaaacacaaacgaattacaccaggtcaggcaactctgcttgaatcaaagaagcattgtttcaatgtcgaggagaataatagctcaccaatccgcatgattaacttccccacccttagaccatctcgaatgaggaaagtattatttttttatttttttctttcatcagatttgatacatttttttttatataaattatcttggggataattccaaaagttgtttactatgattcatataccacatttaaataaaattttataattatatatattctctcaaaaaaattagttggtgataaagtaacaattttcaaaataaataaatatataacatctcacggtcattgctcattttggataatgttattcataagttaatttgaaatgttgaccaaaatacacatatggcaaagaccttccatgggtaactcccattgaagatgctctcaacatctccaacgggggttgcccattggagtagtcttgatacatatgcaatgtagtccaattatcaataccaattttatgtaggggaattaccctatatagtattttttattattatttttacatttcgagttgctctagtagttattatgtaggttgttatgtgaatttgggttgcgatttaagttg

SEQ ID NO: 329675 - DNA, 585 bp, Cannabis indica
atttctttcaaataacagcatttaatataaaatatatatttatacaattatctttaaaataagaaaattacaaaatacaatcactcgtgcacaggtagacttggttaagactttgtttttaatcttccatctttcaaattataaaggtgaagaaaatagagagagtaatgattactaaagtaattacatgcaaataaatttagcatacatattcattctattaaattataatattttattcttattcttttagtaaacttgcttcatcgaaccaccttggaggatcaaatccagatccacctaaccaaatacgtaaacaaattagttaaaataattattaaaaacaagaccaaaatgattcaggttaagattataaataaaaaatcattaccaagaggattacaacgacaaatactccaagtagttaaaagagtaccctttacaaattcatatttcttgtaagtttctattgaatattcactacaagttgatacaaaatgacagcttttgggtaatattggtgatatttcacctgtttattttattcattatgtaaatttataaatattttttagagtcagaaat

SEQ ID NO: 329676 - DNA, 521 bp, Cannabis indica
tataatatcaatcaatatatatatatatatataaatgagagtctaaataaaattgaaatgatattctataaatcatttattgtattttatccttttttcctttatttattattatatatatttgatgaatcggttagtgttttcattattctaaaaattcaatttacaagctaagaacacctttaattagaagacttcaagtattttatacaagatttccacatttataaagataagaactatttcgagtcctccaagctaccttttagaatatgagagttattttaaaaaaaaaaatctcacataatttagaaactattgtggtcaaagatagaggtagaaaatatatgtgaggggggccaaagtgcaaacaaaaacaatttgaggtgggccattaaataagtttttaattaaattaagaaaatacaattttgtaactaaaaaaaataaaaataaaaatatttggggggacggccccccatagtccgttaatagctatgtctctgattgtggtgatatac

SEQ ID NO: 329677 - DNA, 1202 bp, Cannabis indica
tgatgataatgtcattatgttttgcttagaaatcaccaggccaccaactctccttaatccctttttctttgtccatttctatgctttaattagaggacattgaagtcatcaaaatcttgtgtatattgacattattctacacttgtaacatattttacttttttgaagaagaaatatctttcttttttaatcattttttgggttttagttatttaagtaataccaactaggaaaaagttatttggatttggaatttgagtactttgtgacaatggcacgaaaaagaaatccattatcttagaatttggcttgtgattccttgttctatcatttatgtgatagttaagaattttttttagcaagttgcttggagacacgcaagtagaaagaaaaaaaaaaaggttgatgccttattgattattatttgttgcatcagattttttatttatttttttagttgaatttggttggaggtaaatagaatggaaataaattatttttttttatttatttagttgtattttaaactattggaaattgaaatatcattttaataatatgatttttctattattttagtagaaagactatttcatttaaaataaaaaaaaatcattaaatgcttgataaaaagaataaatattttttttaccattggagaaggggaaattcgaagatggaacttcctctttgtgagaaatgtatttctatatattttaaattttattttatttttacttatgatcacaaattaataattttattaatttatttatatatatattttaaattttattcaatttttacttttattattctcattcacattactattcattcctactactattcctatatttatgtaatgaaatgccattttaatagaatatattgtccaaatagaatacctatttcattttgaagtgggaggaatgaatattccaatgcaagatgagaatttttttaataatttcttttttatcaattttaaatttaatttaatttcattactatttctattctaatttctatattttcattcctattatattttcattcattccaactaaatattacttattccattgacaatatatcctaatttgactttaatatataaattagatttgtgtgtaatttatagtaattacacaattttgacatgtttgtctgaccaagtaattacactgtaacagtgtaat

SEQ ID NO: 329678 - DNA, 1837 bp, Cannabis indica
aatcaatacaaaatgcgtagatgatctcgctgccttcaagttgtggagatttgccttgatgatgattagttgatcgcttcggggcaagaccttcctccacacgtcattagagaagaagacgctaattgtcatagacctcaagtaagaagagaaaatgtgaacgttatccgacctcaagtaggagaagagggggcaagcaggtgaggatctcaagcaaggcaagtagataatcgttgtgaagagattgcagtggacgggcagtgcaacagagttaccgcctttgacacgaccaaaggtgaaggtagggcacaatggaagaaggtctcatcatcacgaaggcaccctccacggccaccaccaacactatgagattccagtacctagcgacatcgccccagcaaggaagagaaccaattttgtgagcctaaaatcccaaactcaccactgtgaagatgaactaaatgatctttgctagaaaaccaaagactggaaactacggtgactaacatgcaaaaatcgacagagaagatttttgagattagtcaataattagtctcggcggtcaagagacttcgactatgagagtcggtggaggaatgattgaatcaatgcatatgtcccaggacttgttaatctcaaagatcaatgcttgcaagtcttggggtatatccatgcaactcagaggtcaaccccgtaacaactcacgagtatagttagtaagataaaattactaagatacaattgttgaaggattttcataatgatgcgttcaaaattagatcttgtcataaatataaaatccatatatctctatcttatctttctaatgcattttgaatcatccaatattttgatttatatcgagagagttatagtcaaaatactaagactgttgaattgtgacaactggacgtgcgagcccataagccgttgtgcgagcccttgagctattgtgcgagcccataagtcgttggacaagttagggagtatttggctgagccgtggagtatgtgtgtgagtcgtggagcctttacgcaagtggctgtgaagtattcgttcaagccgtggtggagcatctgtgcaagccatggtaacatcggtgcgaggggctcgcatgtgaggctacaagacggtgagataggggcccgcatgcgagcccgtgagggactcgcatgcgagtgcataagtgtggttgcgaggctgcaagacagtgagacgaagagtctcttgcgatcccatgaggggcttgcatgcgaaagtgcatgtgtgcgcgagtgcgatgatgcaaggttgtaagatggcaaaacaggggcttgcatgcaaccatgagcggctctcatgcgagcgtgtgcacgtgtgcaagtgtaacactgctgcgagaggatgcatgcgagacaagggctcgcatgctcgcatgcatgcgtgcttgtgtgtgcgtttgtgagaatacttgtaagcatgcgtgcatgcgtgtgcatgcaagcccgttagcgtgaaaacgttataaagcgtcaagtatgttgcttgtctgaagaggagagaaggtaaaatttgaatgcatatcgagaagaatgacgttggagaaggaatcaaagggtaatgcatggaacgaagagatatacaaccacaccttctacaaactctaaaaccaaaaaggtacgagtagcggagataatgcacctggaaggtctgaggacctgaccaagggtactctgcaacctcactcctacaactagggaccacactcctgcaaccggggacacactcctgcaaccattgaccacctgattgttgagttttatgccctaaataaatctttacaatctgattagttatc

SEQ ID NO: 329679 - DNA, 1267 bp, Cannabis indica
ctattccgctactaccagagcttgaatcgctatgtttcgaattgaaaatcaaagagaataaataaaggggataaggatctcgtcacacagaggataggggaggattttcatttttgtatgtttatattttaaaacataatatatatattcggataagttttaataaaactttaataataataataataataataataataataataataataataataataataataataataataaaactttttattaatagttatcctagctatcatttcttaaccattaagaaatctctatttttagggcactaaatcaaatttcacgtactcctaattaccccaatatttacactttcaacttatcataattttcttgcaaatctattaattaaacctgctatgacattttggctcccgatcgagtctccaaggtcgccaaacttaaaaatgtttttattatacaaatagctcatataaccttcacatatgctatataaataattaataacttacacttatttatccacttataatagatttaaaatttatgctaaaatagactagaatgatcataattctacttattacttgatcaactcataatataaacataaaccctaattatttaccattagacttattgggatattacacaagtagtcgtcgtgtgagtaaagattaacacaataaatgaaatgtttatgatgatcctatcgatgaagcaaatgaaactaaggatggtgatcatactgatccaaaagacgaggaaagtagtatagaaggtgaacgcgatgagcaaaattctgcaatcattgaaatggccgaaaaattggtggaaactgaattgaaattggcggcctaagaagagttctctcgtagaatactggaaactatgtcgcgattggaagcaaaactcgtgccaagaaagtttactctttgatgaagaaaatcctgacgatcttattctaccaggggataataccacctaagggcaaaaaaattagttagtaatttaaactttactatacaaaaattaaattaattaaataaatattaattatatatattttgtagcattctaattatatcaataaatatcaatcaaaacatgcatatttatggtacaaattcatattctatgacacaaaattttaagtttataatatgtatatggcatgtttctttaaattatttaatgtaattttgcactccttttatgtagagttaaataaattctttgtgtattaaaattgcggtaaaagtcctaaaaa

SEQ ID NO: 329680 - DNA, 621 bp, Cannabis indica
ctctggtctacaccatttggtgtgttcgaaacgccaaacattgggagaaaactgatactaatagcattgcaatgtttaaacaggttcatgtaacgaaaagtcggataacttgtatatggccaaaaaaaagtatctagtagtgacaaagtttggtttgattcattgtaaatattatagagtctaaggtcctctctttttatttgaggatgcttgtagatttatataaattgattattggagtaatgaaacatcatcatatttcattaaaaaaaaagaaaaatagaaagtaataagttacattgacaatttagtaataattaataaaaactaataacatataaataatgactacaacaaaattttaaaaaaattattaatatgaaaaattatttatgtatatcatctatttttatggatatatacttttcttatattttttttacgggtatatatatatattttttttttgatgatctgagtatatgtttttgattttttttatgtttctagataaatgtatagataattattttatttaatttttttattgattactgataattaattttaatttttttacaaaaatgcaaattacacacatttatatatatttttatatat

SEQ ID NO: 329681 - DNA, 795 bp, Cannabis indica
tacggtaaaaaaaaaaaaaaaaaaaaaagcaacactttacacatctcccacaaggacacatgcacgaaaacaaatgttaatacttttgataattgtgcgtgtcaacctaagtcccacactggaagaataagtaagagtttctttgaatataagtgtgtgtcttattaataattacaatggtacaagatgaaaattaatgttaagagctgttgaaattcttccgaacaaagttgacctgtgtgtgtcattcacccattcaagttgaacaaatttccattgaaatgatcaaaatttcaaaaatatcatattgtaatcaaatcacgtggaactttcacaaaagtactgaatttgggcctaaggtgtctacaatttgggttaaaataaaatcttggaccaacaaatgagacatctcctcttctggcacattgtttgaaaaatttacaaaaatatgatcaatttaaatctagctttaataaatacggaaagaaaaaaataagtgaaaattacaccaaatatgggattctacaaaaaagtttgaaaaatatggcttttttaagtttaccacccttatatggcatttatttaaatttaaagttatatatggtattttctttgccatatttttgtaaattcaattttaaatcccatattgtgtattcagcccaatttgaaagggtatgtttgtaattttatattattttttgccaaccgtttttttttcatgggttgttctttttttttaagaaaaaaataaaaaaaaataaaaaccagcctttgtcttttcaacttctgcat

SEQ ID NO: 329682 - DNA, 627 bp, Cannabis indica
ctataaaataagaccaattaatggattctcttcttttttcacactttaacaaatcttttctttctttccttgtctcctatttgtagctcctataattactaaaaaaaatatatatatttttaatagaaaagtatttttcttagtcgtccaagttgggtgggttctataattacagatatctaattggaaaaaattgtgaactaacatattttatagcacattaatcaaatataactgtaaaataattttaattaataaatatttttttttataattaaagtacccaaacataacttatcaaaactagagtagcgaagctgcataatgagaatgggacctataaaataagttataaattaaagaaagataaaaattaatataagaaataaaaagtgagtatactgcataattttctcggtctaatctgcctttactcaaatacgatcgtgagttatattgaaacttgtttaatatgttgtattacttattatttagatttaataataaaaaataatgtgcttaatttggggctataaaataagaccaatggcctctcttatttttcacacttttaacaatcttttctttctttctttcttttgtctcttattttctatagctcctata

SEQ ID NO: 329683 - DNA, 711 bp, Cannabis indica
ctagtcttcattcttcaaaaacaaggtattaaatattccatttgcaatttgcaaaaacacctagctatatgtggaagaatatatatactaaaaatcataaaattcattaattctcatcaagttgaagagggtacaataagaagattattaaagtttattcaaaatatataatcattataattaatttaattaggcttttttgaagttttcttttatgcgacaaaattttaatttgactatgaaaaaaaagtcattcaaagctacttttcctctttattcacttggcattttgtgttcactacaaagttgtaataataattattattattatttgaattgactaattattaatattatcataaaggttaaaaaaagtatacaaggattaaagaaatttttttccaaaaaatagaggtgatgagaatctaattattattacatcatttaaataattaatttatatatgatatatagtgaaaatttttacatgtgtttttttaaaatatcataataaagtacatccttccacacacaatattaatattaatttatttatatagaaaatggaattctatttctagaagtaattaattaacatatttttatataaatacaaattaaaagatttgatcagagtcaatattgacacacataacgtgatattatgattgtccataatctatatatatgtatatggaagaggtttcaatg

SEQ ID NO: 329684 - DNA, 931 bp, Cannabis indica
cctattgtgaagaaactataaatagtttttgagaatgaaatatagcatgtagatataaataaaatgtatatatgaagtgttagcgtacccactacttttaagttgtgtctactccacctcataaaaatgtatatgtcattttttttgttcggtctacaactgactactgatgtgtattacggaaattagcttctaaaaacacaaattaagattttagactttaaaacaaatatattttgcattaaatgagacacaaagaatacatttataacaaacatcttagctgaaattcaagaaaaactcacctgaaaatatagttaatcaacaattttcttagcaaaacatttaaaagaggactaaccaaattaaataccaataatcaaatgtataattatatatgcttaaatatgtttagaattaatgggttatgtttaattatatgatttgaaacaaattaatatcaagatattattgttttctttctggcacgtagcttcgtttcgttaaacttgctgttacttaaccacaaaaataaaaatagttaaattaagaattcaaaaattgttattttaataaatcgttattaaaaaaaaaaaaaaaagtcacccatagtattaatatggcttgagtcgtcagagtgtacctggtaagaaaaaacttgtcattgttggaaatttataggtgcttcaatagaaagactaaagtcaaaatacaactcaaattgaaaagtacaagaacaataatattgataaaataatgttacaactctagacaaaatatacacataagtatagaaaataagatgaagagaagattataaaatacaatataaatagtagtatatatatagatgtgagaacaatctcaacaacactaacaccaagtgtcaagtaggggaatcacaaaacttgaacaaggttttacacctttg

SEQ ID NO: 329685 - DNA, 646 bp, Cannabis indica
gcagtataaaagtaataaaatgcaaaaatacagtataccatgtaaaatccctaaattttctctctttctttgttttctactcacatccacttagctataagtaagacaggctggcccaactacatacattgggcccaatttcttttgacaaaaatagcatattatataagactttagaaaaataccacttttctgtacacaaaagtaaataggtatatttctcaaaagtagaagtaggctgttcagaattcacatcatcttaactttaattttacaatgtccaacaaatatcttatcattcatttcattccactaatccaatccaaccaaagtacaattcccaactctttttccctttataatttattcccttgttatctaacttttcttttcttatcatttctttcacctaactcatgtctatgcaattgtctcttatatatcatagtatgttcatacacatatgtatatatatttatatacatacatagcatgtgtctatagatataaatatatatatatatatatttatatatgggcaccattattagtgtactagctagtgaaaagaaaactcaactgtaatccaataattttgaatgaggtcaatttaaaaaggaaaatttcatttttaatgcttaaaaaa

SEQ ID NO: 329686 - DNA, 490 bp, Cannabis indica
aggaaaaaaaaataaaaaataaaataaatgtgatgaagcataatatatcttgtagacatattatcatgttaacatgtctattcttaaaaaaataaaaaaaaaataaaaaaaattatgaagcattatataatttgaaccatgcatacatggtgtttcactaaaactaaaagtcgatgaggctcattggtgattcattggagccttatatatatcaggtaattttttattatggatttttgcagcttgtttcgagaatttctccactctctgcagttcttttgtgttattagacataatttttcttttttgaaacttgtcaaaatttattttctccacaacaataacaaaaaaaagacacgatattaaaattaatctatcaccatacacactatgtgatacctgtaataccggatgctctttctataagtttagaatttgagaataagataaataaggttccatcccaaaattaattggcaatgggaggagt

SEQ ID NO: 329687 - DNA, 666 bp, Cannabis indica
gagcattcacggctcaaactcgttaaacctgatgttattcttttctattttactacttaatttattacttgaattcttgagatcacttggtatattatttcttgattgtgttgcgtgtttgttggtaatataaattgaatcgtaagtcattaattattctattttgcataataaactggtatcaaagcttggtttgtaatcatggctgttgcgaaatacgatgttgaaaagcttactagtacgaatgactttggattatggaggatgaagataaaggctttgttagttcatcaacggttttatgaggctctgctaagaaataagtctcttcctaattcgatgtttgataaacataagaaagagactcttgcaaaggctcatagtgcgattattttgaagctttaaggttctgaaaaatgttacaaaagaaaatacggttgtaggtgtatggctgaaacatgaatttctgtatatgactaaatctttggtgaatagattatatatgaaacaagccctgtattcattcaaaatgatggaagacaaatttattggagagcagattgatgagtttaataagttgattctcgatcttgaaaacattagtgtcgccattgaagatgaagatcaagccttgtttttgctcagttctttaccaaagtcctttgc

SEQ ID NO: 329688 - DNA, 587 bp, Cannabis indica
cactgaaaaaataagtgttgaaccgattcattacccttcccacaaagcaaacaagttaagtccacctgtgtgtcatatttacatattctgtccttagtcttcaatctatcccacaagactagccataagataaacttgtgtttgggaacccttaaaaaaatttgcttgtgttagaagttatattcataaatttgcttgtgttttagaataaatttttaaaattttcaaagaaacttatattcataaacatctagaagagtttattctagactattctagctacatataaactaattaagttaaaattgtctagaatattaaattagaaaattctcgaatgaattagaaagttaaaattgtaaaataaagaagaaaaaccaactttagcttcctaataaatactatgcatgcatgggttgagtggaaatgtaaccaacaataactatacaaaaatcaataaagcctattaacttctcttacctgtcattctctaccatatatacacaaccaattattaaatttttaggttttaattaataatttattttattttaatttaatgaaaatataaatattaaatatttatt

SEQ ID NO: 329689 - DNA, 630 bp, Cannabis indica
gataatataaaaaatttatggctaattgtcatatctttatctttatatataaaaaatgactatctaactatttttcttagtttaacagaatatatactttaaaaataaaagaatattccgttaaatttaagggatgttatcagtattgtttattttataaatatgtaattattaatattattttatttaagtttattattacaatattaattatataaaactaatattttaatttgattttattatttaactttaaataattcaaaataataaataattttttttttcaaatttagttaaaacaaaattttttttgagctcatattattaaaaaaaattagtcaaaacttagagattttttaagtggattggtttgtgaacctaaacaatattaaaaaaaaaaagtgatattagtattttatcatatatgatagccttaatatacttccacatgaagattatgttatgaccttttattttaactcatatatttgtaatattatttaattattataacatttaaaaaaatatatgtaatctaacataaaactaaacattcataccttgcacgaaacattatctagtttatcatttgttgttgtaacatagttgattaactaataataattt

SEQ ID NO: 329690 - DNA, 659 bp, Cannabis indica
attaaaaaataattttaaaaagccaattaaaaactacacgaaaaataattataaatctatatatttaaggtgacatgtcactttaaattaattttcttttttttttatactatttataagtattaataattaatagtaatttttttaaaaaaaaatcattcatacggtctatataaactaactattctatactatctatatatctaccatatattctcaaacaaaattattttttatcatttactctctcttctcttcctttcacagtgcctctatcaattaatttttcacgtttttcttaattttgtttacacatattaatcatattgacaattattagtgttcttatatatatgattaattagtgttgatagtttattaatttatctttataatgtagacattgacatatatacatgtgaatctttattgttacttatatggaaaggcaagctgtgattttgtaattttttttgggttggctacttatatataatactagtaaaaagttacgtacgagacacgtatattaaattttattgctaggtattttctattatattaaaacgtaatacatttaaaaatgtttatctcatctggttcaacctacttatgttgttccatggattgtgtgttagatatgagcttagaagaatagt

SEQ ID NO: 329691 - DNA, 768 bp, Cannabis indica
tcattttcttattggtatacttaaattattttttttaaaataaaaatttaataatttggaccaatcaaaaattactacatggcaatttatttaaccaggaagttccaaaattataacttaggtattattactattaaaaattaaatttagatatttatttgtaactgaaagttaaaccaaagccgtctctagccatttggaggccttgggcgagctttaaaataaagacttttttataacaattttttactatatataaaataagaaattgaataataaataaatatatattttatgaatcaattaaaagataaatttataaaaaaattatttttctagtctttcgcaaaattatttattaaataatcatagtaaaatttatgtaacattttttttaatagataatatgctaatccatttaatttcttttacgacacaaatgatcttaaataaagtttttataaattttagttttgaaaaattttctttacatgcaactcaaagtgaaaatttcacaatattctataagagatataagcaattagaaatgaatcaagtttatatatatgtataaataattaagttctttcaatgaactataattatcaaaatgtctattataactttaaaaaaaattcaagattcattcaatattattaacttccattaattttaacttcaaaaatttttatttttaatcaccataaaatttgtaactataagtaaaaaagttgtaactaattataaattattattcttatgttgtga

SEQ ID NO: 329692 - DNA, 738 bp, Cannabis indica
ttgaatccagaagggggtgtatctgatactttcaggggtgggggtgggtgagacatcagggtgggtgaacacgataaggaacttatcaaagtgccaaggttgttcttcaaggacacggcggcgatccccatcacattggaaagtagccaaaaagaggccagagtggtattcagtgatttaggcagggaagcgaagagtccacgcctcagacatagctttcttaatccaggcaggcttagcggttctaggggataggagtttaaagatgaggcagaaggagttgggatcagaagaggaagagagagagatgtggttaaaatcatggatgagactttcttcttcagagagaggagtgagaatgttggggttggtggaggaggaagccattgaaggagcagtagaggttagggcgaaagtgatggttagaggagaagagggtaacaatcgagcaaagcaaacaaagattaaatagacagagggaaggaaagaagggtgtagaaaatacctggagagagagggacgcgtcaagtgatgagggaggttctgaatcaccgcttcgattcctggaacggctatctgcagaggcagaggaggaatgatggcccaggagtaaatgttggaggcgatagaaaagatggtttgggttgatttaagaggcttgacaaagaaatagaggagaagaagggtctgagcaaacattaaatgcccaaaaagagggtgccgtcaaaattaaatgca

SEQ ID NO: 329693 - DNA, 1001 bp, Cannabis indica
aaacaactaaatgattacttttttcaaaactcccaaaaaacaaaaaattttagaaacgaaattttttattttcaataattattttaaattttgatatgtatgctatgtggcacatagtatttacgcaaataattttcttaaaagtatttttataaataaaactaaacttaagtataatattgaaaaaaaagcctaagaatttagctaagcaaccgtgcaaaatcacatttagcaaagctagtgtgcttcaaaaatattttatttttttagttattattatttattctataatatgtacatatatttcatttactttgttctttcatatatatactagacgtgaggatgttttagaggcacgtaatctctgtcaaaaaaatatgtggaattataattatatatcttatttttattaattatatttaaataattataaaaatatatatatattaaaacaagaacatagtgtggtataggttcgttattttttactatagatgatgatctaacagtgaaaattaacttctgaagttgattgtcgattttcaaagtctggattacgacagcgggacccgctccgggtaagccaaaacttatttttgttattcccttggggtgaaatttggggctaatagtgtaaagaccgcttagtttaaatttgaaaattagcagataattagggtttaattatgaaaattatttattgttatttaaataattatttatgttgatttatttgaattcagaatgcatttttatggcatatagtgaaatttcataattttacattttcggtgcccggcaaaatggaacgcggtgtatggctcagtagaattacaatctaatatttttgtatagcggggcagtttatttagacattgagaatgtcgggattggtcaggaatttagaatttttcaacatacccttagtaccccttttatgttattttagtgtggaggggcaaaatggtcattttgtcccattggtattttgtccttta

SEQ ID NO: 329694 - DNA, 823 bp, Cannabis indica
caatttctattctcatcttcccctatcaagagagaaaactagaaaactctaagtcttgttgtcttggaagatcattaagtaaaatcaccacaaagattatatctacaagatggattaagatcatcactatctatggattaaagtatggctccgccatttgagttcttctctttgaatcaacaaatgtattctttagatctatggttatacactgataattatatgtaatatgtttatctatagagttgaatattgttattgcatattttatgagtgataaagaattccaacaaatttagcccacaataaatacaattttttatttactataatactactaattattacttttcattgacttttactaaactttacattttttttaatttacctatattactattatttaaataataaaaaatataaaataataatttttatatattctcaataaaataaataaaatattaaatgaccatcaatatacttaattgttttttttttcttatttttacatcttgagtattagagtacaattgtaaacaatagatcaaatataacacaaatttattttttgtgtcaaacttagcagaacttttaaatatttcattggagataatctaatgtgatttagcatatgcctaatttgaaataaaatataggctaattagaatttttgccctttaaaatttgacatgtactaaatcatgccccctgaacttttaaagttgttaaaaatgcctcatagactattgagattgttggatttaaagaaattttgtctaattttattcaattttactatttcagtgattgtttatgt

SEQ ID NO: 329695 - DNA, 536 bp, Cannabis indica
taaaaaaaatcgtaatacaaaaccatattggggagttgatattattttgcatattacaattaggttattatttattatttttcggttgttttgtagttatctttgtattgttttatatttgttttcatattgtttgttaagttgttttagagttatttttttattttattaaaatatggtattttttgtaattttaaaactttaatacagtattttaaaaaacgtggtacagtgaaagtataaaataaaaaagtgtgacattaaaaatgtaaaaataacaaaaaagtgtgagtattttaatctgtacattttcttttggactttatcggagaccacaaaggcccgtaatgtattgaagggatattcatatgggcctataatgggccggactgtgttgtatttatttggaaaatccgttgccaaattactgatggggtaagttgaaaaataccacttttattaatcaattaattaaatttacctctaattttatatttaattaaaacatacctctttttatatgtattgtacccaaa

SEQ ID NO: 329696 - DNA, 1341 bp, Cannabis indica
atatattgggacatgcttatgtgcaatgctatgtttggagatgaaaataacaagaagtttcttatgctgctttctggtgatgatattatatgctctcatcacattctagtttgtatattatgcgatgatatgacatcacatcatcattggtaagcttttaaaatgggagaattagcttattttcttggtatttctactcaactgataacactaaggtggcgtttggttggaggtaataaaatggaatgaaatgacttttctattattttggtggaattaaaatggaaacatcattctaatacaagttaaacttaagtattattaccgctaaaaattaaacttatatatttatttgctactataagttaaacttaagtatttatgctgtaaattactctttttttatcaattttttttttattttattttaaatttgatttcattcttattcttattctcattcttatttttattcttgtattttcattcctctcaactaaacgtaaatgacaacaattgtattcaaacaacttttttatgttaaaaacacaattaaagaacacaaaaggttttcaagtggtttgttaaatagttcactagtctttcttatttcgggagaccttgaagaattagagaagttgaactcaataacttttctccaaagcttaaaagttaaaacggcataatatttggcaatgtatttattttaaaatgagtaaataaatctgacctaattcaaatacataagcaattagtttcttattttgatgccctggccttgaccaaatttgattgcaaatcctttatcaatttccgggtccaaatttgattgtaatccgttacctcataaaataattttcttcacatattttttttcttcaatccaaatgtttttatcaaggtaacatgtaaatatcttacagataatcaattgcatatattgtaagtaatcgactactttcataggaataactctttaccatcttaatgggataacttgttagcatagtaccatcaagaaaacttattactattttaggggaagccaattgaacatattagtaacttgttactatcttagggctaaccaatcacctatgtcattatagtaaccgattatcacaaacttaactttagcactgcatagctagatattagataatgtcccaaaaactcatgcatgatgttatattaaaaattttcaaacgtgttcatgataactctattgttttccaaaaaaaaatactgctaagagcatagtgtacaatttcactaaattggtattgaattttgataactctatgaaaatagagttatttatatctttttgggcattaaatt

SEQ ID NO: 329697 - DNA, 710 bp, Cannabis indica
agttaatacaactttaactctctctagaaaattggtacaactactctaagcaataatatcaactcactaacaacacaaagaaacaagataattatcctcgctcaattaatataccaaaaaaaaaaattaaatactattttaatctggatattacagttagctagctccgtcagtcccgagaataggcgagttaggcgtgcattttgggctcctaattgctcaggtcccgaaagtgtgaaaaaatattaatatataaataaaatattaataaaaaaatataataaatattatttgatgtagtggtaaaaaaatttactttaaactaaaaggtcaagtgagtaatctatttttattttttaaaacatattaaatatttagctatgaaaaattaaattttagaactattaagagatttttaaggctttaccattacattaagtattagaactattattttaataataattaaactatatatatataagaaaccccaaaatttaattttaccactctaaatttgaaagataaattaaagattttatgaacagaaatattattaaaactaaaaattagcaaactatgtaatatatatatatatctttatatattaaaagtgtctatttaacggcatttcttggtttaacagaatatacttaagaataaaagaatattctgttaaatttaacgaccgttaataaataaacccaata

SEQ ID NO: 329698 - DNA, 1606 bp, Cannabis indica
taagctggtacaaaagtttaagagttcccaattgagttggaattggcccattcaatttgttggactctaggctgagaacttgcaactttttcaaactcttgagttccaaagagatcttacaagagagtttattatgactgtaatctggtgagattttgacattgtcccctacatcaacttctctatattttcttttacatagttgaaatagtatattttatattaattaaagttaaagaaaaaatccatactaaaaaaaaaaagttaaaagaaaaaaatcaaaaaataaaaatataataaacaaatgctaatttaagagagataaaacttagctacatttaggtaaagatttttaggagtttggaataaggtattatacctaaggatttagagtatttgatggagaggaatttcaacctcttagtgagctatagcaatctaaataacaacaaaacaataatttaaaaatccaaattactcaatataacagcacttcaaagagcaatggcctctgcctcgagactcaagaggggaagaaaccttaaatttaacagtcaagccttcaatgacattgcgagtagaatccaggaaaatcacaacccccataaggcgaaaccccactgattgcaacatcaacaaagaaatggatacttgaaacatccattcaaaaccaaatacaataggataacaattcaaaaatcaataattaagacaaaaaatgatatacaccaacaaatttaaggacagaaaaatcaactcccctggtttatttattttaagctatcaaaaatattgcagtttgcaatatgatgttgttaaacaagtactagtaatatgtatagaacgagttcaatcaacttcgtacataagtaccagttttaattaaacaaatatttattcttattattgatattcaagtgcaagaagtttctcaattgtaatcgtcctcaatggctcagagatcatggaagctcgactccttgtggataattcttgcgccacaaaatgcatagtgggtcgtgaatctggtctacttctagtacatgacaatgccaagttcatcactaacactgcaacagctgataatctcccagtaggaggtaacagtcgttgatctaacacatctttcaataacatattctttgatgctgatgataaagattccaaaagttcttgtgggtgctttcccatcataatttccaaagctaccactccaaaactgtatacatcacacttttcagtcacacgcacggttaaagccagctctgcacaacaaaacaaattttaaaaatcaagaacacttgaaaacgtttatgcaagaactagttaatattgagtaaaatagtaattacccggggccatgtagccgtaggatccaacaacatttgtccaaatagatgagttaggaatcaacaatcgagctgtgccaaagtctgacaatatgggaacgaaatccgagtcgagtagtacattgttcaaggatacgtcgcgatgaaggattggtggagaacagtcatggtgcaagtatgagattgcatgggccaatccttgactatcttcacctttgaatcccaatcaagatctgttgagtcatataatactttag

SEQ ID NO: 329699 - DNA, 790 bp, Cannabis indica
cctttttcattattgtacatattttatttatttttatatgttttggattttcaaaaataaaaaataaaaaaataaaaaatatatatataaaaaaaaagagatggagtcgtttgtgacttgacttgtgggctaagaaaatctttgttttgtttggtaagtatcaacatttaatctcaattgatttatttgataagttactttttaaagtttgatttcatatcattgtattttgtcttggaagatttttttaattggactatttttggaaagcatcttagtgattcttgtttccttttatttatttatttttaaaaaaggaattatttttgaaaaaaggtgggccggtttttcgttgtgtttgtgggctggtagtttcctttcttaagttggtttccttttttctcctcttacactacatttatttaaacccaatttctttatcatttaatctcaccatcttctcttccacccgactactcttccctagttcttttgtcttctcttacttccttctctttcaaaaattcatggctaagactaagaacttggggcatcccagcaagatgatggaatccaaacctaccccttcaaatacttcacctctggctccaaaattgcctcctgctgttgcaacaacatcaaacctaggagattgatcactttctcggccgtgaatctcaaactgtgaagccccatgcctaaatggattcctaaacaagtggcctagaaaatctgtgagaccccatgaaattctgcacttcatccatcttcatcgtccaaggggttctcc

SEQ ID NO: 329700 - DNA, 298 bp, Cannabis indica
aataagttttatttagggcataaaacccaacagagggatgtttgatggtataatttgtgattgtgggctactattagagaatttctcggaccgtaaaaaattcgggctaaaggttcaaaatatgctttagaatgggagtaagtgttttaaatttgtattcttagtcatgataattataattgaattgtagtgttggtttcaattttttggcactataaacagatagagggtgatgttagaaagtccacattgttaatgtgtggaaagataatagaatatataagatgaattggctact

SEQ ID NO: 329701 - DNA, 714 bp, Cannabis indica
tttattggagggagcccatcattaccgctaaactagtcttagtggcttctttacatttcgattcattcaatatagagaatccttttctcacttcatttcctacataaattataatatataaaatattattgtggatatatataaagtacaaaatattgcattattactacgtacaatgctccctctccacacatttgatcatccttatcacctcatccatggcactatatatagttaaacatctccaaacacaccctgctataccctccttcaatcatatgtactcaacgaacgatctcagtccacgtatccagtaataataataatgataaaaatgtggacaatgactaataataattgctgggctccctccaataaatatattggcatccatcttatcatgatcacatattcatgttcatatatttacatattgtagctagcacagtagtgtagtacatatatatataaatataatatagttgggattaataaatacatatatgcaataatatggctatggtaatactcctccttgtatttgttactgttgtaattttccaccattggtggagaaatagaaatgcaatacttacaaattggccaatgttggggatgttacctgggctaatgtataatactccaaggctacatgagtttatgactgagctaatgaccaaaagtgggggagcatttgagttcaaaggcccattg

SEQ ID NO: 329702 - DNA, 670 bp, Cannabis indica
atttaaatacttatttatccattaacttattacttaataaataaggcactatatcattttaaagaaaataagtaaacaccaccaccaaaagagtggagaaattaaatatacaatgctccaaactaaccatattatggatcaacatgtgataaatcttgtacctgtatatacaattggaggcatatatattaaaagatttactactcctgttgagtgttttaagccatttaattgtgaaaggtgaccttattcaacttgcttagctggtctcatattggccaattctttatatatacatatacaggaattgtatcaaaagtagagataggtggacagaagatgaaattggaaattattattaattgaattgaaaagaagaacaggtcatgtgggagggaattgaaaaagaaaagaccctttgttaggtaaagccatattaaaaacaagaccaattgccataaattcaatgtgtacgaccttgcaatttctttctttttaggcattctcatatggtaaattaagatttttgttgctgaactttgatatatattaaatcatgttctctgaacttttaatgtcgttaaaaatatctcttaaactattgagattgttaaatttaaagactttgtctaatttcatttaattttactatttcagtgattgtttatgt

SEQ ID NO: 329703 - DNA, 873 bp, Cannabis indica
attaagagagttgaccagtacttaattgacaactttataagatagatattagggtataaataagtggatttattatcaaacagagagaaaattggcagaattaaaacagagagaaaatgaaaaagagagagttatcaatatttaaccagtcaatataaggataaagttatcaatttctgattttattaagagcaaaattgtcttagaactattaccttattaagacacttttataatagtaagatatatattttaaatttaattaaagcatattatatatatatatatatacattaatttggagttacataattggaattcgttcaaaagcattcccaataatgtggctatgaccatttaagctagccaatgtaatttgagataattttgtcattctgattcattatatgttaactttttggaatactttaatcaatggtataagtaataaaaaagaaaattaaaacattgcatttattttttttttctctaataatttattataatcaaatattattaataattaattttatttattgtgttttttccttaatatttttttttctttatcaaaattagaagaaaaatatatatgtgtttagatgtcccactaaataattgatttatgctttaaattctataaatatatatatatttttttttatgttttatttacaattttacgatataaattttttatttacagttttgtaaatttaattttttaaaaataattaagattttaatgttttaaatttactaaaatatgactttctcattagaaaaaaataaagcgtgagaaaacaacaaaaaatagaaatcaatctcacaataattgtaaacaaactataaaataataaaaaaatagaaaaa

SEQ ID NO: 329704 - DNA, 608 bp, Cannabis indica
gttattgtgaaaaaaaaaagatacacgatcgaaacggaatcagaattggattcaagttgggccctgggtatcccgttttcaagctctcgagttttcattttgaaacatccaaggttcttgaacttgagaacaaggtacatcctaccctatttttgaccattccgtattcattggtcgaatcacattcggcatttgaataatcaaaccagcacaacaggttgattgacaacctgggcgctaggctcaataccaagtcaacttaggcgatgaccctatttttaaggacttgggtttgtggttttctccccgagtttgcttgaaccatcattatttctattaatggaaaatatattcaaaacacttttttgagaacttgatcggaaatagccaaggttgagaatatatcaacatatgcgttgggcctatagtgtcaggtgttaacctgggcactgggtcccaattacagccttcgaaaagtcctgtttagtccccaaaaatagtttaatcttaatatttttttgaagaaagagaagacgctcggaagagctctcagaaaagatcatcaaaatcggcccagattgataaattatcaacttgggtattgggcc

SEQ ID NO: 329705 - DNA, 925 bp, Cannabis indica
gtttatgtattaattcaaccaatatatcaaaatcaatggacaaaagcacagcaacaaatattgatcccatatcttcttggggatcacgaaaattaaccttatatttagtcaccaatcatatgtgcaatatcaaaaaattaatataattctttaattatttataaatattattttgttttatttagttcagattattaatgtagatctttgacagatatcaattatatttagttagttgcatgtatcttttttagtactaaaataattatacataattaatataacaagtaatattttttagtataattaatatgtataattgcttgataaaacaattaaaagtgttgataacctcatcacttaaattatttatttaaattattatataatatcaccttatatataatacacatacatttgttgttgtttatcatcactatatacgtacttttccgaaagatatagataatatttaaaatatatatggagatttattaagtacattaattaattaatcttaaaaaatgtatacgtacatatgattaatagattatttgttgatttgaatttatcatccatatatattattcaaaatcagttatatatattattgaagtccatttctaacttaaaatagaaaaactaattcatttaattttgtatttacatgagtaatgataagtgcacttaaactattacatgtataatttttttaatcaattacatttaactaaattggaattgtgatcctaaaaaaaaattgaaattgattatgtgtataatatttatagggacacgattttgtcccgcgatgtactttcacagaatgtatttcgtggtacattagatgggtctcagggtacattacatgagtgtcaaggtacgttactattttttaaccctaattacccctagatcaatctca

SEQ ID NO: 329706 - DNA, 549 bp, Cannabis indica
ggtgaatgtatttttttctgtttcatctgtaaagttagaggaaaatggaaatgtatcattgctacattttagcatgaagaggtgtgagacatttagtttggacttctttcgtttgtaacatggaaataatggcttatgctcatcatccttacattctcatcctattagttgaaggtctaatgaatagtatggaaatttaactaaaataatgttactagttggacagagttataaattatatatagtgtaactaaaaataattttacagtgaaatgactaacaataatatgtagctaattaccttttaaaaaaaaaaccaatatgtaactaattagtattttaacagtaaagaataattaatcatacattatacatattacaaagagaaattttcaattatatacaagtaaaataattatattacaaaaaatgtgcaaaaaaaaaaaaccaataattacacaatactatacaattttataaataatttacaaataaatcatcatattcacattatataataaaaaaaaacataaatatttacgattttaa

SEQ ID NO: 329707 - DNA, 616 bp, Cannabis indica
atatatattaattaatgattgtagatttgaggatacaaattctgaaaggctaagagaagaattgatcaaagggagtggcaatttggaaataatggaagcattcaattttgatcccaactccattgattgggaagattatattatcaatactcacattcctggcctcataaaatatgttattatttaaatgatatattaaattctctgtattttctaaagtatactagaagataataataatatgctataataagctcaaaataaaacataataaaatactcttattggaggtaacattatgaataaatatgttgggtcttgtgtttaattaaaactctattttaatgtaatcttgaactttattatcaataaaaatatgggaattatattattattacttgtttggttcacatatttattttatgatcatatgtttgatacattgttattatatatgattgacaataaaatggatgattaaacactacaataaaaactatctttagttataactttttagtcacgatcgatataatttttttgtaattaaatgtgacttttagtcacaacaaaatcttacttgtgactaaaacataatctttagatacaagttgtc

SEQ ID NO: 329708 - DNA, 628 bp, Cannabis indica
taaataagatagactcgtggactaaggctcattaacgccccaactacgtaaaaatccttctctaattttcttacagctctataaacttataatattttattggttgccgaaaacctcggtcaacagttagaaacattaggcacaaaacttaaatttaatttaaaaattaaataaaaataagaataattaatatttttctccctaacataatttaatttatttctttataaataaaaaataaaaatatttataaacattagtctaaaaaatatcttattaaatattttaattaaaaaattcatttatttaaattatataattaatttgagtaaaaattaaatttttaccagttagtaatctgttatagaagattataaaaaattataactattatagttatatttttaatgtaaccatattcatttaatggttatatgatgagaagatagtttcaagtctcaattgatgtatataagaaataaaatcactcaattattgataaatgaattttaaattcactttagagtcaatttacgtgccgtttggtaacactttttcaatcagttttttgtttttaaaattaaaaaagtgaaaatatttttcaaaaacatgttttataaaactgttt

SEQ ID NO: 329709 - DNA, 584 bp, Cannabis indica
atgttttcgttcggctcgaccattttgagctgacgtatgaggacatgagtgatgaaactcaatcccatgagtgttgacaagatcagtaaaagctctaaattcaccaccccaatcagatctaaggcatttgattttcctttcaaatttggtttcagcaagggctttgaattttagaaaagcatcaagtgcctcagccttggatttcagtggataaatccatgtaaatctgctgaaatcatctaagaaatgtatgtaatatctatggtttatgttggatgcaaccggggctggtccccatagatccgtgtgaattaaatccaaaacatttttagccctattgtgagagagtttgaatggcaaagcatgagattttccatattgacatgcatcacaaaaggattttaattcattacggaagcttttacattactaaactttaaacacgacttaagacatttgaagacggataggccaagacgcctatgccaaacatctaattttggaaattggtaaaaactaccctaagcactaaggctgtgttacatgactacaactggctactgctataccagaaaaaaaacggt

SEQ ID NO: 329710 - DNA, 1228 bp, Cannabis indica
aataacaaattgtaagtctttcttagtagcaagatccatcgcaatcagacaagattttgcttccctactaagagcattagcataaggcacccgcttagtaccaacccaaaacaatttccttacatgagcacaagccatcgctgcaagcatcatagccgctctttaactgtcccatcgcagttaattttgatctaatacatgggcggaggagcccattgatcggttatatcaaaagaaggttgaggttgagacaaaagaaagtgactataatctatatagccatgagcaataaaattattataataatgtatgttatacagatgattattgttttaccttgtcgtttctcgttctccatatattgtgtcaactacgataaacgcatatagaaacatataatcaacacttacgtctctcgcattcaaactcaaaatgaatttgacccaattctactcgttcctaattcctaaacatgtttgagactctaaggagaagctctccacacataagatgtcatattacaaagaagaaaaagatgttccatatttttcttcctctcccccacaaattgggcacgagtaatcttcaatgtgtatacaatctctaaggatggatttaattggaagagcattagatacgatgcttcaccgtagtactttatgttgctcatgtgttttactgttttgaagtttgttccacaaagaatgagcactacagtgtgggcttttgagtgcaaaaggtagttgatttggtgaaaaatttaccattcgattctttagtccaaacacagtgatccctctcctgccatgaaggcttttcccatttcaatatgagatatcaacaatgtcccgatcatacaaccaattcaatttcggaagatcccactcctcgttctctaataataaatcaacgacggtcaaatatcctaaattctaacattctttactatttgaactctaactataaatcaattaaatctaagaaaaatttgttataaatataaaaaggctatatcttttatattcttcatctattttaatatttaggctaattagtaatttttctccccgaactttgacatgtattaaatcgtgccccctgaacttttttggccgttagaaattcccctcgaactattgaaattgttaagtttaaggacttttgtctaatttcattcaattttactgttcagtgattatttatgtactaaaccatgctccccagactt

SEQ ID NO: 329711 - DNA, 510 bp, Cannabis indica
actaaattttaaaaaaattggtaaataattaaaaacatctaaagttaaaacgaattattagttagtaattttctacatttttaatgttgcgtgttaaagaggtatatttcggtttatatacaattagggttaggtttagttaaatgggcttggcctataggtgagatagatttcttttttttttcttcttttaaatcaacttaatttttaccgtcggttcactcacaactaacgcaataagttactgtcagtttacaatcaacacaaaaaagttttgctttgcgtcgcactacagaaaacaactacttttagtgacaactttttaggtacaatatcaattttttgttggtcacaacaaaaaaatacttgtgactaataaaacatagtatttagacataagttgtcactaatttacttttagtcacaacaagtattgtgactaaaaccacatttagtcatgacaaattataattttgttgactaatacctttagccatagactttttagtc

SEQ ID NO: 329712 - DNA, 1553 bp, Cannabis indica
gtatccgatcagactcacatagtatactcaattcttctgtgaggggccaccgctcatctttaggccgatgatcaaaccgaacttagaccgcccaaatctggcttcagttttagccacgtaaaaccacactttatcatttttcacctcactcactttctttttcctcaacagcagttgatgcacaatcaccttggagaatttcaaatcattggcattccaaaaaactccaaaaggagtttccttcaccctctccgtcaagttaaaggcttcaaacttagctttaattgaagtaaagtacccattccttctgtaagtgatacgcctaggaaaatactcagccaaggggagaatgagttttggagccatctgcaaattcaaacgaaaattcttattaattggactatatcgcataaaaatcgcacaaaagtcgcttaaaattgcaaaatcgaacatatgtcgcacaaacatcgcttaaaatcgcttaaccacaacaacaaatttataagcttcaattgcaaactgcctagtaaacatcgcacaataatcgcatagtactcgcatagaagtcgccaaaaacatcatttctaattctaacaagacttataacactaaaatcgcataaatgtcgctcaatatcgcttaaaaaaatccaaaacccataaacctttactgattcacataatatcgctaaaaaatcgcacaatatcactcaatatcgctcaaaaatccaaaacacacaaaccctatactaactcctattatattgcacaaaatcacacataaaatcgcatagtatcgcacaaaacatacaaaactagaaaaaagctatagctcgaaacccatatcacaactttcagttcaataacagattcatccacaaattaatgcattttaaaggagaaattaaaagaaaaattcccaaaaaacaaacctagggttggtgcaattggggttgttggggttcgagtgggtctcgtggttgctcggatcgattgggtcgagaggtagtccgtcaatggagtcgagagggtcgtcggagcttggggtcgagagggtcgtcggagcttggggtcgagagggtaaatcggagcttgaggtcgattggagagggaagggggtctggttcaaatggagggggtgggttcgacggttttgggttcgaatggagagggaatgagggagagagaaggttgttagagaggaggggggaaactgaaaaattaggggtaattttggaggaaattgaaaaattaacatatttttacaatgtgtaattttttagtttaattaaataccatatgttatttttcagcatgatttctcaaatttcctttttaataaggctaattaggatttttcttcttaaattttaatatgtataaaatcatgcctcttaaatttttctgagcgttaaaaattttccttgaattattaaaacacttttgtccaattacaattaattttactgatttaattgtttatatattcgaaaaaaagtgagcttttagctagggaaatttcattttttgaccttaataatacaacacatatca

SEQ ID NO: 329713 - DNA, 785 bp, Cannabis indica
acaaatctcttgtgtcaagttatttaattttctgcaaatatttttatattctgtctgttctgttttgtcgctgcaacactggtttctgcagtaacagaattacattctgcttctgcaggcgcatacagttttatattttcgtatatatattgacatttgcaaaaactcggtttttcacttttcgttttttcttttatagattacaaatgctcattatttagagcatttccatcgatcattttttttaaattttttttatctaaattttaattaaaattgctaaaaaataagaatagagtgttatttttattattcttctattttaattagcatttaattatcttattaatattttataatttaaatttaaatattaattaattttttacaataataataaaaaaaagtaatagtatttttattaaaataatattaaaaaaatttagcaaaaaataattttttatggttagagtttatttttaactaaaaaaatatttaagaagcaatcaagagatacactttaacattttgctctatattttacataataacaaaaattatcatctttcaaaccagtaacaatagtttctctggcgtgtcaatttttttttttattatatttaatttatgttattcgactaatagggtttcgtcatcatatcatatacatgcataaatttttttgtctgaacggtgtatctaactgcctttagtgtattctacttattaaataacttcagcatttggttgtcataaaaaataaaatgaaaagaaaagatcaatag

SEQ ID NO: 329714 - DNA, 963 bp, Cannabis indica
tttaatgttttatatggtttttatatatttagtttaattggttagataatgtcatatttagtgacatttactttttatgtcatatttatcataaccttaataaattttcctatattttttaaaatagcccattttaaaaactaaaaatgaaaaacacaggccatatattttgacaaacttaacatttttcgattaatttagtcaaaatattaaataatataatagatgaggatcggattccaatcgcaatcaggttatctcagacttttacattcttcctccgaagccactactacttaagaggtctatcttttctggccaaacaatattttatcgttgctttttttttttaaacataaaaataataataatttatctaattgttttatgccatattttaatctgtaaacagacaagcaacttcttgtctttaggtgattcttctggattttttttttttctgggaggttaagtgattcttctggaattgacttggagggataagaattttttaaagaagtacatcaatgcaatggaaaaattattttctttttttaattttttgcctaaccgattcattgattaagtcgtttgctcctgttttttgaaaggacatttgctcttattcatgatttaatgaatcatatatatgacgacaattaattcgcgtaggttttaaccttctccaaatttaattttgtatttgagctacattattataatatcataatgtaaactaatatttgttatcaaatttcaaaaaaaaaaaaaaaaaaaaaaaaaaaaactaatattgttagatttataaatactaagaatatataaataacagatccaaacatattacctaaaagtgtaatttaataataaaaaaccctgaaagtcattattggagattacagaaaggtcttgatcttaccaagaatacacttatttctctgagtgggaaggagagaatacaac

SEQ ID NO: 329715 - DNA, 2554 bp, Cannabis indica
aaattttttgataaattgggtagcccacatgatagttatgataaaggttttggaaccctactacctatcggagaattagttatctccacaaggttggttagatctataccaatcagaattgaggatagggagttgagtgttgatttggtagaattgggtttagtggatttcgatattatacttggaatggatttcttatccaagtactcaactagtattgattgtaaatgaaagatggtgatcttccaacttgagggagaagaactgtttgtttttgtgggatcagttcagggatcccagattccagtgatcccagtattaacagctagagatttgttacaagaagggtgcttgggatttctggcagtggtattggatactacacggcttgagacagttcggccagaggatatcagggtggttcaagaattttagatgtttttcctgatgaacttccaggtttaccaccgcagagggaaatagatttcattattaatttagcacctggagcagaccagtttctaaggcaccgtacagaatggctccagctgaagaattgaaaattcagcttcaggggttgcttgacctagggttttcacgacctagtgtgtcacccttgggagctcccgtactgtttgttaagaagaaagactgatccctacgcatgtatattgactaccaggaactaaataaactgattgccaagaacaaatactagttacctaggatcgatgaccttttgagtcaacttcagaggaagatagtcttctctaagattgatctttgatcaggctatcatcagttgagaatccgagataaggacattccaaagattgctttttgcactagatatgagcattatgaattcctggttaggtcttttggactaaccaatgctcccacagctttaatggatccgatgaatcggggatccaattaagtactgaattcgactcctcacacttgattagtaccttctccaattttctcaaacaattatcaaaagatgaaccaaaatcgagaagtcatccataaaaatatttatacaacccttaatcaaatctgaaaagatagccatcatgcaccgctgaaatgttgctggagcgttaacattagtccaaatggcattctcctaaaaagtgaaagagccatatggacacgtaaataactgtcttttgatggtcctccggtgctatggtctatttgatgacatccaaaatacccatcttaaaaataattgtactcttgtccagccaatcgatttagcgtacggtcaatggatggcaaaggaaaatggtatttcctggttgccttattaagccttcggtagtcaatgcaaatttgccaactaagtaaaaattcttgtagggatcaattcattcttttcattcttaatcactgtcatccctcatttcttcagcactacttgtactaggttgacctatgtactatctgaaattgggtaggccaccccagcatctaaccacttgaccacttcctttctcgctacctctttcattggtgggttgagtcttcgttgtgcattgatgcttggcttagctccatcttccattaacatttggtgcataacggttgagggactgattcccttgatatcacccaatgtccacccaatgggcttcgtatgtgctctaagtactctcaactacttatcagtctccacatctgaaagtgaagctgacactatgactggcagcatcttgtttttacctaagatttcatatctcaaatgatcaggaagaaccttcaactcaagctctgatggcttctgtatagatggcaacgacccccaactcttcaaagtattttctatttaatggctcataggagtcaagctacttttcatattccatcacctaacttccatctttctcgcgaatctcagtcaacttattcttttccactataatgtccatgagatcaatagagaaacaatcatcactagcctttggaaaagttgtttccttaagaacattaaaaaccacttcaacccccttccacccttatcttacagtttcccttctgaacatctatcgatgcttggcctgttgccaagaatggtctcccaagaatgatgggtacattactatcttcttccatgtccaaaacaataaagtctgttgggaaaatgaatttatctactttgactagaacatcttcgatgaccccccttggatgagccaacgaatgatcacccaattgcatggttacggtggtaggctttgcttctcccaattgcaatcttctaaaaactgacaaaggcattaaattgatgcttgctcccaaatcataaagagaattcattccctctattctctcgatggtacaaggtatggtaaaactcccaggatctctaagtttgggagggagtttcttttgcaatattgcactacactcctcgtgtctcataatcctccattttctcttcttggacgggagttcttttttgagctttacaaagcttggcctttgtttcaaggtcttttgtaaaggggatgttaatgtgcagcttcttgaatatttctaaaaactt

SEQ ID NO: 329716 - DNA, 635 bp, Cannabis indica
taattgtatcacacttaatataccaaataccaatatatgtatataaactggatattacaaagataataatttttaatgaataatattaaccaatcgtaacacgtcatttttaggtagtgttaagcatcactagtacttaatagcaatgatctataatttaatatcgggtctgatacttttttattcaataaataatataaaaaaccactaactaattactacgtactacatcaatatagtgttaagcatcttaaagtgcctaatagcaatactcatttatgaagtaactaacattattgaagtattatcaatctaaatacgagttgagtgttttgacaagctttaaaactcggcttgggcacgatattataaattaggagtagcagaatagattttgacaggacacgaattttaaattagatgtaggtcgaaaacgagttgacacgaaataaaaacaggtcaaatactacacgacccctttatcacgaatttaacacgacatggatttttaaataaaataaaataaaaaattaataataatataatttataaaaatatatatttagtgatttaatagtgagttaaaaattttaaatttatattttttaaaagagaaattaaaaatattttaaatt

SEQ ID NO: 329717 - DNA, 778 bp, Cannabis indica
gtttttttttttttttggtgggggcgggggaggagtgtgttttaaattcaattgcatgtatcaaatctttgatatatataatttttggtgtattgttttggttccggttcactattatatcccataaattagtttattgatcaattcatgcttcactacatagatatgtccctaacatgattattttttttttttttaatatttctcatttgattgatgtcagcgtggtttatagatcaatctttttttgtattgggcttatgggcggctacttcttgatgtgcctatattattacgagttatttgcattagaaaccgttatttttattttaattaagaatttgacattgttttaattaatagggttttataccgttccatctatatcgtttaaattgttttgctatatttttatagcaccacctctctctcttcccaatcgtcaatccttcaagtccccaacatcggacaccctcttccgcctcctctgtccgacatccaagaccggagcactaatcggatccacgacacccatattccttctcttccgacaaatgatttatactcatcaccttcgaatccacttcgcccaggtcaaaattcagtcacttaataacaagcaaagtaatagctatggcccttgccatggaggaagcttgttgtaagcagcttattgttggagagggtggttatggcggaggagaatgataagtttaatgtttttttaagttttgttaataaataaataaataaataatatttaaatttaaataaaagt

SEQ ID NO: 329718 - DNA, 547 bp, Cannabis indica
agtgcactcatatatatatatatttttttaattttgtattttgtaaagtaaataccttcctatgtttggtagagaaaagaaaagtgaaagaaaacaaaagaaaggagagaaaagtgagaagaaaaaatgaaattgagttatttgttaagaaaaattaaaaagaaacgaaaaatgagaagaaaaatatggtgtggtacccaccaagttttttcccttccaatttgcgaaaaaaaaagagtctaacaaaataagaaaaagtgaaatgactaaaataatttcacaaataaatatcagttaatgctcacttttaaggataatatatagtattttcactatatataccaattaataacaaagaaaatagaatcttatcggggctaaatgactacgattggaggaggaggtagctataggagggctggtagtagggatgcacacggggcagggaattggggagagtgctccaccccgtccccatccccgttaaagattttaatccacatcctcgcttatttcttatctgggatggggcggggaatcccctaat

SEQ ID NO: 329719 - DNA, 776 bp, Cannabis indica
cctgtttggctgaagtatgttccaggcattagcttcaggacagataatgagcctttcaaggtttgtctaactctgttatttttgtttgtttggttcatatataagaagagacaagaaaataaaatgggaccatttgattttttcataaaatgttaaagaacataacacatatacatatatatatgtagtttttaactattctcattttttcaatttacagtcagccatgcagaaatttacccagaaaattgtccaaatgatgaaagatgagaagttgtttcaatctcaaggtggtcccataatcctttctcaggtaataataataataataataataacaatattgtgtaatgccttttttttgtttgtttttccttaaagtttgtgtttttataacaaacaaaaccattaattaataaccatataattaatgtgttttgctttatttgtacagattgagaatgaatatgaaccagaaaggaaggagtttggagctgctggctatgcatatatgacttgggctgcaaagatggctgttgaaatgggtactggtgttccatgggtgatgtgcaaggaaactgatgctcctgacccagtggtatataacttaatcgaataatgatgtttaattaatctcaaccacgcaattaaaagtgatgtgattcttgttatttaaacatttcaacttaatgatagagcgttgctattgggcactagtggtgcttagcaccttctagatgtgtcactttgcgattggctagcgatactctctaaaa

SEQ ID NO: 329720 - DNA, 1234 bp, Cannabis indica
cacccgtcaatcgagatcagcattttagcattctcttatagcatttctaaaatcagaacccgagcatgtgaatcatcgtagtctttgcaatgaactttgattggactctcatgttcatatagataagctcgggccacaatgttgtcgatattgttagagtagagatatactagctgattaacggccctctattcatcgaaattgtacatgagaggtggctcatttaggaaaacaaactgttgagcataattttgtggtcgaccctcatcctcacgagcgtattgttgtggaacatacgcttgatgagccacctctccttctttctcaaaaagtccggccaccatgcacatacaaaataacaatgttaataatatgaaaaaaatccaaaaaatccaattttttttttttttaaaattaaaataatgtacattacaaaaatgaatgaaaactatatttataccttaatggacattgagattgaacgttttctcaacaaatatcagtggctggagttatacccaccactattcttcaatttgatactgaattaggaaaaaaattgaaacttttttggtgtatagatttaggtatcgaaaatagaagatttaaaaaattaaatgggctcaaatggtgcaaaaatggggaagatatggactggaataagggtggttggcgaaggtggcaggggtttgggtatgtctctactgctggtgtttggttcgtgaggaagaagaagtgaagcagacgaagctaatagggtttttatataatcctataccatcggttattaggaaataacagatggaataggctattcaaatcaccctcaaaattatctccctctcaaccgactctaaatgatatagtcaaattttatacctacagtttttttaaaaaaaaaaccgtctctaaaggtcaatcttcaatagatgagcatttttactccttttaactgtccttattatgaaacctgtagaaaaacagactctaaaggatgattttgtagtagtaatttaataaaacaccaatttttataaaaaatgaactacattacatacgtggcaacaaccgtccacagtccacaaccgacaaccaaccgacaaccaccggaaatgttctcagtttgcagtaattatgaattggaaaacaaatatgtagattagtgtacatgagtgtgacacgcttcatatacaccactaataaatattgggatggatttctgaatagtctctca

SEQ ID NO: 329721 - DNA, 1735 bp, Cannabis indica
acatattatcaaaatactaaaatttaaattttaaaatacattattcatttcaaaaatagaaaatttaaatacacatgtattcctatataaaaataattattaaaatctaattaataaaatatgtttaaaataataaataatattttataaatatagactaaaaattcaaaaaaaaaaaatgtaacaagagtttaaagcaatagaatttttttggatatggttatttaaaaatttaaaattttcttattttagaaaaattattgtgagtattattagctaatgaaaatttcttatattataactttttttctaactaattaatatcacttcataaccaaaaaaaatccttaaagtacactttgattaagagaattaattatactaaatatagtatttattttattatgagattagatattttaattaaatttacaaatttggataagaaaaaaaaagggggggagtagtgaaattatttgagagtgatatttcatggttttttcagtgtctgaattctgtgaaagtatatattaaaagcagaaaaaaacattgggcactgttgaattgagtggtgttttcaagatattctgtcatcattgcttcttattttcaggttgattattcttggaattctctatattattaaattaataaacaaaaatattaattaaatatattatagtgtgaagaaaaacaaggaccaaacctgaataattcttatattatatgataatggaataattaataagcctctgcatataaacatttgaatttcagtgatttatttttttttttttttttgaaatctatttcagtgatatttatatatatatatatatatcaccaatttcggaatagattttctttctcttactgataccaaatccaacttaagatttgggcgtgagagaatagtcagtgagaaaattcaattatatatatacaagtttataggccactactgctgtcactcatattattttaataaattaattaattaattagtgttttgtatttgaaaattgggcaaaccggcaatagaatttcattggaagatcatatgtattaaacaaattaataaatgtatgcgtttttttatcttaggtaacaatatatataggtataggtatatatagctgtctgttgacaaagtggtatagttcccaattcccatgataataaacaatttggtcatgattttcaaattgatcaatatataattaagcatgtataaatacactaaacacaacactaggatataggttgatttgctaataattaggtttttgaaatttggttacacacctagctaaatttgtgattaattactttttcaatgttttgtgtagaaaatgatttagaaattattagtttgaatattttaattgaaaatgattcaacttgccataaaaatatattgttttattttcatgcaattaaagagaataagggacacacaatggtgataacaataaaattatgagactcttttctttgcaatcaccgagtaagggatttgattttttatccatgatttaaagatttattagttaggaaaacttaaactataaataattgttagaataggccaactttacttaaatcttaaaactacccctctcaaaatcccacacccattctctcttcttccctctattctctctgttcgtcccaaacgccggccacaaacgcacgcaggagacccaccggcccacggcgctccccaccgacccac

SEQ ID NO: 329722 - DNA, 840 bp, Cannabis indica
tatgtaattaactgccttactataattataatagaggcaagttacactgaaaaaaggacaaaaaaaatcattatagaaaaaaggctgagagttgtatcagaaatctaataagattgactcgtggactatgtagaattttaactggaaaaccacgtaaaaacctttgtgttcatatctttccttttttgcttttatattctgtgtaaatctatcactattaggctcaaatataattaacgaaaattgacattaacagccatgcattatgtttttttagttttcaatctttgatgtgttttttgaatattcatgctattataaacctttagttgttattcatattgtatctatgcatgaaatctatttgaaaaaccataaaaattttgaaattttttctagaaacatgtctatacccgagattttttttttaaaattaaagtccaaaatttacgtatttttgatgcatggaatcaacatgtatctcttagttttttcatttagattcatttggaactgattttgggtattttggtcgggtttgaattgggtccgtgccactcgcgtgtagaaaaataggtcaaaaatgactcggctggtggtaagggatgaagaaaacggcatgtaattttctttatataattacaaaacgacatgtcgtgtccagaagcgactgatttttttatgcatcaaaatgaattttaaatataggcatatatattgggcaatgaactcatactttcaaagaaactttacaaatgtactgggagtttatccatactcacgaattttaatgtagtattctctattttatatttgatctcactatcttaatatgcaaaa

SEQ ID NO: 329723 - DNA, 1473 bp, Cannabis indica
cacttgtgataagggatagtgagccaaaaaagagccgcttatgatcgagttgtccaagatggtgatcaaataatagctaccatcttgaggggggatgttagagagtcccacattgctaatgtgtggaaagataatagaatatataagaagaataagctactccttccattgccaattggttttgagatagaacctcattcatcttatccccaaattctaacatcttatacacttttaaatatctcatattccctacttattctattttttttctctaagtttgaaaccattgataattacttctactttttaagaagaagaaatctatcatttaattaaaactaagccttgttttgattgaattcaccatcatcaattataagttctttttcatccaatttgtataagttaggtatttatagtcttttatatttattatataattattttttattaaaaatattcatttatatgatcatgaatagaattatataattatatactcatgtttgctatataatttattttaatagagtaaattggaaaagacaatctcttaatcttaatatcagtgtataattttttttcatgaatgtatttagttacaatatatatgtattttacttggtaaagattgtacttaagaaataatagcatatatgtatttcttaaatacatatatgtatttaatttattaaatttataaacacagaataacatattaaaaataatattaaaactaaatttatatgctatattatcttatagcataaacaaaggatagcatattaaatttgaatatatatgtatttgatttattaaatttgttaatatgtgtttctttattttttttgtgcaaatatttttcagtgataagtttgaatttataattttgatgatgtatgatttagggactattatagtcgttttcaaatcttaaaaatgtgttaataaaaatatttgtaattctgaatgaattctgagattattattgagatatgtgaaggacaatagtggtgactataagagatacggtgatgacaacagatgagatattgtgatgacaaccggtgagatatggtgatggcaaagggtgagatgaggtcaaggttagttctgaaatttagtgggtgaaaggagaaaaaatattttaggctcttatttagagtaaaatgttatatttttcaaaattagtaaaaaaaaatatgtacttttaaaagatgacaaaatatttctggcgctgcagctaggtggggccaggaccggtcctggatgaggtgataataacgggagatacaatgataactataactttaaataatcaaaatatatattaaaaaaaataccttatgagaaagagtgtttacttaaataatatgataatacttaattttttctgacatcactatttatttattttaaaatttacaatttaaaactctattatacgcgttgacttcgcttttagccaac

SEQ ID NO: 329724 - DNA, 811 bp, Cannabis indica
ttattcaaatcatgttgatccccactaatctacattaaaggttgtgaatgagtatattatacatatatatttttcttctgctatatatatgtattatattacatgtattgtaatattcttcttctacctttcctttatatataatatatatagtgtacataaatatgttgtagcatctatttaatcaatctcttttattattcttgtattatttttacaactaaattgtaatatatattttaatttatattctattataaataaaatctctaataaattggaggtttaaatttttgttataaatttagaatggataaactgacaaaataaattgtatgtaaagaagttttgtagttcgaattattaagaagctgataaattaaaattattaatttaaattgatgttacatgattttagttaatataacccttccctcaatagataaatagaataattaaaacatatttaatatagagaataaaaaaaataaaaaaagtatgcatataataataaatataaaattaaagataataaatttcaatatattaacattgtgatatttaagttaaaataaataaaaaaacatctattttaagcaaatatttgtgcaattttgttttgagaaaaatacaataaattaaggtcaatcatataaaataaaaatatttaaacatttatttagtataacttagtggtttcacattttttctgacaaagaggagattcaagttccaatcttcctctccaatgtaaaaagaatgatatttaaacatttataataaatatttaaattaaattaaaatatatttt

SEQ ID NO: 329725 - DNA, 494 bp, Cannabis indica
gggtattatgttgtagtgcttcccagcaaatgataagttttgagaactccaaacattaattctgttggtccattctttccactaacacctcactctctgaacttgagagtctacagcaacaatgggaattcccaattatttaaaagataaagtgctcctagaaaaatctgagacatccaaaactcgttgtatttcttgttctgacatcccataaaaataaaagacatgtttgttctcactcgaatgtaaacccagagttcgagaaaaatgtttaaggccttgtaacatcaagtaaatagacttagagtcaccatggcagaaaagcaatatgtcatcggtaaaacataagtgaatcaattctaattcctttcatctttcatgaaactaaaatttttctttttgaccaatattcaccattgttttttaaatgcattccattccaagaataaaaaagagtggagatatagggtcacatttgttgggttttatgccct

SEQ ID NO: 329726 - DNA, 1313 bp, Cannabis indica
atccaaacaactaatagcgagacacccatatcgctataggaaggcgcgctcatggtaccttcactaatcagctccaaacatctttcaatgagatccacagctccgtcgagtcagctctcttagatagaagctaacattcaaatgatgttgactgctgaagttcaccttgtaaccaaaaaccgtgattgtcaaatggagcgttatgtcttcaaatgcagaaacaacgaggttacattatcaacatcagaaaggcatgggaaaagttccagctcactgccagggttattgttgctatgttcctagcgagacgtcccagaacgatatgtgttacaacgtattttatacacgtttacattgacccggtaaaagcagaccagtcacaacagtgcgattttcaaatattaactgtatttattttacgtgggatataatcgaatcccaggatttcaggggataattttttgtaaaatattagtcaactctctaattaactgacctctatgtagttatagataggagcaggtcacacgggaaaatggatgaaaaatttattggaaaaaagagccctagaactacatcagaaatctatcacaatttagactcaaatatagttaatgaatatctattttaatagtttggtgcttttctattgagtagccctcgtgaaaaaggctcagaaaaaccctccttatatacgtataagaaaacaactttctccatggctggcaatagagaaaactttgacactcatcatgaagaaaccactcactctcctggaaaagagacaatgggctcccggaggcctcccgattcatgatctaaacagacactcgttccaggagaactcaacttgacgttggcccaagcacgtggaccactcgttccaggaggacccaacttgagggtggcccaagtacgcggaccacacgttcaaggagaacctagaattcgagaaccaggtatgaagaacctaaagtgaacattggcagagcccatcccagtacagttggtgaggatggcgcctacgatctaacaagatacacgctgattgtcgagttggaaaactgccaactgagacgctgcctggaggaggcaaactagtggaacgctgagttggaacgtgaggcagctggtgccagggcggcataggagaataatacccaaaattaacttgaccctggagtgagaagaccatgagggataggcgaccagaagcgtcctcactcaccaagttaaagcaacaacctagcgagaagtttcaggcgtacttaagtcattttagcatggcttctacgagagtaagaaatttggat

SEQ ID NO: 329727 - DNA, 710 bp, Cannabis indica
tttttttttttttagaaattatattacctttttatactattttttataaataaatagaaaaagaaaaaaaataaaagaagaaagaaaataaaaatgatatatcattatttacaattaagttatttttttttttctgttttaagtttaggttttacaaaaaatatataaaaaatttatattcaggtttcaagtgtattttaatttttcgagttttgaattaatgaaactcaaacccgaccagtaatgaaccgggtgtaatccaaataaagtttactaaactttaaacttcggatggattttgaatttcgggtgtaaatgtgcacccctaattttatctcatattgctaataaatgatgtgtgggatatatgttccactatagctaagtaaattaagtaatgtctgtgattgaaatctattgaaaaagaaaaaaaaatcaataattcacttattagagttttttcctcacgattaatttattttatatgttgatcttgcttgattttatgcaaacttaagtgtagtaaaaagcatacgaaactcgattttgaaacacttatttatctatttattatttattttgatagaagtcaaacaagttaacatctctaatagaaaatacaaagtttgtattaacagtcagtaatcccgtgatccgtaaggggaaatactgagtaagttgtacaatcccacaccgcctggggaaggtca

SEQ ID NO: 329728 - DNA, 1005 bp, Cannabis indica
tttttcaccatcgaaaagatataaatttcatacaaaacatcaaatttacttgtagaagatcgaaaaataatataatttagtttgaaatgaaaaactctcttaagacactgagctcatttatttttaagtaaattatttaattagtttttaaattcttacacaaagtcacaaaccatctaaaatgatatatttttaaaatatattttactatttttatttcaaattcttttacttacattttttatgaataactacaacttctctatttttttttaaaaaaagaaaacttaaaatctgcaaaataaacaaaaaatgaaaaaaaaaaaaaactgtaaattaatctgaatattataaacttattttaataattatgaaaatttttcttatttatttctcattcaatcttttgtctttatacaataaataatgaagaaaacaatttatacatatatgacatgtgtgcttttgttgtgtgtggaatcttctattatatactatcaacttattgtgtggctgctaatctctctcattatcacaactaaataaaaaagatgttcattatttaaatatttatttttatatataaggtaacatatatataacataaaaacaataattaacttctgtttacaaaaaaaaaataaaaaattaacaatttaaatttaacacactataaatgtataaccagtcagattttgtggggtctttagaaaaaaaatattattgaactgttattaagaaaaaaaaaatatttggtgtatattttcaaaaatcacacaagtgtatttttaaaaaagaattatttcttttcagatttctaaatgggatgggcgcgaaagtaggcctagttcaaaataggggtgttcgcggtgcgggtggtgcggtttttgactattttttcaaaccaacccgcacgtgcggtttttttcaatttcccaaaccgcacccgcaccgtgaaactaaaaaatcgcaccgcaaaaatagtgcggtacggtgcggtttttg

SEQ ID NO: 329729 - DNA, 761 bp, Cannabis indica
aaaatcgtatttttgttgtttttgtgcatttgtgaaattaaccctatttaataagtgttaagtaaattaatgttatagttcttaattggtgcaaattattacatttttattttttaattaaatatcattttaatattaaaagcttacaaaaattttaaaaatataaattaattattattatccttaaaaattaaatttaaatattaattaatcaattatatatataacaaaaatatttaaattcttgttaattaactaattaattaatatccaataaatacagtaatgaattaacaaaataaaaaatgagatgagatgagatgagatcaatgtttggaaattccacatgcaacccactcgatctgatgatgatgatcatctaatcatacatcaaataatccaatccaagggtccatattaaatttagcttttacaagtatatatgtgtatgtatatgtgtatatatagatggggccaagattcttggagtgggaggtgggaaaaacaatgtaccaaccaaaattctaagctgttaacatctgtcagaaatcaacaaataataaacaaacaatgattgatattcaccatcattacctttggatcctatcacaaaattttgcttagcctccaaacctatttcgagtaataatatttggataaccattctttttgtttttccacattaaaattaaataattagttattgttattatcattacaatgtataattttcttttttaaaaaaaaaatgaaaaattgat

SEQ ID NO: 329730 - DNA, 696 bp, Cannabis indica
tatattatataattatctgaaaaaaatcctaacaatttgtgttcatggaaattggaaactggtaataacagaaaagaaagaaggaaagtaaaaagtagaaatattaccaaaggaagagccatcaagtttgagaacagagagcttgagaggctcctctggaagcttatcataagaaacactactctttcgagaaaggctatccataagcatcaatggtgacaatggcaacccaagagagcgcctaggcttttcttgagaaagccgaggtgcaaagtcttcatgtttgtgatgatgagccatggctgatatatgccctgaaactcattgctatcttatagaaaggaacacagagatagattcctaggagagaagaacacgtataccatttggggttttgatgatgtgaagaaggagcttccaacctcttttttcagcttgtgtcggaggcaattcccttttccttaacaacacaaaacactatttattatacatacacaacatttttattacttgtttaataaattaagccctacacttaactaataccacattcaaaacaaaaagtgagaaaaagaaaatattcttttctccttagattttctatagttgtaatcatgatttttggctgaaatataacaaacctaaaggcatcaaaaagactttaccactgtatcaacctatatatatatatatata

SEQ ID NO: 329731 - DNA, 1687 bp, Cannabis indica
cattgagatcttctcgcgactttatagtgacatccgtgacttcagcagtatttgtgacctcagcctcctcagggaaaaggctcctcctagtcctgagtcttagtaggagatatggtgtagaaaagcattagccatctaaacagcctctagactaaaaaatacgaatcgaagtctggcagcttggtcaggggtggtatagatgtaatcaaaaacagcctgatcataagctttcttcgctattttctttttcagcctcaatattgcgaataagattaacgatctcttcctctaacttcttagtcttctcctctgacttcttggccttctcctctgcctgatttttggccctgctgagatcctcgacttctttgtctttggcaacaatgtctagctttgccttcttgaagagttgagtttttgtttcttcagaagtttaaagtccttgagacccacaacggaagcccgcgagtatacattcatgaactgtgaggcaagtttgatagagcgagacaagagatcttcgaaaggagccccctcaactttcgcgacaaattaccacttgcgaaccgttcctacaaagtaatgaagtcgtgagctttggttgtgggctctatcatgacctttttccctttggtcctgggtgactttctggtgtttctttgacaaatcaacctcgagagtggtggtgactttgctcttcctcttttgaggtgtcgcggcagagggagtcacaatgttgaccttcatttgcagttaaaagagggagcttgcttcaggaaagtcatatctacgaggaggtacaaagaagagcaagaatttgaggagttaaaagagcattatcaataatcattaagttgcattacctgatacttgtcttgaagtctgtttggaaggcacttgtctatctttttcttttgtttctcagaaggctccttgtatattggttcttgctggagtttagcgtcgactggaatcaacttgtgttcttgcaactttgcagaagtacacagtagacgccagtcataatcttgaactggaaggctgctcaacacttagtgatttccacactatttttgtctaacacatattgagttgttctatctgcaaacatagataaatgttagcatttacaaaattataaaaataatagttgtgtaaaaatacgcaacgtacgaggtcagcaattgaagtctatcctaacccctagcatctcaaatgtgcaaacccacttcgacttctaatctcccatattagaaaccgtgccttctaccccattaaccttagaactgaccctttttctaaagcagtagaagccattatcatgaccaacatttttcatatcataaaaataactaaaatcatcgactgtgggttctccttgtgtgtattccatatacatcgcgtagaatccaagaattatgcaatagttgttgggtgtaagttggaaaggagaaacgtcgtagtgcgtcaagatagcctttacaaaatgatggaaaggaagtatcacaccacaacgaagaatgggaattgaaaccactacattttgagttgggatgatcgcggaattagtgaatggaagatgggatcgctgcattgacataggttttgaggtggcgatacgaattaaatctagtcttttaattattgttagattagactttttaacccgcgagactaggtcctcgca

SEQ ID NO: 329732 - DNA, 960 bp, Cannabis indica
taaaaaattatttcggatgctaaaacagataggggtgcatcaatatgtccattttaaaggggtgcattgtagaattttcctattatttattaccgttactaaaacatatatttttattattattcttttttaagaaataaaaaaaagtatgatatttagaaaaagaaaaaagatattatgaaattaaaaatattaaaattaaattaatattataattaataataaattttaaatattattatgataatttttataaatatcacttaaattaaatattttttaattaaaaatgatgtttaattaacctactatatatatttatgatgtcactagccacgttgggcctaattatgtatttttaagttttttttcttcttttaaatgaagcagtttaatgcagaagtttagctacacctgaatgtgggtgaccaactggtcctacctgattaatttcttaaataagttggagccattatgttatgtgtggaccaagtaatctctggttctttcgaagctaatcttctactttattaaatactaattaaggataaacattttcattcatggcccccttcttaaggaaaaagtacacatctaaagcaaacctatgataatgacaactgacaagcatttcaatgccaactgacaagagtggaattattgacgctgagagactaataattgaaattaagagtaaagaaaaacatagacaaaacataatattacagcacaaaaaaaaaaaaaaaaaactaaaaagaaagaagaagaaacttgcagttacttttctgccaaacttggtacactctacatggctcaaattctcccggtaagttgatacattccttcccagcatggaaaacagagtagccagcagcagcagcagcagcagcagcacgtcatatcaatccaattgcattgtattctcctttaactcatacagctatagttatggctgccaac

SEQ ID NO: 329733 - DNA, 1018 bp, Cannabis indica
gtaaataattaagaaggttgactttttattcacaagaattactcgagaaagctgcacaaaataacaaggtgtgtttattaacccaagtaaataagaacactaggccgtattaatggctggttacacatgaatgccacgcacagttttagagccaactaatgctaattaaagttacctaagttcttgagattcccaatagtagtattagcaaaactaataaaccacaacattttcatcttaaaattcaaaaaacccatcatcagaatatttccaacgcataatcaaagttcttgggattttaacaataattatgattatatttttatatgataattagtacatgtagagacaattgttttcactctaaattttaacaaaaaaacagtctgggaaatcacaagtcagattttgaatacaacaaacaagataagcttatattattttggttcatttctttcttgagttgaaagagaatcagcagagttcatcaccactcgccgtttacattgagaagagaagctgaacaactccttcacatgcatgagtcatgcctcactgatggaaatgcagcataaaaaaatcatgcaataatatatcagcatgaaatgaatgtagcagaaacaaacacttgaaatatatatatatatatatatatatatatttatataaatatatacatagaaaaaacaaagcatacatgaaccatgttttgcaacctttctatttgcaacagctatgtaagtagatgccaacctgttcagcagcttaaactcagaataaggtatatacaataaataaataatcctacatcaaatgattatgcctcactaactgattcaagtactttactttgtatgtgagagatacttcaacttagtcaagccctagaaaaaaccaagggaagagaacagctgaaagtaagttttcagtaaacgcaattataaacatcaaccgtacatctcttaccataagtaaaacgtaaacctttaaaaagagaaaatatatatatatatataaa

SEQ ID NO: 329734 - DNA, 761 bp, Cannabis indica
ttgtaggaattaaagtgtatttttgttgaggaaaagaaataaaagtagtaaaattgaaagaagcaagtctacagaaaaaaaaatgagaaagcaaaggaaaggagaaaagagcccaaagaaaggcccagcccaaacctctacttcagcccagccacgcgggtcccacggaaccacatcagctccaaacgacggccttctattagtccaactcatcccagtcagcgcctatgtggctttgtcttttcccagccatgcgtgccacatggcgtcacctaattggatccattttcccagcttctccctcttctttctcttcaggccacgcgggcctcctgctttctcctatcttcacgcaagcccagcccatgccacctgaaatgaaagatcaattaaaaagttacaacattacattttcaaaagaagtgtcaaagtcaatcacaaagacttttcaaacccaatatccacaaacataataataagaataataataatattaacaacatattaactaagaagatcaaaactatgaggtttgttgttgttgttattattatttttgagactctataaattggagctcactttttgtaatttggagtgtaatttttagtgtagaaaaactatagcaaaattctctcaacttttcttctcatcttttctctttagaaattttatgagaatgattagcataatggcctaatcttccttggaaggttagggatgattccatatgcaaagtgaggttattttgtatctttgat

SEQ ID NO: 329735 - DNA, 575 bp, Cannabis indica
ttaaaatgtaccaatttgagccttaatcacaatgtaaaaaggatggccaaatttcctactaaaagaaatattgccaatcttgtatttttattcaaatgattctaaaaaaaaatagactcatgaagtatgtaaaattaactataaaacaacgttaaaaattccctatcttttattaattatttagtattgcatatattgtttagattaatgttcatattgaaagtattaagggccagtttggcacagctgtgctgtggggaaaagcagctgtagctgtgctgtgggaaaaagcagctgtagcagaactgtggaaaaaagttgagctgagtgtttggtaaattataatttttaaagtgctgtgagttgttaagattctattacaataatgataatattttaatttagttcattataattacaaatatatatataaaaatatgttatataaattttttatttttttatatatttttaattatttttttctatagtataaatttatatgcatttgataaaaataattttaaatatttttaaattatatttttatcacttgcaaaagataaaattgtagt

SEQ ID NO: 329736 - DNA, 942 bp, Cannabis indica
tttgtcgttctgcacgggttgctcattgcttcatcttgagcatgcatatgaggtatcctgttcagactgcgtcttgcgagcaaatacccagagttcattctacgtttaaccattgtgtgatgccacgtcagagtgtaaaaattaggataacatttgccccccaagtctgtatgagacttccgaagttgcgtgtagacttcatccgagctgtctttgcatttgaatgggtgacacgtgtcaggcgcatctattcgtgtctttatgggaggctgaatgggcgtcgcttcagttttcgcttttggggggaacccaggcgtctgaggttcttttgaaatgattaccccttttcattgttctcctataaataccagtgatcatttgttcacaaaccctttttcaccaaccttctttactaggtaagtctagagcgaaaagagaggtttttggcttccagtttggtgaagtgttttcaccagagcggctaatttgccttggcgtaacctgaatccacacgttcgatccttgagtatgttctcgatttattttgcgtttactttgcacatttattctctgaatgccactttaacttcgctgtagaagagatgtaggaaaccctaagtttagaaattctacatttttcctttgtaacgatctgtgctattttatcgttcataatgcttgctttcggaacagcataatgcgtgtctttcaccttgcttattctaagcttcatgaaatttgttgccttaactcgcgagaatttcaaacttcctgagttttgacttttcgttgaatattcttattctttaatttgttgagtactcctggtcggcatatttgcctgttttaatgttcgatatcccgaccaaacactcatcttgtgtgttgtcttctgtagatgaacccaggtgagttttggggaagcgaacaccaaatcgacca

SEQ ID NO: 329737 - DNA, 949 bp, Cannabis indica
agttaaataaaataattcaaacaaaaacactcattcaatatgctccaactcaccaaataattacactcataccatatctaccccaaaaatactcattcttatgttatataaccgattttattttagttacaactgatttgagttatttcctgttttttgtttttatttattataacattgttatagaactaattctattttaattataattgattttagttattttgtgttatttatttttattcattatgttacagaactgattatatttcaattataaccggtttgagttatttgtgttatttatttttattcattatgttatagagctggttctatttttattatttgaaacatctacttaggtaactactctggcaatttttctggcggcgatgacttttccaacgataataaattttttggtaccgataactttttcggcaaaacttaatattatattttatcaaatttatttattgttttataaatatgagatttctacctttattataaacatatggcataaaaaaaccctatataaaatataaaaaaaaactataaaaaaaaaacctacataactttatggtattatttatttatgctataataccaaagtgtaatttctatcaaaaatgtatgtatgtagaagatgatacatttatatattctcaaaagccgttcacataagcccattccccccttttttttttgggaaatttacacagtttactgtgttttcccattttctttcttttatactgttacactccaaaaataacttttgtactgtttttttttttttttttcggctgccattttttttttttctttttcggctgccaacaattttcaattttatgttattgttttgtttttttttagattgattgggacatgggctcaattatttatttaattttttattttaatggatataaaagttatt

SEQ ID NO: 329738 - DNA, 887 bp, Cannabis indica
gagttaggacaatatgaaataacttatcaatcctggacagcagtaaaaggatgagctttggcagattttatggttgagtgcacaggcaaggaggtaagtagctcaaaagacaacactaagtacgaaaaaagagcaaggaaaagcacccccactagaagagagcattgaaaataaaccaatttggaagttacatatggacggatcatccactgatcaattttccagggctaggattcctctcatcacgcttagggggcaacccgtgcacaaaataattaagtttgggttcaaagcatccacaatgaggagtctaaaccttacttgggaggtttgtgctgagtttctagaaatttccagtgactcacattggtggtaaatcatatcttattggattatacgaatcagggagagaaaatggcagtgtacttaagtaggatctaagacctgctcacacaaatttaagggatacactctccagtagattctaagagaataaaatgtaacaactgatgcactagcactgctagcgagcaaaatagttacagacaaagaaaaccttatcccaatccagtttctttaagaacctaatgtcacttgcatggaggaaattgagatggtggacaccacatcaaattggatgactcttatagcagcctaccttaatagtggtgaacttccaagcaataggtataaggctcaaaaaatgatgaagaaagctgcttgatatttaatagtggatggtgtgatgtacagaaggggcttctccatgacattgctaagatgtgtcacaaatgaataagctgcactactcttgtccgaagttcatgaaaataagatgtgtcaccaggatctagatttactaacaagtatgttggattaacaaccta

SEQ ID NO: 329739 - DNA, 1469 bp, Cannabis indica
atattaattttttacattaaaatgttactatatataactttttaatttttttttttataaatatgtgtgaattagattcgatcagttagttttacatgtcaatcaacatacatctaatccgtacaaagtgcaaattttgaatattttaatccaatctaatctgcataagtgcggatatcctcactttgcagattgaattaaattggatcgtacagattaaattggatcgactattttatgcacactagatactacgtacacacatatcacaataactaataaagtgaagttaacaaggagatgaagatgacatgtttaaagcaagcatgggctttacactaaccaagtatttgttttcaataactcgataagggttaagctaggttagttatatataggatataaatatacatggaccaatatcgatatattttatccaataagagtataacattgattttatctcctttcaaaaagaaaataccattgatcaagttaagattattattgaaatattgttgtgttttacttaaaaatattttatcattaattaatgtcataatttttggtccatcaactgcttttttctaataaattatgaaattttattaataataattagttaaaataatagtatgcaatttaattagtacatctctctcattagaaatataattaaaattagaaattaaaaaataattcaaataatcagttgcttgtttctcaaattatttgaaaaaaaattaataaaatcaaatcaaataaaaaattacaatattacaattaatcttaagaacacttatattttgttatccacttcttaaaagacacaacagaaaaaattgttgcaaaatattcatttagtcgcagaaatattattcacaactactaacgacgatttgatgacaaaccattgaagaataaaaaatagaactaactaataatgaaacaaaattatatcatatatacaagaataaaatttcaaaattataacatggaaacaagattataagacattcaaaatcatatcacataaataaaattaaatcataatagtaaaaattaaattatatatagtagaaaaatacaacctcgaccaagtcggtagactaccgacttgataggagaaaaaacccaacctccactagttataaatttaagaaggagaaaccttcataaaatatatgtatatatatatatatatatatatattttaactgctatcttagttatatgtagatatacatgagcttatatagttaaaaaaaaagtttgaagtaaatttatatattattaacaatttacatcttcataggtattataatcgttaacattaatcttattgtatgtatgtatatttatgataatgatattaattacattaattaatatataattttattttatataattttttgagctagcctttgaatcatgcaatgttttatgtcactatttttaatttttct

SEQ ID NO: 329740 - DNA, 2217 bp, Cannabis indica
ttgaaatggtagccaaaatttcggaacaattgccccttaattttttttaataaaaagtactttttaaaatgcctacatagggtgtattcgtcacaatccattttttgagaccacacatgcgctcaattttaacggctccacggtttcgagtgtcattagtaacattaatgaactgccctttcaccttctacctcattccaaaccgttagatttcccaacctttggccattccgttagtgggttccgagtgtaaaatggtggcttggtttaaccatgttccatacgctccttgtttttgatgagtttcatccagaagttggattatcattcgcttgctatgatgtcccatccaagctcagaaacttatccttcaatactcgtaacaccaaaatataccaaccatttttcctctccgtacgttcacagaaactttaaacctcaatttaaattggaaacaaacgattccaagactgaagatcatccaatttatcaaaccaagtagatacaatcaatcaatacaagcgattcccacaagagatttctgagggtaagcgtcatcctctgcgaatggtggtctgatgtggattattattatttttttcactatcgcttcactgatcttttatctttgtctctacagaaatggacgtagattttgagagcgagttcaaaggtccccctcaaactgacaaggaatccagattgaagtaatcccagttggcaaggtcatggattctactaaagaacctaaatggctcaagacccaagcttgcacaagaaaatctccgaactagataatcactggcatttataaatttctcgagactgggaatgaggtctcgaccgtagggaatgaggtctctgctgcaagaaatgagatcttttgatgcaaagaatgaggtctatgcaaaggtctagtccttattcatgtagacggtctttctgaagctatgtgtattgcttatttaggaaaatgccttagtggtttgcccctagtgacatttttgtaaagacaagtttgtaaaccaacttgagttttctcttatcttaaatgcctcgtactttgtccttcaaacttaatatatttgtgtttgcttgcatttttattcacaatgtaaacaactatattttgatcaaatgcaagtacctttgggtctttccattgctcgtacttttcctatttaagtatgtagtaatctactagacttttgaatttcgagcagttatcaactctgccttgtaatgacagttatagtctgtcttaagaaaatttgaatatacgtttaatgattttatcacttttgtacatttttgattgcttgtatgaatagttatattatctatccattcactaggtttaagtacttttatcaagacatctcgatgtcttgtttaatactttcgtatcttgcgcgaaccgttaatattcaattttgtatgcaagttatgagttatatctcatttataacttttgaatttcctttctcgtcagataggtttttaatcaaaaaattataattgtttgatcactttctcgtcagaatgtttgatcaggaagttataacaattcgacccctttctcgttaaaatgatttggtcaggaagttataaaagttcgaccgctttctcgacagaatggtttggtcaagaacctttaaaaaattttaaaaaaaatatttttaaagtggtgggtttgcattatataatgtatttccagatgaattccggttaatcatacatatatgcccctcaagtaattttaaagggtcatgctttataattacttgtcgaaagaaaggattattttaacgactgaagttcaaaatattacatcaccgatgctgtttgcaatcattaatttaccatcgatttactcccataagaattttcccgattcaattgcttattttatcaatccttcagaagcatctggttttgataaaatgagttttaatattcagggttaatccctagaatattcccaaagggattttgatattcagggtcaatccctgccatatccccacggttctaggtgaactgatcctgatttgcccttaagaaacttattagctgctattttagctgctcgtccaggtttttcttaatgtaaacacactttgggggatttcttaggtcaagaacaacttcttcaaattcttcaattggttttaataagtttctttcatcttggacctgggggtcaagatcctcgtc

SEQ ID NO: 329741 - DNA, 692 bp, Cannabis indica
gtattattaatttgtgatttcttcctatacacataataataataatctcacgtaataactaataactatttttttctttaattttttaattgtataactttcaaataacatagaaaaattagcataaaatttagtatacgtgcctcgcacgtagtctttttgttagtatatatatatatatatttatatagtacaaaaggggtctttcggtatttctaatagtttcggcactcaggagtgtgttattttattttattattatttttcgtgtaggttgtaattatttaagtttatttgtgaatttttaacgaattttgaataatttattgtgttgaaaatgagattaatatattttcttatgcatgtaataaataatttttttttatattttatattttcgatgttatatattatttgaaagtttttaataatttacttgtctcccaaatgtcaaaacaataaaacttaataaaataaagtactaaatataattatttagtaattacacagttaatcgaaatcaaagactaccaaatacaagaacactattttgaatgataatttcaaccttttgcaaaagctcacaattatagtctaattgtcattattatgtagcttgtataatttattgtcgtttgtgttcatgtatgaaaacgacaacatttttaaaagaacaagaaaaaactatggga

SEQ ID NO: 329742 - DNA, 1046 bp, Cannabis indica
atggtcaaaaaccataaccctgccctaacccagaattctatttttctctaataaatattccactaagaaaaggttctagacttacctttgtgattaacatagtcatccatcgtattttctgttgtcgccgagcaaaaattataaaaatagcataattcaaatataactaaaataatacacatggagtttaataaaatctccagaattgagaaattataactctaatgcccatttctaataatggaatctacaattaaataagttcataaataattataaaaatatcaatagttagtgctaattacctttactaatccatattgtaaaatgcagtcattataggatatgttttggcaaattaaagacgactacaatatacatgacatgaatatggctggaataatcaatacgatgataagtatgaagttaagaagcaattattgaacataactattagattttatcggcattacagattgaaacttcacaagtatagtaaagtagtaccaaagtagataaaagttagtataaaaaactagctaatccacaatcaattctacttgattgaaaagattaatagagcatcaggcactagcatacaaattaggaaaggagttatagtagagtggtataagaatcaagagactacaaaatgagccagagactattatccaaacaaatggaaggtatgatgagtgcaacaaatacaaggataaaggaaattaagaagtaaacgttacacaaaaaggtggtcaaaatagatcattaaatatttatatatagaagaccttttaaaaagcttccatatttatttctaagtaccgtggaatgagtatctatcaatgagtgagtcacaactattaaactgaaagaatgacactatagctttacggtataaaattaagtagaaaagtaagatttttatatgtaataacattcaacgaaggaatgggaataattaaagagaagtttgtataaggtcttctactctactctttgttgtttgatattcttgtattgtataatgtgttctcaagtgacatgta

SEQ ID NO: 329743 - DNA, 1087 bp, Cannabis indica
tttttattcatttatttccttccgaactcataatataatacttaatataaaacatagcatacgtgcatcgctacaatatactagtatatatatatatatataatacattttcatgaacacccccaaaaatcaagtgttgtatacatatgattaatgtatatgtgtgtatatataattgttatatgtaccttagatcaatactaaaagcaaacgacaaaataaaataaggtgtggactaaaactttaattgccactttattacaatatatttaatgacaactagtatatatgcatttatatatttttaatttgacattatatgcatattgttgaaagaaaatgatgtcaagtttattaattatttttgggtgctattcttttatttaattaataactatgttctattagttggtttaaagttatatattagttttatctcaaaagaagttatatattagtggctagagtttgccaacttaattgacattaatcacatttgtgaacttatcgttatctattttgctaccaatactaatttaggccagctactattttcttttcatgcgtacaactatttgttcttatccatatagagaaccatttagctttatcatttagtttctatcaaataaaaattatgataatcttttaattttgttgatgtattcttttttctgtattaaatgtatatatatatacactaggtaggagctacgtgccgaggcacgtaaatattagttttaggtaaagcttagtttttttttattattattttttcttatttagattgtatgtgaaagtatgatcatacaaatgatttattttatgaaagtaatatttatgctattattatcagttattcaaataaatttaggtatataaatgtcataactaaataatacttattatttacttatagaaaatttggaggaacaagtcataagttttgcaaattttaaagcaaacattatgcaacaaaaattaaagtgaatgtgcgaacttaaaatagaaggaaaaaagtactaaaaaaactcttaatatatggaatattattagaaaaactaaaagagtatagtgaaacttctgc

SEQ ID NO: 329744 - DNA, 788 bp, Cannabis indica
gtccaggcgagataatcctccaatacaacaagaatccggaagacatcatttgaagcgtccgataaagtagttagcagaagtctggatatctagctctgtgtcacatctattaattacaagatcccacgatgtcagaacttaacttctaagatctcgtccaagggtcatatctcccaatatggaaagatagtaattgacaatcaaataattaatgtgtctttattctccacaaaagtaagatacgtttttgacaactatcaacatgatgtgacatccacatgagcatacagtcgatacctcatgggtcaggctccaccagatgggcccaagtcaatatactatttgtatttaccccatcaatgggcaaagtctaacgaataagaacccttgtactattaatataagaacatctattcaagcaaagagttagaatctcattcctcaattgctcaagttaaatttagggttcaaacacttgtaaaaaattataaaacttttctagtcgtaatattgacatgtggactaagacgttaacgctccaatgcataaatagtgttattttttttttattattatttatcaatttctttagctttcactatttattttatttgattttttgaaaaaaactaataaatataataatttatatgatttggagagcacgtaacaatgacttatgggattagaaaattcaatatgttaacagcttaattcaaagtgtgaaatttgtaagtctaaacagaattcatagtacgcatactctgaaaatagagataaagacaaag

SEQ ID NO: 329745 - DNA, 832 bp, Cannabis indica
gcatcattttgcaacatattcaggatatatagcagtttcatctcatctgatattgcgtaaaacactcgcatcaatggaggttctttagccaatatgttggttgcttgaatacactgcattggagttaggccattaatcttgcttatttctgtgaataaattggtttgcatctcagctacatccttatcagatattgcatcaattaatccttgaaacttcgggacaatattagatatagaattttccaacgtttgtagaaatatcatccataaccttaattttttattcttaccacgttattggttactagtagtactcccagtggatttacgacgcatattaattggttgttgagtatgtgagacgccatcaaattcatctatttcttcatcatccccaccaccaattgtattataatcaactccgaattctacaccagttgtatcattttagcttatattttcttcatcatcatcaacattaccagcatttgtcctagtagctcgatctcgtccatatatttctgcaagcttgttgtaataagaaaatggtttcccatataatccacttgcatctttttatttctgtacattcacaaaaatatatacatataataagtccacgttgtaaatataaagtaaaatataaatatatataaatatttgtactataaaagttacgttatatttaccttcacatattcattaaagggttttttcataattatacaacagaaataacataattacaaaaaatgtgcaagaaaaaattattttaaaaacttatacattttgaaaacttattacatgaaaccatacattttaatcattaa

SEQ ID NO: 329746 - DNA, 590 bp, Cannabis indica
tttttttgttataattaaaaatcacaattgattacaaaaaaaaaaaaaaattatattataattaaaaaatatcattaaaagtaacttttttttatagtctaaaaaacgattcaaataaaataaatactcaaaacgatttaattgtgcaaattttaatataaaatgaaatcaaatatataattatagtatgtgatgtgactacttctccatatattataggcccctagttgcaatatattctcttctttatataaaccatgggcgcattattgtcaacacataaatttccatctggttttttttttaatttttaattttttttaaagaatattaaaattaaaaattacaatattactatataacacaatatataattttaaagttatattttggtacgaacgaacttttagtcaatttatttttcataatcacgtacattataattatttagagttatttttaaaatttaaaatattttaaattgtttacaatatcaaaaattagatttatattttttgttacacgtttaactatttaattttattttgaatatagtaaattatttataattttttaaaaagtttacaaat

SEQ ID NO: 329747 - DNA, 423 bp, Cannabis indica
aatccctatcttttttacaggcaattttctttgtgtaactatatataatatattctattacaaacactatgcattatattgtgaaaacttctttagagtgttgtaactctgaagttccatataaagcttcgtttcaggtctttccaaaccgttgtggaaattgcacacaagaacaccttcctcttgaattgactttctttattggttttaatccaattaaggataccaagaagctgcatactcaaacatttcatacctaattagtctttcacagttttaaagacttgagaactataccagcactcaaaaaataaatgctgatttgatttatctttgataccatagattaagcatttagaggttgtttgattatgttttcagtttttaatttttagaattgtgttttaaaaatgagaacaaaaa

SEQ ID NO: 329748 - DNA, 711 bp, Cannabis indica
ttattattattattatatattttccatgatgaaattgtttcccatatgaaaggttctcagaccaatgtggtccacagaaaccaacttataaataataatttcttcttttttttcttcttatttttgaaatctaaataataattaatatatgcattcaagtcatccatgtgagactgccaaattatattagaactattttttgtttttttgaatgtgatgaataatatcgacatcagatatagtttgatcaaacttgttattaagttgtattttttatgtattgataggtatactaatctgttgctgacttgtcaccatgttctccagctacccatactgaatttttaactaatatatacaattcgttatatatatattatatttttttttgctttacatgtatagtgtgtatgttaattttggtatacctactaatacccaatttacccctgaacaccaactaacataactgttttgacagttatgttcgttatgtgcccactactgtttttcatgtgtgtatatatagccttttggctatctagttttagtaaccattctgtaataaagctaagtatcaataaagctttaattctctctcaattctgtcttaattggattcgagttccttggataggttcagttgttgaacctgagtctgttctggtgcatgaaagaaacacctctggtgtgatcgaattggtgtttgct

SEQ ID NO: 329749 - DNA, 893 bp, Cannabis indica
aacttttttatacagtctccaatgatgacttgcttccatggtattggccctagaaaagagcaaggtgtcatccgcaaacattaaatgagtcaccgccggggcttcccttgagatcttgatttccatgaatgtcacccctagcttgggatcgatcaagcatccttgagagcacatcattacatagaacaaacaaatagggagatatggggtccccttgcctcaatcctctcccaggatagatcttcttttgaggtttaaccattgagcaaaactgaataagagacagtacttacacattgcataatcaacttcacaactacatcattgaaaccatggttttccaaaactctttgcaaaaagggtcattctattcgatcgtaagctttatgcatatcgatctttatagccataagaccacctctccctttctttttcttgatcgtatgcactatctcctgagttagaattgaggcctcggctatccaacgccctggaatgaaggcagattggtaaggggacactaaatggtcgattaccatcttcagccgctgagaaatgatacgacttataattttgtacacaaaattacaaagggcaattggtctaaatcggtccaccgtctttggattttcacccttagggattaggcaaagaaaggtgtgattcacattaccactcaattcacccgttctaaagaactcttgcacaaatgtgatcacatcagtcttaacaatctcccagcagcgacggaaaaagcatcccgagaaaccatccggtcccggcgcctttaaagggtgcatttggaacacttgtaactttatctcctcctcagaagggatctccaaaagcatctcattttcctgggctgatatagacggagtgatcaaaccttc

SEQ ID NO: 329750 - DNA, 645 bp, Cannabis indica
atatatataattatattttttgataaaaatgttaggttaaaaaaaattcagggtgggttagacccaactcgattttggcgagttggagttgacctgcactgactcagacctaacccaacttaggaggatcagggttgaccggccttaggcgagccggtactaacctgtcctgattcaaaaagcttaatgggttggagaggggcaggtcgaaaatgggctaggacagctcggtaacgggtcggggccgactcaccccattagatccctatgagtaagggtgggcatcatccaatccaatccaattgaaccgaaccgatccaatccaatccaattacaattggattggattggatgctaaaagttggattctacttggattggatcggttattggatgtcaatctcaaaatccaattaaaaaccgatcaaatccaattacatttatatatattaaaaaattatttatataataaaaaatataataaatatttattagatttttttgtatgttaatttataacacttgattgtttagtatatttattttcataatgttttgttttattttattacttataaatgttattattttaattatttaaaacttttagcctacaatatacttgtaagaatagtatgtttatga

SEQ ID NO: 329751 - DNA, 1058 bp, Cannabis indica
aagactcattaatgctccaactacgtaaaaaaaattaatttcaaaataatacttaatcgtttctttaatctctataattatataatttattatttattagttgcctaaaaaattgacttaataataataataaattttcttaacaaaaccttgtatgttatgactaatgcatattaaagtttagtcatacttgtaggaaaatgtatcacaacaaatgagttataatagctaaaagttaaaaaattttgaagagttgtccacaaaacattccttattagagcactcccactagtgtcttcataatagctaaaagctaaacaaatttagttaaaaacttatttttaactcttccattaacttctttataacttagctataatatgtttgcacaaactctaataaaatgcatctcttgatgtagctatagagagagctaaatttttttattgttttattactgctttatttaagttattaactttttataattatatataatgtataatataatattttttattaatttatatattattaatgtattaaagatatgttattttaatgatatagataaaaatatagtgaactcgtatgttataatataaaaatgtgagataaaatataagagaaatgataaaaggtacttatggtacttagcactattctgatatgtaatattattattgatgtaattcattatcgagttttatttattttaataaattttatagaatattgctaactaattataaagtgacactttatcatagtgctaggtactatgagtgtcatagcaatgctcaatataaaagtaagattttggtgagttattttaaaaaataaagtaaaaaaagtgatgtgagtgtgagctaaaataactaaggagttaagctaagcactattcattctttaaacttattttactattattttttttttcttcttcattttctctttttttctttctcatatttttatttataaaaataaataataaataaatatataatatttaaaaaaaaatgtaatgatataatatgagaaacttacaaaaatac

SEQ ID NO: 329752 - DNA, 1114 bp, Cannabis indica
tatataatttaatttgtatatatgataagatatatacggttaggattgagacgaatacgatacgattttttataaattggttaaggttaagaaagttattagatacgagttaaaaaatagatcgacacgtctgatacgaaatataaaagcagatcatataaaatatgacacgaacacaatacggtgacacgttttgccacccctatagatatattagagtcatatccattgcgggcaagtgatcctatccaatctgcacctatacagataatgaccatgtttactctgattggtaagtaaaaaaaaaagtcaccatcttgagggagaatattatggacgtttatctcacattgaataaatggtaaaatattgagtcatatataagaacatgggctaccttctcattagcaattggaattgagatggaacctcatgattctcaataaaattatgtttgacactttaattatatataaaaaaatatttattaattaaaattatttaataattatatttagttgatgtataataataaaaaaatagttctcaagttattccaaaatttattagttaatttttaaaagaaaatgtaattttattttttttttaagggaaatatgtgtgcgcaggcctaacctgttttgggcctcgcatgtgataaatttgaggaaattatattgtatatccactttactttatttgttttgaattttacctccatttttattttctttaatatatacccacttttatagattatgtccctattataccccttaagttaatgtaaattatatgctagacttaagtgtaaggtggaggtatatttggtaactcactcaaaaaagtggatatatttcaatgaaatataatgtaagagtatttttgattaatggacacaaaaaagggtaatttttaacttatcccgataaatatttaaaaatttacaaaaatactaaaatttcagttaacttttacaaaaatactgttacacagaatttttttaaaataaaatactgtatttttataaaacaacagtggaacacaaaacagaacaactaaaaaataacagtaaaacaactaaaaaacaaccgtggaacaacagtaaaaactt

SEQ ID NO: 329753 - DNA, 612 bp, Cannabis indica
gttagtgatacactccattcatgtttttgatattcatttataattttaacttttttatataagaatattttggttgttatatattttgtgctaaatttagttttaaaaataaattaatattatattttcctcaaattttataattatactctaatgtactaaagacaaaataaattttattttcataaaaatgtacaaaacaaaaccaataaaaacattcaatttttattggaagtatatataaaacctatattaaatgtataaataaaaatataaaaatttattaattgcattaattaataaaaaaaaattaatatttattatggtataaaatttagttcatattatattttatgtcaaatttatgacaactttatgaatataggctaaaaatatatacatcatatttatagcactctattaattagattaatttactataataatatatattatagttacttacaatatagggataattacataaggtactattttttgtaaaaaaaaattaacatttttacaattaatgattttttacggtttcccgtaaattaaacaacaagaaacaacaaaaaactaacataaatagtaacataaaaataaactatc

SEQ ID NO: 329754 - DNA, 1113 bp, Cannabis indica
agtgttggggttttatgccctaaataaaactcatttcaatataattttatttactaattaataaaagatcataaattattttatacatcttagttcacatgattactttcatgattatatgtttaatatatgaattctattaaatcctgagcatatatagttactcatgattatagtgttgttcacacagtaaaaaataatcatgattatatgctttaaattatttagtctcataatttatctaaacacttgatttacacagatgtgataatcgacgatgtggtttacttacacttgaataagtggaatgtcttttttaggacattagtaaagtaaaattatattggatgcatcaacgatacatcagactggaccgttattgatagtgaaaataatatcataaacttaagattatatattttctaagtcaatgtcacttagttgatattagatcaattaatttcaatcctgagatggttaagctatagcttaattgtactatacgggttcttagaattatttgttaccaatttactcgtaggactagcccatacttacatgttgggagcttggtagtgtaattaagtgagagcattaatcttagatatagaatctatagcttctataactatttagaagtgaaacaatagtttccttagagcttggttaaacgatataaatggaagatctctcatttcggtaattataatagtttactgaaatatcatttataaggagctaagtgttttaaggatacaatacatcgaagagtaaaatggtaaatttgtccctactcgatgtaaactatctataaaggatcattgattatttagattgaaataatggagaattcatagcgtatctatatttaatatgtagagagctctattctgaatctatagtggaaccaggaggaattaataagctataaaatttacttgataaattttggatctacttattgggatcttggttatataagccaatggtcctcatattatatgagataatactaccttgtagacttaattaatttatttaataagttaattagaattttaaaatgagactatgtcttatttgagaattttaaaagatcttaatcctgacatg

SEQ ID NO: 329755 - DNA, 1003 bp, Cannabis indica
ttttaattaataaaaaatagaatgagatttatatttactaatcaataaatatattttttacaataattattatgctattatgcataattaacattaaacacatataataataataaaaaattatttattttaattttttaaaataatatataagatttttgtgcttaactaaataatgtaattcaactaacggaaatatgattatatgttactgtacacaaccaaacacaatttaaatatttttctataatcatatttttcttcataatattcttattttgaacactttatacctattgatgcctaagtgtgattcaagcccacttttttaaggagccaacgttacctatgtaacacattagccaatttaaaaaatattttacaacccgctatattatataataaacactttaatattaaaaaagaaaattaaatttatgcattttaattttatttttcatattttttaaaaatgtattttatacttttttatcttatttatgcattttcttttagtatattagtaactttttttacaaattttaatttttatattaaataataattactataatgaataatatgtaatattttaaatttttatggaatttattttctttatatacttaaatatttaatattaaactttattttatacatggatctatgtagagatttcgtgcctcgtccctgagagagaatatgtagagatggagattaaaattcttaatggaaatgggaataagaatagagaaagcactttccgccaattacttgcactgtgtgcattcctacacaaggttgaccctaactcaaccgaaataattatcgcattatttgcatttaacctaattttaaattgcatatattttttaaaaccctaacctgcaataatttgtaactgaactgtcaacccttaaagaatggacaaatgggaaatttgattttctatacttagatatacctaatttttttttctaaacacataacatttaatatttgt

SEQ ID NO: 329756 - DNA, 835 bp, Cannabis indica
attaacataaataactgctaatttccaaattaactaagcgggctttacagtgttgcttctagtatttcattcattatcaaaaattgcttcatatctttaaacattccatacccaaagccaaatataaagaaaaaaaaatcattttattaatatcccatgaaaatttcataatgtaaatatttatccaattttatacaaagaaacattcagaaaactccctcaatttgaataattatatagtttcctcggcattaatgaatgatctctatcttatttaatttgatacaaaatctttaaaacaagtacaattactaacacccccaccatgctccgacggttcgaccactctattcctgacccgaagcgcattgcttcctccttttccctaaggcatttttctgaacaatccacagaatactaaatttgaataaccttaaaaatgtcatcatcaatatgttatagaagcactagaatgttaacaaggaataaaacattggcatggccaataatgctacttttacaattacttattttggataaagcttttgatgaaagagcatgttttcataatatatttaaaatatacatatgaataaatatatatatatatggaacacttcttaatgggtaatacccattgatgggaactaaaaaaattaataaggtaataatctaataaactttttatggcaagtttctaaaaataattttttttaaaaaaattatatttatttttataaaattgaaaataataattacaactaataatttgaaagaaaaaaaattataaattattttaaaaattaattaaaattactactttattattttatga

SEQ ID NO: 329757 - DNA, 622 bp, Cannabis indica
gtgtgtataaggttttctctctagctcttggttctcgcagctaccttagctggcgccatggcaaaaacgagatcgaaggttcaagggaggcaaccaatagctatgaagacgaggaaggttcgaaagaagggtcctgtatctactgctgatgtcaaaaaaaccaaatcaatggatgaggttcttggcatcgaaccgattcatttcacggatgaggagagtgtcgaagaaggggacagtcatgaaccagatgcaaatttgtttcaagcacctctatctcccaaatcgtcacttcgctcgatccagaggcaagaagaaatcagggcagactttgccactttcatggaggctaatgctcaatgtagcagtagcatctcacaaggtaaaacctccatccctccaattctacgatctggtaacattcaaagaaatttggataattcttttaaaaacttggagaaggagaaggtgaagataactgatgaggacattgaagaggaggttaacttttggaattcagcaattgtatgctatgttctaggagttaaccctcctctgtccgttattgatggatttgcaagagagtgtggaaagataggattgataaggtagaaatgatttcata

SEQ ID NO: 329758 - DNA, 846 bp, Cannabis indica
aagatttatttttatttatttatttattaattaatttttaacacgtgatcagaagaggtaaaacgcgatcagtcaatgatccgccttttcctcccacgatccaactcctcccacgataatattattaccgttttcttaccgttttttttccttcgatcgacttctatataagtcgtatcagaacaacgtaagaatacatcttttctacattaaaaaaaaaattcttttctttctttacgatttttctgagagcaaacagtagggtgttacagagcgatacagttcggtgcagaacgtatcgtacttatacagaggctgttttatcctggggacgccgtggttgctagactgccgtgcacacttcgggcagagccgcgaaacgtcttaaagagagcgacattgtccgcgactcagccagattattctatcggtaattcgttccaatttcactgtatttaatttcggtataacagaaataaattaataagggtaaatatggaggccctaagtcgaagaatttatccaatgttccatttgaaacagattgtattgcggttgttcatactcttaatagtcgattgctcttctatcaattttagttttctatcaattttagtttttggtttgtttgttcagagagtgtcaattgattccttatttgtcatgttaaacgatttgctaacaaaaccgcatcgtcatttactgagagtaatatttcacgtgttcttcaatctattgtgttaacggatattgctgtttaataaattaattttagttcaaaaaaaaaaaaaaaaaataagggtaaataatggatcttatgttgcaaatttttgttgatcttgtatt

SEQ ID NO: 329759 - DNA, 622 bp, Cannabis indica
ataaatagttagatctgatgattattacaaaaaatattctccggaatagaggagatagaaatatcgccaaatctcaactaagcaaacgctcctttagccacattataggccgaaaaaatacaactaatgaatgatagaaaataactaatacaaaaggagcgataattctcaagagcccaatgaggatccttcccattaagcgcattgatcaccacactcaagtcgttctccacaataataaacttggcaccaaggtcgtaatagccgagcaacagaccgccacttctccacacaatgcatcagaaaaatccaactgatccgtatgaatccggattactctgcctaggttatccctaattatttttcaaagttaatcttggatcaagtaggaaggaaatgtttttccttttagatttgtttgggatattagtactagggaagttttcaaaaaaaaaattagataaagtattattttttgtgaaatttttatttttttatatttttttacaattttctacaaaaacaacacgaaaataatacaaaaactacataaaaataatatcaaaataatatctaaataatattaaaataacaataaaaataacatagagataataaaaaa

SEQ ID NO: 329760 - DNA, 534 bp, Cannabis indica
tatttttgaaaaaaaaagttttgtctttcctttttgtttattttttcatactaagataaaaatgtaaattttagatctaaaaagcctattaaggaaaatatccccactcgtataatacatcatttattaaatttaataattttaaattaaaatacacaaaaaatctatatctattcttatcattatcatatgattgattgaaagaataaattgtgatgagagcatacgaataatagttgttaaatgcttttttaaactatatatacataatacatgtatgtggcttcatcatattgtcaattaagaatgacagagagaaaatgaagagtaaaaataataaaattttggattgttgagagaaaaattacatgtgcagcgaaaacttgaaagtgtcatatcatatcatattagtgaaactactaaccgccataaaaactattaaaaatattcaaagttatttgttgatgttgtttatttaagaagaaagaaagaaaaaaaaaaagaagaagaaagaaattatatttatatatatat

SEQ ID NO: 329761 - DNA, 885 bp, Cannabis indica
tttaaaaaacaaatttttaaatttaataagtatagaaaatcaaatttcccttttataatcagttaggggtttcttatatcatttattaaattataatatatgagatttaatattaaaatgtactaataatagtatattaccttttgtaatgcatgacaccttaaagtgtccttaggcatttctcattaaatttagtacttaacaccttcaaataccactagcattttatttttatttttaagtattaaatttagcattttatttaattatttggaaaaatcaaaaaccatcataatattttcaatccacatgcaccactcaacaaaaaaaagttttaatcaccattgtccataattataaatagtaaaattttaatacatgcattgcatgttaggccccctactatctaatagtcgccatcatatttaagcaaattaccgtattttacttgtagtcgtcactaatttccctaataattttgttctatacataaaataaattaaacaatggttaactactcacttgtttttaacataagtaaaactgtgaaacctttaggtaaaattaacacagtgaataaattaattaaaaaaaataattatcaatatttttttcatatatatatatatatattttggtaataaattagttagagtatttatcatattactatatttcatattttttttaaatttctaaataaaagattaattagattttttttgtgattaatttagtaccatacgactacactatcactactacaaaaatacccctttacgtagacggtttttaagtccctttcctagcatcggttttgtatgaaattcgtctaccaacgctaatcaagacgacgctaaagggtttttaaaaaccgtaaacgcc

SEQ ID NO: 329762 - DNA, 545 bp, Cannabis indica
acattgaattattattattattattcataaatatagttgtggaggtaaacaaattagattgtatttattgtcttttttatataaatataattgtctttattgcttgaggcttgcttaataaaacaacaaaaaatcatctttgtactacattgacttttctagttagacatgataagattctttataaatatactagtggtaggctcctacaaatcttagtgaaaaatgggttaaaaattaattgagggaattttcaataaaagatatataatttttttaaaaatatatatataaatatatatataaatagttcacatatacatacaagtaattagatccaaacattatatataagcaaattcaagaaaacataaaaataactatatataaattaaacaaacaaattaataaaagcactttgcttacattatttataggattttagctacacttttcttcctcatatcctcaaccccatttctcatcttcttctaaaattaacacacacacatatatatatatatatacatatatataaaatatat

SEQ ID NO: 329763 - DNA, 832 bp, Cannabis indica
tattagtttgtaaagcaaaaacattcgcctgtctgtttgaatacctttattattgtaatgaaggaatttctttgacaattctcaaatacaatatccaacccatccatatgaatgtacaaagaaaactaaactttaagcaccactagtccctcttgctaccgctttagcatatgtttattacaattacaacaacctcgagtacatctattattatcattctttcatattttacttaagaaattattttaagactggttcactggatattacaaaatatcagaaaaggtgtggtatatttcctctaataaaaaagatctccaaaagttattctaattatgagaagttagatgtcatccagaaaggcgtttcttgaagtctatttttcattcggaagaagtctcgtagaatgatagatgctattcggatgggcgttctcggatgtctatcatgtccaccttaaaggagtcttcaagaaagttagttttcctccggaaaggagttccgaatggctaattgttcctcttagaagggagtttcggatagtcgactctagctgttgccttttttatttgggaagtccttcagcatacgcttcggtccttagtctcggaagcgtatgtctcatccgaaagtactttgacttgtactgacgtggagatattgttgtgaggagtttgttaagtcgtaactaacttaacaacttaacacttgtagccaccaactttagtatctatatcctgaacctatatataccagccacacttgtcatttcgaacatgatggatagatcaagtttcaagaggagatttcgagcttgagagagagagagaga

SEQ ID NO: 329764 - DNA, 545 bp, Cannabis indica
attactttaaggagtaccataactacctcggggttccccattccgactaaaccccatctcgtataagatccttgcaagcttgaaggtcgtataacatattttaggatgggaatgccctactcccttggagatagcctgcttttactcagtcaaagcagtccctacgaggaagaatgctgcaggaggcttctactatcttgggacttatactggtgatcgcaagatcatagttaggttgtaaaacaagacagagtttaaagaagacttcttctggatgacgagcctctctccaataaatacaacttccttttgcattatacgtaagttccctttcttggaaatttaaccttaaaatgtattaatttttatctttaaggtcgcttattaaacttttgtctgtttgcagcggttcctcagagaccacttcctactcatgagatagttgagcaccacggaatcctgctaagtcttccatttgggctgcgagcagcagatttcttattaaatgagaagaatctgaagaatgttggccttcttgcctcaga

SEQ ID NO: 329765 - DNA, 555 bp, Cannabis indica
acagtctgttaagttaatcgtgtaaggctaaataaaaaaagaatcgttaaaccaagaatcgttaaatcaagaattgccgttaaatagacacttttaatatataaagatattgagtactcaaataatatataaaacatgcacacggatatttgtcttaatcacctaacaaaaactttggaaatgagttgttttgtgccataaaatcttctaagtaatacttaatatgatcaccacgtaggattggcaagtacttgtacgtgttatgttgtgtttggagatttttaaattttaattttttataataataataataaaaagtttgaatattttggattattgttgtgaccatatattacataaatttacaacaataataattttagtgaagagaggggtatagtacgtggtagctgccatttcttgtcactgtctttctttattcataacttatttataaagcttaaaattgtactctaaaatatatatatgaattattgacatataacaaaatgtcaattaattctatacgtatatacacaataataataataataa

SEQ ID NO: 329766 - DNA, 716 bp, Cannabis indica
aaatgtatctatgaatcaaggatatgagctgaggatgaaaacctaaatggtgcatgatttgactgatgaagtcccattcaaatttttcaaaggatttctccatatccaatttaagagcagcccagcccaccttaccaaattttttaatagtgatagcatggatgacctaattagctataataatgttatcaaaaataatacaattatgaaggaaggctccttggttatgagagatgaggtcattcaaaacatttttaagtctgctagccacagttttagagacaactttgtaaatggtggaacagagactgatgagcctgaagtccttaactctagaggggtccttgatcttagcgataagaacaaggacagtctcattaatgggagcgatattagcatcgaagttaatgttgggttttatgccctaaataaaactcaatttcaatgtaatccgtattattcaatatcaataaagaaacagaagtatttttcattcatttgtgtatgttttggttcacattgtcaattacttgtctatttgatttataaattcatccaaacccttttcacatttatgttcttgtttattgtgttgtcagcacagtggaaagtaatcaaagctatgtgattaaagattcctagatttatcagaacactggtttactgatatcacaatctataacagagtttacttgcatcttggataaatgctatgt

SEQ ID NO: 329767 - DNA, 900 bp, Cannabis indica
ttataagagataatcatctcatattatgagataagaaaagtgaactatgagagttacacttatgagaattgtcttgtcatagcaagaacaaatagatcaaaagtggatccaaacttgtgaaatgagccataaattggaagagcaattttggactcaaagtaaatgaatcaatgtggattcaaaaattgtgaaaagataacaaaattggagaagcaattttgaatcttaaataatcaaagtggtgaacaaaattgatgagaattttgttaactttggtataattttgggctaatctcaatgaggagataaccttaaaattatgagtaaaaataattacattattttgttaaattgcatcaagatctagagcacaaaatgttaagaggtattttgattattttttaaaattcattttacaaaataattatcaaatgatgttactttaaacatattgcatgtagatataattagtagtaattagagtagttagagtctcttagctagaaatataaatttgagagtaagtagattttgttaggttgagttaattaaatttggcccaatttttttctttctaaaatagtattgaagtgagctcagttttctaaaatactatttctactgagtttatgtcttgtttaattgtcttcttaatgaagatttatttctattaaaaaaaaaatagggtaattagccacaaattttttttatattttaatttttatacagttaatcttcttatatatatatatatatatattttttttttaactaaaacccctttaaatttacttttctttgtcaaggtgccaaataaatatcattattaaatatcaacttgatgaccaatgtgtatacctatgtatatgtgacagtcaaagtcaatacagtagtaatcca

SEQ ID NO: 329768 - DNA, 867 bp, Cannabis indica
ttaataatatgttttgatgtactccttcctttgatgtaagtgtctggaaagctttgaagttgtcacataatatttagaaaattatggataggacccaccaaccacaaggggtagttttgtttggtctatggattttaggcatgcaaagttcataattgttaaattgtctttgtaatgaatgaatatcaatacaggagtgagataccaaaagaaattgaacgtttttcttttcatttcctaaaattggagggaattagtggtcgtcttgtgtgtgtgttgtggttcactttttattgggcttctttacattttagtggctactctatcctaaaagaccaattctatgtcaaaatatttggttttattggaatttgatgatccctaggtgaagaacaaaacaagaaaggatatagtcaagtttggagtagaggttatgagaccattgaagtaaagggatcaatttcattgaaaaagaagaaaaaatcaaaataactctttttatgtcagcataaatgcataacgagtatcatttattgcaattttttcatataatctaatttattaatagtaattagaggtgggcatcatccaatccaatccaattaaatcgaaccgatccaattcaatccaattacaaaaagttggatattcaattataattggattggattgaatgctaaaagttggattctaattggattagatcagttattggatgtcaatctcaaaatctaattaaaaactgatccaatccaattatatttatatatattaaaaattatttatataataaaaaatattgaaaaatataataaatatattagattttttttttttgtatgttgaatttttaatacttgattgttt

SEQ ID NO: 329769 - DNA, 697 bp, Cannabis indica
aataattttcaaaatatatttattttattttattaatcattttcctctaatttcgaaatgcactttacttttaaatctagaaactttttatagaagactcgtcaaatgatagcggcttgagggtaggaatcattttgattctttcgaaatgcttagatttcactatccattgagatttcaatttctaacttctaacaacgaggtcgagaatgaagtgttactggcaggactaagaattgttgaagtcttaaaacctaaagcaatccattgtttcaacaactctcgactaatattaagtaacacactagatcaaaatggctaagtatttggagcaattatgaaacaacttggaaagttttgattattacaaaattgaacaagttccaagagaacaaaactccaatggcattgcattagtaaagcaagtgtcactgtttgtagaatgataacctcaacttcgttttcattgaaaaactcgaatagccaagtatttgcgagattgatgaccagaatatagaaatgattgatacaaatccaacttggatgacaacaatagtcaactatctattaattagacaactcccttctgataaaaatgaggccaaaaaaatcatgtgcagttttcaagtacgaaattatagatggtaatctttatcaaagaggctattccatgctaactactacaatgtatattacc

SEQ ID NO: 329770 - DNA, 679 bp, Cannabis indica
cttaaaactttacacaatatattatttaattattttttttttcaaattactattatattttatttttatcaatctaaatcaaatattatttattataagtttatatattatatttattaaataaatataacttaaaataaaatcaaacatgcattacttgccacataacaatatatacataaatgaagtatttagtccctcacttctttatgaggtgtgtcatgcattaacacatttataaccattagattgattcttaaagtcaaactcctatatcttatggctaaaatgaattaaagggtagagtttgttgaaaaattggcaaacgactcaattgatactattgtataatattttaatattaaatcaattgaagtatcttatgctattctcttttgaattgtaccatttcataatatttaaatctccaaaatatctatttttttctaaaaaaaaaaactccaaaatatatatattttttaaaaaaatcactccataattatttctcaatttgacataatatgaaaaatgtgtagtgcattcactaaaaggatatttcaataaaatctgtatctgtttcgacatttaaaatagttttttaatctaaaattcgtgtacgttgtacggtcttaattatttaggacaattcgtaaatttttaaaaaaatttaaataattta

SEQ ID NO: 329771 - DNA, 1548 bp, Cannabis indica
cttcagcattaaaacgcttaaatgaatcctgtaaggactcaccaatttctcgcttggtgttagccagggttgtgtaaggtagtttatacgtcatcatggcttggaagtgcgttaagaataaatccacaaaagtctcccaaattgatatggatgcctcaggcaactggctgaaccaatcatgagcattattctccaaggttaccgctaggaagcgacattttgctaattgaggtacttagtctacttctataattgaattaaatttttctaagtaatctatgggattagtagtacctttatattttagtttcagacaacctgaatcccttgggaatttgatcctgtcacacttcttcagtgaaaggagaagtcccatggagcttctaaatgggctttctctgatgctcaattattttcaatgctcgtagcaggatgctctgatcaacaaccccctggcacgacagtgttgttttgagttgtcgtaggtgcagttgcaatcgcagttatgttagctgggattaccacctcggtagttagagctggtgcgttaggtgggttgacaacatttgctgggttattaccattgtttgtgccttgatcgcccattggggatcacgaggttcatcgcaatttcggggcatttgagaccgtgccctgaaaactacgttgaggtgatcacaaagatcacccctgtgaacttggtatctttctccttgcggtgtctccacagagccagacctggtatagacactaggagaacaactttgtgaggatgaagaataagattcaacatcatttacctcattaagcggttgggctctacttcgagggttgcgtcgctagggatcctcctcttgctgcacctcgtggttagtgttttgtgcgacttgttccctttgtgtaggctggttcaagtcgagtccctccggtccagtcctgtgttctctacgagagcgattattacttcgttgcctagtgtttgtgacctaggggttatctgaacgcatgtttggtgctcgaggaggacgccaggtcctgacccttccattgacctcagcctgcatttgttcttgcagagtcgtatactaggtcgtggtcagttgaatgattccctcagacaccacaacaggtgtgataggtgggaattgtcccatagtggttgccggtgtcgatgtttctccaacatgatcggtggtttcaagaaataagttgaggggagtaacggtggtacgtcccactcctctgttgatggtatcgacaagtgctgttccattacttgggagtggatcattcattgttccgcgttgaaagatccagtgttgttatctccattcgtctggtttccaagcattatgattttcctccgaaatcaacaaaaaaattcatgcgccaaatgattttccaggccttataaaactagttaattagattagcagctgggttcccaaactttttgtattttcgatttgtgttagttttagagctttgatttgttaattccctattagtttagggtattgccatgttaactttcagtaggaaaacttt

SEQ ID NO: 329772 - DNA, 697 bp, Cannabis indica
tgataatgtcttgggtaagcagaacgggttaactagctggctgctagagcatattatccatgctgcatgtgtatgtgcatcttgcatcccatgtctctgtaaatttaagtaggttgttagagctggaaaatattatcccttcaatttgtcaggtttttcagtcataagtcaatggtagttgacgtattagaaatatattagttttgtttgaggctaaattctctgcttgtactaaattttgcatatatttgttttcataggttattaacacctcccgacactcctctttttccttcactggatgatgagccacagcaacaaacttctacaagaaggggaagacctcgaagtcaacctatttcaatatctagatcatcgacagtaagtggttatatccttttctgtgattataattttgttggttatgttctgtgaagatttagagtagatttctctttacctcttcttaaagcatatcagcatcttttgcagatggagaaaagttataggagcgagtaggggtagtgcaagtccaaatcgttgagtccatctcctcgttctggaagtagtacattcaatcagggaagccatcatcagcacaccaatccagtccatcatcagtcgtcaatctagtccatcatcagtcgtcaatctagtccgtcatcagcccgtcatctagtccgtcatcagctcgtca

SEQ ID NO: 329773 - DNA, 1001 bp, Cannabis indica
tttagggtttaggggtttaggatgaagggtttacaatttagtgtttagggtttagggtttagggcttcgggtttcgggtttagtgttttgggtttagggttttgggcttagtgtttagggtttagggtttaacatttagcatttagggtttagggtttatggattaggatttaaggtttagggttaagggttcaaggtttagggattagggtttagggtttacgctatagggtatagggtttagggtccttatcgttgtttcgatttgggtctctagtcccagtccatctctgggtttcggacccgagaacggggtcgggtcttggatcccgatcacagttttaggtcccaattccggttctaagatcgaatctgggtcaccattgtagattttggtcctaggtttgggtctaggtccccaatgtgtgtttggatcgttcagtctcgggtccgtgtctcagttcgggttcatgttcgagtcgggatctaagttttattccaagtccaggtcttagtccgagtctttgtctgatttcagttctaggtccagatcttgggtcacggatctatgtctagggtcgggtcccgggtctcggtgccgtttctgtggcctaggtcccgtttccgtgacctaggtccttggtctgggtcccccatctacgtgcgggtcctatgtcccggtccaggtccaggttcaggtttgggttagaatctcatgtcctaatttgagtcttgatcccagtccgagtcaaagtctcagtcgggtctcaagtccatgtacatgtccgggtctaggttctaatctcggtcttggtctaggtctgggttttgtttcctaggtccaggtctgggtcctagtcaagagttccaatccgggtctgggttccgaggcaaggtgttatagtgagatttctctcacctagaaactcgagaccagacccccactaaaaggacacacgtatactcagatttttcacagaaagctgagatgtccctgaggg

SEQ ID NO: 329774 - DNA, 1089 bp, Cannabis indica
aaaaaaaaatggaccttaaaaaaatgggggccttgtgcaatggtccaagctgcccaatgcttaggccggccctgagtataacaatacataatatttttgaaaaaaattccgtactataataaaaaaaaagttagaaatttctgtggtgtaaaaactcctagtttctaggatttaccatgctggaaaatgtccccaaataaatacattagtttggtaaatattttagttttcattttctttttttttttctttttaaataaattgccaaatataataaattagatggtaaaaaatataagcatgaatgaaaaaaaaaaatagtactttgttgaataaattctacaccggataatatttttgaaactagcacaatgttttttttcttttcttttcttaagtaactagctaagtgttattcttgtattttagaaaggactataaattgaccaactctttcacattctattattattattattattattattgttattattattattattattattactcctaagtacaaacaagtgacaacaaagccaatagacttgtacagtgtacaccaaagtcatcatggttatcaacacaaattatactaaccgaaacaatcaaaagaaaataaaacaattcacattcactgttgtgttatttttgtaatgactcaatatgggcttacaaattaagatttttttttagaagatatacaatataacctctattaatatcctatgaataacttctaatttgttataaaaaaatcaattcccgatttaggccaattataaataagaataatctctaaattgtaattagttatatattttttaagtcccgtattaacaaagtatacctctatataagaataattacatcttaataaaatatatacaagtattttgtaaatttatttatgtaaaattaataattttattttaaattataatacatgtatgaaattatatttactctaaaataattatgatattgtattaatgattatttattgttattattgttacattgatattttttagtttttatttttttttttctagtgtaactctatttagttataacctcccaatt

SEQ ID NO: 329775 - DNA, 843 bp, Cannabis indica
tgtttaaaagtaaaagaatatttttattaggcaccagtattaagcaccatttaaatatgatgtcttgtaaatggtcagcgatattccataatagttattaaattaaataatataaaatacgatacttaattatatcaataacaatataacacctctaagtataagtaatactagatactactaatatttctatatattctcaaaatgtatatattcctaagataaaaatgataccctttctatagttactctcatcaaatattaaagggaagaagaaaagaaaaaaaaagataaattggtggttatagtggaagttgatgttgggtagaaaatagtactaattgaaaccaaagattcttcaatttccaatgaaactttaacacattcaaatcaaatcttcacaagacaagattatgttttttcaaatttaacattgattatttatttactcaccaatggaagaccctagaaaacaaaataattctcctacttacaggagtgtggctttgactataattctcttacaagttttaactttctgtgtaacatttattaaagttaagggtaaaaatgtaatcttcaaagaaaaaaaaaataaatgttttgatattttctaaagcttgattttagaagttgttatgcattcataattataaattaactaatgctagtttcttcacttttatacttactaatagggctgaatatcgggcgggtttaccgagtttcgggttggcgggtttcgggttcaaaaaattgaaaccgaacccggacccgaataaggcatgggttggcgggttggcgggttagcgggtcacgggttggcgggtttcggttggtcgg

SEQ ID NO: 329776 - DNA, 621 bp, Cannabis indica
gggagagaacaacttcaggcggccatgaacaagggggaaatggtagattgtgaaagttcaaaagagaatttttttagtgtagagatgtggaaagttttagggaattggcgagtcaagggtattgtttcggaagtagttgaaaaagtttttgggatgacataatttgtgagttcttaatatatttaggatgaaatgagacgtaaatagtataggaaaaatgttaagtacatctggggtattttggaagagtttttatttattttaatatttaaaaaacaatttaattttttttttttgattgtgtacatggtagttatttaagttaaatttttataaaattttgaatagctgaaaataaaattcaaataattattcactgcaatcatactaataaatatatacacatatatatttcaattttatttatgttatcataaactatttgaattattttaagaatattttactaaccttaaataactaccacataaaggataaaaaaaattgaattaaaaagttttcctaaatgttaaaataaaaggatattggcggctaaactacctgaattttacggtttgtaacacttaaccacaaaaatcgaatttttggcggttaaactac

SEQ ID NO: 329777 - DNA, 917 bp, Cannabis indica
agagagagagagaaacaagattgtgggttggttgggttcatttaggatgaagtatgaatgaaatgaaagaagcgcgtgagggttttattttggttgagtatacctggcggtttaaaactatcaactatactatagaatacgattttaaatcataggctatattatagccgataattttaaattgtcgagtatagcccacttataaaatcacgcaatttttaaggcatgcttaaaaactgccgcctatacctcctaagtgttaaaagccgtcaagaatattcaatatttcccgatagttttcaacactcaacttttagcaatggtcccccaaaaaaagcatttttaagaccgttgggaattttgagttttgtaatagtattttaacgatctaaaatgttcaggagacatgatttggtatatatatattaaaatttagggagcaaattaaagctgcaaaactcttaattaaaaccacttgaggctaactcaagtggccataggtgggtgtttgtgtggaggtcctgggtttgagttccaaataaagcatggttgtaatatataaacgcttaaataaaaaaaaaactcttaattagtctaaaaaaaaaatatgtatcaaaactataactagaaagtaaattttattgtgtgttaaatttaacacaatgttttattttattagagcattttttatagagtgttaaacgtatggtatatatgcatgttttagcccatcatcataaaagtgaactacaatagtagtgtataaagtggtctaaatttaacatatgttaaaagttatgttaaatttgacacaaattatagcgttagtcaaattttacattataataaatatcactttttatctactattttgctgttagttaataaaggtatcgtttggtaatagttttattttt

SEQ ID NO: 329778 - DNA, 931 bp, Cannabis indica
atcactcttaattagtactatgcatgtactgctgactaagtactatgattgtaccactatgatagtgtcactttatactttctagaattgaatataagtcataaccagtactatgctcgtactgctgacccaatactatggacatatcactatgataccaattcatactttctagaattgccaaacatatattcaaacgatatttagatgcaatctcatgtacacaaactatcgctctaattgatatatcatataattggaaaatataaacatgtacatatgtgtgttgtatactagttttagctcattttcaaattcaagtgggccggtcaacctgaatagaaataccgtctgatgatcggaggccttatgtcacatttatgaaagactggtaagtgtttactctagaacactccctgattcctgaaaagactttagggtcttctaccaattacatggtgaaaaacaccctaaaataaaacttatactttgtctctaatatatctatatatatatcatactgtagagctcatcataaagcttaaaaaatagtatatagaaacgtccaaaatggacaccctagtaaaaatttatggccaaaatacaaaaattgatactttttaaatattgtccaaacagaattctagttggtacgaccatgtaccttctgaaaattccggtttcatgggagcaagaaacacgagatttccaatattcaaaccaccacaacttggtccaataaatcccaaatgctaccaaactttccagaacattaatataccaaataattatggtcttaccgctacgatgctaattcatactttctggaatttccaaacatatatttttactatatctagacgcaatcttatgtacaccaactatagctataattgatacatcatatgtaacaccctaactatcttaggcg

SEQ ID NO: 329779 - DNA, 395 bp, Cannabis indica
aggataataggataatgaaggggagaaagaactacaatatataccatacattttagcaataataaaataatgaagagagaactaaaaaatgtgtgcacgacttttctctctcttccacagtgaagaagcaaattgttcgaaagccagttaatatcagaactcccttcaatccatggtagtgactgtgatgaagatcgatttgctaaagaacttgatcttatagctgaagcgataaattaggggatatcgtctacaaggaacatgaaacaacacttgattatgatgggaagaaaattccaaaacttgatgtggagtaggggtgaacaacggtcgatttggtcggttttttatacaaaaaaaaatccgaaatttgattttcgattttcatggttata

SEQ ID NO: 329780 - DNA, 1760 bp, Cannabis indica
agagaaaattaattatcaaattaataagaatagtttagcatatgtagtttagaatattaattttttaataatcacaacttctgttaaaatattttagtattgtacatatatacttatgtaaatgtagtggatatttatatacggaatacttctcaatgggtattacctattgttatacccgaaattcaactgacactttagaggatggcatgtgtcaaccttgaagaatacgaatcaacgaatataatggaaattatattaaaggatattaaaacagaataactcatcaaatgcggagttgatatagtatatctataactcactgactgtaaagtcttaagcgagacaaggatgtacgaactattgattcatgcattgacgaaaaactatttcgcgtcaaaagatacaatcataatgatgacatcaataatgcatagcaaggcaccaacctgtataaaaaggtgctgacaagacatgttgactgttagaacacttagcgtataatatacattgtactaactaagtatcacagctggaaaaacctaagtgacagatagcgaggcatccatctcgctataggaaggcatactcatggtatcttcactaatcaactccagacatctttcaatgagatccactgctccgtcgagtcagctctcccagatagaagctgacattcaaatgatgttgactactgaagttcaccttgtcatcaagaattgcgattgacagatggagcgttatgtctttaatcacagaaacaacgagatttacaagatcaatctcgaaaagacatggaaaaagctccaactcacagctaggattattgttgttattcaagttcccagcgagatgccccaacgagatacactttgcagcatatctaaatccacgtcagcattgacccagtaaaagcgaataaatcacagttgtatgattttcaaataataaccgcattaatttacgtggtgcgtaattaaggcccacgatttcagggaaatatgattgtaggatttgaatctgattgtaattaactaccaccctatggtactatatataggtgcacaatgtactgaaaaagggacgaaaagtccttgagagaaaagaaccctagtctctatcagaataatctgaataagattgactcgtggactatgcagaattttaactacaaaaccacgtaaaaagctttgtgttattttttcttcttttactttatattatttctgtgcaaaacttatcacgaaataagcttattattgttaacgaaaatctgcgtcaacagtttggtgctttcattgagagcctacgtgaaaaaagctcagaaaaaccctcctaaccaaaaggaaaatctttctccatcgctgataagggagaaaatgttgatactcatcctgaagagactactcaccgtcctggaaaagagccgatgggctcacggaggcctcctaattcatgatcgacactgtccacgcgttcaagaaggacccaacatgaaggtggccaaaacccagaatctacacggtccacacgttcaagaaggaccaaacgtgaaggcagccagaacccaaaaattgggaatgatgtaccaaacacaagcattggttgtgctcaacccatggatgacggtgcctatgatcccacgagatacgtacctattgtcgagttggaaaattgtcatctcaggtgctgcctggaggaggcaaatcgacaaaacactaagttggaatgggaggcagccgcagccagggcagcacagg

SEQ ID NO: 329781 - DNA, 1137 bp, Cannabis indica
ggatacaagggttagagatctgagtggaaggagacattattccgctgcaaccaatgtaaggttttcttaactttttatgtgtttatttatcgttttagaaagttcatatttagggtgttaaacaatatacttgtgagtagatctaagatcctggtaaaataaattccaacacatgtgtgtccatcttatatcgcgaataatcactattacaaaattcagaattcacgatagtcctaaaaatatttttttggggaaccgtcactaaaaaaattaagtaactatttgaaaccgttaggaaaaattagtattcccgatagtttataatagtaattacaggaataggtgacagttttaattggaattcgtaaatttattgggcacttatactcgacagtttcaaaccgtccggtataagggcccattaaaaaattgtttctcccacatatataccatatttcagttgacctagcatactcattttagattgcctctatcatctctaacttccaatgttgacaaaaactagataaaatcgttaagccttacctattgaaaaaccttgacgaacccacaccgattaacaaacccacatcgacaaacccatattgaagggtttttttcagttaacctctctctcgtcccaagctccacctagcctctacacccacgaaacccacacgaccagagttcctccctccataaccaccaccgccacacccactcaacgatcggagttcatcgaccgggctccgtctcaaggtcgatatttatatattatttattatatattcatttattaattaatttatatatttatatattttctttaagctttttctaaaactttctgattatattttctttacatttgtgcacatccattaagcatgaattttataattttttgtaactagatttaaaatttgttgaaacttaattgagcttgaatattttctattgtaaccaagaggtataggaggaatttttttgattttctttaatcttatgtggttttttattgcgaacttaggctttgtttggattttaaattgttgtaggaatagttgttggctgattcacatacctaaaaaataagctaataaagggaagaaaattcttaggcctttcagcatcatt

SEQ ID NO: 329782 - DNA, 1247 bp, Cannabis indica
taaaataaatttccaacatcaccctgttcaggtaattagaagctatacatgctgatgtataatatgaagtctgctcgggacatttatctccgcccaaatgcgagaaatgcaggacacgtgtcacttgtgtattctaccacatcattgtgcaaaaaatggggtaacatttgcccccaagtctgcacgggaccttcgtggtcgcacgtggacttcacttggtatggatccttatccgaacgggtggcacatgttcgaagtgtcagttgatgacccgatgtgactctgaccaagggtctctttagtttttggctcattactgctgactgacatgtaacaggttattgagtgcacaacgtacacttttagggggaactcgaggtatttaaaatttgaaatgattactttgtgtcactaatctacttataaatagggttgaaaaccttaaccaaccacttttagccactttcgcttttgaagaatcagagtaagaaacctttttctttcaatttcttcgaaggatcttctggaaacatcgtccaacgctatccgagcaaatctaaagcttcgaacattgagtaagctcttcaattctttcctcttatatgtttgaatgtttaattttttgggtttttgctgcgaaacttgatagttcttgaacttgttctaggagaaccatagaaaatttaggtttaggaatgtgaactcttgactatgtttaatcacattgcttgatcataactgtgttttaattttgattccatgaaactccctttcacttacccattcggggcttagtgaaaatcaacccttacttcaaaattttgaaaaattctggattgcaaacctcataatcatgcaaattttctatttttgatcccttgatcagacttggtcggtataacaaccttttttcgttcgttatcctggccaaatgctcatcttgtgtcctaccttttgtagatgaaccctggtggatattggggaagcaaacaccgtatcgaccaggatctgcttcaacttctatacgaggatcatcctcgcctccgtgctagtctgtcttcatctagtgacagtctctccaattcaagcttcgaagattgggagataaatagcaaacacacaccttccctagaacctaaagtgcagcaccatttttaccctggccagattgaaagtcaaggctacggacgcttcatctgggagcttaggaaggggtggaggcgctatctgttggattttatgcccta

SEQ ID NO: 329783 - DNA, 621 bp, Cannabis indica
tatctatctctatatatatatatcatatatgtatgtgaatgtggccatattgtatgtatatattgaattttggctttgtttttttttttagtcttattctgactctggtggagcactaatataaggctgtttgtcattttcctcttcttcttttttcttttctcactatgctcaagtctcaagacataagttcttatgaccaactttttagttttattaccttattattcagaatttgtggaagaaattataatgtgtcttgttgtagtgaatggtggggcatatatatttttatacggtctaacaccaaaggtggtgttttactgatatttttataaagttactctcttaaattataagatttgatatttaattgtactaataataatataatattaaggaaggtactaaatactattaatatcaaaatattgttattaaatattaatagtacctaacattttttatatgcgatatcttataattaattaacgatattttttaaaaattactaaaatacatgagatatactatctaattaagaatataaaaccgaaaaaatactaaacactaacgtggcgtttggttggaggtaatgaaatggaatggaatggaaaggaa

SEQ ID NO: 329784 - DNA, 804 bp, Cannabis indica
taaaataatttccaacagatttttctacaatggaaacccaaataattagagattcaaatattaaagagagaaaagatgaagcacttagtcactgttcgaatctttaaggttgttcggatgacgttgatcgacactttttggaaattctccgaaggatttgagaggaaaatgtgttttttctctgaaatcactaaataagaaaatgttaaaaatggtttattaggactttttgccctatttataagcaagttagtgaagggttatcattattttgaaatttaaatgcttcaatttccccccaaaagtaaacgttgagaaatcaattaatcaagtatctaaagaagaccaactgtctaagcatgcgatcattggggtatttcgaggtacgaattaatcagcatttatgagtcaaatattgaagagacctttggtcagaatcacattggatcaccaataggaacattgaacacgtgccacccgttctgacacaaatttatactaagtgaagtctacgcgcgacttcgaaagtcccgagcagacttgggggcaaatgttatcccattttagcaccatgatgtggcagcatgaactagtgacacgtgtttgttattctttacagttagctggagaaatgttccaacagacttcaagtaatgcatctgcacggacatagtctgcctgaccgagcagagcaagtggcagatgatccaaacaacaaaatgaaaaatatttctcaaaccgagcatcaagaaattggtaactttaggaatgatatcgtgaagcccaagcacaaaacgcaatccc

SEQ ID NO: 329785 - DNA, 768 bp, Cannabis indica
ctaataattgacaaacctcatagtaataaaatataccattttaattaattaattaattaaacaatgaaaaacgcataagtaaaaagtagaacttttcgaaagtatagtcttgtgaacagaacaatgcaacattgaaatagtacagtcatatctgaatttgaaacagaaaacagagctaaaaagattaatggctgagataccaaagctacaaactgtaccaaaatgaccgtaccatgttcatagacaaaaccatcaaaactagagcaaccaggtcctccatttaaccacaaacgactgcatcacttgttgggtttctctcagaagaaacaaagtaatagaaaatgtttttaccacttggattcccatctatgtttatgtatctgcaaaacccacataccaaaacttatctatttacatatattgttgtaaaaatgcaatcttttgttgatatatatacatatacatatgtaaagaaacttaccctgagtaatgttttgatggaaaagtaccagcaaagccaggaagttttgtgacaagagagcctgaaggagcagcttcagaagataaaagaatgtaataaacatagaatatgatgagaaagaagaatttggtataataatgttctgccatgggaataggaagactgttatagtacaacaagttaagaggtttgaacagtgtatatatagctatatttggctatttagctcaaggcttattgtgctgtgtaaatatgcatatatttgtttttgagagagagagagagag

SEQ ID NO: 329786 - DNA, 730 bp, Cannabis indica
ggtaataaataaaagatttggacatccacataattattaatatttataatataaagttctattttcctcaaaatctaacatactatttctattgtacattgtacatttttattattatatttttacacacttcatacctttgttttagataatgatcaattagtactctctatttataacaactaccactttaatacccttaatacatataaaattttaatatttccaaactatctcattttaataataattattattatttaacaataaaaacaataattacaaaaataatttctttttatcattttaagagatcaacatggccccaaactcccaattctttatttctattatatatgttgacgttaattataatgtctctctccttattttcttcttctatatataacttaatatttataattaggggtagacccacattaaaacgagataagacagtcgtctctcttgacaaaaaatcgagaaaaaaatatatacatactttagttagttaaaatatatatttcgaatcaaaagtaataatgttaaagagggatatagtggctaaaccacctaaattttacgttttgtaacacttaaccataaaaactaaaattttggtggcaaaacctactgaactcccattccgttttgctctgcacccctccgtaaaaaaatcacagttaagtgtcttggtggactgtccacgtgtacacacttgtacacgtgg

SEQ ID NO: 329787 - DNA, 889 bp, Cannabis indica
agactttgtatagctagttggatttttcatttctcctagactacgcatgttacacccaaaaaaaaattcaaaatgaaaagagtttaggataattaagtgcagtttaagataattaagtgcatataattaaaaaaactattttttacttttaaaaatagaaaattattttttaaaaacaattaaacatgattaaccttgtattttgaaaataaattttaaaaaacaaagttacaaaaataagaattttaagactagcaaaatgttgttttgtgttttaaaaaataattcacttttagtcaatattttttctccactttatctcatatcattatacttctcattttctctctccttttctctcatcgctttctcgctcatcattttttcacattattttctctcttatcgctttttctcttattattttctcacactttctctctctaattttctctctcatcactttctctctattttctctctcctcattttcggtctaggctgggtctagggattgcgagttcgggtcgggaccaggtctaggattggggtccgaatctagggccatgtttgagattcaggttcggggctgaggccgggctagggttcgaggctgggctgggttggggcctggggctaggttggatcgaggttcgaggttgagccggggctggggtccgggtctgggtctggatttgggtcgggtccaagtctagggccgaagtccagttctgaggtcgggtccagttttgggcctggggttcaagtttgggctgggattaaggtgcgggcccgggtccaggttcgtggacaggtcttgttcatatcagggactcaaagtattgaagtatttttaaaaaaaataaaataaattaaaaataaaaataaa

SEQ ID NO: 329788 - DNA, 757 bp, Cannabis indica
tctattgatttccatcattaactgtattaattaatattattatattgaataataaaatagttaaaaataaaaaaataagaaaaattgagaaaatagaaaaaaaaaagaatgctcatataatctgccacctcacatgccctaacaacaacattatatagatatatagatatatataatatgagaagatcatgaagatgtataaacacccacttaattttgagtgtagattaatagggagtacttttgtcctaaagcttatttctctatatttataagcactaagagatctattgataatagctttgagaataataaagtcttaaattttatttagcaaagtgcttttgttgatagaaaactagttgtctaaataaacacattagtaggcacgaatttatagtcaaggatcacatactttgaaattcatatacaccttatacctcatagttgttactgtaaatgaacttaaatgggtaatttagatgttataaagcatcctgaacgttcaaaaatgcacacacataaagttaaaaaaaaaaaaaaaaactaggttactagttacccatttttttttttttagttctaattatctttcaaaatatttcaaatcacttccgttgaattttatatcacttatacaaactataaattataagaataagtctccaacaaatgtttaactgtaagttttgaatttcaaaaaattaaagttgtgtaacttctctttacaaattaagtgatatttatatatatatat

SEQ ID NO: 329789 - DNA, 1326 bp, Cannabis indica
tttattaaaattataatatatattaatttattatttttttattttattttttttgtgttgaatttgtaacatatggctagattttgaattccaattagattggatcggttattagatattaatactcaaaaattcaaataaaaatcgaattcaatctaattacatttatatatagttaaaaaattatttatatttatttctaataacaaaaaatattaaaattataatatatattaattgtatttttattgtattttttttttttgtgtgttaaatttgtaacatatggttgtttggaatatttattctgatgatattttgttttattttattacttagtattaataatgttgttattttaattatttgaaatttttagttatattacacttcatggtatgtttatagaatattaaatttaaatgaggtgatatttagatatcatttagtaacaattttgtttttaatttttttaatcacaaaatgaattgaattagacaccctaatatactaatttttttttttgatttttttttttgataattccctaatatattaatttgcttggcgcaaaattagttgcttttttttattatggacgtgggacgcatttatttatgttgtttaatgttggccacactttttcaaacaatcgaattttcacagtccaatttaataatggctcagtctatgtcaaagtttaattttcacgagcggatgttccaaatataaaactttacaattacaaggactataatatcttacatcaaggaaacatagttgtttttcatggcatcttcaacctgtaatattatggttaaatagtggtataatattctaaattttaagtttataaatgccacaaatttaatgtttatttttagcaatataagtatttaatatttgtaaaaatgtaatttgtctctaatttgtcggtacagactttattattgtcttaaacagaatacatataagacttaaattttagattattgggtctaaacacaaaaacatatagtatcaagtacttccaaatgttattttaataaattcaaaagggaatctgtactcacgaaattttaggaaaattacagtttcacaaatattaggtacttataccattaaaaataaatatttaatttatgacgcttacaaacttaaaattttaggtacttatgtccctatttaccttaatattatctatagtgtgagttttatcacttttattgaacttatttttatggaaatttatagtgttctactaataatagtaagcacagtaaattacgataaaatattttttttcttaatttttaatttttaatt

SEQ ID NO: 329790 - DNA, 610 bp, Cannabis indica
cttagaaagatttaatttttttttattatttttattatgcataatatatgtttaaattatgcttcactttttttcttctttctcacactctaaaaaattacatatatattatatgaaataaaatatattttaaatgttaggaccaaaattaaaataaaaagatatataaaaattttattggactaaaaataaacatatgaaaacaagataaaaaaaattattgaaatgaacatggtaaagaaatttttattaaaaaaatattaaggataatttacaaattattatataatttttttaatattagtgtttatactttaaggtgagagttagcattgtaatacttaattcgaactgtaatctcaattcttactaactcacttattttgatttcgattaattttatatacatttttttttacaaaaaaaaaaaataataataataaaataaaaaaaaaataaaaatagagctctcagccaccaaattaaatggctaaaattcctaggaaagcatatagaagcaaatggtcaaattaaattggtgattttatttatttatttattttatttttgaggttgctgaattgttgttattttttatttatattaattt

SEQ ID NO: 329791 - DNA, 901 bp, Cannabis indica
cttcagttggaggattgttcttctgaaacatgttctattgttattaacgatttgattagttaataaaaataatattttttaaaaaaagatttatttaaatattttatttttaataaattaaacaatattaaagttgtgataactatcaagactattttataataaactattacgattaattatttattacgaagatataacacataaacattgaaagtatattatgaaaaataaaaaattagacaccacacaatacaacatgtattttgggaaaacttaaaatatgggatttttaaagtttatatacaaaataaaataaaaaaatccataatcccatggtattatttatttatgccataaaaaggtaaactcttaaaaccggttatatttcatacataaccagtttaagttattttgtgttatttgtttttattcgttatgttatagaaccgattctttttttatttataactgaaacatctaattctggtgactttttcagcgacaatgattttttcggcgacaatgatttttttggtgatttttccaacaataataacttttctgatgaatttcccaacgctaacggcttttcccacgaaacttattatttcaagttttatcaaatttatttaatgttttatatgagatttttacttttttttttataaaaaatatctttatacataaaaaatgtctatctaacggcaattgttggtttaacgattttgtttaacgattccttttttcatttatccttgcacgattaacttaacagtctgttaacgttaaacattaacaaatatataaacccaataattaaacccaaaaaattaaataatctttttttaaataaaaaaaaaatacatcttacccacatatctctctaacaaattgtata

SEQ ID NO: 329792 - DNA, 1307 bp, Cannabis indica
attctgagatcgactgtggacaaactatcatcggagtactatccctctgtcccatcatcctgttttactaaatcgctagggcggtttttccttctcttgggctttggtactttcgtaccaatcttttttggtactacagggccttttggggctaaagggcttctgagcctggaggtgtcggtcaccttcaacgcttgagaaggcctgatggcttgattcatgtttttctaaggaggttgaggaggatgcgggttcttggggtcacttacttttgcctttcccttatcctgtggaagagcagaggttccaatatcagtagggttttcccttgtgtttcctccaacgcactccattgaggggtcatctttagaatcttccccgttaagatcttcaaacttggcatgaaggcgagccatcatcttctccatcttttgagaaaatttctcttggcgagctaacttctgtctagtcttaagtaactctttaaacattcaaaccacttcggtattactcataataatagtcatctttatagtatccatctctgacgtaatcttcattgtcttcttcctctttattattctcaacattcttatcatcatcgacatgatcatgctagttttctggatcaccctctcaatttttcacattggacgtatgcctgccccttacatcactcgactgggcatggtctagtgagagggggtttacttcttccatgaccatctcgaggccaccttgaagagtcttcttaggaaatgtctttcgtgtgaataccatggcaataacagtggtttatgtctttcttcagctctcaataaaagtaccaaaatatttatcgagattttcagaaactagatattagagctaaagaaataatgacttgtagaaataaagagatgaagattttttatgtggtttgtgtttgggtattaataaaccttagtccacgagtcagtctattagcctctaagggcgatattgatgtgtttacaatatatttgcaggaaaccctaactctttagcctaaatttctctttgaagaagaaggagaaaacctagagtattatgggcagtgttttagctatgtaagttgtgataccccctttgtatgagaattgaggggtatttataggctaagtggcgggtatggataggcccatgacctgcctaaggtatctactaaaatcccattattggggtaaattacgatgcaatgttagagctaccaaatgattccgtgggaacatgtgcttgcacaactggataatggggaccattttgtaccactcaaacacgtgtcacac

SEQ ID NO: 329793 - DNA, 1512 bp, Cannabis indica
tttttatttaaatatttaaaaagtaaaaaatgaaataagttgaaggattttttagaaaaaaaaatggctgcacttgttatcgattgattagcttgaggcctcatacttagttcatataattgtaacaaaataattaaatatcatttaaaaataattaattatttgaaaatttattataagaagagaattttaatttgtgtcaaaagaagtttaatttttgtaaaaaaaaaaattttattgtaaatattataattaaatggcttaattattaaaataattcaagtaaggatttaaatataaatattaattgctaaaagaggtcttgttgaatatttaattaattattttaagaaaatagttaattataattaattaattctaaaaaaggaatgtctactatttaattaattattttaagaaaatagttaattataattaattaattctaaaaaaggaaagtctacctattagtaacctgctattacaggtcaaagaaaaatgtaaccatatggttacaataaaaatgtaaccattgaatagtcacccatatatatatatatatatataataagttaactatcatttatcttcttcttctttttgtaaattgtctatttatcttctttaatattagtagtattaccttaaaattaagtaaaactgttgtacccaataatttttaaatgtcggagatactatacctgacgattctcgtgctacataaaacctaaaaattctcaattttgattttattaaatgtctctctctttctctctccctcatctacgaccaccccatctcatccctcttgtctcttccctctagtcgaatacgacccaccatctcgtctctctttgccacgacagattcaaactcagaggtatctctctctcatttataaatggttttattattattattattattactgaagagtaattttttaaaaataaaaaagttaaaaaagtaaaaatgaagtattttttcgtgagtagggtacttctataatttttcaaacttttgccctattatataaatttttacaaaaaaaaaaaagccaacaaatcggctgcctgattcccgaatcgtttgacaaaaaaattaaaataaaatctgatgaaaaagtttgcaacatcacatttcaccttaagaacacctatattcgggttcttccaccgtttaggagatataacattagaaactattgcaacagcaggttcacacaatcccttagtttgagcactcaattattgtgcaaggtacgtaactgcactactaataacacattcagctgcaaaaaacttgttaatccgtactactaatatcgatttgatgacaagtcattgaagaatcaaaggactaaccaataaggatcataaaacaaataaaattatgttatagagacaagactaattgtagtaacctaaattaaaaacaactcaaaaattataatcataaagaaaaagactaaattgtaagtagtaaaaaaatttaattgacagtaacaaaacg

SEQ ID NO: 329794 - DNA, 407 bp, Cannabis indica
ttatattttaactatatacttaatcatatctctattaaagatacaaataatgaaaactcaaatttatgagtaatgacacatactcttaatttacacactttatatatttaattttaattatatataaataaacagtgctccttaaaaatagtaatagttgatattgaaagcacattatagctagtttatagataatacatatatatagtgtgtgtaattgttggtattaaatactcattatagtatgtaataagagtgaatgtcaaaatctttgagttactctatattatataaaggaatcaaatctcttgttcataaaatctgatcaaaaaaaatcattcccaaaaaataattgattgatcatgcgatgtttggttgcatattaaaatattaaaatatcattttaa

SEQ ID NO: 329795 - DNA, 732 bp, Cannabis indica
tctctctctctctctcgtttttgtagcagccatagaaccaaggttcctccaatttttttcttgttcattctagctggaattcaagggtttagaagaagctttggaggaggaaagctaaggtgagccctagaactaacttttcctgaagttttgaattatgcataactattagttagctactgtttggttgggtttcggttagaattggtttctacaaattaggtttgatgtattaagctttattggactgttgttgttggctggttttggggttgagcaagtttgagttctacgaactcaaacttgactcaacaatggcatattgagtattagtgtgtttttcttgctactttcacttggaaattatcctagaatggttttgcaggtgttctgaagagtttggattggtttggacacaatttggacatgatttcaaattatttgggttactggcaccgattaaccggttttacaggccctgtaaaattagttaatcggatcaggaacaggtttcacgaattttttgtgttgtcggtttgtgttatttccagtaccttagttagttatttccttaatttttttgggtattgttatagtagttaccaataacagaacccttagttggagtttgggtgtcccgaattaaggttttgatatgtcatttacccgtttacgtgaatgtgacttagggcatccatccagcacgaggttttccgttcaggtcgaccaact

SEQ ID NO: 329796 - DNA, 1042 bp, Cannabis indica
attttattatgaattattgtacttattagatttttttttacgaaccagaaagttgtattgctcaaaaactgattttattataaagaaaacaaatttaagaaatacataaaatataatttttagtaaaataaattttaaaaagagtcatctaacaagcttattaaaataaataagttttgtaaagtaactatattaaaaaaaaataatctttagaagaatataaaaaaaataaaaaaaatagtaattaagtaatttaagtgtactaaaaaataaaataaaataactattaaatttagtttttaaaataaaataaaaagaagaagaagaagaagaagacaatagtgtaaagacaaaaaaggtgtaaaaatactataagctaggttccattattactatcatgtttccttaactttattaccattagatcaataatcaagggctagaaaagaattcctaccatagggacaaaaccaaggtctccaccataaacatttcctatatatttatatatttttttaatttagaaatacaatctttggtagaaataatagtattgtaatatttttccattaacttttactgtcatgctaatgcataattaaatcttgatgcaaaatttaacatcctattagattaggtatgttatcatgattttatataattgtgtcatccgttgctaatcaatgggtttatcaaaaatcgtgattcatttacacttttctggaatacttttaaatatcaaagtaaataacatatctataaccgggatctcgtgtttaaaatatttacaactgagttacaaaatattcgatacaaaagttgtcgtctagtgactatacaaaatgcagcctactgtcccaaagattgtatgctccaggcctaactgccccgacatgtacaattttcatctgctcgggctcactgctgttcagccttagctttgcccttacctacacatgaaaagaatgactgtcactcaacagactcagtaagaaaagtgtaaagaccgcttagttttaatttaaaaattagctgataaata

SEQ ID NO: 329797 - DNA, 945 bp, Cannabis indica
gagagagagagagagaaggagagaataaaggtcaacctttaatttctcctttggtcgccgacatccaagtcgcctgaaaatttctttgctctggtttttctagaataagaatgacgaaaaggagtaactaaggttttcaatcctatttataagtaattcaaaaaaggaagtaatcgaattccccctaaaagtgtacgttatgtactcattacaaaagagtaaccgtcaagcacacacagacatcgaaccgtaattcgaggcagaactttcaattaccattaaatgggcagaaattgaagagacccccagtcaaggtcacgtcagttcatcattcgacacttaagagacgcatcacccatctgaacaagactccagatcgagtaaagtccacgtacgactaggaaggtcccgcgaagacttgggggcaaatgttatctaattttttgcacctcaacgtggcagtagaactgaatgacacttgtcccatgttcttgatacctgggcagggaaaagtgtcctgggcagcctgtgaatgccctaccggcatctgtcacacttcgacatccgagcaggattgtgaagaagatgtctgacaaggtatgatatgcctgccgagcaacttacaagagatagtaacttcagaataatctcgttatacccacacatgaagacaatctctgtaatcgtgggattgagttagagagatatggccacctgctctagtttcctatttcatattttgtaattatgtaatcattgtaattttctattttgttcattgtaagcaaaagagaaaccacccctcatgcattaagcccctataaatagtgacctaccctaactatgaaagggattgaaagaatcgcttcaaagagagagatatttattttgattatataggcccatggtccccatactagttcagaccatactgcttgtaagact

SEQ ID NO: 329798 - DNA, 855 bp, Cannabis indica
ataagcattattaaaaatacagagtatttgtatttagataaaacacaagatactaaatatataaacactcttttattggagtggaaacaaaaagatgtcattaattgcatttattttatattataatctttcacaaactttgtacggattgattgtactttgttcctcatctctgtttttttttttaaacaaagtaattattaacatctctttattatagacttttccgtttaggaacaaaatattgaatgtatcgttaatgtctccgaaaaagttgccacctttttaagctaacgatgtctcatgtagaaagcactatagtaaacatgattggttgaaagtgaaacattggtgggcccataaaaattatataaaattttaagattgaaattaaacagtaaagatctcaccttgagcattaggatgaatggttttgtaaaatgatttagatcatttgttgctaatctataaataataataatgataaccaactttcaatcaatcaatattattattttgagattataaaataagtaagtcgaaagcacaaatcagaaatcaaaatgagaaagttgtaaaggaaagacaaataaaggtaatattatactcatatttactaagttttattttaacttaacgatagagttttaataataagatgtatactaagtgttattttttttatacaatgactagggaactaagccgcgcttcgcgcggtattgtcaaatatttttaattttttttatatatattttactttctagtgagtgatacaatctaaaatataatatatttttatgtatgtatgtattataaataaattaattgtattaaatttaaaaacatagtttg

SEQ ID NO: 329799 - DNA, 531 bp, Cannabis indica
tatcttgaatagaggttctactgtatatagtaattatatatactttttaatcaagaaataaaagattaaaaaacaaaacgtggttgcatatttaattaaaatatatatatagacatctaagcttataaatagaagagattatgcgtcctcgaatatatatctcacctaattctatttggcttcaaaactatatatatcgtctattgttgttgcttcaaattccatcattttttttttctatactctacaaatctatattttagagcagaagaatattatcaattctcgaaaagggttagtttataaatatatgtatacgtatatgtaactataactgcataagtctaatctacgtacgttgctgtgtatctacttttatttatattaccaagaattatattttcttaaactttctataattaatttgtttcaaatttcaattgatcctcttttatgcctaactcagaaagataaataatttatttttaaaaaagttatataattttttatatataaaaagtggttatttaa

SEQ ID NO: 329800 - DNA, 913 bp, Cannabis indica
ataaataaatttttataattttatttacaaaaaatagagtcttttgatataattttatggtgtactgttgctatttttttattatttatatgttattttttggtgttattttgatattattttttataatttttttattatttttattaaataactgtataaatataaaaaaagattaaacctaaaaatattaatttttttttaagaaaatagtgtattatctttattttttttttttttttttcatgtttaacgaaaggatgcgaatgtggtgcctgaattagaagtttgatgggccagaaggctgaaactccaagcccaatagagtgggtttatttggggagaagcgtaatggagatttctaatttcttttgtttcatttagttttatacctacaggataattttcaggtcttcacaataagaagctagtgaaatagtagttgcattatcaagggataattacataagcacttatttttatgtttaaatattttttatatatatttttaaggttttttatagaaataatacgaaaataacaaataaaaactaatataaaaataacatgaaaataacatctaaataaattcaaaacaacaacaaaaaataacatacaaaaaataaaaaaaacaacaacaaattaatataagtcaacataaaaaaactttattttctataaataaaataaaaaaatcataaaaatatttaaaattgtgtgaaactgtatttttgtaattttttttttattatttttgtgtatttgtgaagcatatcaattttgtttttgttttttttttttttttttagtaatttactacttgtatagtgtatatgggagggatatatatttatatacatagatagatagagaggaatgtgataattaattccctatcaatatattatttttg

SEQ ID NO: 329801 - DNA, 902 bp, Cannabis indica
ttctttctcttcttttcctctctttttctttctctcttggctgctggtagaacttgttgtccacgacacaacaatcagcctttttcattttttttttctttttgtttccttttaattataaataggctttagcccttatttggtccaagcccaaaaacaaggggcggacccaacaaaatttaacattattgaactactggaaaaataatttttcaatttggttgaatataactcatttttggtagatttttagttttcaagaaaatcgaaaagcttaccgaaaagttaggatttttgatatttttctatttttcttgtttgagcatatttttttatcatatatcaactgttagaaaagattttgcatgaaaattttacataaaattaatatttggtaagtaagttgcttaaaatgaccttctatggccaaaatgagtaaaacttgctaaaatatcttctttttgaagcttttttctatttttccagctttttacacttcatattaatcatgattaagccgatgcaaaaataatttttcaaaaaagatgcataaaacttagttttggtacatatgctatttttgcttaaatttttgaaaaacttaccagaaagtctcaattcttgtcatttaatcaatttaagtgcatgaacatatttgttttatcatacttgaggtatgagaaaaggtttaaaatcataactatatcattctttacgtgtctctcttactttcaaggattttgacatgatttttggcagattgaatgtttgacttgttttgactacatggcctttcatctttttatgcattttgaaatttctctttacctattgtatctcattggtataagtaatatcttgtatgattaagggggagaaatatatttagtttgaccttgctt

SEQ ID NO: 329802 - DNA, 675 bp, Cannabis indica
ttctttggtagttttaataattttgatgaagatgcctgaattataaaagtcttatacttcatcttgttttaattaggtcactggtatgcctctcataagagttctaatcttattaaagatagtccgccacattaaactagtctctcaaaagaccaaatagaatctctcttaataaaaaattgtggtgaaattcgaacttttaacccaaataattaagaagaatgtcaatagaaacttccctaccataacatcacacaatacatggtagactccaattttaaatttcaaacttatacaccttacacatatattttttggataacatataaaatatttgtttattttaaaaaataaacataaatatttgtctctaaattaatacacaatctattaatttaattttaataagttcgatcggataaaattctcttatttttcatctataattaaattattatgtataacaaaatttcaataataataaaaaaagaagaaaataaaaagaaataaaaagaccaagtataaatcttatcaaagtataagataagatatttaaacaaacatatttaaagtgtggaactctctaaaatttattatttgtttatcaaaatattagaaggtgttacattgataatgtgtaggagctatcatattcgttgtcaattaatttttaga

SEQ ID NO: 329803 - DNA, 2249 bp, Cannabis indica
catctgacagaccattcaaaataaaattcttacacagaaaatcattctccacctaagagtctcttttcttaacatgcgattcgtacttctcgacttcatccttcttctcggcaagaggtggagtctcagacacatctagtttcaaaataaccagcacaaacacaactttttttcatagtcaaaaaaaaaatcttttgtcttcaacgtttaaaatgcaaaccctcgaaacgaaaaggcttgtcaatgtcagcagtagaaccagaaaagtcatcggtagtagtcatagcagaaggaacgtcttaaaattgttgactaaactgctagcaaaagtaaaagattaggttgagtcgtggactaggtccggcactgcccaggattgtgcaaacagtcaccaagtcgtatggtatcgaaaccctactatactgtagagaaccgtcgaatacaccttaaaaattatgatatcgcagatgggtttttttttttttttttttgagtgaaactgtgttgtttttttgatatgaaaaagatgtattcctcccataagttcaatcacattatataaatgaataaattaagaaaaaaaaaatataacgggaagaagaacattttctgaatcgtgaaagagttgttgctaaacatatctcataactaataagcctaagtattcaattttatattaaacatgttatcaaataaataaataaagataaaaaaataatatttattaaataaatttctataaaataaaataataacactagccagctcggatcaatcgaactgacaacgcgtgctgatgggttgtgtgtgtcctcatccaattgcacaaaactaaatactccttaagccctattccaactattaaaattccaccttatatatccttataaacaaaaagattcattttatgtggaactctttcgagtttatttcatgtttttttgttaaaatattcattaactttaacaaaattccaacatgtatatcctttattgtctagctcggtcatcccctataatgaatactggataaaaaaattgtcggtgaattgaattaactaaatattaaataaataaaattcaattattattaaaagagaaatcaaataaagaattgagaattgggagagatagaaaagcaggacgactagtttcaaaaaaaaaaaaaaaaaaaacgaacaggacgatggagaaggcgtacggaggacaggtggttataataactgggtgcaccacgggtggaatcggtaacgcgctggcacgtgccttcgcggcggagggttgtactgtggtggcgacgagcaggtcggtgaggtccatgtcggatctggaacaggattcaaggttctttctacaggagcttgacgtgcgatccgaggagagtgtgcagcacgctctttcaactgtactggagaggttcggtcagatcgatgtgttggtcaacaatgccggggttcagtgcgttggccccgtagctgaagttcctctttctgctttccaatccacttttgataccaatttattcggtaatctgctttctctcttaactaattttttcaatttatacatctattactcaatacccaacctttgttgatgttgatgttgatattgtatgagatcatcattgtctcaagaactttgaggtataagaacacacttcatgtcaaagttttgctctttcatactttttcaatttcttttagctttaaaggattcctatggtgtgattttcatttcaggtcccataaggttgattcaagctgtagttcctcacatggcatctaggagaaaagggacaattgtcaacgttggaagtgttactgctttgtcccctggaccgtggactggtgcttatactgcatcaaaagctgctgttcattcattaaccgactctttaaggtgttaaaacattgcttaataattccctaatatgtgttactctcattcacatattgattcgtaaagttatatgtttagtcatgtattagccttctttatccattttagagtaaataatcatacttatgttcgtttatttttgtgataatctttacttcaggtttgaactcaagccttttggaattgatgtcattactgtggtgccaggagctattgttagaaaaattaatataaacccaagatcaatttgtatataacatagaatacaataataatatataataattaaatatgcgcacctgattgatccatagcaattacttcaatttgatagtgcaatactatcaa

SEQ ID NO: 329804 - DNA, 598 bp, Cannabis indica
ctaatctccctagctacaacaatttttagtaacaaaaaaaaaaattaagatgaattttaagttattgatgagtaataattttcagaataaacaagcctgatctaccactagcttcaggggaaatatcagtaaacacagcttggattatgagcataattgtggcactgtttggattgataataactataaaaatgaagggtggaccactctatatatttggctactgttttggtatttttggtgggattgtctattctgttccaccatttagatggaagcaaaaatccttccactgcatttcttctcaatttcctggtattttactttactaacaataatcatatcttcacacaaaatatgttctctttaattataactatcatattttttctgttactaatttcttaattttattaagatcaccatttagttagatgagataattattaaagtaagatttctatcaaaaaatttattaaagtaagattgtacactcccatatttatataaatatatatattcgttggaattttatttttattgatttctaaagcataaatttgtaaaaactatagctttttcttaaaaaaaaaaaaag

SEQ ID NO: 329805 - DNA, 611 bp, Cannabis indica
agttatagtgtaaaaaaaatatttttttagattaaatattaaataatttaatattaaaagtaaccaataaaaaataatcgatctaatccatattttgtgaattgaattggatttgagctattgtgcgaattaaattgaatcagatgcactatgagcaaaatgatgcaaattgaattagacgaacactctattacgaaacaaatatgtaagacccaacattgtgaaaactacatttttagacaaaagtaagcttttttcttattatcttcttctctttaagaaaaagagcatccatttgttgttgtttttcatttagatatcctcagaatattttctcagatatactttctctatttcattatttcttttccttgctgtaacattcttccttctcacaggccaaattacatagtagcttagagaaagaaggaaaacaaaaaaataacccaacaaagacggtctcatctctaaaaccattattattagcagcagaagcctcgtgtgttaaggacgtaaagtgtaagaaaatcttgacaatagaaaatgcctttgacagacaaatctgacataaaaaaaaaaaaaaaaaaaaaaaaaaactaaaaaaaactaac

SEQ ID NO: 329806 - DNA, 1119 bp, Cannabis indica
taatatgtcaattgttcacatcttctaaatttattactcgttttaggcaaaacgctctcaatcggtagaagatgaaatacccttcaacacaagggtggataactctggcttagactcttcatgaaaatgtaatttaatatatataatttctattttatgaagtttactttaattacaattttcttacaacttatatttatcagcaagaaaagagttacattaagacttggaaggtttgtcatacaaagaaagccacaaacacttttgtcaacaaggctgccaaaaatacgtcggtatgactttataaattaattacttttaaatatattcaaataattgtaattttgtttagtttctaacttattcttattataggaagagatggtgacatactgaactagtgcttctaaatatacacaagtttctgagcttgagatacttcgacagactcttggagagaggcgtggccatgagtgaggagtgggtcacaaattgaaggaaaatcatcaggacaacgcacacaacatgtaactactaattaacttgacttatgggaaatagcaattcagatgcaaagacaaacatagatgttgactcaacaattgtcacgtgaaggtcctgcacaaatggatgttgagataaatgatgcagctccaacctaaccaacgcatccacatccgtctcgctctcatatgcctggagatggacctggtccgtcttttttagccaatgggttttcaacatcagcagcggcagcagactcctagttcattccagcaactgctacaataccctcctatttctttagttacctctgaacagtcatacaattagatgtaccagtcattcttgtagttttttgtcacccaaacagttcacaagtaatgatgaatatgatgatgcaattgcctcaaacatctttggtgtcacagtctcgaatgccacaaatgatgccaacaaaacaaatatcacaaatgccacaagatgacgtcgacaccacaagggtagtactatttgtagacacaacaaggacatcatacatctcaaatgatgctgacacaactgttaggttttatgccctaaataaaactctatttcaatgtaatctattttattcaa

SEQ ID NO: 329807 - DNA, 539 bp, Cannabis indica
tagagatctctttaaattatatattttttagatgtgtatatcatttataggtacctatatataaagttgtacattcggatggcctggtccagcctgtttttataaaagtccactttttttatgtgagcctagcccgactcatttctattataaccattgagtagtcatcattttaactatatatgtaatgtttaaacacatattttagattaacatattgacaataattataacattttcttaaaattaaaaaataatatttaaattcaagtcaccttaactaaaaaatctatcatctccttacacttctactgcatattttatctttattaacaagtaggttaattaaacacaaattaaaatatgctagtttgaaaatagataaaagacatacataaagaaaccaagaaatttagactaaaaattaatggttaaaagaattttcaggaagaattcagatacccactaagcaaaataacacttgatacgatatcgtcgttatttctataataataataagagacttttttatttttaca

SEQ ID NO: 329808 - DNA, 693 bp, Cannabis indica
ttatttgtttattaaagtttaacaacatataaaccctaaaatatgttactaattgaattctaaatgtagttctcttaggtaagtgatcaagaatcttaaaataaaaattagaaaattatgtgtcatttttgtgaaataactttgcacaatttagtgagccgaacatatacttaaaaataaaataaaaaagtgaacttgtaaatgactttagaagactaagaaatgtacataaacttttgatactttataacaccttgccacagatagaatttgagtgttgaacagaaggagtcttataatattccgttatgttctcgttataaaaaaaattctaactttattttttgggtagatcaataataagggtaattattgaaaatacatgctagtaaataaggtcctaataatatatgttctaactagggctgagcatcggtcggtttagtcggtttttttctatataaaaattcaaaattcgattttttgtttggattggtgcaatccgaaaaccggccgaccaatccagaacatatcttaaaaccgaccgttttgaacctcgatttggtcggtgtaaaccgcccaaaccgaacttttttttttaaaaaaaacaattccaatttattctataaatacattattttacattttacaactacaaacatataaattaattgttcaaaaactaattatttt

SEQ ID NO: 329809 - DNA, 754 bp, Cannabis indica
aaacttatattttttctatatcatgtcatactaatttataatatcatgctatatcatgcccatattcagtggcagagctagagcaatattttagattttagtggaggcaattttttttttttttaaagtactgataaaatataaattttaattgaaaaactataaattttgtgaagataaaaataaaatataaatgggaataaaaatgaaaatataaattttatagaaatacaaactaaaaatatataggataaaaagaaaaatataaattttatgagaataaatatacaaatatgtaaggacataagataaaaaaaaattatttttaatgaggttaaaatgtaaaattctcaaaaattcatattttgaaaagttgagaggaggcaaatgacgctacatgctcccattccttttgccattgcccatacctatttttttcttttcgtgtcggaccatgctcgtgtttctcatactcgtgttgatttcgtgtcaataatattagctcatatatttttttgggaagttacaaatttaaatgaatttttttattttttatacaaaattacgatatttttaaaaaaagattattttatgaaaaaattgaggaaaaaattataaaatgtgagaaaatcaagtaagattaaccatataaactaattactataaaatgtaactaagtatcttatgcgattttttttgtatatttttttttatttttttctaaattttcacataaaataactttttttttttt

SEQ ID NO: 329810 - DNA, 955 bp, Cannabis indica
taatttttagtataaattaaagtttagcataatattatataaaaatatgatatataatcaaatttaatacaatacaatacaatacgacctaatacgacgttccaaacgaatcctatcaaaaagatgtcatattaattaatataatcaataagattattagatatgtattaattcttcaaattcttgacagtttaatcataatggtatatacatgaaaagtaaggttcctattgatattgagagattccttccactgtagcttttttcaataaatattgatattgagattttgattgggtacaattttgatgaatgtactgtaaaaaatttattttgggcttatataaacgttttaattgttttgttaaaatataagttgataatagatttttgtcgttttaacttataaaattaatgatctatgattaatagacttagcatttgtattaaatttagggttttgttgttagatctcgttacaattatgtacttttattaatttatctaccttcagtcgtaaagatttagaaagaaaaacttaggtggtgtttggtaacacttttttatcagttttttgtttttaaaagtagaaaggtgaatttttttttcaaaaacatgttctataaaactttttttacttttcaatttttataattagaaatcaaaatttttaaaacaaaaaaaaaaaatcaactttcaattttttttaaactagttttttttctttaatcaatcttttggtattacgaccagacccggacccaaatcccctccccacggccctggcgctgaactcggcttctaacttgaacccgaatccgaccccggacctaaacccgaccttaaataaaataaaaaaaaaaaaaaaaaataaaattttacagaacacacttttgttttctgttttaaaatttgaaaaacaaaagtaggttacagaacgcatttttatttttct

SEQ ID NO: 329811 - DNA, 603 bp, Cannabis indica
atgtacacaccaaccaactctcaggagccctgtcagttgatatttcaaggctaactaacttaaaggaattatttgttcataataataacttcactggttcaattccttcagagattggaaacttgaagaaacttaaaagattggatctttctcagaattatctcacaggtgctattccaacttctttatggaacctaaaaaagctcaccggtttgcgacttttcagaaatagtttggttggaaccatcccaccagagattggaaatctaaaacttctatcatcttttgatgtaagcagtaaccaactatcaggagagttaccaataaccatttccagtcttagtaacttgaagacgttctctgttcttaacaataatttcacagggacaatccctagagactttgggaagaagagtcctaatttgaggttttttatgtttgtaaacaacaatttctttggaaagttgccaccaggtctgtgtaacgggttcaatctagagtatttgggtgtaagcaaaaacagatttacaggaccattacccgagtgcctcagaaactgcaccaaattaaaaagagtaaggcttgatgagaatcgattcacag

SEQ ID NO: 329812 - DNA, 907 bp, Cannabis indica
taggtttaaaatattgaataaactcaaattaaaccaataaatatatatgaaacacatccaatggatagaactgatccaatccaatatccaatggatgttggattgattggatgactgaaattgattggatcggatcggatggtaaaatctaatatccaatatatgattggatcgaatctggataggctcaaaaatattggatgtaatccaatgaacacccctttatattaagaattgttttcaagtttattatattaaaagatggttaaaaattgaacttaacgttctattaatactatttaaaaaaaaaatataaaatctatcttattatttaataaaataaaagctctaattattaacttttataaaatacaaaatagtattaaccttattaaatcttatatttaatgaaatatttacaatcactatttttgaagaacaagaaaaaggtagcccaaaataaaatatatgtatataatatatacaggaatataaaaaatgtaatgttcaaaaaaaaaaaaaaagaatataaaaaaatgcatctcgaatgtcacacataaataagaattaaaatctttggagaagatattggtggacctaccaaaataagttgtttgataggtggtagggccaaggctaaaggctatgcctacaaaaatcacaagattgggctcacatttaggtccaatttcttgccattaaatttgggcccaaaatacaataattatagcccacctaatattttattatatttatgtaatgtaatatatgcttttatatatatatataaaagcataagtttccctttagatatattgtgtacaaaaaataggtgatataatattgtgcgtaaaaaagataattacacaaggcactattttttgtaaaagaaaaaaaattatatttt

SEQ ID NO: 329813 - DNA, 1238 bp, Cannabis indica
aatacaaattatgaaaataatgttaaaataagtactcaaattagcacaagatagtgttaaacttattttattattattttgtttttgctaattaggatttttgcctcttgaactttgacatgtattaaatcatgtcctttaaacttttttggtcgttaaaaattctcctgaactattgaaattgttggatttaaggacttttatcctatttcattcaattttactgattcagtgattgtccatgtactaaatcatgctccttagactttgatatttaccaaattatgccccttgaactttaacatgtgccaaattatatccccgaactttcatcgatgtaagacttttcttactaaaattagacaaagtctttaaatctaataatttcaataattcagtgaaacttttaacgcttttcaaaatttgaatacataatttagtatatgttaaagtacagagctaaaaatactaattaacattattatttttttttttaatattggctacaaataaagacaaaagggtttagcttaggagaggaaagtttgaatataaacgcctcttatttcaacattgacctcacttcaactccacgggcccagatccgaagagtttgggaaaccctagctctatcttcctactattttcgctctatatctctctttcgatacggattctacagctcgcaggtatccttacatttgtaactatatgtatgtatatatgtttcgaaagtttgtatcaacttattcatatcacagctgcatgtcgaagtaatttcttactgttttttgttgttttcggattttatggtacctcccagtttgaatcatttgatcttagaatggttttggttgagttttgtttgagatctatttgtttatgtatagttattttcagataagcagatactcagtccgaaatcattcttaaattatttttttcacttgcttttcaccggggaagaacaaattcaaacaaaacctaaccaaaaccattatagcatcaaatgattcaaactgtgaggtaccataaaatccgaaaacaatggattgtgagcacgtgattttcccccttttgtttggtttaatgtatatgtatatctgtatttatattatgtataacaagtttcctttttgattatacctaaaatcagagtcagctgtttgggttctttttttttttttttctattgtgactagaggtatatatatacatgagttactaaaggtgtgtaa

SEQ ID NO: 329814 - DNA, 1736 bp, Cannabis indica
aattacacagtttagtaattacactatattttaaaatgcaatgtgtgtttggatatgaggtgataattagtaattacatgggaaaataatattttttagtagctaatgtttaatatggaaagtttttaataattacacagtgtaattacatccaattctcatggggggccatgagaattggagagtaattgaaacccctcaattacttccaattacgtagttacattgtaattacatggtcagacaaacatgtcaaattgtgtaattacctccaattatacacaaatctaattacattgtggcttttcaaactcaccctaaactatgtttggtaggaaatagaagtgagcggatggaaagaagaagatggagagaggtgggagtagatgacaaatctcgattgaaggagagaaacgatagttgagagaggataacaaatctactctaacctccaatttagaatccatccgttaatgaaaggattgaaagaaaatcaacaggagtagtgttatcattgactttaagaactgaatagaaacaagagctacaagtaacacaatgtgcagctttgtttgcaatacccttaacaaaacataaaaaagaattatataaggaagccaaaagatgtttaacaatcagctacaaacaaattactaaagaaagatggtatggtaacggaactggtaatgggttgaacaaccactaggctatcggtctccaccaaaacatgatatcactctttcgttttaattcaacttaaagcttccttaaatccaaatgcctctaccatgacaggttgaattcagcatagcttactaacaaacataaccttaatcaaatgaccaatgtgatcccgaactacacatccaccaccaaaggacattttgtgtcaaaaattgattcatcaacattcatattaatctttattcatacataattataataagaaaaacaacaattaaaaatgacttaaataataatattattttttataaactacaaagtaaataatattaaaaatttattttaacttatgtttcaacgacaaacctataaaaatttaccattgtagatagtaaatttaaataatacaataaatatataattaaaaaaatattaaaatatgataccgctacatattcataaatcaacaataaaatatactataaatactaaaatataaaaatgtgaggagctaaaattctctctagctattatatgtgtctgctagtatttatttatttttcttattattaatgtatatgaatataataaattaaagtattaaaatattaatattaatataataaatgaaaaaatattaatataattatttttctacaaagttataaaattaaaaaatatatatataattatttgaatttaacaaaaaatataaattaagtaagtaaaataaataataaaaatgtcaatacctaatagtgagaacttaatgttgctaaaaaaaataaaagtttgggggatcaatttataaaaaatataaagtttaggggaccaacttgccaaaacttatatagtttggggactaattgtcaaaaaaaagtttgagaactaatttgccaaaacatgtatagtttagagacttgcgatacaaataagccttactcaaatgagtaatagttattacataatttaattataaatattaattttaaaaatattaaactattaaattttgatcgagaataataaaaaagaaatatagagcatgtttg

SEQ ID NO: 329815 - DNA, 695 bp, Cannabis indica
ctatggctataatgaatatagttaatacttaatattaatattaaatgtcatatatatcattgctgatgaatataatgtttgtacgtatgtataactaaatttaatcaagagatgactattcttctatactcaaccaaaatatatataacatttaatggtctctacaataatattatatatatattttatttaaatgcaacaacatcaatccttatctagacacgtactgttctattttttcacaatcaatcatttaattcgagtcgatttaaattttaattttgataataattatcttttgatgatatatatattttttccattaaattgtatatctatattaaattaatattatatctacaatgcaccataaaaagaattactctaacaatcaaagtatcctaaattaatcttaatctgttttgatatttaaaaaaataatttagtctttaatactctcgtgcgtgtttattgtagtcttttaggattattagtaaaattttaaaaataatttagagtgtttaaaataaaatttatataattatatactacttatataaaaaaaatagtcatgcatttaataaaatatttaaatattatttttagtatgataaattatttatcttttttaaaaaaatttataaataattataaataaatacaatatacacaattatatataaaaaaaaaaactt

SEQ ID NO: 329816 - DNA, 713 bp, Cannabis indica
aattaaaatatataaaattcaatatcaaattacactaacagtaataatattttttcttttttgagtgtgggtaataacatgtctctgttagaaatgcaagtaagtgttacaaagttaaaatatagctcgcttaactaataaaaaactctaatggtatgccaagataatataaacttcacacaatatttactataatacaaaatttaaccataaatatactactttttttttaaaaaaaaaaaagaaaacaataaataaactactttatttatttatttttatgcactttcattattttctttagtatatttaattatagcattaaattataccatttatattctttttttatttttttaacatcataaagctattatttttgatattttaaaaaaaaatattaatcaaacattaagttttgcatcaataattacatgcattggagcacaatgctaaatataaatacaactatatattacaaagtaataatttgtgctgaatatataacacaatttttacttctttcattgggattttttttatatatattgttagaaaattattgtgctccaatagaaatatcaaacgaacaagattacaactcaatgacaaataatacaaaggacaaaaaatatagattaaataatgttacacatgaaatcacaatatatataaatatatatatatatatataagagatgtgagagtaatct

SEQ ID NO: 329817 - DNA, 661 bp, Cannabis indica
tctcgcgctggctctgattgggtatgagaattgagctcggcagccacaacaaaagtaccaacaccaacaccaataccaacactgctgctactactacaacaactactactatttcagatattaatgatgatcttgatcaagaatattgggatgatggtgatggtcatgatcatgatgatattgggaagttgactaagtcaacgagagttgggagtggcagtaattgtacggatcaggagatcatcttcaataataatgataatgataatgatgatgatgatgatgatattgatcacgtgactgttgctgaagctaataagaatgtggaagaggataaaattgcaatgcagatgattgaagaactacttaactggaattatcctatttcttcttcggctcaagatatcattcctcatcatcctcctcctcctcctcatcatcaacaacttaattaatgaagcttatatatgttattattgtttaataaattaagtcatcatcgatcgatccatcatcatcatcaaattttataattattagagatatctatcaatctagctaatagcatgcccgcgcatataaatataattaagtaattgtttatatagctatagctttatatatatatatatatatatatatatatatatatatactatcg

SEQ ID NO: 329818 - DNA, 1596 bp, Cannabis indica
aaaatataattttattttatttgatgggtatattttttaagaatatagaattaagaaaaaaaagtttaaaaaatttaagtacaattaaaaatataaattttatttaaaataaaaattattaagatagaatgtctttagaaatttttggggtgtaataaaatttctctatccaatatttgtaggataggccaatatttgtgttaactccaaaatgtcctccccatttatatgatctccctctctcttccctcttttcctcttcctgtctactacccgagcatcgctccaccaccacaaagaaacacaattttcttttctcttcatgcattctcttcactacactacaagctacactacatactttctctcatttttagacggagcattataaacgaagttgatgagtaatttttttttttgtaatcttattagttattattatatttagtttagaatgttgttttaaaaaaataaaataaaatcaaataaaactttaataaagaacactacttattctaatttcaattcttgcaagtctaagtaaataacttatttgattcttaatcaatctgattttaaacatttcaatcacttgtaagtaatggcacaaaatgggaagagttttgtaacttttaattttttcataagataaaatcatatttttaaaattttatcatggtattatagtttggtaactaagtgtaatataaatccacaaatcactttatgagtaatgtgtggcactatatatgtatatacaatgataaagggtacttgccttatgagatatattatcgttattagagattatatagaattggtaactaattagaagacactgtatcacaaaagtgctagacacgttaatgccttgtaacaatgctaaaaaaaatacttgaatcaatttttttttttggtcaggagaaaactaagtactaagtgaaaaactcgaaagagagaaaaaaagaaaaggctaattaggatttttgtttcctgaactttgacatgtaccaaattatgcaggtgattgaaaatgccccatgaactattgagattgttggatttaaggacttttttctaattttagtaaaaaagtctaacatgaatgaaagttaaaggacataatttagtacatgtcaaagttctaagggcataatttagtagatattaaagtttggggaacatggtttagtacataaacaatcattgaaataataaaattgaataaaattagacaaaaatccttaaatctaataatctcaataattcaggagtatttttaaagggcttaaaagttcagaggcatgatttagtacatgtaaaggaaggaaaatattaattagccaaaaagaaataaacattttaaatatataaaaaatcccagcttgtggagtggagggttcgattcttcgttcttcttcatgtatttcgcatcggcctcttttctgcaacctttttatgctctggattttgatttgatacccctttttgaggtacatctattctatataaagtgtgcctatataattgaaattcttagtttataagaaatttatgggtgacttttaatttttatttaataaaataataataaaa

SEQ ID NO: 329819 - DNA, 956 bp, Cannabis indica
tccttaaatttaacaatctcaatagttcagggggaatttctaacgaccaaaaaagttcaggaggcacaatttagtatatgtcaaagtttgggggaaaaattactaattagctatattagctcaatgaatagtgaaaaagtaaaacatattttatatattttttttctcttttttttcttttaattgattttttattgttctttttacccttttttgtatttttcatgttttaattaataaaatacatgtaaatatattatatttaaataatataaaaatatatttatatatatatataaattgatatataatgtaaatatataagtaaaatagagaaaataaaattttaataatgtattttaaaaaataaaataaagaagttattgcgagtaatctaatgagctattttaccttgaaatgctcttagaatacggattcaaatgaactaaacattagagtgaatgatctttaccaataaaagattgaaaattatagtttgttttcagtatcaaaatcccattagatgatgaaattattattattttctttaattctcattgttcttacagtctagttaactattaatatttcttttttaagaaaaaaaattgaaacaaatatcactttatttaaagaattcattttggtataataataaataaatgtaagtctttttttattattctccttttcattgtttttcccagtttaactattaagttctttaattttatttaaagaactttggtctaataataaaaaataaatgtaattcatttaaatagagacattgaccctagttggttcgatttttaaaaattatatttgagcgtccgaagctccaaaagtatttctactactagtttgagtaatctataagttttagctttagctataaaatttattttataataaaatcatgtttagtagcttttctctaattttttttttttgaa

SEQ ID NO: 329820 - DNA, 1142 bp, Cannabis indica
gataatcaagatgagtagtatatacataacgattgctattggatactatagtgtcttagcatctctagatatgttattttaagattgattagttagcgacactgtttaaaagttattatattaaactatgtgagactcgatacttaactagactaataataatattgacacatataataggtaacactattccattttaagcattactataatgaatttctaaaatgctactatttttaggggaagttagttttggtgcatgaccccatatcatgtaatacttattaagagaaaataattatcaattagttttaagattaaattaatcccatactacttattacttacatgctaattaacgattgttttattagtttattgttatttctcttaggccatgtgcttatggttacaattttatgtaactacttataaatcattaatacatattctctatgtaatttattaatttcatctcactcatattttgtttctctatgttttatcatggtataagaaccaaataatcatcttcttgttctctttattttttttttcttttcatcatcatttttctttatttattttgtcataaatggagcaatattgcaatattcctaaagatgcgataggggtgtgcataaattgattcaatctaataacaattgatcgctccaattagaactgactgccaaacatattagatatccaattatgatcaaatcagattgaatattatttttgaatatccaattggatcgaatcggatcgaatgttggatagagtgtccaaaaattcaacacatctaacatccaatcgaactgattagtcaagatgttactttttccaacacattttgcgttggcaaaagtttagtattgtgctggaaaaacagaatctacttttggtgttggtaaaaaggattggcaaattgatgttggtattagaacatttgctagcataaaatgaaatgcactgacaaaaatgactttttttcagcatgtaaatacgatagtaaaactttgacattttttccagcacagtttgcgagatgctggtaaaagttacttttactagcatagtagagaactgcactggcaaaagtgatatttcttgtagtaagtattttcatttaatttaga

SEQ ID NO: 329821 - DNA, 707 bp, Cannabis indica
gtttgggtttaaattatttaaaaaaaaaaagtttagttacaaaaaatttaaaactactaaaagtacctattttttaataaattttttggaaaaaatacaagtactattttattattttaaacaaaattaaaaaagtaccaatttgtaaattttttgcaaaatatagaatccaaaataataattatcctacatatatgactacatatatatacacatatccatatacatcactttcaactataataataagcttcaatatacataattataagagggataggggaatagaagaatgaatatgaaagtgaagcttaattaccctatacttcttcttcttcatattattattattattattttttattattgagtatatatatgtatatatttatttatatataaatatttatataagctcatgtttatgtcatcacttatctttctatatcattattacaaaaaattaaagatgtttatattctttgggcagttggcctctttcagcaaccaattatacaatttcaaatacataccaaccaaatcttatgaaatatactattcctataagtatatagtacaccctaaataagtgttgcagtattatttgtttcagcatttgaaaaaaaaaatgttaatttttttcttattaatcgtgtaatagtaaatttttaaaaaattatgaataatttacaataataaaaataaaa

SEQ ID NO: 329822 - DNA, 814 bp, Cannabis indica
ggcataaaggttgactaatagattgtaacagaaagtcatctttatttatattttcattaactctgtaagcataacaaaatttcttatttaaacaaaaaagaagtttatttatggaattgacatttggtagtttcttatcaaaaatacaaaaacactcattaattgtttaaatcataattacaccatacaatctgttatttttttgattgaagttattaatctcgtaatgatgtgcttattaatttttactattcttaacactaagttaaaatttcaacaaaaatgtaaacatcaaatcaacaaatataaataaatacctcttgaaacgtaacgaatttttactaaacgaatatcgaatcataaataagataatagaaaactcacaccttaattttccaaatcgtcgatcaaaatctgtgcaagaatgagataaactggtttgatttctactgatgagatttagagtgatattaaatgatttcaggttgattttgtgagattacgttttaatatggaaactaaattattattatatataattataaattaaataagtataaccgtatatgttaatatcttaacaaattttgaaatatctataactaactaattctaaataaataaatacctaaattagttacaatattattatttaatcaaattaaatattagatgaatattttaaagtaatttagggcattattctatatactgttttttttaattttttaatttttttttaaatttaccgtttctaaattgtatttctctggtagaatctatgtggattgctattacgattttttgttgcgat

SEQ ID NO: 329823 - DNA, 588 bp, Cannabis indica
taactaaattatatcagtagtactacatatacataatatcagtttttttttgtgataaatatcaattgtgagaaatctgataatcagtgattaatattataattcttaacacatgaataatattgaaattctcccagccatatgtatattctttttcttttgtataattgtttaattgtttcatttaatttttgtttgaatattaattgctggtgtaatattatcataattaataattgaaactagtatgtaaagtatataattaaagattgtagacttgtcttcctattgatataacagtactaattaactttaattattttgaagattattaataaaatcaaaaagcatacgtttacattaataaattaatgcctatatatataatacatataatatagagggtgtgcaattaaactcaaaaaattagacaaaaaaaaatcgtatcttaattttttgatctaattaatcccatttagttgtattttgtacttcaatcagtcgttgtatataatttcattgctatattgagttataacttgttgtctacatctattctatataaagtgtgcctatataactgaaatt

SEQ ID NO: 329824 - DNA, 914 bp, Cannabis indica
ttatgtgtgtttattaaatatatgtagtctatttatgttacttttgcatatatatatatatatataaaaaaaaaaattaaatcagtaacaaattacaaacccaaaaccgattatttgtgtggttagtacctattgggcaatattaatggctatattgtagtaatggagcattgtatgggacactaaagtaccaaccactattatgaggtgacgttctataattggttagtgatttttttatatattttttttttaaataaaacatgtgaaactcaatattaaattacaccaaacgttactacttggcgtgtacccaacactttcaatcataattggtgcttgcaaattaatatcagattttacagtaaatttaattttaatttaaaataaattatattttataatatattaaattactattaattttattttattatcctatcaaatagtgtaaaatgtgtcttactaattttgtgatagttagtagtcccatgatccgtaaggagaaatactgggtaagctgtgcaatcccacattgcttggggaaggtcaagtgtaaatattctaaaactgtgtaggtatgagagactacacaattgaagaggacttaaatagattgattgatactacctatatcaataaggtacatcttacttttcggtagcccatcataaaagaactccagggttaagcgtgcttgacttggggcaattttaggatgggtgacatcttgaaaagtttttccaagaagtgtgtgggtgaggacaaagcatactggaaatacttgtgttggtttctggggtcagtcgttattccacgaagcagccagagtgacatacttgtgtataagagtcatcattcaggacgtcggaccctgtaaggggagaaattgtgacagtcagtagtcccgtgat

SEQ ID NO: 329825 - DNA, 581 bp, Cannabis indica
catgtttcataaaataagcacaacaaaagtacttaatataaattaatacacaaaatgcatttaaaaaatgcaattatacaaatgaaaataattgtgcaaataaagaaaaaaattagaaaaagtaatacaatgaatagctaaaataacttacccaacaaaaaatagtaatattaaaattgacttaatcttataaaataaaattgattaatggtcacaataaattttaaaaagaaataaaattacataggtcaccaaaaaactgaatttaatgttgtagtaaaataatttgactttaacataaataaaagttgataaatataataggctaattaggaattttttcccccggactttgacatgtacaaaatcatgtcccctaactttttttggctactaataaaaattcccctgaactattgagattgttagatttaaagacttttgtctaatttcattcaattttactgtttcagtgattatttatgtactaaaccatgctccccagactttgatatccaccaaatcatgcccctcgaattttaatatatgctaaatcatgcaccctgaactttcatccatgt

SEQ ID NO: 329826 - DNA, 1095 bp, Cannabis indica
gaagtggtcgtacccctctctggtgatctgctaagagtaataatggtgttgcactatgggttctggagtagaagaacgatcactactcacctcccaatcttcaaagctcaaattataaagtctgtcactcgaagaggacggactagcacgaagacgaggttgatccacgtacagaagttgaagcaaatcctggtcgatttggtgtttgcttccccaaaactcacaaggggttcatctacaaaagacaacacacaagatgagtgtttggtcgggatattgaacaataaataggcaaatatgccgaccaggcgtaatcaacacattaaagggatgaaaaaatgtacaaaaacaagtcaaaacttagaagttcaaaatttttgggtttaggcttaaatttcctgaagatttgaatgaccaaggtgaaagacgaacaatgtgtgattaaaggcaaacgtcgtaaaccgtgaagctgtacagactattacaaagaaaatcacaaagttttgagcctagattttctatctatcttctacaataagttgagaacacatgtatgaaactcggaaattaaacacgcaaattaaaaagagaaaaagattgaaaaaacatactgtttgacgcctaagttcagtccacacaaagctgctcggatgcctttggtgggaatctcacaacaatctggaagtaaaaatcttttttgctctgagtttgtttggcagagaaatcattaaaagtaaagttatgaggaagactcaaccttatttataggcaatgtgttgaaaaaggtaatcatttcaaaatgcctttagacgcttcgattccctcccaaaagaaaatattgggaaatcaaatgtaatcaagtgtaaccgtcaaaacgtgatgagaaaaaccgggtttcaagacactaagtaagtcagagcaataattagtcgaaaactgaagagacgcctggtcagcctcacatcgaatcatccacagatgcacctaacacgtgtcacccattcaaagtgcaaaggcagctcggataaagtctacacgcaacttcgaaagtcccgtacagacttggagggaaaatgttatcccaattttggcact

SEQ ID NO: 329827 - DNA, 568 bp, Cannabis indica
gatgatagagagttgagtgctaatctggttgagctagtcacaaagaattttgacattattatcaaaatggatttcttttctaagtatgcacccaatattgattgcaaaagaaaaatggtaatctttcaacccaagggtgaggaaccattcactgttgtgggattagtttggggttcctgaatcccagtcatctcattagtgagagctagagacctattgcaagatggatgcatatgactcctagcaattatgctagatgctagcagacctaaaacaattgagcttaaagatatcaaagtagtgtgaaagatttcttggatgtattttctgaagaattacccagtttacacgtagtggaaattgatttagtattgaccagcaccaggagcagagctagttctaaagtaccttataggatggctccaacataacttaaggaactaaagttacaattttagggaatgttagacattgggtttacctgatccaatgtatcgccctgggaagttcctgttggaatttattttaccaggatcttagatagactcacaagtatgttgtttaaaca

SEQ ID NO: 329828 - DNA, 1010 bp, Cannabis indica
ttcaaatcccataatactcttcttttaattttttttttatatatttttgagggccccaaaatttaatttgtcttgggcccatatattttcagggccggccctgcttactgtgtacccacacgacatattgccctagccaagcaacatgtctcctagaacacactcatgggaaatgcatttatgtagttaggaatctctcaaattgctccaggcgacatgtcacctactagctagtgggcgacacgtcgactaggagctaagacagagttccgaaacattataaaataaaacaccgtcaaagtgctccatgcgacatattgtccataaaagctggttttttagcatttcattttataacgtttttggctcaaattttaatttactactacaaaaatctcatttcatgtccattaaagttggacatgataagtctttcccgttgtggtagttcttccaaataaaaaggtctccgcaaatgtcatttatggaaagttgttctctcgatgtttaccaatctcagaaggagtcttgaggaatgattgtcgagttcgaaagggagttcacaaatgactatcatgtccactctgggttcagtcttcaggatagttagccctcccctggaaaggagtttcatctggctaattatccctcctaaaatggtagatcatgatagtcgactacaacagactttataatatctggaagtgtcttcagcgagtacccttagtccatgagtctggaagctcgttcatgttcccgaagggcctggtacttaagctggagactttgctcaaagaggagtttgttaagttagttacatctaactaacttaacaacctcatttcttgtagccaccaactttaggatcttgatcataagcctataaataccacattcacttatcattttgaaggaagacaagtagtgcgaaattgagatgagattgagagtttgagaggaaaagattaagaggtagagagaggtgttgagaaaagagagagagagagaga

SEQ ID NO: 329829 - DNA, 770 bp, Cannabis indica
tagcgtttcgaatatatatatatgtagtgtgtcactttgtttctccagccgaattttgtttatatgaatgtttttgatttgcgtatccagtcaaaccatgagatagttacattttagttagtatttagaggttgcgagacttatcaataataatatccatctgtgtatatatatattattatatatttgtacggatgcaaatatatttgcaggtggttaaattaagcattattttattataaagaacttagatctatagctataattgttatgacgttgctggaactatacttatataaaaaatcacttaacataagctatatatatgctatttttcacacaagtgttttttgttaatgactatgaaacgctcccatatagttgtgtaagttcctaattaattaccgtgctgctccactctatatttttattcaagcttttcaaaagacgagtcgtgtgtcgtattatggccaatatgtgctgacgcgtcgcatattatggccaataagtctgttttcatgttttacttttttatatatttttctacaattattaaattttacgtatcttttaaatctttagttatatttatataatttttgaacaatatcttacaaataattacactacaacagatttattaattaccagcggaactagtaccggcggagccaaaccgccagtattaattggttattaccggcggaattggtcatccgctagtattgtttttttagaaaaatttaaaaaaaaattaataatttaaaaaa

SEQ ID NO: 329830 - DNA, 1061 bp, Cannabis indica
tgtttggtgattatataaatgtagagttgtaatgatgttataatataaatgtattataatatttttaaaactatatcaaagaaagacattgcaattgttaagaaatagcataatctgatctaagttataattaaatattctacaacctatcacactatattaaaaaaataatttattttttacatttttgttataagtgtgtgagtgtgtaatcattgggtggttagaatattcttctagggatttgtgaagaacaactataataatgtcattggctccttacctttttaataaatagtatattaattttcctataaataaagtgtttctaactcatagacgttgaaatgagttgagtattactaaaacctatatgtcataatttctaatttggtattagagctttaaaactactgccaatgacgatttaagaaaattctaatgataacaaaaacaatgcttttgctgtaagcacaaactgtaaagactcgatttgatcaagctaaaagaagaaatatatatataataaataataataatataatatatgtatatatataaaaaattaaattagacccttcttcccattgcgtctctctttctttctctttcttcaaaccataataaaagaaaacccacaaaatcccatcaccagcatgactccggcgacccatctccagtcactgtcaggccccacgcaccaaaccgatcaaaaccccgggtgtcggcgacctcgatcaacccccaagcggtgccactcctttcgccgccattaacccaagatcgccagtcaaagtttggaggctcaaactttgaacggattttttgaccacctccggtgtcagtttgacgagtcgtcttcaccactacactcaactcctcgaggagaacaacctacactaaactatttttcccaacttgctactttttctagtgacatttttgtagctctgtccctttctggcaactttccgccaatatcgtgtaccattttgttaaacggttggtatgggtgtgatctacatgccgatgtggtcgttttgatataaactatgttggaa

SEQ ID NO: 329831 - DNA, 827 bp, Cannabis indica
ctctcctccgctctctcgtggcaataaaaaggtaagcacaacattctcttatttattgtttaaatttctattagtcatgatttggtttgttgatcttgatctttgttgatcttgatctttgtgtgtgcaaaaaaaaaaaaaaatctgaagcttgcaatttgaagaaagcttcgaggatcgttaagtgaaaagcaagctgaagcttgtaaaagaaagtttcgaagaggatgaagacgagcacaacgacagtggatgaggatgaagcttgtaaaggttttggagcggctgcgatatatgcgagaagtagtctcgaggaggataaagatgacgatttttggaaatccactatagtgacggttcaaaatcgttgcttatagtatagatgatggttttaaaccgtggcctattgtatcgactatagctgatggttttaaaacgttgggagtactttttcctgacattttcctacattcgcctattctactcagtattcatgacgttcgtatagacgacagttttatagattgtctaaaattcttcactcaagggtgtaaaactatcaagaattccgagttttttaatagtgactttttattattttggagtatttatgaaaatatcctagtatataatcaatttttaatgtgtgtataaaggcctatgctaatagtgggcataaagttcaaatcaaaagcttgtaaaagaaagttttgatgaggatgaagacgagcacaacgacggtcgatgatgaggatgaagcttgtaaagattttggagcgtatatgcgagaagtggtttcgaggaggataagacgatgttagtttttt

SEQ ID NO: 329832 - DNA, 1013 bp, Cannabis indica
ctaaaatcatcacaaaacatcgctaaacttcacccctaaccttaaatttagtctatcattacaaatacatcatcaaatattgtaaaaaactaaaaaatcatataaaaatgcaaaaaatgagcgatgggtgaggatttcggggtggttgagctcgtgaagtttaaggctttgggtggagatggcgagacttcgagagagagagaccatgagagaagacgatagcaggggcttgtgattggggttctgggttcgacgacggaggttatggggttgagggttcaacactatatatatatatatatatatagagagagagagagagaagcggtttttaaatataaagatattttatttactaagccaaatttctctttaaataaatattacaaattctaatcattctaattatatgatgtataaattatcgttaaaaaattatataaaaacaattgaaactataataaaatatatataatttagtgatttactcattaatcgtaaataaaataatgaaaaagaagagccgatatctaagcctataaatgaaaacaggctgacctatatataaaaatggctaactgagtaaaacgtgaagtgaaaatatgagcttgtaaaccatgtctagcctaccctttgaaatgtcgacagcagccatattattacaagcttgacaagtgcgacactgtgttgatgatgtaaagtgtaaaccacataaccacagtacataatatgatcttattttagaaagaaagaaaaaaacgtttacacaaccacatatacatctcaagattttttttccgggtgtgtggtccatggttttgtttaacaattaacatacccttaggatacacagtacactttttcagatggaagaaacctttccacttttaccttaaaaatgccatacaaaacaaactaacatttttcttgtactgcactaaaagaaaagttggctcattgtattgaagcacatattacatcgaaaaacgacattccatatccctaaacgacat

SEQ ID NO: 329833 - DNA, 1128 bp, Cannabis indica
cattcacagcattatcatttttatcctctgaatatttttattttgtgaaatgttttaaattataaaaattattgcaaatatctcctttatttacacactgctcattttttaaaaacaatttacttatttacacattattattatgcaagtataattacagttcgagaacttatgacactatttaaaatctgatttattagtaatattagctcttcaagagtatataatttattatcaaactgctacaaatatcatcatcccattacatcgatagaattaatgtttaaagaaataattaagttaaatataactagaaaatgatatatattaatctacaatttctttttaacttaggaagaattttcacaataagaaatactaaaagagcaaactctataaatatcataattggaaataaaaaaatgttattattttttcttatatatgtcaacatcaattatatatgtaactatagggtatactatatatatatgatgattataaatgaaatttatacacatgtatactatattgatttatagctaggttagtcctagctagcaaaagtggtcagttaaatgtcaatttcattaataatatatatatatatatatatataataaaaagaagaattaaataaaactaaatttttaaaaaaagtacaaatatatatatgagtggagtagcataaactataatgggatattccaaagagattcactaccaattccatctctctctttcatcacttccacatcatatatctttaaccaaaaagttaattaattaattaattaaacatggttcactaatttaaatatatatttatttattaaatttaagattaaaaaggaaagaaaaaaattgtggtttttttagcataaatatataattaattatttaaattatcccatgcaacccctccactttttgaaaggttcaatctcattgaatggggacttaatttgtctattttgtcattgagatttctcaataataatagagatttttacactagatactaaatttagccttttttttacatttttattcccgttagtttttttaaacttttttatacttttatgtttttcatttttatatttaaaaaagttctttaattacaaa

SEQ ID NO: 329834 - DNA, 805 bp, Cannabis indica
tgtaaattattataattttaaaagaacttcttaaaaattcttttgagaaaaactacaaatcctaattattttctaaaaagattttcattttttagtcaaacactcctaaaatgactttttttaattctaaaagctaaataaaaatttataaaaactaagccaaacagtattagcgttagttccacattactaatgtatgaaaataaaatatcatatataagatgaatgaactactcatctcattgtcaattagttttgagatagaatcctatgaaccttatcaaattctaacatgatatcaaaactaaaaaaaaaaaacttctgtctcccctttaacctccattatttgggacctttcgacaaatatgtgtcaatctctcatttaacctccatttgagaatttttggccaacgtgccactttctagtattgggatctttgaccgtattttttaaaaaaaaagttctatttttttttttaaattttccttactagggtaaaaatataaaatagtagtctaaaatgcatattatagaaaaaatcccttaattttttgggattatttcacaaatacacaaaaataacaaaaatacaatttcacgaaattttaaacacttttacgatttttttaattttatttaaagaaaatatggtctttttatgttgttttcttgttagtttgttgttgatttttgttatctgtatgttattttttgttgttgttttgatattattttgatattacttttatatagttttcttattatttttatattgtttctatgaaaaatcgtaaaaatgtaaaa

SEQ ID NO: 329835 - DNA, 1531 bp, Cannabis indica
agacttctctcaaaacttcatctccaaggctcaagatgattgcactatgtgctttgctctctgtgtctttcttggtcttgtcataattgatgttgttcaagtaatctgcattcaaagcttcaaagatcccttgatgaacaagaagtacctttattttgattcttcacaaaccaaaattatttttaccattgaacttgtccacctcgaatcttgcagatgacaaagctgtgtttcttgatcttcaaagaacaggttcttgatttctttgatctccctcagctctgataccacttgtagtgaatcaatcacccttaagaactcgatcaagaaatcattacaacaatcaaaataacaacaatataagtaaacaatttggtcacaaactaatatgatgataaccaatattaatgaactaaaacagagtgaaaatgtaactaaaataattgataatagaccttgtattgatgttgacaattagtacatgagagacctaaaacaatggagaattattgagaaaaaattacaatgaaacttacattggggaaccaagatcaaatacacttggaccccttttataaccctcatttcactctctctaactatgttttttgatctcacaacattaattgaaatgaatggtacaaggtctatttatagtagggattagttaaagggtgttaattaactaacccgagtgctaactattaaaatagttagtgacacatcagcatatgtaaacttaaaatgactgaactaaacaccacacaattcatgtgtgggcatccgatccaatccaacctttttttcctcatccgatccaatcaaattagtaattggatttagaaaatcatcatctgatccaatccaattagacctcaaaatccaatccaatccaattactaattggattggatcggttttttaattggatatccaattatacacctaaattttaatttttactaaaaaatatgaaaaaaaaatgcgtaaaaactaagtatcactttctatttaagttgaatacttcatatacatactattcttacaagtgtaatatagctaaaaattttaaataattaaaataataacatttctaagtaataaaatagaacaaaatatcataaaaataaatacacaaaacaatcaagtattacaaatttaacatacaaaaaaatatataaataatttttcaatatatatataatgtaattggattggatcggtttttaattgaattttgagattgacatccaataaccgatccaatccaattagaatctaacttttagcatccaatccaatccaattgtaattggatatccaacttttagtaattggattggattggattggttcggttcaattgtttggatgatgcccacccctacatgtaaatatttttgaaaaaactctgtatctccctgtataacccatatgatctatttttgtagtatatctataaagaccgctgtagacgctaaaatctacaatgatcggaatgagcgtttgtgggcaccgacaacctgcggaa

SEQ ID NO: 329836 - DNA, 1284 bp, Cannabis indica
acttatgaccatataaaaataaactccattaactagtattttggtcattttacccagaaatcggatttgggccaggagttagagaatcttcaatgaagatacaaatgtaaaaaaatttactctaattatgagtgttcatcaaactgctcacacctacaagccgcccacaccacatcacaccgcataaaaattatggtttgaaaccatttgcggtgcggttgcgggatataagtaacaagatatatacacaatataagtactataaatgaaaaaacaaatatcaagtttggaatctatatatgatacatgagcacatttaaaagaacacataaaataatttaaaaattccacgataagattatccaaaaattaaagttatgccttagggtcggttaaattaatattgtataatttacaagatttgttcttgtctttattaattgcaactaaaataactcttattatctttacaaaataaagtaccgcttgtttagtcaagctatgtcccctagtgtcaaagacagggacataactttgtgagtgtgactcattatattagattccatgacttgacttagtaacaccaccttaaagatggatatcgcactaaaatacatcactttgtcctatcctcaaaagaaaatcagccttgacaatgtatggttcaacactttccttaggagaacaaaaataaagttgtctcgaggccctccccataccttcggtgttcgactaataatggagaccatagatttcataacagatgacaaccctctctcactattttaaaacgtgtttatcattattaagactatttcaaaaaaaaatagattttaatatttaaaattaaccacttgtaatacattaattaaattactatattataagtctgaaaataatctaattaattccatacacatagattttcaaaaaaataccatttttgaaaaacattagttaattctgtaactaacttttagagaaagtcaattagtgtgaattaccaagttaaactatttgactcaacctagtattttatgttattgatttctctaaatgcaatacacataaaatatataggacaatcctaaataataatgtttctaatatgagatgcatgattagccaatttaatagttctagcttgtttctctcatagtttgtgtttgttaatttttatatattctcaacactttattttatttttgtttaaaccaatttgtgagtaattagttttataattaatttccaattttcaatctgtggagacgatactcgatttat

SEQ ID NO: 329837 - DNA, 3412 bp, Cannabis indica
gtacacacacacacacatatatatatatatgaaactttaacaatgaatctacaaactcaaaattataaaatgataccttagtttccaataaatttagttgagcactaaaacttgaatataaatgatgttgatggtgatgccaaaataataaaggatatatatatatatttatatatgggagaataatgaaggttgtttatggtaatggcttcaacaaaatggatgaaagaattaataaaagaagacttgatggacgttaatagtggggtaaggtggtgaaaataacttgaggtttcgttgtttatatatgaatttggtttagatgttgacaagatgagagagtgatgtgattatggttatgtatgatggatagggtgataagtatgagggtttaagagatgacagcagttcacaatgaagagagagatttttgagtctaggtcttatgagtgttgagatgaatgaataattaaggttctatttataggcttcccatagcccaccccacttacctatatcatatcccttggctaagatttgaattttgaataatatgctaatagtcattttaaatcctaactgtattgaaaatcttcacaaagtcagtcgaagtgataataaagttccccacttcccatgcaaccgcataataccaatttcaaatttgaattcatttactgtctaataatccttcacctatcttactctaccatgaccaagtctactattttattaatcgtccaccaccacgtgtacaatatttaaatataagctaagattcctttaatccttttccaaaccaagtgaatgttatgctagaaattgatgttctccttatttattaaagtgagcatatctctctactgctaccacgtggtgttcacttaaacttaagacttaaaattctaaactttgaatgcatgttctgctctatatgcttaatcttaataagtctaattattcttcttgcatctgtcaaaatattaaactaagttcaaacttgatacctcctacaataactacctctatatatttatcttaaataatatcattctatcctatatatcaaaatgaacatatcacgccttctatttaattcctactatactacaaatcatatcatatatttgttcatgtaacttaattcccatatattattcaagtgtccattacttgaatatataactaatagattactatattttaaaataaatatttgtccacgattggtatttatgtagcaagtcattattcaccttgaccacttaattatcatgccatataatgcggttcaaacaaataatatttgtttaaagtctcattcaaaatggaatacacctaaggcccataatgatctataaaattctaaaaaatgacataatttcttagaacttagtaaaatactatttaatgagaaaaattctaagcaatccactatctccacaacgagagtactaaaactatgtactatagaataacagtcaatattttggttaagacaccgacaaagcctaaggaagtataagccctgacaggaagaatggctgcacttaacagattcatttcgaactcaactgataagtatgtgccattcttcaacatattacgaggcaacaaaaagtttgagtggacaaaagagtgcgaagaggcctttcagaacataaaaaggcatctagcaacgcctcctgttttggcaaaaccaataattagagagacgctgtttctctatttagccatctcggaagatgcgattagtgcagctatagtgcgagaagagggcaagcaccaacaacctatttactatgtaagtaaaaggttactagggggagaatccagatatctccctctagaaaaccttgcgttatgcctaatccatgcgtctcgtaaactacgaccctacttttaggctcatcccataaaagtgttaaccgatttgcccttgagacaagttttatcaaaaccagatacttctgaaagattgataaaatggtcgattgaactggggcagttcgacataacataccatcctcgaacattcatcaagggccaagctttagctgacttcttgatagaaggtataactccagaagaaattacacctgattagcaagacgcagaatactggaagttatacgtggatggtgcatccatcgaacagggttcgggtgcaggggtaatattaatgtctccagaaggctttaagtttcactatgctctgaaattccaatttgacgcatccaataacgaggctgaatatgaagccttgatcgctggcttaaagatagcagaggcgttgagtttccacttgtcgatgccttagcaaaactggcttcgcagaatgacttggatgaattaaactttgttccggtagagatgcttagcgagccaagtataagtgaaactgaagacgtcaagatgatagatagctctccaacatggatgacgcctattataaattattaactcgacggacaacttgcaaatgacaaaaatgaggcgcaaaaactattgttttcagtgcctcgctacacaatatagaagagggtattcaatgcccctacttcggtgtgttctcctcgcaaatgaaatcatcagagaaatttatgaaggcttctgtggggatcatgcgggctggcaaagtctgtctaaaaaaatcattagaggagaatattactggccaacgatcaataaggacacacacgagtttgtcaagaaatgtgataagtgttagaggtttttacatatacctcgcgtaccgccaacagaagttagaatgatgacctcgccctacccatttactatatgggggatcgacctaattggggtattacccactaggcgaggaggagctaagtttgcggtagtagtagtcgacttcttcactaaatggacggaggccgagcccctcgtctccataacctgcaagaaagtccttgactttgtcgtcaagaaccttatctgttggtttggaattctcatgaagatagtatctgataatggaacccaatttgatggcgacttgttcactgaattttgcgagaggaataaaattatcaaaagcttctcgtcagtatccaggcctcaggcaaatagacaagtggaaatcgttaataaaaccttaaaggatactatcaagaagaagctagaccctgtgaaaggcacatgggttgacgagctacctcaggtactctgggtccacatgattaccgagaagacagctacaggacacagtcctttctcactagcatttggcttagaagcaatactgcctgttgaatagaacatatcggcttatagaggagagtttcataattaagaagaaaactagaaacttggaaaattttccttggatctacttgaggaaacaaactgagtagcaaatcaccaacgcagcataccagcaccgagttac

SEQ ID NO: 329838 - DNA, 506 bp, Cannabis indica
gacgtatatagatcacgaaaaatattgtgtgacgagatcagatcagttgttactaaatattcactttatagcttgtactagttttagtcattaatataaatattagtggatatatgtatagatatagatatatatatagtagtactgtatatatatatgatatgatatatggggttgtaaaaggagttaatcatttattagatctgacctttggtggtgtttaattaattaatatccatatatatatatattgtgttaattacatagacaaagacgtcattagccactataaccaaccatgacctaataatcctatcttcttttcgatccacatgcaatgcaaccatgtttttcctgatcaacccttcttaattaattaattaattgatgataattagtcttagggagaagattttgtcgagggtttttattttgaatttaaattaagggggacgttacttgggttttttttatagtattaaatatatataattaaattaaaaaaa

SEQ ID NO: 329839 - DNA, 1109 bp, Cannabis indica
taaaatatttccaacagtgtccaacccagattacctcgaaagacatcaagtacctttcgacactctttgttctctacgtggagcttggctggccaaaaccctcaccttacgaggtggggtattactttgagctaaaattcgttcctaagtaaggtaggtttggatatttttactttagccagttaggctatcagtggctaggaagcacaaatgacaaggctgtgtcaaagattgggagatactcccagagttatttccttgcttgggatgttaggtaagtcggtcaccacttttagagggtgttaacattccttttctcaatccctactctctagttaagggattgagccaatcatatctcttctctgtctggggaaaggtgtgacatacgcaggctggcctatgaggaaaattttcaaaggtatggcctatatcatcctgtgcatagtactaagggtacaaaaggccctcccaaaggacctgacgacactcatatggcagaggaggctagtcaaggggaaaggcctgcgcctaagcggaaaaggggtgagtctgatgacaacatccccttagctaggatttccaaaactgtagccaggagggaatgagccttcgacaatgatttgtatgaggaggcactgctgataatgcccccgtgttgttcaggtccggaggataggactccgctaggcctgcccaaccactgcctgtgtcaaaagaaaagggcatggtagctgtctctgaagctagcttggaggattcttctattagggtttatgccctgaaaatcctgtgaagatatttttgattattaaataaagagtaaaaatttgatatatgtgtgaatgttataattgaataatttatattaaatattagaaaatttcttatcatatatgaggttgtggcttgtagctgtacatagaactaagatcacttagctatgattaaattaactgatgcccattctacggtgcaagtaatctcaattcagattattgatgtagtgagacatctaagtgaaggtgctgtatataatagagattatatatgacaaggatcgatatgaataaagttgtctttattaacatgtcatttatcataaagac

SEQ ID NO: 329840 - DNA, 888 bp, Cannabis indica
attaggtgtaccaatataaatatatgccatgtgtacaagagtgtacacataagcagcccatagtgacagttaactgaataacactttaaatttgttactagtttaataatttagaagttttaccgtcaaaatttgagcttaaaagattaaatgcaagtgaaacgatagttgagatggttttgctctaaaaaaactctaagaaaaacttcaaattaacttgcgattactcatcttatttgcaattgtaattaagctttcaatgttggaaaaattctacccctgaaggaaatgtattgatgcacatttatttatttattttgtaaaattctaatatgattcacgtacagcttgttatatgtatgattttttttactttatatgcgtataaattagattgtttgaatactatttttttctatattgtcaatatttctgttatcacttctttgggtctacttttggatgatatttttggttttgtaataggctcaaagttattagttttgttcattgtaagagatcttgtaatgatgttactcatatataccttggtcaaacttacgttaacggcaaaaagtagaatgatttggtgaccagagaatcctaattgtatctaggatatgttaatagcatatactatttttgaataaattctcattcccactattttcgagtacttattgctcgtgatgtttagtggttgagacgctttccaaaaaaaaaaagaaatatagagaccaaaagaaaaacatctagattttttctaagcctgcttgaatatatagagaggaatacattaatttttatcaatccataaaaaaaagctacctttgtaaaagaaaaaattcaaaatccaacctaaaattgataactccacaaatttccatt

SEQ ID NO: 329841 - DNA, 2496 bp, Cannabis indica
cagatatcgaggaaatccttgaataccctattcatcaaatttataaaagctgcaggtgcgttggttagtccaaaagacataactagaaattcatagtgcccgtacctagtgcagaaagcaatatttggaatgttctcctctcggattctcaactgatgatagcccaatcggagatcaatcgttgagaagactgtctttccgtgaagctaattgaaaagatcatcgatcttaggtaaaggatacttgttcttgacagtcagtttatttaattctcgatagttaatacacatgcgtaaagatccgtctttcctttcaacaaacaatacgggagcttcccatggttacacactaggccgagaaaaccctaggtcaagcaacacctgaagctaaattttcaattcttttaagttttgccagagccattctgtaagatgccttagaaactggttctactccagatgctagattgataataaaatttatttctctctgcggtggtaaacccagaagttcatcagaaaaacatatagaaattcctaaaccaccctaatatcttctggcccatctgtctcaggtcgtgtggtatcctatgccactgtcagaaatcctaaacatccgccttgtaataaatctctagctgttaatactgaaattattagaatttgggatccctgaaatgatcccacaaaaacgaacggttcctcgccctcgggttggaagatcaccatcttccgtttacaattaatactagctgagtacttggataagaaatcgattccaagtataatatcacaatctgctaaacccaatcatatcaagtaagcactcaacttcctatcctcaactctgattggcatagacctaatccaccttttggagataattgattctctgccaggcagtagggtttcaaaccatttatcataactatcatgcagtctatccaatttactaaaaatcttggctggcacataagaatgagtggccccagagtcaaacaatacagagaagtaagagttgttgactgagaggtgacctgtaacagctgaggggctagcttctgcatcagctagagttaaagcaaacacccttgccgaatcaggttttgcagctatcttctgttcctctttcttaagctacgggcaatctcttttgtaatgtcctggcaacccacactggaaacatccttgtcctctacactcacctagatgatgctttttacaactgggacactcctggtaagtgtatcaggtttcaaaccaccccgacggttgcctcgacccttgttcccccagaacctcttatgctgacctgagccaccaggtgtagttggtacctttcttttctgatcagtagtcgagccactaccacccctaccataaccagaggtaggaggagtaggggccccactgacaacctgagtcattcaagactccttagtgcactccactgcgccctcagctcgcagtgccttccccaccatgtcagcatatgtggtgttgtcttcagtagtaatcataagccacgtcttatctttggatttaatccatccaggtacttttctttcttgctaaaatcgattggcacaatttccgaggccaacctagccaaccgatcaaatggagttgtgtattcaataacactcatattctccttcttggtcaactgggtaaattcttttctttttacatttctgagtgcttcattgtagtactttggattaaacaactcatggaacttttgctaggtcatagtagtaacatcacaatttagggacaccatgtcccaccaaaccagggcatcctcttgaaactggaatgtggcacaggccactttgtcattgtcgatgatgcccatgtaattcaaaattcttgtaataacctctagccactactcgactttcatcacatcgaaacctcccagaaagaatggaggtgcccgcttgcagaacctttcctacagtggttccattcggttcactacagtaatcgaccctccccacacagcaggggcatgagccacctgcacttctgaagcaggcattacaagagcactttgttgcctcaggcgtctaatttctttgtcttgtttgttgattttggtttgcattgctgcaacaagttttttcccattcctgggcagcatgtggcaggttaacctctccccgatggcgtaccctaattcttgagcctctacctcggccacgtctatccaggggaaactaaactccctgaccgccactgtatctgaccttacctcctggcttcttgcattttgcctgacattcattctaatagaacagcccgcaaaaccacgagctagcctggtcagatcacggtcatgaataatttactgatttctacttattttggaaattaaaacatgcgcctattcaactattaggctattaacatgcttcttatcaagcttttcttatagcatactatgaaaataaattactaaagtaataaaggcttactaaatcgtgagtcgagc

SEQ ID NO: 329842 - DNA, 661 bp, Cannabis indica
ttgttctcctttgtgttgtttggtattaggtataaagtgagaatgatggagagagaatcaaagtcacaatattttgggctttttcttgtttttttttttttttttttgaaaattactggaacgagttcattgcaaaatataacttggaatcacaaaaagggatccctccctacaaaaacagccattgcaatctgcattgatcttggcccatctagccacagcatcacacgctgagttgtctttacgcttaacataaaaaaaaatacagatattaaagctattacacaaatttaaaacctccaaagccaacggcttaagcttccacagaggaggacactggcgagcctccaaagcgctgattagcacatttgcatccgaagctcccacaaaggactgaatacccttctgaactgccaattccatagcccatttgatagggctttttcttgttaaattacatatatacctttctcaaagatacatataaatataataatacaaacaaattataaaatatgttgatttttttttctctttcaatgaattattcttatactatattgaggttatatagatgctagtttatatctcaatatttttttccatcatatttaaatattaatgtatagtatatttataaggtattatttagtataattca

SEQ ID NO: 329843 - DNA, 697 bp, Cannabis indica
attattctttttattatataaatatagattataatattttgtcatttataaattattttctttatggtcagtttaatttttttaaataatacctgggatcgatcgatcgatatccataatgatctggaagtccactaaatttatgtactgagatcagacaattatgttaaataatatctatatacaatatatatatatttatactataataatatacattatacatagttatatatactaatatttttcaataaaataattattaatatatacacagacataaacctaatatctgatgccactaataatagcatgttctatttattgatcatgatttgtatttttaaaaaatttcatttcgtttactactcaacatttatgataatcgatttatttatcaatatttaaaattaaaattataattgatttttttatttggttgattatatgttcatttatcaagtatagttaagtctcttgatattttttttttgtaaataaatcagtgagtatgagatttttttattattgtggattatttaattagttaataattaattgatcaatattaattaacattaagctaaataattaggactcttaataattagctagaatacatgaccacacgcctgaggttctttctttcttaccttctttctttttaatttttctaacttgtatattttttatttta

SEQ ID NO: 329844 - DNA, 662 bp, Cannabis indica
ctttaatatatgtcttttagcttacattgcattctttttttttttttgtttttttttaatccaaaaataatattgtttaaggattttaatgttgaaaacctattaatattgtatataagcgtaggcttaagtggatttaaagttagaaaaataattatttgaatttagggttgtatgagttttgaggcttggcggtggcagcgttaaacggtagcttcgattgaaggtaaaaatatgattttttttttttaaaaaaaataaatacctatatctttggttatttgaaataaccaaagacatagggttctatatttttgggacctacgtcatcgcctaaagagtcttcaattctagttttttttttttctaactgaagatagaccagtgcaaaaagcaaagataaatcgagtttttctagttgtgactagggagttatgttgaaccattatatttctcgtatcattgtttacattattgtttttatctcttgttttacttatttattattcattctttgtttgaatacttcttttattgtgattattgtgtgagtgtttgtgttcttattgagtactcgcagtttttgtgtgagtgtttggtattatttatttatttattttttcaaatttacagtttgcgttgctccggtagtttttatgtgg

SEQ ID NO: 329845 - DNA, 527 bp, Cannabis indica
tattattattattattttggtttcggtgaaaataattaaaatgaaacactccaattatgagtggactgattttttatcatgctagagaaaaatggaatttttcttttctttttgttttcttaaaggattttttatttaaagaaaataattaatttggtagtacaaaaaaggacaaaaggccaataaaagagatacccgtgtctaggtaaagcgcgttcgagttcattagtgcaaatataatcaatttgttgccattatggggagcaaattatgctctgttttatctttatttcatttccacttattaatctaataatctatacaccacttttgtcaattttttgttctctaaaacattagtggtacttaagactctaataattctataattaaatattaaatctcatacaattattttatagtactaaagtgtcttgtacctttataacatgacgttttataattagttaccgatttttataatttttattaaatttaaataagtaggagctaatattaaattgtac

SEQ ID NO: 329846 - DNA, 3744 bp, Cannabis indica
aaaatacagaaattagtgctaattgccttttctaatccaaatcactaaagcgatcattacaagttttgactttgcataaatagttctggttctctcgataaatttttgatgggttatttatataaatgtggggaaaaaagttagtttgtatatttatgggtatgaaatttaatgcaaaaaatatagttgctgacagagattttcggtaactacttaatctttcttaaatataaattacaaatgtgtttaagaagggtatttttaacgaggtggtggcattaatgatctttaattcacgaataattgatattatatgttgaataaggttacaacaatagtgtctttgattattgtaggggtattttggtaaatttttctctcttaattttctaaaattagatcccttttaaagtgggtttattcccatatttatagcagaagtagatgggcttttggagggatctaggctcgttccctcttccagctttcatgagtacgtacactttccttaacaaggttacacttcctcttcgtgggcttgtcgactaggctcaaaataggtatttggtgagacaagactgtacctgtctgtgacggatgggactgtaaagatgtgtgtcgtcagtcggtgttagagtttatgccataaaaataagtaattaatggataatatattataaaaaaaatttaaaatacaagtacaagataaatgaatatgttaattatagaaatataattaataaatatataaaaatttcatattcatatagagaaggtatgatcttgtaaggaagtataagaaaattaagatcatactatatgaataaaataagtaggtaatgtattaaagtatgaaacctttgaaatagaaataccaagtatggtttactaagcacgatactttagtggcatgtggatagatattaagtaaatataccgtgtataatttgatttgacaggatcgatatgaactaactgttggattttatgccttaaataaaaccacaattcaatgtaatcttatttaagtatcaataaaagatcaactatcattttaattattgtctattgcttggttcacatgtttactttatgattatttatttaatatataaattctgataaatcacgaacatatagttattcacaattatagtgttgtcactacaacaaaaaataattatgattatatgttttaaactatttaagtcccataatttatcagtgcactgaatttacactgatatgataatcaacgatagggtttacttacactttgctaagtaaatttttttttcaaggcattagcaaagtaaataaggatcagatgtataggttttacatcgaactagaccaatattgatactagaaaagatatcataaacttaccgttatattctttctagtacaatgtaacttagttgatcatagatcaactgatctcaatcttgagatgattaagatttaagctgattgtatcattagagttctttgatttgtttgttaccaacttatccgtcggactagctcatacttatatattgggaattcggtagttcaattgagtggaactattaatcataaatatggatatctatagcttctacacttatttagaagtgaaacaataatctcctttgagcttggcttaatgagatcaaatggtgggccatgtttacataaaaacactagcccataaatataatgaaacatcttcatgcaaagggttcgtaattcatttcttacaagttaaggctgaaaatagggttcataaacagtgcaaaaatacttgtgtaatactcgaaggcctttctagccaaataatattgaatcgtggactagagttcattaatactcaaaccacataaaaatccttgtcttaatttatatatcttaatcattttctttagatttattttattttatatcagtttttgaaaaactcggtaaacgattagcactttctctagaaacttatatcgataatgcactagaaagattcttaatggagaattctaaaaaagaacagttatcgtccaaacatagaatttttgtatgaaaagatcaatgtccaaagactttgcaaaagatggaggacatgagaaagtactcttctgcataagtagttggaaacttaatgtatgaaatgttgtgtacaaggcttgacatatgctatgatgtagggattgttagtcgttatgaatcaaatccaggtttggaacactagatagctgtaaagcacattgaagaatgagagatctcatgcttgcgtatttcacaggagagttgaatcctgttggatatactaattctaattttcaatcaaaaaagatagttgaaagtcgacatcaaggatcagtattcactcttgatggtagagctgtagtctagagaagcattaagcaaaccagtattgcagattcaaccatggaagctgaacatagcagcttgtgaaacaactaagaaagcagtttggttgaaaaatttgtacactgatctggaagtaattccagaagtagaaaaaccactagttctctaatatgataatagtggagcggtggccaactccaaggaaccaagaagccacaagagaggcaagtatatcaagaggaagtaccatctactaagagatataatagaaagaggtgatgtgatggtcttgaagattgtgtcagagcataacctgatagatccattcataaagacactactagcaaaatcttttatgatcatgtaatgaatatggcattaagggagatgcccaatttactttgatggaaagtagaaaattgttagtgtttatgccttgaaaagcttgtaaaggcattttgattatagatagtagaaattttttgatgtatacttgaattttaaagttattaatattttatatttcatattcatatataaatatatataaaaaaatccttattcatatatgatgtgtaaattgtacggagaattatgatcacttaaaatgaataaaatagtcaacaacatagtaaagttatagaatttttaattaatgattaataaacatggcaaaaaggtccatttattcggatcgggtcggagttctgatccgacggatcacttatctgaaacattcaaatacttattggaacttggatctgattcgacctgccccgcctatttttttctggatctaaatagattcgcccgcctatttttttttggatctgatctgacccgtactgcctattttttcaatatatttaactataaaaaaagataatttgagatctgagtctctatctcgactcgatctcaaaaacttcctaaagccagagcccgcagcaacccatcccccaaaccaagtctttaatcaataaccaaccgtaaatgtcaattctcttttcctttgataatgttatctttagtgtcacatcaccagatgttattctacttgattattattaatgtttatcattaattgaataagcaaacaaatgtaattaatataaataattaaaacattataaatccttcgaagcatattcttatacatataaatatatatacatattcttatacatgtgcactcttaataggtattacccatgaatgggtaaacttaaaaaattttgagtttttatgcttgatttttctatctaattaaaaaaatctttcatttttatatcatatgggctgagattgttctatcgctaaaaaaaaaattaaaaaaaaagttttttaagcaagaaaaataagaaaagaaaagtt

SEQ ID NO: 329847 - DNA, 1446 bp, Cannabis indica
atccaaagatggatataggtactatattcattttttagatgactttagtagatatacatggatctttcctctcactctcaagtctcaagcctatccaacctttttacagtttaaaattcttgctgaaaaacaatttaatttacctcttaaaagtattcaatctgactggggaggtgagtataggtctttggaaaagttcttgcttcaacatggtatccattttaagcacccttgtcctcatgaccatgctcaaaatggtcgtgctgaacggaaacatcgccatatcactgaaacggggttaactctattggctcaagctggacttgacttgtcctattggtggcatgcttttagcactgccacatatgtcattaacagaatgccaactgctgttataggagatatctctccacttgagtgcttgctacataaaacaccaaattatgagtttctaaagcctttcggctgtgcatgctttccatacttacgaccctacaatgcgcacaagttgacattcagatctgaaaaatgcatcttccttgggtattctcttcatcacaaaggatatctttgtgaaaacaaggatggacgggtctatgttacaagaaatgttgaatttcatgaagatgattttcctggctcctcatgtccagcaactcccaggtatcatctatccctaccctttctattcctactgctacatttactacaccagtattacctactaatactacacctccttttactgaggtacaacctgtccaagatcctacagcagttggtacacctactactgatatacctgccatttcagcaaccatttccacaccagcagctactgatggttcccatatgcctactgcagccttctctcaaccacatcctggccataataccactacaaatctccccatcccaacatctaatccctcaattcagccttcccacaacactcattcaatgcaaacccgatccaaatccggcatacacaaacctaaagcctacactgctacttccctaccccttacccgagtctctcttaccaaaagaacccacttccctcaaacaggcactagtagatcccaagtggtatgcatccatgcaaacagaaaacacagccctcatcaagaataacacatggaaacttgtcccctaccacccttccatgacacttaatagggaataaatgggttcataggatcaagctcaaggctgatggttcattagacaaatacaagtcgaggttggttgccaaaggctattctcaaactcccggcattgacttcaaagagacattcagtcccgttagttaaaccagccacagtgcgaattttactcacccttgctgtctctttcagttggccgactactcaacttgatgtatctaatcgcattcctcaatggtactcttgaagagctgtctacatgcctcaacccccaggtttt

SEQ ID NO: 329848 - DNA, 826 bp, Cannabis indica
aataagtttctcttttcttaacctactatacattaattatttttatttattaaaaacacaaatatgaaagaataaaaaataactacgtgttctaaccataacaatttaatcaaattcaagcatttcgattacttttcttaattatttaaacgaaatgattctgatttttctattaatttagtaaacaacataataaaatattgttttcaattattttataatttaaactgtttattgttgtgattttaattaaagttaataaactttgtatccttataaatactttaaattattaattatagtatttgtaaaaaagaaatcagttacagtggtataaataaaaaagaaaaagtctaaaaaatttgataaggtctattttttcaaaaatgtttttttaaaagaagtttatctccacctaactactaattaaaccctcacctactactctcttgtttttatttacttatattatatcaacacaacaaaattaactagtcttacttgccgtcttctgctcagctcagcacagctcctttccaattatcctttatttgaccaataatataatacaaaaaattaaaaaaataatacaataaactagtatattaaaatctgtatcaactgctttttaacactttgtttatcaactaataagaatgtgcatgttcttcccattaattatgttatttgtgtttagtctataccaaaaatatattatggccaaatgtttttttcttctaaattattgacttctttcactacttagtctgtttcttcaatatttttgccttgtaaatatactctggaactggaagagttctaccta

SEQ ID NO: 329849 - DNA, 449 bp, Cannabis indica
atatgatcatttatattgttcaagaaaaatgtatatatgatttatattgttttgtttgtcttagaatatgaattattattcgtgaaaacatatgatatatgcatgttctaacatgtctgtacttcatatagtactaaccctttaaagttgaaacagtagtaatactactatatataacttaggcaatatctcacatgacaaagatgcatgcatctcttctctgatgtctttcccagatcgatcatcatcatactactatatatatactactatatatatgtgttgttatttatatatatatgcttaattttgaatatgacgaatacacacttccatgtggattatcttttactatactttttgcatatattccctcactttttttttttgtatagctctattatatgtaggctaaattttgatgacaaatacacatttccatgtggatt

SEQ ID NO: 329850 - DNA, 596 bp, Cannabis indica
attgttgaagaataatattgctgacgaaattgagagatcaaatccaaaccaaaccaaatcccactcttctataggattaataatatatatgaatatataattgtatgtaatgggccacaaagttgaaaactcttatataattaattagtatttgatatgaatctatcattaattaacttcaaatttgtgtacgtctcatacacttattagtttatttcatcatcatcatacactaaccctagatatatatatataataggttaagtaaatttccatgaagttaactcatagctcaagcttggccacaattttagttttttatattatttttctagaatatatatgttataattatcaaaggtaattctttcccaaagttgacgacataggtcatttgaaagtcaaagtagtttgtacttaaggtctctaatcaccttcaatttaattatatatttatataagagaaatatttttactataaaaaatcttactttcagttacaaaaatttatgataataaaaataaaaaagttgtaaccattcctatgttgtgactaaaaggtctgtgactaaatgtattagtcacaaaaatcacaa

SEQ ID NO: 329851 - DNA, 1484 bp, Cannabis indica
aaataatttccaacaatatcatcctctctaagcttggtgtagtggtaagtttatctctcacttattaagaataggagttgaagttccatttctcgcacttttattttaattttttgagttttgacggttaaacccttccaattattattttacttgcacttactctttcaatctcaaattttagtggtaaaaccctccaaactattgagctgttaataaatttaagctgtcatctatttaccatagttaactgttaatatggatagcttatgtatacactcttatacacgtgacacgtttatattggtatacataatattattatttaaaaattaattttaaaactaaaaaaagaattaatgttaaaaaatcaacaaataaatatttttttttccttttattctttcttccctgactctttcttcccttccaatgctctctccctccccctcactctcactaaagcttttcctttgaggaagttttaatgtagagaagaaaatgttcaaacaaaattcacaaaaccctaaaccctcaacgagattctctctctctctctctgtctctctctcttacttatctctttgtacctccttctctctccctcctactctcattttcttgaccaacgatgtcctctgtaagcatctaccccatgaactaccacaagttatcgtgcacctttaatcccatcacaaccaatgggagtcgacgatcccctaagccctaaaccttagatctcaatctctctctttactgatttgttaaatcttcaggtgttggaatttttactatacagagcttgcgggtttctttcagatataagatttttttaatattctttcttctggtttttggtttattctaaagatttgattttaatcttttatttgagatttggtttttgtttgacgattcttaactaggtagtgattcgtatgatgtctagatttctatttgaagaagatgaatgagtaaaaataaaatttgaaaaaagaaaaaaaaagagaggaagacacaatcagagaaagaaaaattaaaaaaaaatcaaaatgaattttactaagtaaaaattgtagcataagttctcaaaaagtttactttgatgcagataagtccccaacctcaaaaaattacggtaatagtccccaaactcgagattcttgtaagtccattggtcctcattttaacaaattttttagttgctcccaaaagttctaggtattgatatgaaattgtagcataagtctccaaaaagtttactttgatgcagataagtctccaatctaaaaaaactatagtaatagtctttaagctcgagattctcgctagtacataggtatctaatttaattgttccgtttgttactcccaaaaatatcatgtgttaatgttcaattggtcaaaatcgtaatttcaattaaaaataatttaaaataaataaataaattattttaaaaactaaaaaggaaaaaaaatcaaaaa

SEQ ID NO: 329852 - DNA, 501 bp, Cannabis indica
tagttgtccaaatagttgatcacgtatgtagcctagtatgatccatctctactagtgctaccatggaggactttgtttcgctccatccaaatcacccacagaataaaaattatttgttctatctctgccttagtttgcactgttgagagatgaaatatataatcactattgcgtaattggtgagctttaccataatccatatgaaaattaaattgtttccaaacagtcttggcatgcttacaacagaatagagcgtgcctaatcaatttccaagcatgtgcacaccttgaacaagtagctgaatcaattaccgtcttcttgtgtaaacttgtcgccactggaaaggtaccttggctgactttccatgcaaaagttttaatctttgaaggcaaatttaggttccaaaagaatttccactagtctttgtgagaagcgcatggtttttaatcgttagtttcttccaaattagtagccaagtgaaaccctgactttactgtgtac

SEQ ID NO: 329853 - DNA, 732 bp, Cannabis indica
atgaattataagttcaaggatctcaacatagtgtatatagattaaatctagactaatgaataaagagacaatacctcttgtagtctatcagtggtttctcgctatctttctgtattattatcgaacatccaatccaataactttgttattgctgaagagtttcacactacaatcttcaaaactaacctctacattcgggaatagagtggactattagattatataaaataagtataattatccattcacattatattctcaactcatgagatattgtgatgaaatagggttgatcacaaaacttataccacacttcaatgagtgtggcgtgtgaaattgagcatagagagagagagtgaaaaatcaatcatattttctctcaaatctgacacttgtttttctctacttgttaattgccttcttatcgttagtttataatgatatatatcttatatataattttataaacaaatattttaattaatcttttaaaataaaggaaaacatctaatttgtttcaaatttataattcaaatttaaatatctttatagattaaaagtgtctatctaacggtatttcttggtttaacagaatatactttacaaataaaaggatattctgttaaatttaaccccaaaagcttttaacgccgttaactttaactttcatttttcgtttaatcgttttctcactctcaattccaatcatagaatctcttcaatcaccagacc

SEQ ID NO: 329854 - DNA, 1224 bp, Cannabis indica
agctagtaaaaattaaatttaatattgttaatatgtaaatagtgattgtttaaaattattgaaccttttaaaaaaatttaaggtgtgtaatatagtattaagtgtataaagttatatacaaaaattaacaattggagtaattaatagtccatgtatcatatatataaatgctattaagttaatactcaaaaatctttacttttaataacaataaaatttgtgattaaaactaaaaaagttgtgactaattataaattaatattattatattgtgacttaaggtttgtggctaaatatattagtcacaaaaatcattatttgttgtgactaaatatgtttttagtcacactacttattgtgattaaaattaaattagtgacaagttgtatctataaactatgctttagtgacaagtaactttttgctgtgactaaaagtcacatttaatcacaaaaaaaaatatgttgtgactaaaaaattatcattaaatgtaactattttttgtagtgtaatattacgtgcaatgtatgtaacttagttatatttttaatttctatttttgttatgtatatttttacttatataattagtttttttatgttatacaataaataatatcattttttattaaaaaaattttaatttaagtattatttatgtataaaaaatataataatatttaaaatttattgttaattataattttagttcaaccattatatatttaataatataatatatttcatttatttagaaatacatgcacttctttattattcttttttttttaataataatagaagaatatttttttaaaatttaaattgcaatgttaaaaaattactctatgttatataagcacattttatacaagatgaaagatgagaagagtatgtgtagttgatttaaatttgaattgtaatgtttttttttaaaaaaaaaaatactttttgttatataacataaatataaatataataataaatataaccattgctattagtgaccttaattaaggcacccaatataataccacttattacgttaacagggccggtccaagcattttgggagccttttgcaaaattttaaaatttggctatttttttttttaaaaaaaaaaaccgttagttcattaaatacaattctattactagcattttttttaagattacgttaataaatttttaattataaattttttatttatgtatatataatagg

SEQ ID NO: 329855 - DNA, 718 bp, Cannabis indica
acaaattaataaataaaatacatagtcactataatttacttatatttacaaaaaacgtaaaaaaaaaaaaacctaagaaaaagtcaacttaattgaaccaaaagaaaaaaaaggaacaacaaagaatctgaggtcccatggctcctttctttggctattagtcaagtttaccttagcctctcttttaacccacgagttgtttattaaaaaaataattaaatattttttaatttttattttattttttgtatactaattaagattttagtttttttttgtctaaatttattaaaggaagcttgatgtgaattaaaatttaggggacaagatttaatatatatcaaaattcaggaggcacgatataatgcattgttaatgattaaattagtaaaattaaatgaaattagactgaagtctttgaatttaagttttgaggcatgatttgattcatgtgaaattttgtctaattttactaatggaagcccaggcatgaataaaagtttaagaaatacaattaagtaaatatcaaaattcacaccaatctataacaaaatatcttataattaattagcagttttctataatcgttattaaattaaaataaatgagactcacaattaatgactttttaagttaaaaataattttttttctaataaaaagaaaaaaaaactatcatttaatcattgtctaagtatcagtagtgttgtttaacattt

SEQ ID NO: 329856 - DNA, 1022 bp, Cannabis indica
tgccccgctattaacatcctaaatcatacaaaatgtaactctctaatggcccaacatcgctttccactgctaccggactaaaacaccgaaaataagaaattcacatatttagcatagttaatacatactgaacttaaataaatctccacaatatataaaaattataaataataactcaatctcataattaaaccctaataataaataattcattgtattaaagttaggcggtcattacattatttacctaaaaaaacaatcacaatcccattcattagccatgtttcttgttgtcgatgagatctaaacaaatcagatagttttctctctccccatgaggtttagcccttgtctgtagcgttttcgaagttcgatgagctaacacccaattttagattttggaacgatggtggtggattgataatggtggtggccatggaaggtttgtgatgaaaaagaacaaggaggcatgaatagaagagagaaaatgaataaaaaagagaagaaaaataaaacaaattaatttttttattattttttattaaaattaatatttggataaataaactttcaacacgtggcattcttgtcaaaatttaacaaatatgtcaaattgggtagtgacggacttacaataaatgtgaccttgggactattaccatcaatttttgaggttaaggatttatcttcatcaaagtgaactttttggagacttatgcagtaattttttctttaaaatatagtgtaattagtattttctactacctttcataagattttaaaataatttaccatactgaaaattaggggtatgcataaattgatccaatccaatgagaaccaattaattcaattaaaattgaccgccaacattggatatctaattgtgattgaatcgaattggatgttaattttaaatatctaattggatcggattgaatgttggatgaagtgtctaaaaatttaatatatctaatatccaatcgcactaattagtattttcatttagtttggatgagtaa

SEQ ID NO: 329857 - DNA, 888 bp, Cannabis indica
tcggtttaggcggtttataaattttttttgtacaaccctagacacgatgacactactggaaacccgcacgagagttagcgggtttgggtttgctttaaatgggtttgggtcgtgttcgggttgactcgcctaacccgttaaataaacgggtcgtgttcgggttgacacggctaacacgaaattgacccgttaatgacccatttaaagttattttagtactttaacgtgtcataaatgagttacaaacgtgttgaatacttcataaacgtgttattgattgacatgtttaaacaaaatatacatataaacgggttacacgggtcgtgtcgtgtcaacccgtttataaacgggtcgtgttcgggttttatttttttgacacgattattaaacgggtcgtgttcgggtcgagcatgtacttgttatacatgggtctcgacacgacacaaacacgacccgcgaacacgaattgccacccctaccgtgaatgatatgaatgaattaactatatttattattacaatattttgtggtgaatctatcattacataaaaacaagacaatataaatgaagttaacaaagtttgaattgcttgctactgctgtacaaatacaatttctaatgtgtatcatttttatatttaagttaaaccgttagatcaaaatttggatacaatctaagagccccacgtcacatgaccattgccacgtggcatttacagatcacagagaagattaaaagaataaacaaatattatgtaaagtccttttttggcaagttaggtgacaaaataatttttcctttttatggtaagattgctatgcattcattttcgaaatcttacctcttttattcggttataagttgccattttccttgtttggaaagtt

SEQ ID NO: 329858 - DNA, 693 bp, Cannabis indica
aataccccgaccaaatacgtgaagaatggtacatatgctttatctgggagttgatgaaagattgggggtgtgtttcttgcttcttagacatatagagtctagtgtagtgttgttgatactttgcttgaaggtcgtccaaccctaacttctaagggaattttcattgccaaatttgttgtaaccattgctcgacatgcaactgaactaaagtcaccgaccaagcataaattgatggtgtagacaaagcaaacaatgaggaaagcgtatgagagaaacccacattttactagactatttgctgcagctagagtggaacaagcccgacatgtggtcgaggaaggaaagattattgatggcaactttgaagtccaaggagctgaggaccagggcaaggtctgtcttgttacactcctgaggctgagggagaagaggaagaggaggggatagtttgggtactgcccttcggtggctataatgaagagagagatatctctgagatcggagaagtcttggaagctggctgggattatgtagaggaggagtatatcgaggcctcttcgataaacaagagggtaggggtgtttgtggtgcagttttgaccattttttcaaaccaacccacacgtgcagtttttccaatttcccaaatcgcacccgcaccgcaaaattaaaaactgcaaaaactgcaccacaa

SEQ ID NO: 329859 - DNA, 1237 bp, Cannabis indica
ggtttctagacccttcttcagagtacttaaactctgggattcaaacgacacaggttttggtgtcgtgttgaatgaacggtgccgttttggtctattcttattaatagactaggaaaggtcgattttgaccttgatactgatattaaagtatcttgttggtgtagggcaaatctgtaaaattcctacaaatataaatatatattatatacactaataataaggattcaataaattgaaaagcactgctataaagaacatatataaaaatgtaaatgtatataaaacaatgtaaactgcatatctctgcaaatctctgcacatccaaataattttatttttaaattttggatgcaacatgcagataatataaataaaacaaaataaacatgaaagaaaagaacataacttaactcgtccaaaccagatgagctcctggtagagctaatggtgtacccttcactgcatttcctttctcttgaacccttaatttcatttatattatgatatcttgaagtttagttctacttgcaagattgtttgcaagttgtatgtgttaatttgccgaattggtcatcgactattgagtataacttggagctttaattgcaagtttatcaaggatataatcatagtataccaatgatcatagtatacaaatgacatagtataacgatgattcatagtaagataaattagagcatagtataccaatagtcatgacattagtaataacaaatatatttgtacctattagagcaattataatatttattctattaagtatatagcagcgtaaaataagttagaacctatgagataacttgcattgtactcgtacccttcatccaacttaaaatttcctgcatcttaacctgaaaaaaaaaaaagaaaagaaagaaagccaaaatttgagaattccttctctttctctctttcccttcgagctgcaacaaaccaaggagaaaccaggggagttctttgcttcttttgctgggaattcagtagagattcaagggtattgaagctaaggtaagccctagtcttattcctctctagttcttgaattttatggttggttgaatgtgaaatttctaggtttagtggctgttaggttttcttatatttagaattcgaattttagggtttgtttagcttaattctagttcatggtagctggtttagagattggttgttggttttgagcaattctaagctttgagttcaagctttaagcttt

SEQ ID NO: 329860 - DNA, 680 bp, Cannabis indica
aagtacactcacctctataatatgattcctttatcacgcattatatattatacacaatcgtataaatatatcaactatagattaagagttgttacctaaaattatggagttctttttttgatgggccattgtctttttttacattctattagctggtactgatttcatataataataattgtgaattaaggtcgttaaaaggtgactaataataataataatcccttaaatcaactcataaaccaattacacattatcaataataagttggggagtctcatctcagacccaactttctgaactgtcatcaatcacaatcatatatgcaactggcaacaggtaaaaattagaaaatactactacagtaaaattattaaaccttgttccttaagctttggatctatctacacatggtttttctactgtttccccaaataattgcaagtaaagcaatgaaacacattatttatcttttttctctttagcccatacccacttgaaaacaatctctgttttgctgttttccaaagcaatctctctcctacatatctctgtctattacttaatattaattcaagtgttgctagttggtataaaagaaaatataattgaatttttaatatcaaattttttatatttttttaatttaggattttggaaaatataattgggtctttttt

SEQ ID NO: 329861 - DNA, 508 bp, Cannabis indica
ttaaccccatattaatctctctctttactatttttttttaattgacatatctttgacgagaatcattacagaagttgatgcagtataaaaaaaacatataaatatgtatatattattaactcaatgatacaaaaaaatcttttattatacttaaatatatatatatatatatctattctatataaagtatacctatataactgaaattcttggtttttgagaattttatgggtgacttttaatttttatttaataaaataataaaatattatttatctataataaaataataataaatatcctaaattaaatatttgaatttgaactgatattaacaatcacctcaattaaatatcataaaacaattgaatcacctctgccctcaattaaatattctaaaacgagaaagaaaagcagagccttttaggcacaaacccacaaaaagttacgtgcaagcgtattgaataatggaagctggcgtagggagtgtaatagtcctatactgaca

SEQ ID NO: 329862 - DNA, 1405 bp, Cannabis indica
ataaataaatttaaatggtgcattttaatattaatatttttatatataattgtttataaagatatatatattttccactattcataggttttgaggatataaattgaaatgagcttttttgtgtgaggctgcactcatataataattatatatgtatggcgccgaaagagaccactaaattatttgggtatttttcaaaaatagacctcacaacaaagtcaatttcaatgcaataattattaataaccattcaaattcttctcatcaacgtaccttgcattttatatcttatggtaattgtagtaaaatgaattaaaaacaatattgatgaaaaaatttgactcaaaccaaaactgcaaatctgagcttaatttttgtctcattatattaataatcactagagatcactattaatctcttttaataattaatcaaactttctaattactctaattacgtatcttgttttcgaatcgtattattttgtcatgaccagtaatatcactcttaattaaagtatttcggctagagtattttcaatgcaagagatttcatgggtgcatattttggcagagaggaagacaaaactaattaatctaggatttgaaataaaaagtttcttaaaaaatattataaaattagtttcacattgctaaataaaaatactatatatatggaatgaagaaactacttctcttatgttttgagataaaatcccatacactttaaccatacacttctaaattttaacaaagagagttgaatgtattaacggcttattatgcatggtaaatgagtaaatttaagtactcacgaggtataatagtaattaagcataattaatatttaagtaaacatagtgagattatttttgctaaatttctccatcccaaaactcttgagcagatgagcaaaaatgttgtcctccatatgatctttgttgtggaatttggtcaattagtagaagctcattaggggtaagactccaatcaaatatgtcaaggttttcttgcatccttttcttgttgaaactcttcataacaaagcaaatcccttgtttcatatgcccacctcaaacaaaccttcatttaccaaaatttataaaatatacaaatcaatattctatcactctgaaatatcatttatttctttttatttctaatattatttttgaattttatttaaagttattttacaatttatatatataactcatcctcctataaaaacttctaaaatttgtaatttcctctacaagaaaaacattaggattgtaattgttcaatgtgcaaaaaaaaattcaaaaacaaagtggttttgaaacttgtttaatattacatgagtcaaacaattttttttttaattaaagtctaattttttcaccataaattattcaaaattttat

SEQ ID NO: 329863 - DNA, 536 bp, Cannabis indica
aaaaaaaaaaaaacataaaataataacattaaaaaaaaaatgcaatactaaagtattgttattattattatttttccattaatactgtttcttttttgggtatactaaagtacttttattgtgaatgaaataattgtatttctaatgttaaagtacatgtagtatacaaatgaaaatattcgaaatttgttgggcaatgactctcatattatatatcaaaaacccattaaatacgtttccgacacaaaaacataatgacgcctagatgaacaacttcttgcgtctggttccttgtttttagaatttcttttatttattttttctgattaaataaatatttttaaatgatactacatagagtttgtgtatataatacattataaatgtacacattccaataatgtaaaggaaactattacagtagagatgggtaaatttaataggatagtaatttataacttttgatttaatcgctcaaattaatttttgaaaactatatcataattaatacatttatttatttataattaactttg

SEQ ID NO: 329864 - DNA, 631 bp, Cannabis indica
ttaatttaaaattagtataagttataaataatattaatatttatatatatttataaaactaattttacttacattattaaatttaatgtaaaatatttttaatattttttaaaatattttattaaattaaaaatatatgtataaagatatattttaagagagagaacaaatagaaaattatgaaggttagtaaaattatgtataaatatctagaaaagacaaaattcaaatcccacatttactctccaactacttaagatgtgatcatattattctgatgtgagttgattaagcttttagatgagtgtacatctttattattcaacttgcacataagctcgtgacaatattgtttatataaatatattatatactactacaattaatgaatgtgttattatatttaattatgaaataccaaagttaatttttcttatatatagatttcaatcacacaccaaataaataccaaagctgatttaattaggaattctagaaagactaattaattatggtgtcgtttagtaacatttttgttttctaattttttaatcacgaaatgaaagtacaatttttgtttttaaaaattttgtttttgaaaaacaaaatgccttctgtaaccacttttgtt

SEQ ID NO: 329865 - DNA, 506 bp, Cannabis indica
tttttatttttatgtatttgtgaaataatcccgtagatgaaacaattatcatattactcgttgaatatgtacatttataatttgtcaaaataattaccatgatacatattgtttttctttttcaactacaggaaaatacatcagattaaatttgatggtaatgctaaaaggtattcacggtgcctagcaatcctgtgagatgtactatcgttattgatgcaacttatattactttattaaataacatcgagaactgctaactaattatagggcgtcatctcatagtggtgcctcactattaaaaaaaaggacctttagacgcaattagcaaaatttgcaaccgtaagtgttacaggggttgcttaaggggtcaaacaaaaccatctctcactaccaaaaaaaaaagtattatctttaatgacaacattttagtcaaaacataaatttatgtgactttagtcacagcaaaaaattatttgtaattaaaacataatatttagatacaa

SEQ ID NO: 329866 - DNA, 912 bp, Cannabis indica
gcggtgcggtttaaactgtgattactaaatttaaaactgcaaatgcactgcaccatgcgatttggcaaaaacacaaaatcgcactgtaaagaattttaaaccgtatttttatgcagtgcgggtagtttgatgagactcctatatttcaccgcaaaacatacattttttttttaaaaaaaaaataataattaatgtatagaaattagaaagttataagaaaaatgactcatttctttattgattttgtaaagtgatgtttatatataggcgctcaactaatgatgaacattctgattttaatataaaatgatcttatccagttattatgctttaattattggttcttcccttttttttttaaaatatatgtataaaagaaacaacaacaacaacaagagaaacaactcatcatgtattatggggttgactttttttatgtgtgtattttttttttgggaaatttacattctatatttattttattttatctattttaattttatttttattttcatattatttaaaatatatcaacttttatagatgatgtccctattatattccttaattaatataaattatatgctaaatttaagtggagtgtgaaagtatattagacaactcactcacagcgggtacatatgaataaaatataatatgagagtattttgtattaataaataaaaaaaagtatttctcaaattatcttatatttcttttgggagatcttcttgctatttgtcttgatttttatgacttcattcgtttttgatcctttgcatatgtggcctgtttagtcttaaagatgattttagttatcatgtagagtcgagaatctggtttaggagaaataaaatagtttatatgctaagttaattgctgtagatattattatttttgaggttgtgattt

SEQ ID NO: 329867 - DNA, 502 bp, Cannabis indica
aaaaaatatttcgacatgtgttttggaacgtaaaaattgactagattgtaacacgaagttaacggtaggactcttctaaattaatttatcatatgagtcgttggtgaggcaagttttgaaattgcttttatattattcaacaacatcatcttattgccaactaattttttcaacaaaaagtgccacattaagtgttgaataagaactaataagacgctacccaattttaatgtgtaacattaataccatttaatttatgtgaatatactaaattacccttatttcaattgctaaataaataaagaataattagcatctgtttggcacaacttttaaaaatattaaagctacttttcaaaaaaattgtgagaaatttttatttgataagcagttaaaaagtaatttattgaacaatttatgaaaaaattacagttaaaaattaaagctggtacaacccaattttttaaaaaaattatttaattaaaagactctataataaatt

SEQ ID NO: 329868 - DNA, 521 bp, Cannabis indica
tgacgtactcgtgtataagagccattcatttcgtgggtgtaaggatccaatggaggcttgaagcggggacgttacagtgatgttttatgtacttttaaactttgagctatgaattaaaatatgtaaaatttgatatattaaattataagctaattaaggttgttaaaaattctcttaattaattaaattgttgaatttaaaaatttatgtctaattctgtttaattttagagaattatttatttatatacttctacctctaaattttaatatttactaaattgcgcactagaattttaacaagtattaaagcctgacacttaaaattattattaatctcaagtttttgtgagtaaaattttaaattaaataatcttaataattaaaaaaattaaagtaataaaaagttgaaataaaaagaaaaaatactaattagcttcaattatatatatattattttattggctaaataatattttacaccttctgttttataaaattaccaattggaccctgtatttt

SEQ ID NO: 329869 - DNA, 967 bp, Cannabis indica
ttatggctatcatcagatttaatgcaattttgcggctcctacaaatgtcgaccaattatattatactttgtgtgtgttgtatatagtttgtgatttgataacgataataatgtttttatttaacttctttgacttgaccataaattaggtgccgctacactgatattatcaaccactcttttcagatataaaaaaaatcattttacactccaaacagtttttttttacatttttacgaaaatttatataaaaactcatattacaactaaagctgcaacctaaattgcaataaaaaattgtacagaaattcctattgcaactagcgctgcaagcactttagaaacttaaaccgtaaatttaaaagaaaaaaattaaaaaaaaataagtatatgggataatttcccaaaaaaaataataaaaaaaataactactcttaataattatttatttattctttaaaataaataatcaataatctatagagagaatatataatattagagttttctataagtaaaatattaaaagatattaatggtgcttagtaatttcttatatgttaatattactattgatataattaattaacgagtttcatttaacttaatgtaatattttttaaaaaagtatcgttaactaatcacaatacaacatgtttaaaagatgttagcaatactattttctatacatataaagcgggtggaatcatcaatttatcaatattatttaatgacttattagttattactaattaatattcgtaatgagattgccacaattaattttagccaataatcaatataataaaaaaaaatctaaatttaatttcataattaaaacacataaagcctaaaagtttaattgtaacgtccccgcttcaagtttttattgggtctttacacctacggaataatagctcttatacacgagtacgtcactatgtctgcttcatggactgacgactgac

SEQ ID NO: 329870 - DNA, 794 bp, Cannabis indica
gcataaaacccaacatgaatttgtaaaatatactaaacaaaaaaaaaaaagttcatcaaattaataatgaacaaaatagatagagttacatctaatcagatttaaattcaaatgatatgtgggaatacttttaatttcttataatcatttactctaagagatatcttcaaatattataataaaaaaaaactattagaaattgaagactatatcctcacatatatatatatataaaaagacaattgataaatctatagaaaactcatcttatgatttcaaaatagttgtcatcatcgtatttcacttgtagttgccattatattcaaaaccgttgtgttatcactatatctcactagttatcactatcattctcaataagtttgttctatgtacatagagcataattatagtaatgaaatagatgaagagagtatgagtgaatgtataacgccctgtcccacagggacgtcacgtgtgtacttttataaaactattcttttaaaatttatgtaattatattaaaagtgtggctaattaaattttcttttgcaaattaaaataaacgcattgattttattaaagacaagtattaatatttacggggaccccctatttccaaaatagtttcattcggaaccaaagtgcttttacaaagtacataaatattccaaaatacaatcaaaaatgagttatcttgtccaccaggctgtggcaccgcagctgatatgaacattgctgctgcgactcaaactcatggctgctgtgacagtcagtagtccccgtgagtcccgtaa

SEQ ID NO: 329871 - DNA, 1212 bp, Cannabis indica
gcggactacgtataagcgaggtgggacaatcgacccctaaaaaaggacaaatatatatatatatatatatgtgctttagttagttacaatatatatttataataaaagatatatttataaatataatattaactttatactaattaagttacttaacatatagattagaggacaaggattctaatcccaccaaaagcatatatatatatatatatatatatattttttttcttttaagtttatttttgtcctcctcaacttaccctaaaacaaaaaaaaaaaaaatggcctctctcactttattctaggtctgccagtgtttgttacaatagttgtgcaagcctcagctggatgaagagttagttacaactaaataacagaaatagtactaactgaatttctaactaacgatctatcctagcaaatattatgttcggataaattatattaattattacgatcaaaattttgaatacaaggtattatttaatacataataaatagtctatattaatttgtattataatatttacaaatgatttagggtcaattccaatctccgacttggattcgaacttgaacctgaacccaaatctagaacatgtatctagaaccagacctgactcgtagtcggtgttaagatcgagtgtattgaaaatatattataacattacacaatctattaatacaaatcaaaccaaacataatatcatattaattaaataatactaatataatataatattagagcataagcccataatcaaataatttgtacgtactaaaataataggtatgtgatggcatttaattataaaaaaaagggtatatgttagttttaaacgctggcggccagccccgatatatgaacttcttttcgtgtattgtttaaatgctcaagttcataagttatttagttgaaaatgatgttttttataaatagtttggttaacctatttttatttaatatcaatcttcatattatctattaatataaatttcatttactttaaagagaaaggtatatattaattttaaaattaataagggaactttccctcgtagattcatatataatcaaaatttcatatatattttacctcgagagacagacacacttgttttggtgcggggttatagctcgaataaaaaaactaataatttgtggtgtaaatatttaaattttacttttcagttacagataaatattta

SEQ ID NO: 329872 - DNA, 1187 bp, Cannabis indica
ctacttgattgcgtgcacttgcgtattgttttacaattttcgtaacaagaaaagtaataaagaaggatacattaaatagctaattgtacatttcattatcataaaatgattataccataacattcaacaataggtaataaccagccatatgcgtagaaatagatatgctcactcatttgcattgcctaattagacaagcatgtgtcataatgcaatatcatttacaacaccattgcaccacctaataaggtgagctcgtgccacgacctaacactaatataatgtattgcctaatcagacgagcccgtacctacgcctggtcctcatttgtcactgacgcccatacttacgcctgatacgttgataggaagaaacccacaacagtttcattctgtgccacaacctggcaattttcatattactgccgcctgtatctaatatggtacgctgctaggtggaaacctaacaacagttttgatctatgccataaccaggcaatttcatattactgtcgctcgtatctaataaggtaaccgccaattggaaacctaacagtgacttcgatctctgccataactaggcatttttatattattgtcgctcgtatctaatatggtacgctgctagatggaaaccaaacagcgatttcaattcctaatcatgactttataacagttgccccacaaatacaatctgaatgtcagtatccatttatcacattaccgactcaaacaagtttatgacatagcctggcattcatcatatatatacatatgttgcattgcctaatcaggcaagctcagcctatgccatagcttggtactatatcacctaattatgtgtatttatatagcatattgcctaattaggcaaactcatttcacaatttaaaattcatctatcatatcacttaattaggtgaagttgtatgccacgtttatattattattgtctaatcagacagtcgatgatcacaaaacctattattccatgtggtacattataattttcttacctcaagttttagttcagttatgttggccgacctacttggagtacgatcgatgatcctgggccctatgtcataacaataataaaccaataagtgtttatcccaaaatactgcttaactgttgcaaagaataacctaggctttcctaccaaatcccatagtttaaatacactaa

SEQ ID NO: 329873 - DNA, 674 bp, Cannabis indica
acaaggctgctcaaaggagattactataaacaagacgagagttagaaagtccatatctgaccagatgtgcgaatagggacctagagggaaaatgttatcccaaattttattacctgacgtggcatatctacgtaagccaaaacagagtacatgtagaatacaaccttgccaataacaatacaaggtctccatataagttatggcaaaaacgtcaagcagcaaccgaaaggagtgaagcaaaatatcaaggagctgtaccaacatgtttggccagccaatagaagcctataggccggctagggtaagcttgtatggccggctaggatctgggcacaagttggtcggccaaaaggtggctttcagaccaagggaacctgatctttacaaggaaaatgtgtacaaagttggcctccacttgccaaaggttgacctcctcttggtaaggctggcaggaacataacctgccagaccctgacaagagcatggttggccaagattgatttggcaaggtggatggctggccaggattgacctggaaagattttttgtacaacctgatacgtggactgcaagctacctgcgaattgggcccttaacagcccaacaaactagattaaaaatatctactttcaaggggcaatttaatctttttatatttaatcaatttaatatgt

SEQ ID NO: 329874 - DNA, 1152 bp, Cannabis indica
attataatatatactaatcataaaaaataattaaactaaaaaaaaattaatttaccatttaagacggatccactagtactaatgtggggctatagcgcccaccaataaaaatattatcttttaaaaaattaaatataaattttttaattcgataattatagatcaaaatagtagaaaagtctccacaaaattaaataaatctagtaaaagtgattataatataagtatatatttttttttatgttaaataagctcccataaaataaaactctgattctgtcactgtttgccacctcattatccttttctaacgattttttgcttactttgcctagaaaatttaacgtgcatctatttttatttaatttattttttttattattgtgtaccctatatttatttaagatattatataaaattttattttgtatattaatgcatcaattgttctttttatttcttcataaattaattttggttcatacatattttgtatataataatactatcatatttttgttgatgtcataaagttataacttttcgtattttattatttttcatactaaatttaaaaataaaaagaaatgtattatggatatatagaagaaaaaaaggtgatataattcagttatataatatagtgtaaaggagagtattactaactttaaaggcatgggtatttatatacatatattggtattcacatatatatatatataattatatatatatatattacgtacacaaaattatgtattattttttttattgggaaattaattaagagataattgaacacgtgttgtgttgtgttgtgttaaatggcaaaattaattatgtgtaaactctctcaccttaattaggttgtctcttattgtgtgagtacgtatatattaacaccacccctttaccaaaaaatcatactaaatttatttatatatataaacgttgatcttattttttatattatcatttcattcttgtaattactaaatatggctcttaatcatgtttaattaatcatagtgtacttttcaaattttaacattgcaggatcataaatttggtactctttagtctttacgatgagaagtactatagtacattaggctatatatatatatatatatatacacatatggacttata

SEQ ID NO: 329875 - DNA, 976 bp, Cannabis indica
aaaaataaattaatttttaatactatggcatcaatttttaagcatttgttgtcggttacaagtatataatcgatgtcatagtgtacatatagtgtcgattatttaataataattaacgacatagtgtacactatggtgtcagttatgtttgaccctatagcattgtttaacgccaatagtaaattttgttaaaactgatattgaaaaactttaaaaattacctcaaaagcccaaaatatgtagtagtgacaagaaacttgaaaagcaaagcttctttacaacatgaactcacttgtgacaatggtgattaaacacacaccatgtcattaacaccccttcttatctatattcttttctctctaaacaactctctcaatttctctcaccagatcctaggattgtgttccaaaaaaaaagagtactctaaggcttggctataaataatctttggttcagctcgagtactaactgtgtataaatgacagttagttaattttatctagatagttagtagtcttgacatgtggccaaattacaataatcatccaccttggtcatatgataagtttttgtgattgagtagtgattgttcctaatcttactctaacatcctaacatgtaaggacgccacgtgtgtaattttattacttaactaacggtttaagaaaattgaggtttaattaaaaaattataaattattaaatcataacttaagttttaattcaaatatcactagtttcaggagtccccttatttataatcttttacaacatattacaaaatacggttacatttttaaaacacaacaaaagatggattgtaacgtccccgcttcaagcctccattaagcccttatacacatggactaatggctcttatacacgggtacatcactttggctgcttcatggactgatgactgccctacagacaaacacgagtgtttctagcatgctttgtcctcactcacacgcttc

SEQ ID NO: 329876 - DNA, 577 bp, Cannabis indica
atacaagggcataacaataatgtgacccaactacttatttatgtaagggtagtttgggaatttcaattttccgctacccctataaataatgcaatggatttcaaccaatttcaagatgagataaatgcagcaatatattatattccaataaaaaaaaaaaaagtactatcttcattttagtttgagagctaataaagataatatataaattactattataatttacttaaaaaaaaaagaagaaaaaaattcttccaaagcatctaatcaaagcaaacaaaaatcaggtatgacttatacaaagtaattatataaattttttgtgattattattttacttgtacttaattttttttaacgttttttaaggctaaacttgccaaactttagtccgattataaatttagttttctatctatttttcttaattaattattaagttggaatatttatgtttaccctcatatacacatgatatatttatattagtccaaatcatgtaattatttaaatattatgaaaaagtattttaaaaaaatttgaaattaaaataaaaatatattaaaaaaattaattt

SEQ ID NO: 329877 - DNA, 1072 bp, Cannabis indica
aaaaaaaaaaaaaaatactacatcaatttttgtactctatcctttataatattaataactcaccaatacctcattttttttttctattttacctcacacatttacattataccatacatcaatttctatatatcatttaaaaattattggggagttaccccatatactattttttaacttttttttttttaaatttacagtttgggtttctaaattggttgcagcgctagttgcaataggagtttctatacgactttttattgcaaattaggttgcagtgctagttgcaataggggtttctatgtagaattccgtaaaaatgacaaaaaaaaaaaaaaaaaaattgttttgaagtgtaaaaatgaaaaagacccaaaattatttctttcaatatattttttattttaaaaattaaataaataaatataataatattacatactgatacattctaaaaatattttaaaaagatatataatatttatagctcaatgtaaagtgcttttctacatgtagttaagcactattcatgagctaaattttttagttgtaacagctcatttgatggagtaccattttcaccattttttatctcttagctagctatttcagatcttctattgtgagtgctctaatgtttaacttatttgttgaaaacttaattttatcacattttctttataatttgaagatgttaactcagaaatctagactagacttctaagtcacactcgttcgctagattggcgagaataaaacagttgttaagtaattataagagagacatagcaaatttatagtagttcaccaaaagctccaatttataaagagaaaagctctgaccttgtgggtagttttctgaacgtgaaacatgaactaagggagttctccttttataggtgaaggaggcccacaaaaataggagaaatataaaacttagatgtttttgaccgtagatgatgatctaacggtgaaaattaacttttgatggtgatagtcatttttcggagtctcgctgtgggtaacctggagcttattttcgtaactcacttggggtgaaatttgaggtcga

SEQ ID NO: 329878 - DNA, 1221 bp, Cannabis indica
ggtagaagagagcactgccatctcttgggaaacaaagatggcagttgtgggctaagggggttatacaccctttggtgacttttcttacttgtatttgataccttgatgttggaaatatactttggccaaagaaattctccaccatttgttgtggccaaccactgccactctttggaccacaaaggtggcagtggtgatccaagtggtttctatacaacttggtggccttcctcacttggttttgacatgttgatgatgaaaaagtaattttggcacaaaatccccttctgatttgatgtggctgacttgtgccacttatttgtgcacaaagatggcacatgtcagctaggcttgtccttgagtgaaaaatggtttctttcacttatgttgtaatccttggtgttgagggagcacaatttgataagtctcgtttggtattttgagagtagagagcattcccatcttcttgtggcagtagtccctaaaaaatagagagagcgttgtcatcttcatgtaggaattaaaaacatgacacatatataccatatatacaacagtcccaacgtaacaaaaattaaaattagcccttaaacggaaagacagcattaaagctcgagctttgagctttaaaaagttcaaactcgatttctaactcaaaactacctcaaatttagcaagtaaatatcaatattaatcccatagctacccaaaaacaattctatgaagttactatctttataactactctaaatcacaaagccaacatataaaaccaatctttttcaacttaaaatgaaaccaatccttaccttaagcttttcctcttcattagtttactatccagctattaccgggacttgaattactaagtttctggctggaatcgaagaaaattaaatagtgggagtgaaggtttcggtgcaccgaaagaggagggtttcgttctgttctttctttcttaagttttaaaacgtattatatatataacctgataagttattttttttaaaaaaaatattaataataataaaaaatttattaataaaagttttttttactgtttcttagctattaagaaatttttatttctaggacactaggtcaaattccaatcacttctaattatctcaataattatactatcaacctatcataatactcccatcaaagttactaatttaaccttgctatgatatttttggcccccgatcgagtctctaa

SEQ ID NO: 329879 - DNA, 937 bp, Cannabis indica
gagcttgagatccctggctagccacccatgctactggttattgggatctggctgctctcgccatttggcctttgtggcaaggtctgtcctccctctgtcaagggaagatatgtcctagtccctgaggaaccaagttggttagcttttcgatagatcttcctagatctatcaaccagtcttcctttaagtggatctctattgaaatcttggcctcttccatcaattttctggttgaactaccttatcaggtcactaacctctctattacagtgattaagctctgcttggcgagatcgaaggatgtactcttggtcatccatccacctcaagaattcacgtctctactgagcgaatacatcgcaatcagcggcacatggttattcagttaggctagcttggtcgatggcttctctaagtccggctaacttgagatcttatctcaagtccacatggggctcgccaactcctagtcctatctctccaacataataccagagatgagattcaattgttattcctgagggttgtcgcccatgagtccttcctttagtaggaggaaccagtggagggtcctcccttagaggcaagagcggctggctagctcctttgaagcagctggtctgtcacttgttgtcccgtttgagtgttatggtccccattggctgaggtgctgacttgaacttcttgttggtgagttgtgttgccacatggcgctgattttagatcacataagcaataccacgtccagtgggtaaaagttgggataacagtaccactacaaaaaattatatacttttaattataataaaagtttgtgactaattatcattgttatgctatggctaaaatattcatgactaatatattagtcataaaaactatactttgttgtgactaaatgtagttttagccacaatacttgttgtgactaaaacta

SEQ ID NO: 329880 - DNA, 668 bp, Cannabis indica
ggtggtgactcccgggagatcttctactagcatcccccacgaccaagtcgcttaatggacgaggaagaagaagaaggcgagatccttcctcctggaccgcaagcgtaaaggtaagatggtggaggtagagattgttaaaaaattgaggcgcgtggatactcctgctcccagttctgactcagagattttgtccgaggtggacaagtatactatgcctcatgttactgtcttaacccccattcctaccgatgaggaaaggacttagctccgaattgccaagcacaaatatgccatgggggagtacaccaaggggaatgcagagatatgtttactcgtagtgaatatgtcgggaacgtctgggacttgaatttggatcccttgtataagtggtttaaccgcttcatcgaccctaacttaactcccaatgaagagatatgcagcctgtgcctctacaaatcccgtccaggatgtaagcgtggcccttacagcggtgagttcttatctattagatttttcaagcctcttatccctcactgtccccactccagcttcctgactagggaatttaaagcataagtgcgggatggaggtgattgctccgaaattgaccaaggccgaccgaccaaggatggtgttgtatgctgttgggcaatccaccaccacaaagg

SEQ ID NO: 329881 - DNA, 763 bp, Cannabis indica
agatattaaagtctagacaataatttagtacatgaacaattatcgaattagtaaaactaaataaaattaaacaaaagtttttaaattgatctaacaatctcaatagtttaaaataaatttttaacaactaaaaaagtgaaagagtatcattttatacaagtccaaaatcttaattaaccatcctattaagaatattcatcaacattaattggattatattactatttcgcttttacttctttttcccaataaagattcatcgttagaatatattttgatttttatgtataaattagggaataataatggttaccaaatattgttattggtggatgaaacgatcgatgtgtcatgtgtgagagcataggatagcatcaagtatatgttgttgaagaaaattatatagttgaaaattaaaatcccacctcacaaatatacgtatatattaacattaatactaattacacctaaaataaagtatatataatacaaaagagcaatttatgaatacttgtgtcaatgagattgttcaccaaccattttattaagcagccgaaaaggtaagtaaaaagagagaaccaaattaatatgaataatcatcattattaattaatcaaacttttattaatttctatcaaatcaaaccacccttattggaaaatcatgcattaatttgaaatatgcatgtgaaacatagaactttcattttttgctaacgcaagaaaaatagaattatgaatatatatatggtccaacactatat

SEQ ID NO: 329882 - DNA, 742 bp, Cannabis indica
ataatggcaattaaagaatagatgtatagttgtctttgcttctaactcaagcatccaggtctgggtccgggtccaggtttgggtcccaggtccaagtcctgggtctcaaattctcgatcctcggtccaggtcccgggtcataggtttgggtccgggtttaggtccgggtccgagtctcgattatgggcctagattcgagtccgagtccgggccaaggtcgggatctgggttcgggtgtgggtcgagtttgggtcccgagtcctgagtcgtgggtctgagtccgagtctgagttagggtccgggtcttgggtcttaagtctggttttgggttcgggtttgggtcttgggttcatgtccaagtctaggaccgggttcgagtctgggtccaggtccggttctggatctgggtcttaggtctaggtctcgggtctagttttgggtacaggtctgggtccgagtttggatctgagtcctgggttctgagtctaggtctgggtccgagttcgggtctggtcctgggttcgagttcgggtccgggtcaaagtcccagtctagtcctaggtctaggtcttgtcctgggtttaggttcaagtcttgtcctgggtattggtccgggtctggttccgagtttataataggtccaaatttggatcctgcgcaagtccgatccagttccaggtctcagttccaagggatttgggtccggggttcgagtcttgaatttaaggtttttttttttttt

SEQ ID NO: 329883 - DNA, 2027 bp, Cannabis indica
gatggtcattactgttatgaaactaaagagacggtcaataccgttatgaaagtgaagaagcggtcatggcagctaagaagagtcatgattcaactgaaactgttgttaggttttctacttgctggttatctcattagataacgatagtgacatgtcagagatattggtggctaggtattcgagctgtctggcttgacaacgacaataatatttgaataccaatttaagtatcaggaatgttttattagattacatctagaacgtttatcctatgtattgatgtttatggtttgtctcatgaggcaattacttgtttattatggattgttgttatacttatgataattagtatgggccttactcttgttttaacttggattgattatctatctgatttatgctattaattacttttctttctgagtctcgcgactcatgggtgctttatgttgcaggtaagggcaaatagatactagaacaaccataagacgacaatcttctccgacaaatgtacatattgacttatctgacttgtacgattgagttgttaggagttgttttggattgtatctgatgtgtatcttgacttattgttgtatataacatttttttttgtaaaatttttataacaggagattcttgaaataaatttttggcaatgtcatcatgttcattgctatgatttattttagtgaagtttttattattatcacaaattttattaaaaagttaatctactatgataaaactacgtttcaaaagcatacacgtggcgtccttatagattagagcatacactgctaaagtaaattgcgagcaacacaacgaaggaaggcttctcgatatgatatctgtctattggattaagccaaatgacggttactgggcagttatgcacattttcccacatgttgtaattatttaaaacatgagaattgaccacgattcatgagcagttattaagattaatctaaagaaaataactgccatatgagaaattctataaataggcgaaaagaccactaagtaagggacgacaagatgatcaataggagaccctgagaaaaactcatcctttattcttgaattctataatctataacacaaaacacctagaaataaaaaagactcgtggactatgtagatttaactacaaaaaccatgtaaatatcttgtgtcaattattttattatttattattcatttaaagctttattaacgttagtttttttatttcataaagaagatcctatttattattaacaaaattctaaattaacggttagcaatgctctctaaaatttattaaattaaattatatgtgggccgatacttaattgcatcaataacgatattgacacgcaggagggtgctagacaccactaatacccttttaatatttctctttaaaataatctctccaatattgtccttaattttgtgctaaatttgacacaaaatataatattgtgctaaatttaatatacaataactatatatttcttaattataattttaccattgatttttaattataagctttaatacatttttttttcactacaataatgttatgaattatttttttaaatatttaatttatttataattattaattaataacattttatttttgttattatttgtatttaaatgtttcgatagcaaatattattacaaatataatatttgtttattttatgttaagtttagtataatatttaaatctttcatattaaagaaggtcatattacatttattagtaacccaacattttattgggattatttcacaaatatacaaaaattacaaaaatttgattaaacgtaattttaatttttttacgatttttatgattttatttacaaaaaatagggtcttttaaaacatttttatattatacttttattaatttatggttgattttttgttatttatatgttattttttgttattgttttaatattgtttagatgctatttttctgttacttttatatagtttttttattattttcgtgttgtttt

SEQ ID NO: 329884 - DNA, 854 bp, Cannabis indica
catgtaactaaaatctgtttaaacaagtagatatcaattaataaataaagttgaggttgagaatattgaaatttatgtacttatataaatgaagaatataggagtgtgaagttgattactaatacaaatataattttgatacagttattggtgcagtttaatatcagagtttatataaattataaacacaatttgaaataataaattaaaaagaatataataaggagatcacaagtaccataatcaactgcataaaccagcaatacttttctatgaaaacaagttaataatattattattagaagtgtaagaatggatagagaatatggtgccattttcatttgtctttgaagtacttaattagaatctaaaaatgatatggttttgcatttacttaaggttggtatttatagcttgaataattcatgaataactagcaatgacagagaaacataagaagaataatattaattaaaccttaatagataaggatgatccaattcctcggcagccgcccgaatctatgaaatattcatataaatatatttttgaactataacactctctccactaataataaaatatgtaatactataaaaatagaaaataaaattatgttaatacatgataataaataagaacattggcagctaaactacttgaactttaaattttttaacgcaaccaaaaaaaattgaaattttgacggcaaaatctactgaactctcattccgttttgctctttacacttctgttaaaaaatctcagttaagtgccacactagtctgcctgtgtgtacacttgtgtacacgtggtaaatttttagtggtctacgcaatattaattattaaaaa

SEQ ID NO: 329885 - DNA, 832 bp, Cannabis indica
tttttttaaaaaataaatatatcattaaatattattataatatgtataaagtttgtatacaagcaatcttatagtaagagtatacacttacatcataataactagaagatctaaaatcaatggttaaaaaaaaatttcttactggtggagaacttttgctaggtcctaccacagtcttaccctgtatatatcactaaaaacgccactttgagtggttaaacctttatgttacatcattaattttggagttttcttaatataatagctaaaaataaatttatttacaaaaatatttttaagaaaattatttgtgcaaatactgatgtgccatgttagtatacatacagaaattcaaaataattactggaaaaaaaaaactagaaaaatctcgtttttagaaatttttgtgttttcgaagttttaaaaaaacaatcatttagttgcttttaatgtgaataagatatcaattagttagtattccattaaaaactttatctcaaactttacgcacatataaataataaaataacgattttaatatgtgagaaacatatattttttttaaaaaaaaaaatactaattggttacttatatcaaaaacatataaatagtttattaaataaattctataagatatctttagtgacttttaaatgtgaaataacaaaaattagtgtaatctattatgttggttgtcatattgaattataagatattatgtggttttttatctagaaattttttaaatatgaaatagcaaattattgtttaataactaataaaattggctgacatattaaattttattaactaaatgaaaaaaaaaaaaaaa

SEQ ID NO: 329886 - DNA, 1169 bp, Cannabis indica
ataccataaaacttataaataatattatattattatattaaatattttaaatacaaaaaatagatttataattatgatgtatctatttagtgcaagaatatatggtcaaataaatgacaatactaccaatttttataatttatttctcaagaaaagactaaatatattaaaagtgtttctaatgaactgttaacaaagtgttggatactataaatttattatattcaagagaagataaacactcaaatatataagaattttaatgtatactctattgaaaaaggaaaacaataaaaaattgctaaatcttcatctcagattataaattacatattagtaataatttaaaaattataataaaaaatataacttatttaattttttatatagatatgaaaatctaaaaaagaaaaacaaaaaataaagatacaacgtgctttgcacgtagttgccgcctagtatatatatatatatatatatatttataccgaggggacatgaggtggggggaatttataaaatatggcaacattaatgatgagtgatgggagggatgaacaaagttgtccacttgagaaggcagagctcttagaagttaattagaagtagaactcggtctttaatttggataacttttgtggctagcaaagtcatggcagagctctgaactcaactttgtgttaacaccaaccaaaaccttacgcagacccacccagctggaagagagaccaaaaagctgagagaaaacaacaccaatcatatattccaattcaaaacttttttattttgtaatatatatatttattaacgaaaaagattttttgtctttgtctaaaaataagacaagttaattaacgtgagtaacttcggttattaatcaacatattttaactttttgttcaaaaaaaattaagcattttaatttgtatacgttagctttcgacaatgtccgcatgcatttgcgtatatatgaaaaatcttactgaaatcactctttccgggagttgcaatttgacgaagattatgtcaaaagagcattttggtaaatggtatttttatttgacaaattatgtgtaccactggctactaatacggtgaaagaaggggcgcaataagttttgaaattttttacagcatgtacttcaaatttttttacttttttatttttt

SEQ ID NO: 329887 - DNA, 626 bp, Cannabis indica
tatttttatatttaaaaactatagatagtataaaaactaaacataatctagtacaataatatatatttgagcttctttggtggagacattaatttacttaaggcattttctatttttcattctttaagaaattgtatttcattttttttatctaatgttgtatattatagttgtaatacacagtttatttttaataaaatattttaaatattttacggtattgaaaataaagttcaaaatagtttgttgtacgagcacaaaataaaataaatacgtacaactaaatttttaaatcttattttcggtatctttaataattattcataatttttcaaaaagggacaaattcccaatatatataactataatatatatcatcatataaacaaatataatttataatttctctatatatcaaatacaaaaaatacccatataataaaagcaaaattgatgtactgacggtttcacctaagaatttttttatatattgttattttttttatataaaatttaaattgtgttagatccacattaccatttatccatcgttataaatagctcgatttagtagtaaggaagataggaactaacttttttcattttggtatgtattggatttttta

SEQ ID NO: 329888 - DNA, 430 bp, Cannabis indica
caaagagattagtcaatctcttgaaagtcaggacggatgatggagaaacccatcgacctccctttggacatattctgcttatgggacgagcctcgatatacacctcctcgacataatcttggccaaattccaagacttcacctgtcttaaagacagcttcccccttcttattgaagccaccggcaacacccgagatacccccttttcctctttgccctcgacctcagaaggagttgcaggatggacctcgccctggtcctccatttattgaacttcaacatctccagtaatctcttcctccttgatcacaggacgggcctattctgccctggccagggtagctacccgagcaatatggcggttggcagacaaaggttttctgacagtctacttggttcgtgccatcattttacgactagatagaatttta

SEQ ID NO: 329889 - DNA, 948 bp, Cannabis indica
ttatacacgagtacgccactctggctgcttcctggattgatgactgaccctacagaccaacacgagtgtttccagcgtgctttgtcctcactcgcacgcttcctgggaaaacttcccaggaggtcacccatcctgaaattgctccaggccaagcacgcttaactgtggagttctttcgagatgggctaccgaaaaacaagatgcaccttgttgatataggtagtaccaatcaatccatttaagctctcttcaactgtgtagtcccatacctacacagtctcagaatcatcccacttgaccttccccaggcgatgtgggattgcacagcttacccggtatttccccttacggatcacgggactactgactgtcacaataaagtattaaataagaagaaaatataacaaaaattgtttagcgtggtagtaaatggacttacttttaagtaaaaggacatgtgatcaattcccaatctctactttttaatttttttaccattacactaaatactagaactatcatttttataatagttaaactatataaagtggcttcaaaatttaatttcgccttaggccccatatactttaagagcggtcccgagtatatgtgttgttagaataagaaatctccacctttcgtataacaacaaacaacgctatacttttttcaaaagaataaaaaaaaacaaaaagcatcatatagtcatgaacatatgcattcatattatattattgacaataatattagacagatcgtgattgatgattgccaactggaacattaattaacaaataaagtaggggtgttcaataaaatttacaaaccgctcaacccgaataaaccgtccaaaccaaaccgaataaaccgacaaaaaatacaacccgaaataatataatgaaaatccaacccgcccaatgaatatattgggtggtttacaaattattc

SEQ ID NO: 329890 - DNA, 566 bp, Cannabis indica
tgaatccatctcctcatccatgggctagggccatttagacttgtttccacctaaaattacctcttcgtagcttttgggctctttaattttagtctattataccgctgccagtgcaaatgctatcaagtttgctttcgcaaaccttgcagaaggattaatccctctccttgctctatcacgggctaactgataaccttccaaacctgcctgtctaaatccttccaaaacatttgtttggtctgcgttatcttccgattcaacaccatatttcttttgtgaaatatctttcggttccaccatagcttctgattgcaaaccttcttttggatgttttgttccgttctccatttccatgcgtgtaatatccttatttttagataatcttgcatcacatggagacacactacctttctcggctgttaagtggagaaattccaattcattgaaaactacattcctagcaattactaccttttgtctatccttcttggaaatgcatattctataacccttggtacctaaggcataacctaggaaagttttcttaactgatctaggttctattt

SEQ ID NO: 329891 - DNA, 1579 bp, Cannabis indica
gagtagaagtcttcttatcccaagcgagactgttgcgtgcttttcagattgcctaacaaagcatgataatgcaacaactggtatcattatcagaagctttaaacataatgtgaagccaagtaccaaccgtggtattaccaacaatattgagggacggttgagcattcttccaacatgcctgagcaaagcagcagctgatgagagcgtgatggatggattcgagttgactcttgcatactagacaagctgaagagatgtttacatgcttagtgacaagctataaacaggtgggaagggcattcaaaactgctctccatataaaaattttaactttcggggagatcttaagttgccaaagtttgcgccaaaacccagaattgtcaacaccaagatgatgttgtgtcaatttctacagcagattgtatgtgcttttgactgagaaagaaccgatgctctcccctatccaagaccaacaatcatcaccagctgaaaaaacataagggtagcctgagaatcaaagatgcatcacgcgaattgaacatgtcatggacaatctcatgatcccaggatatattattatgattaaaacaagttttaactattttgtgatgaagtccaggatgagtagtggtgacatacggattggagtgattaggcaacgaaggatgagatagtatacttgtagtggtcctcgaccctatgatacgccttgcaccaagtttaactaggtctcttgcttgccaaatgctccgtcatacaaagcttggattatttccaagatcagcagtaagaaaatcagatcgagagaaatacttagctttataaatttggttgacaagcgaatttggtgaggtgagaagccaccaaccttgttttgcaagcattgcaaggttaaaatcatgtaatcgtcgaaaaccaatgcccccatagtctttatgaactgccatcctatcccaagccatccaaataatctcgttacctttgctggatgtggtcttccaccagaagttagccattagtgtcttaatttcagtgcaatttttttgaggaataagaaagacactcatagcataagtgagaagggattgaataaccgttttaagaagaatttctttgctagcatgagacagaaactggccattccaaatgttgatctgattgaccactttattttttagaaagtccaagtattgtagtctttttcctaccaatgatattaggaagcccaaggtaaagactatgctcatcagcttcaggcatccccagtgttgaacatattttattcccttagcaaaagatcagtgttggggctaaagaatatggatgacttggtgacattcactttttggccagacgtcatttcaaaagagtgaagcaaggtgcgtacatttgaagctgctcccgaagaggcttgacaaaataagtaactaatcatcgataatcaacatatgagatattgatagagccccattagccacacggcacccttgcaggagttgatttgattcaaacttcttgataattgatgataaaccctcagcacaaataatgaaaagatatgttgagagtgggtcacctt

SEQ ID NO: 329892 - DNA, 755 bp, Cannabis indica
agtgtgtttttgataacagaatagtggttctgggggtttactcgcagaaatttgggttgtgggggtttggcgaaaccaaaaccaaagtattgggggttttgccgccattttcccttttatataatactatattaaactttaatttatactaaaatattatatatttatgtgtccataaaagttaatatcacaaataattttacataaaaatattacattaaatataatttaatataatattatacaaaataatacaatataatacgacatactagacaaactcttacgtgttaattttatttaactaattatatatctattttatgagcgttactataaggtaacataatatctaacataaagcatgtcaatacaatcaattgaatcgctacttatattcctacgtacgttgttacaatataatttattaaaacgaatgtaattatgctaataccttagaggatagtataaaatataaatattaatatataatttgatatttatttacatcaataatattataaaatatttgatatcctggttctttattctttctcttattaattatgtgatccattagtttttaaaaaagaaaaaattaataattttttttgcctaacatattttttaaaaatactagtgtaatattttagtacatagatgctaccaatatttatatatatttaaattataaatagcatgacataatccatgtgttggggctcactcaaattgtacatttgtcatggtagttt

SEQ ID NO: 329893 - DNA, 879 bp, Cannabis indica
ttttttttttttgaataaactaaaagtcacatttagtcacaaaaaatttatgttttgactaaaaagttgtcactaaaaatagttattttttgtagtggatcaaatgtcattatattatttgtatttaccccatcagtgggaaagaaccttagcactataaatataaaaaaacttattcatgcaaagggttggaatctcatttcttaagtggtccggaaaaatgtagggttcaaatacttatgtaaatcctaaaacttttccagactaaacataataataatatctcgtagactaagtttttttaatatcccaaccacataaaaactctaattttattctttgtctataatccttttctttaagctttattatattttattggttttcaaaaatctttattccgtttcttcttatttctgactatatctacaacctttcattttactatgtatattttaggtaattttcacattctttagctttaagatataagatacaattctttaaaataaaaagataaaagaaaaaaataataatgaaataaaatacaatagatgaaagtgttcttcaccaaaaaagagttgagcatgagacgaaaaaagatggttagaactaataaaaagttatgattgtgagattttctaccacgcttccgtttcctgaaatattagaaaaatatatgaaatcaacagaagacataaataaaagataaataaatacaaaggaaatttcaactctatatataacaaatacaaagaactagaaatgagtaaataagagttataactctagaatacaaaatgctacataaatagagaataaaaaaataaaattaaaattacaactcaaagcatggaacatacatataaatataaaagt

SEQ ID NO: 329894 - DNA, 1504 bp, Cannabis indica
  modified_base (1430)..(1430): a, c, t, g, unknown or other
atatgaaaaaaattagaataaaaattttttctagatgccaaaataagtagaaagtgcatcaatgcatctattttaagggggtgcattgtaaaatcaccctataatattattgcttaactcaaatggatcaagtttatatttctattaatatgtcgcttattactatttatgcatacatatatcattaagtagatatcaaatttttactaattattaataaatgaggatacacttagtcatttgtccctttttttaatacgaatattatttataaatagttattaaataaatttaactataatttattaatttttaaaatattaattcaattttaatttaataattaataataaattataaaaaataaaataataattattttatatccttaatatatattctatataaatattactagaaagattacttatttaagtttttctttaaaatgtataaatttatatatataatctcaaaaattcatatctaaataataaatataattttcgaaactaccacaaaataaaataaaataaaattctaaaaaattattctatgttgatctaaaaattaataaataatttgtcaacttaaattaattttcctcttacaattaattctatttaatctatttattttaattaattattaattaaaattacttaatttaagttaatctaaaattaatgaaaaaattaattttcaactttaatttaattttcaaataataattttgaaattctaatatttaataaataaatattattcaaaattaattaataataattaaaataaaataaaattttgaaaatcactttatagttgatctaaaattaaaaaaaaaatcaacttaaatataactttcacttattcaatattcataaatattattttagtatcttgaaaaaaaatcaacttaataataatttattatataattaaattttgaaaaatacaatttaatttactagaaaattaatttcattaaactaagtgtgtttttcttaaattaatttcaaaatattctaataaaaaattaatttcattaaactaagtgtgtttttattaaattaatttcaaaatattctaataaaaaagtaatttcatatattttgaatttaattagcctaatataattatttaaataatgacaaactgatcttcacgattgggttcacacaagacccaaaagagaagaatttaactattacttgaaaggaaatttgcacaaaatgctaatttttctttaaacttcacatttatactgtgacaagaaaatttttacatttataatatctcttcttttctttttttagtattattttagagtagtctgcggcaaaacccccctcaactatcaatttacttgtaaaaaaccatctaacctcatattttgtgggaaaacccttcaaagtattgttccgtttacntttttaaggtgtcgtctgtccagtctcgttaagtcctaattttgcccacgtggcaatgacaggtcactaaaaaa

SEQ ID NO: 329895 - DNA, 1217 bp, Cannabis indica
tatatttatatatatatatgttagttcaattgggttggttttaaataatggaatcgagtactacgttctgcgcctctgagtgagagagaagagaggcgttacttaaggagagtaggtggatgaatggtgttggcacttggcatttggcagtgggggcctgccaactcccaactcatttattacttatagctcatactatttctttctacactttcttcactccaatccaatccaccatacctttttcatttatatttttttgacttgaatattctatctgttgtttaatttgggtttgggcatgccagtagtggggttaattttcaacctcactgttgcattaattacgtgttgtgtggtgtagtggtaaagattgtttttattggcatcattcttcacttaagttaaaaggttcaaaacacaccacaactcttcttgaagggctagcaggtattatctgtgtgatgaaaatctttaaaaattgagataattacaaataacctaattaaagaaaactgaagtataaaactcttacagctaaaacatggtgctcagaatgatcaaattgactgaacagataggaaacgaagctgcactacatgaactcttttttcgagaaaaaatttattggtagataggcagcatcaacttttttttttccaaattccaagcttagctcggtcattttctatatgtactaaatatataaatgtacacatccaataatatctaattctaacctgtctatattcagctaggttataataatcataataacaatataaggtgggttgggttcagatcacaattcacacacaacgattcctttagattctgtggtcgggatccaaaattacatatgctcccaattataatactgaataaattttatctactcatatatatagaagatacttttacaaggcactttttaataaaatttattgatgcatcatttatttgctttactatttaagaaaattttttagtttatttttgttatggtcgccaatgttgtagttatttaaatattttgtaaaattttaaaaaatttaatacactaaaaataaagtttaaataatttattgtacatgaaactcttttattttgtaggcttgtttaaatcccatttttagtgttaaattttttgaaatttctaaatattttacaaaatatcttaaataataaaaaaaaaattagactaaaaaaaattttct

SEQ ID NO: 329896 - DNA, 557 bp, Cannabis indica
ttaataaaataaagtaaaaaaaaaaaattatttaatttttttatttggttaaaatattagaatatcattatgtttttattcctctcacttaaagtttgaattggagatatagagtttgaatgatagaaagaatatgaaactaagtattggaagtcattactattttaatttgaaaaatgagacccacataaaaatacaaactctttctaattaaaatttaatttaagtttgaaattctcattctcattctcataaattataaacatcataccaaacacaattatatgagaacgtatatcataattataattggatccattttataatttttttttgaataatttatactaccaaaaacttatttaaattgtgagttgcattgttttttttttttgttttttttctaaaaaaaatgtgcttgtaagatataatttttgaactttttctttttcaacatagtaaaatactcattaatttttttaaaataggtgagttgaattatctgttatacaatatcttatataaaaatgttatataattttttagataccaaataa

SEQ ID NO: 329897 - DNA, 843 bp, Cannabis indica
cattacaaagagcaataggatgaagatcccccttgaccgttggattcttcttcttcagaataaggaccaagtttgtatcattcaacccatttggcattacacaagaggcgaaaaaattcctaaccaataaaataacatccttacccacaatttaccaatacctttgataaaaagttggagtcataccatcaggccccgaagatttgtcaggatgcatctaaaacaacacttatttaacctcttcatctaaaaatgctttcaacacgatcaaattatgattagtcataataactggaggaatgcaatcaacaatctcctgccattgaacaagagatgatgagaaaatcttagaaaaataaaccaacatgacctctcccaagccatgctcctagtcaatccattggcccatagaatttttcagttagtgaattgtattattctttcgtctagtcgtggccttagagtcaaatactttgtgtttcgatttccatctttgagccacaattgcttcgatctctggcaccaaaaagtttcccgttgatccagtattaccgttgaatttttctttgcttcgtcaaactgatgacaagagacctcatcacgcctgtcctaaagtttctttatagcagcccgagtagctacaatccttgctttaaaatttctagtaatttcttcttcctaatctattaacctctgcccacaagtagctgttgggttttgtgccctaaataaaactcattttaatataatcagatttactaattaataaagatcagaaatcacttttatgttgcatggttcacatgatttatttcattattctttaatgtataaattctatta

SEQ ID NO: 329898 - DNA, 525 bp, Cannabis indica
gcgtctacaagctggtcaattcttgggagcgaaaagcattcctttggatattctttgttcaggttggtgaagtcgatgcacactctccccttttttttgggtttaggtaccagcacaggatttgatatccaaagtggatagaatacttttgttattaagtcatgggctcacagtctctcgacttcatctttgagtgcttgggcgcactctttgtccaataacctcctcttttattgtatatgtcagatgtttggatcgatattaagagcatgggccatcgcgattgggttacttcagaccatgtctccatgtgaccatgcaaataggtcccggttttctttagaaaccttattagtaatgattttatttatggtactaaaccttcccgatcataagtctttagttggaaaagttggataacctccatttcctccaactctctacatgtccaaatctatctatacggctccccaaagtgaggatctatatatgcgtccctactttaggctggacttcattgccctt

SEQ ID NO: 329899 - DNA, 724 bp, Cannabis indica
tttctttgttacttttgtttatggttttaatgacgaggttgggagaagagacctttagggactgtgtgaatgactgtcatcttgaagatgtgaagtatactgggaatttctatacatggtgtaataagcagattggagaagagaggatttagtctccaatagacaacgtccttgccaatctggcttggttgaactcgcaccctgcaactgaggttattttttagaatgagggtctctttgaccactccccaaccgtgttaaccattttcacagcccctcttggtgaaaataagccattttgttatttcaggatgtggtcctctcatcctgaatatcgaagtctggttgcaaataggtggctggaaaaggatgttggctctaaaatgtatcaggcggtcactaaattgaaaggtgtgaagcctaaataagcaacattttactgattttcctgctctgaatgatatggctaaggagaaattggatgcctgttaaacattgctgcatcagaatcctttgaatgttgatctgcagatgtaagaagcaatagctagagaggaatatgcaactgtataggtagcatacctatcattactacagcagaaaagctaagctactttggcttaaggatggggattctaattttatcttttttaccacaatagtattcgtgctagaagaagtcagaatcaaaattttatctatcatggacactaatgggggtaag

SEQ ID NO: 329900 - DNA, 528 bp, Cannabis indica
ttttttaaaagacaatatttttgaagtggggctataacccctacatcaattttaatgggtccgtccccgtgttagtggttattttattcagattttataaattgtgacgaaagggctttgttgaagaaactcaggttgatgatcgtcatttgtattagaaatattgatgagtttctaaagaaatttaaattgttacttgaatttctttgttggtctttagctgcattggaattttgcaaagtgattgaagagtgtggaggcttcttaagaaaagagagatcgaaaaaagagtgtcgcgcattaaaatctactgctgggttatattgtacagaaaagtcaatgatgtgggttccattccaagcataaaaaaaaactttccaagcataaaaaaaactttaattgacaataatctactacaatacattccaccacattaaatatgcacatgtgacaatacttacttgatcatgggtcccactctaaaataaaagggaaacttacaaaatactggaatttaagttaactttt

SEQ ID NO: 329901 - DNA, 767 bp, Cannabis indica
gtgggatgattctgagactgtgtaggtacgggactgcactgttgaaaatggcttaaatggattgattggtactacctatagcaataaggtgcatcttgttttttggtaacctatcacgaaagaacttttaataaatgagaatgttataggcgtgagagaatagaatgaaaagtaagggactattgaagcatgagggagagaataagagagcatatgtaagaaagtgggagaaaatgagaggtgtgagatttgaaatttaggaaattaggattttcaatttatgaatttatatatttatttaagattcatgttttagctttaaagttcaacttcacaaaaaaaaaaaaaaacatatatatatttataatatattgatcttatttaacttcggatcacatttttaattaggactttcttttttcttttgagaaataaacttaagaaaacaccacctaaaagacagagctcacattattgatatataattggtatctgcaaaataatagattctataaatatatatatgagtgactattcaatggttacatttttattgtaaccatatggttatatttttctttaacctgtaatagcaggttactaataggtagactttccttttttagatttaattaattataattaactattttctacattccttttttagaattatttaattataattaactattttcttaaaataattaattaaaaatttaacaagacctcttttagcaattattatttatatttaaatccttact

SEQ ID NO: 329902 - DNA, 627 bp, Cannabis indica
atagttactagcggacctcgttctacttacggacggtgtcctacccatggacctcgtcctactcactgacctagtccttgagtgacttgcagtcttacttgtaccagtgctttctcgatcattgctacgatgagtactttctttttctcgtgttgatcgactgtgggttcttatgcgccctcaggttacactcgcttcttcacgccctgttcttcctcctttggtgtggttcgtcgtgtttccccctttaagatttgtacgagcctcttccctacgggtctgggaagaacgctggtggttcctcgttggtgcactacatcccccctattgtttccaaggatttccttgtttccacaaggatttcctgttgcctggttttcggtcgccttctattctcatttctatgagatgtttctggctgatcatttgggttttcagggggaaccttagtttccccagttgctcatttttagggggccctcagtttccccatgcttttcttccagagcattttgagggtcctcctgagtagtttcctgcctcttggtttgtgagccacgaggcctgcgtcatggtcttctcactccagggtcgggttgattttgagtattattcccctgtgccgcc

SEQ ID NO: 329903 - DNA, 1214 bp, Cannabis indica
gacctgggactttgactagaacctagacccgtaacagaacccgtagcgagacccaaaccctgacccagatcaagagccaacccatacatagactaaaacttggacccagaacaagaccaacacccagactcgcacccagacccggactcataccagaactaagactcgaacccaagactcggacaacgaccgagatcaggactgggaccaagacccagacaaggaccaagacaaaaacctggagtaggattagaacccagactggaccagggaccgagaccctggaccgagacctaggacccgagacccgatactcggacaaggactagtacaaaacacggactgggacctgcacttagactgggaccctaacccagaccgggaggtaggaccctaacttgaatcggggacccggacccatgacttaggacccacgacccaaacctagacctaagacccgtactaggacccaagacaagagctagaattggtccaagatttggatttggacccgagaccaaggacccaagacctgaggcttggacccgacccatagtcggtgtctaaattagggaattggacctagacccggacccaaacccgaaccagaaccagaacccagaggcaaacccatagcagaaccttgcttggacctagaccttgattcagacgcggatcgggatctcgacctaaactcgaataggaacctggacgtagaccgggacttgaacccagactcaaacttgaacctgtattggaacctagactcagatcgaaactcgggatcaaaacccgaacctaaacttggacctagaccgggaactaggatccaacctagatgggggacttgggtcccaaacgcgaacctggacccaaacctggaccaaggatccgaacctagatggtggacttggacccaaaactaggccccgaaactaggaccgagacccaaaactcgaccccagactcgagacacgagacaagaccttggacccgaaacacaagacctaactactgggacacaaccccaaaagttgaccaaaagccaaacataggatgcggcccaagacccgagactacaactggaataacgtggacccggatctgtatccaaactcgatcttgaacctagaattagaatcggaacctgtttgggacttaaacacagacttgggacactaacaagacccaaacctaaacccaaactcaaacca

SEQ ID NO: 329904 - DNA, 1021 bp, Cannabis indica
aaaaactatatactcttaatagttcacatgtatataatatcttaatatgaacacaaatgactttgtggggtcttagtcttgccaattggccaatattttctatatatattgacatatatacatatacaaataatagataaattcttatgaagctaataatggcaatgatttctttacaaagagtgatgagtttgatactaatcataacactttattataatacttttgttgttagttctgttctatcaactcaaacacttttggaaactgaatttgaagccttaaaagccttcaaaaactcaatcaaaagtgacccaattggagctttatcagattggaaagatgtgattcaccattgcaactggtctggcattgtctgtgatcccatttcgaatagtgttgtttcgatttctctggttgataaacagctcaaaggtcagctaacacccttcattggcaacctttcaagtcttcaggttcttgacttaactcaaaactcattcactggctcaataccatctgagttaggactttgttctcaactttctcagctaattctttacacaaatgctttttcgggtcatatcccaacacagctaggaaacttggtaaatctgcagattgttgatttaggtgcaaattttcttagtgggaaaatccctgagagtatttgtaactgtatttctttgttagcttttggtgttagttccaataatctcacaggctcaatcccttcaaatattggaaagttaatcaatcttcaaatgtttgtagctgattcgaatagtttagtaggctcgattcctcgttctataggcgaattaggagctttacaagctcttggtttgaacacaaacaagttatctggtgtgatcccattagagattggtaagttgtcaaatttagagtacttagagctttatgagaattctttctatggagaaataccacccgaaataggcctttgtaagaagcttatttttcttgaactaaacactaataacttaagtggatccattcc

SEQ ID NO: 329905 - DNA, 1099 bp, Cannabis indica
tttttactattttagaaaatacagggtccattttgtcatttaacaaaatacaaggtccaatttgtaacttttgcaaaacacagggtccaaaatgttatttacccatgaaaaactagtatattttattgtggtgtgaattttacatatagtaaatatcgtgccaaattcgacataaaatttgctatgtgccaaatttatgccaaatttacataactttttagcacattattagagtacactttttaataaatgagctatatttaaactttttaccacttatttacacctctattaaaaatgatcatattctacattatttttaccaatggcacttctaaagctactctaaattctaataataagtattatttaaatttaattactatttagtatattatttgtccttttatacaataatgtattatttatttaattataatattattacactaaattttaaaaactcatatattaatatattaatatagataaatataatatgaaattaaatttaattaaatataaaagaagaaattgcactcacaatagattttaaaagttatttacttaaatatgacacatttaagtttgaccaatttatatgacatttttttaggtatttttatgatatttgatgtaccatatatatgtaaattaggtttttaaagctcatatttaatgttttatttgtttaggcagttttatttgtcactaataccggaaaagtaccaaagtttgctgatgacatcgaaaaagtcgctggagtagctaccggtgccataaaagtcgttagagttgctgctgacgctggaaaagtcatcaaaattggcattgacactttcttggtaatttttccggcgacttagtgccaattttgacgactttttctgacgtcgacagcaactctggtgacttttctgacaccggcaactactccggcgacttttctagcactgatagcaaactctgaaaaattcgtcggaattggtattgtcgccgaataactcactagaaaaatcacgaagaatccagtttcttgatgaagaaattaatttcttggtgatttttttcagtgatttttttggcaacaatgccaatt

SEQ ID NO: 329906 - DNA, 603 bp, Cannabis indica
tttgagggctggttttccaatttgataatttttccatttgttcagattttgactcttttccccacacccgaatcaaatatatcaaatccagcgtttgggtcaggtcatggtgtcgcaatccgctaatgtcgatgatgatgatgaagaggatgatctgggatttcgataccagccaacttctaagcccttagcattcaacaataatttgggtagcaaatctaatgtttttccagtaatgtcttcctctcggcctaatagatatctttctcatgcgattagtttcaaatgttttattttatgattggtttaaaatcaaaattcaatttgcattatttgataatcaaatttaaagtttggggtttgaatttgggtagttatttctttattataaattaacgatttaggttgggtcgtagtcttattggttgcaattttagattaaagaagttgagtgaagattgagattgcttcttttttttgaaaatggcgttttataaaataaggagttagacctctcggtcattacaaaggatagagacaggtatggaatgaacatccacccttccggaaatagagttagcaaaagcccacctggccacatta

SEQ ID NO: 329907 - DNA, 576 bp, Cannabis indica
tttttaaatattatatgattaaaaattaaaaaaaaacacaaaaaaaaaaataataatttagtgttatctataatgcctacctaaatatagtgggatattgtagacaaactaaaaaatgattatacaattgctggttggacttgattttggtgtgatatcacactgtaattgaggttttgcagcccattggaggtggccttagatgatattatcaccaaatttcaagaagtgttgaccatgatctctcttcaaacaaaaaacaacattatattcctgtgatattgttgttagaatattttatatttaataattaaccaactgactgattttaattagtttaatatatcaaagttaatatttcaataattgattaaatgttttattttatactcaacatttaattttgtttcaaattttattttgtcattaattatcataatattttgatagttaattgtaacagaaatttagggcgcgtttggaaagccacctgagaattggaattggatgtaattggaggtaattacacagtttaacgtgtttgtgtggccacgtaattacatagtaactgtataa

SEQ ID NO: 329908 - DNA, 761 bp, Cannabis indica
aataatctttctattaatcaaactaaccatttacaatccaatagacaagaaaccccactaaacttacttacatttcttttctatttttttataatcaatttgtcataataacttattctcttgaacaaaattcaatctaattttgagattctttttaaggatttttacaatatatgctaaaatttttaactttttgacttttttactatagaaaagaattttttttaaaaatactgtgtaagttttatactgttaagttttcattattattttacagttgtttttttaattgttttactgttatgatttgttattttacggttattttataaaaaaaataaaatttttataaaaaaaaatcgcgtgtcagtcaaattgtaaacttttaccgaaaattcagtatttttttttaaaaaaaaaaaccctttacttttaaataactctatctatacaaattggagctatatacttttttctcagatttacacaagttccgatttaaaacatcaaccaaagagcttggccaaagataatttggaagccacttcaaaagaggtagttttgaaatgtttgttagtgtgttttcattttctcttacagctttgtatgaaagtaacaagagagaaagaacaagacacaatatatatagccctacaatatttggaaactattaatattttggtgttaatatacactaaggtggaaaatatatccacaccacttgtatattgcattcatttttttttaaaaaaaaacttaag

SEQ ID NO: 329909 - DNA, 532 bp, Cannabis indica
agaacttcagctgcctcattaagtacaaaatttaaccaacatttatacatatccttcatatatctatatatatctatgatctttcttctaccctctttgcctacaaatttttcccatgtgtttatatacatacatttctattctccatcttactaagcagattggagtatcaaatattattatattatataaccatttggtgactttagggtttcgaggctactgttgtcatgtttatgtatacctatgctcagccatggtggttttattcttctgcatttgcacctgcacctgtatcttactccatctatatcctacagagtgaaagctttttaaacttataagtccaataagagagagaaaaacaaagaaaaaatcacatacacacaataataggcaagaacttcaatccatagtcttagaagacttaattagagtatgcacaaacatacaccataaatttctatatacccagaaaacaataggagagaagaatagaataatctatttatatatatatgtagagagagag

SEQ ID NO: 329910 - DNA, 794 bp, Cannabis indica
ataatacatttagaaaaatagcatagtataacaaagtagacatgcattgcacgtaacttcaatctagtatatatataaatctattattgatgcagttttttatcaacgagtctaagaaaatcgtaaacgagcaagataaacacatgtaaatatcgatcaaaacaaaccgatttatgaaaagaaatttgacaatggtgaacaatgaatttttatagtggttcactccttcgtcaataataagctagtccagttttattgatcttaatgcttaagaaaagttcttcaaaattattattctattctcaagtgagttcttttagaataagagagtgtgtgtccttttacaactcactttatgatctttttataggttttcatcgtagagcttagaatttcttaaccagatatatcttttttcttaactagagttaagttaggtttaaaatacaaaataataataaaataacattccaaaataaatatcatcaaaaaatgataatttgttgtagatgtccatggagtagcgctgatggcacgtgtgtagcacgagagtgcatcttgcttagaacctaggtgcacgagtacctattgtcctaatggactctgagggttggcatgggaaaatggactttgagggttgaccttccttgatggacgacgagggtcgggtgcccaagcgtatggaccttaagggttggccctccctgatggactttgagagtcgacccaggtgcattgtaacaccctactagcttaggcgtgctaacgtgatttttaacttaactgtgcagctc

SEQ ID NO: 329911 - DNA, 770 bp, Cannabis indica
aagcctatatagaatataatttagggatatatttaatgttgtaacacaaataacatattaattaatcaaataggctgccgatgcctttatagtacacccttgaaacgtctctgtatcaaaaagaatgctgaaaaagttgagtgcttcatctttgcttaattttgagtctttttgaggataaaacctaatatttgatgtctagtattaagctgtggatcaatcagtggatggttctgattcttcacaatacaggtttgggagattaattaggatcattatttggttctcttaaaaaagaaaaaagaaaagaaagaaagggattatttgagtgagatattggcattgaaatattaatattcaagttatatatattcaattcagcaaaaaataagggttatatgtattcttcaaaatataactttttcaatttcgtaaggcaactaattttttttatgaagaattttgtaaggcaactgttgttgaatttaggaggcaaagtgtgatgattattggttggtatttacacgtgtaagaattttttccctaaacacgtgtgggagaaactgatccaataattatgaataatcattaaatcagaaatcatgtcatgtcccccacacttcttcttttcgtttttttcatatgttaaaagttctccaaattagttttaaaaacatattgataatttttttttgagctccaaaaatgttcaaattaacatgtttaacatttttctgcgaaaaaaaaatagtaagttttaacatttaaat

SEQ ID NO: 329912 - DNA, 838 bp, Cannabis indica
ttttttaaggatttttggagaagctacagttaaacgctaaagcagctctaatctaacttttagaaaaaaattattttgattaaaagactaataatttttttgtactaaaaccatatttacttattgattatatattaaaaaaataaaatatttaaaataaattagttataataaaataaataattattaaatttgttatttaaaaaaaataatttatatttttttcaatattaacaaaacaacatcaatctagaattttcttatatacttgagtttctaatttttttaacatttgataaaacataatataaaaatactataaattatttttatcaaatccatataaatttatatttgaaaaaaaaattaaaaaatatttaaaaaataaaatatcatataaaataaatttttacatatttgtgattatagtaaactagattataacattatcattatcattataatatatcttaataacttacagtactttgaaatttataatttaccaaaccttctgcacagtttttttttacaattctgctgcaggtgctttttctcataacacagcaataactgctttttcccacatcacagctatgccaaactagccctaagtggggttgagattaggggtgttcatcaaactgcccacactgtacaaaccgcccgcactgcataaaatgtggtttgaaatcctttgtaatgcggttgtagtttgcatttgttttcaaacagtgcggtgcgatgtgatttgcggttcaaacttcaccacactatatattacaaagttattaatttttacaatataaatttttatttatttttttaatataataac

SEQ ID NO: 329913 - DNA, 642 bp, Cannabis indica
gggcataaaacccaacaaaaagtatcatacatggagggtaagcctttgaaaatggcagcaatatgctcttttactgaaacttgatgaccaacagatcgaagtcgatccacaagagtttttatacggaggagatactcattgactgaaagggaacctttcttgaagttctgcaattgagtagtataaagatcaattttagcaaaggtttgagtgaagaaatatacctctagagtttgccagaactaagcagaagtttcagtgccaacaatcctggtaagaatcgaatcggacatagactaaaggagccaagagtacaggagctggccttgaacttcccactcagtgaaacgaggattgatgagaccaagagcttcatcttcttggttgagaaatttcaaaggatgactgaacgaagctgagatataatcttgaagccgatggcctcgaattgcagagagaatttgtggacgctagagaaggaagttatgtcatccaatttgacagagactttgtgagaaaagaccacaggattgaaggtgtgaatcggagcagccatggaggaaagagagcaagaacgagtggagagatgaagagtgtggaagcagagaaaaaaaaaggttactctgatacaatgttgagatt

SEQ ID NO: 329914 - DNA, 821 bp, Cannabis indica
gtaaactgtgtaaatttccctgttattatgcatcttaaggtatcatagtgatataacatgttgtgaatgattagcatttttttttttttttaaaattttaaaatgtgtgagatctaatattatattgcaccaataataatatgttaacttttgtaatatttgacaccttaaaatattccttgacatttatatatttgaattattataatattttaagaataaaataaattctcctgaattactggtagaaatttgattattttttttttgttgaaaaaattatttcccaacttatgaaacttgttacaaatatcctaccttaattacattttgttcattattttatgagtttttcgctgaaaaactctctcaacaattatttcacttgcacttaacttttaagctttaagtttagtggtaaaaccctccaaattattgcactggtaaaaaatttaaagtgtcatccatttagcacagttacttatcaacatagattacttttgtgtacaattttgtacatgtaatacatttataatattctatgatatataattatttaaaagatataaataattaattccaaaattaagaatttattttaaaaattatttgacacacaacacaattacattagtttacatatacacataacacaatgtaatttagggctgttcatccgatccaatccgcacttttttggtcaaacaacatccaatccgcattaagtgcggatttcattttttggatccaatccaatccgcacaatagttcaaatccaatccgcaaaagtgtggattggatcggttactttggattggtta

SEQ ID NO: 329915 - DNA, 854 bp, Cannabis indica
agccgtagattctaatagtggtattaaagctggtttttttttttttttgaaagaatcaagatacaaattaatacagttaacaagcaagactgaaagaaatcgacaatcaagaataggaggaaattgatcctcaagaacaagagagattgaatccacgagaagatgactttaacattagaaatttagtggatgtgccacttaatgatcaaccttagatttttaaccctatctctaatttaaattctaacagaattaatattattagtgttaagactgacattgataaatttgatggcttaggtgattataagacttgaaggaggaagatcagatccttgctagcataatagaagttgctaagagtgctagaagaacctattcaatggccagagaacacaaccaggattcagcaggaagaattcttcgaaactacaatatgtttcatcatcttcaatttgagtgatgtaattatcaaactagtggataaagtagagactccatcggggatatggaggaagctagaagaacagttctagcagaagtctttaaccaaaaatatttttttcaaggaagaaatctttggtttcaagatgaacagaactttgatgaatttttaagaatgcatatagaactggccaactctggtgagaatgagtctttaagtgataaaaatcaggctatcatcatcttaaattctctactagaatcctacagggaggtgaagacaaccataaagcatgtaaggacttctaaaacactagatgaagttatctctaaccctaatgtctatggatctagaattaaagaatgacaagctaggcagatctaatggagaacttgttggaaattatttt

SEQ ID NO: 329916 - DNA, 624 bp, Cannabis indica
tttgttgatattattagtaattgcacaacttttttcctcacccatcaacactgatgtcctaccaatactttcacccatgattgacctgtaacaagtaaaacaaaaacagagaacaacatttctgtttcaatgaggagttgttgggtatgtgaagagagggtttgttaggaggagaggattctagtgtaactgttaataataatgggtgttggttgaaaattgatgaggaagaacaaccatttctactagactactagttccaccgtgtggccttttgaaaatgagtatatacaacgattaatttgcatgcaccgtaaatatttaactttaatttttaacgataataatatttaaattataattattattaacacattataatttactaacttagatattattactgtcttacaaaaaaaaattataaactatcaaagagagacaccccacaatggcccgaccctctccgccaacccctttctttctcggctcccaagttgacaaccgacttggcttccctcgacgaccgcggcagacaaattacacaacaaattactcaaataataataataataattcaggttggtgggtgggtacgggtcaaatgcagatgttcagaataca

SEQ ID NO: 329917 - DNA, 724 bp, Cannabis indica
actaaatattaaacaaaaacaacttactcaaaatttgacatttgtcattacatgaaagagagagtgcaaaagagagtgagatagagagtttccttagcactcctcaacattaatcaattcccattactattcttattccattgcattactattaccgttacgacattaccattactattatattccaccaaaccaaacatcacctaatatttgtatcattgtccacatactaccgggtctcttttcgaacaatttgttgagcctcccatacacatacacttttccatacaaaatttggattatttccaagttaggcagtaagaaaagaacctaaaaggaagtaccttgacttaaatatttttgaggctagcgagtgaggtcttgttaggaggagtattcatttgatcaaatctacactattttgttcatagtgtatcagatttgcgctaggtgcgcagggctagacccatggccggccagagggtagggcagccggggcctaggccctagaccccacaaatttggaggcctcaaaaaattaaaattaatattatatacataaaaataaaaatataatatatgtacatatgtgtaacgccccaatattttgctttattttacaaagtgctaattttgatgcattaactaaaaagattcaaagctgtttgaaaatacacagtgggttttacaataaatatgcaaaaaggtgaatgatcattcatat

SEQ ID NO: 329918 - DNA, 647 bp, Cannabis indica
aaaagagaaaaagaatcaataaatgttatcgtgaaattatcaggagaagagaaaatgggttgttgtcgtttcgggatctggtaagccctgcttgactaataatatgtcatagtttattttatttttattcatattaataattataataaataattaataaaataaaaaatagaagtgaaagtgaaagtgacttgtcagaaacttttgtcagaatgctagttgcactccaacaaacgcaccctaaaagttttaatttttcaagcaaccaaaacaaaattaaatattaataataccctcaaacttacaaaatgtcaatttcccaatttttatttttttattgctaaatcttaaatatgggtagtagtgcctcacacacttgtacacaacttattatacatatattgtacgagtagtgtctactaatttaaatgttttatttgtaattgattatagatattctttaaaaatattcgataattaatttagaaatatttatagtaaaacttttttaatatttataattattacacatataatttcaatcaaaaaatagcggcaaaagtattttatcttacaattttattgtaattatattctttttttggacaatcaaatgtgaactcaaaaatacgtggcgacatattatt

SEQ ID NO: 329919 - DNA, 880 bp, Cannabis indica
gaccctagtaaaatagagagagagagagagagagagagagaccaagagaatagaaaatagagatcgacatagtgtacttactttatggggcttgttggggacgggaacggcaacggtcgtccaacgttttgtgcacagagacaaagagaaactgatcaacaagcaagaataacggttgtcgctcgatttccacggtcgtcgctcgatttccacagtcgtcgctcgatttccaccattgctgctattactcaactccggtcatcctctagcttatgtccgggaagagccactaagaacaacccctcaccatcgacgcgaagagccactaagaacaacccctcaccatcgagaaccccttcgcgaacaaccgagagagataatagcaagaataactatgaaaaaaaagagatagaagaggcgagagagttgagtttcggattgagattgagaagcctttgtgttttgtttaggtgtgcggctgagtttaggagtgcggctgagtgagaataagattaagaggtagggttttctatgtttaaattggagagagaataagaatggttaataaattacattaaattatttattgtataaaaataataataataaattactattaaaatataaaatatattttccttattaattttttgaaaactctcgtccagcatcaaagatggacgttcttaagtattttttttttaaaaaaaaagaattattatttaaatttattattgtatcatgtccccacttattttttatgtccaatattgttggacataatgtaaatttttttttatgtccaacaatgttggacttgaaaactccacataaccattttatgtccaacattatttttgttggacttgaaaaagggaca

SEQ ID NO: 329920 - DNA, 555 bp, Cannabis indica
aaactacccaatttcggtgacggtcgtataggtgacgacttaatagaccattaggaactatttacccgatagtgtaaaatcgttaggaattctgggtttttagtagtgattctctaagtaattcaataaaagggagaataggctattaccattatcacggggccgaacctctataaatttcttgggctcttatttgctttgtcttattattaattgatcattcaattcaatgactttaaagactcaacgtcgttggctaaaagtgaggtgaaaaaaaaggatgttctcccatttgatatccaggaaattccctgtcatttcatagcattatttttggttagcaatttagggtaaaaatttgtctttcttacccaaaaagtaatactatccaacttcgcatcccacctgtaagaaccattattttctgaagtgacaaattatgtccagttgcatttcagttgcatctgggacttgtagtgttttgtctggggttcgtactgttagtgttagtccacgtcagtaaagatattttaggttttaatgttcagatggtaa

SEQ ID NO: 329921 - DNA, 560 bp, Cannabis indica
aaccccaagtgagagagaaatttaaaagtctcagacttggagttaaatgattgtgaagactaacaacatacaaggaattaggagactggaatgagtgattggagtgtttgaggtggctccaactggaacgataagtttccgtcgtagccaaacaggaagaaggtgcacaacgaagaagcaaacaacgctctctgttctctgggctttctgtttggattcggattcgaatgttttcttaattctattgtcgtttttcttgttatatgtagtttccatactttcttgtcgtttcactttttgtgtatttgattattttctcgtcccaaacaaaaattgctatttcacaaccaaaaaaaaaacaaatgcaatttagtttaaatacaaaaaacatacaatctttacatgtattgtcatctcataaagttgtttagtctaatattttttttttaaaatatgttaaattattgagtatcatgttagagattttattacaatggaagataaatcaagacatatacaactcaattgtaaaaatagtacaaggataataaaagagattg

SEQ ID NO: 329922 - DNA, 790 bp, Cannabis indica
ttttttcttgctttttttgacaaggccgcattaattaaaagaagaaaaaaaaatattcctaaattctcgacaactgagtacatggaaaagaaagctgatcgatttaagctgcagggccttactataacgtttataaaaacattaaataattatatatttatttattgacaaaaaataataatatatgaattagataaataaataaacaattctatttttttttaatttttattttccaacagcctttggaatattcaaaatagaaccttataataagtgcacgtgttgttggggcagaatgagaggttgatctccaactggccatgcataatagtttcaattttgtatgtcattacgtgcattatctttttttaattaggcttcatatttattatttcttacacattattcttcgtaattaattaattaattaataaattgtattaattaagtatttcattaaaaataaatacaaaaaatttactgagacactaccatgtggctactccaatgatctgtcctctcttacaaatcctatttaaagtttaattatattgatatagttagcactagcatataattatatcataattactatgtattgtagtggtatgggtatagcattagataagtataaatgtattaatattgcatttctttagttgttaaaatgtatatcttttcttttcttgtcagaaaaaaaaaacatattattttattcgttaaaagtggcaatagtggaagttgctagatcataacccatgtagtaatcagggccggccctgaaatt

SEQ ID NO: 329923 - DNA, 712 bp, Cannabis indica
tttttgactattttacccctacgcctgaattcgcttaagtttaagcatcaatggcattttggtcattttattagagagatgtggtggctaacttggagcttgacacctggccatctagtgacttgctgaactaaaaggattattaggctttatccacccaaaagttaattaagaaaaataaaaaaaattcaagaatccctctttctccctttccttgcttgaccaccaccaagaccagaaagaaccatcaaaaatctcaacatttattctggaattaaacaagaaaatatgggggaatcaagtagaggtaaaccctagtactttaattctttagatgttcaagcttaagtttagttcttgtatgcaattttgtgacactgtggctgttaggatttgtatgtgttatcccaaatttcgcactttgacgtggcatcacgagagtggttacacgtggactctacttggagcatctgttcaaaaaaatatgccgagtaggatgcctcgctggcacatccagtatggaatattcaacgagctgtgcagaatgatcaacacttagcgaattcagcttaacgcatcatgagtcaccagctcaatccctacaactcagggatcaacttacgtggatgtggcacacacacgatcccactatcggtgtattcagcctcaatcccacgatccttgcattcagcattgatcacacgatctttct

SEQ ID NO: 329924 - DNA, 944 bp, Cannabis indica
atacttgcttaatgacttacagatccctcaaaaggctcctgcattcctctattgtgacaaccagtccgccatacacattgccaacaaccccacctttcacgaacgcaccaaacacatagagttagactgtcatttcatcagggacaagataaaagcttctacactccgactcatccctgtaaataccactctacaacttgcagacgccttcaccaaacctcttccatccacaattctggcttctcatatccgtaagatgtctgtatatgacatatacagtccatcttaaggggggaatattaggattataacagaattggactgacttaggttgtttgactgttacttacagttattagttattatcctaccgttatttcagttagttatttctgttacaatagctaccttttaggtagatatttaagccttaatgtcggttactctatgtatatatattggtgttcttcttcatttgtatgtaagcagattgtactttttcattcattcagtaaataaactttttccttttcctctgttttctctgtttcgtgtttaaagaggtttatataagtgaaaattaaaagtgtacctgttcaacgagaacattaagagttcccttagatacatgatgggtctctccaagaatagggttataaggtacaactccaaagattaaagggcgcagagtggaaaagttccatgcaagaacggctttgaatctttctattgggctctctccaatattgcatttattcaataaatcatcaccaacacaatacactaactcaccataacactgtaattgtgattttggcatgttgaatgtagccggcaactgttaaaagaaaatcatgcatgtggttttagtatatatttttctttctttctataaaataataataataataataataataaagaacttttttatttttacactt

SEQ ID NO: 329925 - DNA, 828 bp, Cannabis indica
aacgatcattaatgcctaaaccctgtaagaacatgtctgtttattaattattattcgtatttctttaagctctaaatatatttagtttttaaaaaactcagtaaatagattggatcgctcctttatatagaaagcaagtgatcattcaatttacataatcgattagtcaggattattacaatgttaattatattcagttaagataaaaaaaaaaggtctataaaataaatgacaacagttttgactatttttatttaatatttaaatgaatgttgacgtcgcacatcgactatccttattctgagcaactgtcatacttacgggttccctgatgttgttcgcatatgaggtctttataccgtttagaaatgcataaaaagcctcttggagtgtatcgatgcacaaacatctagggattccttataaaatagaatagctgcgactatatgataactctacaaaataaaattatttctcatcattaatcttttagatttgtgttagtttagagtctttttagtttattttcttatgttattttattcattttgcttagttttagtattaatttgttatggtggtatttatggtaggaaaattttgcaagaaagataaagctgaaactataatttgaaattttactatgttctaatcctattttgataaaagtcaaaacataaaattttaagatgtctttttcatctttcagaagaagtttttggcaccattttcggtgactgaaaatttatcaatgtcaaaatagttaattttatttttaatttatttttttagtttaatttttctatctagtttattgtatatgtttgt

SEQ ID NO: 329926 - DNA, 569 bp, Cannabis indica
ttcatatttagggtgttaaataacatacttgtgagtagatctaagatcctggttaaaataatttccaacatatagttcctcatgtgtctcacaactctggggtgctatctgttgtcattgttgtgatggaggacactcacttcttcctgccatgtgcgtcgttctcacaagaaggtcattgtggtatggtgttacaagtagtatcacgactttgggttgttcgtaacctagacctctcttggcctttgatagggtaacatgttgaatgactcccacaagttctccccttctcgctgtaccgagacactcacgggttcctcgtcattgtggccttgagttgtggcctgatgtcccccaatttgttacactgcggttgcgttaataaacgagctatgtcgtatccataaagaggtaaaatgacactcaaaaggagagttagtgagtccaaaacaataaaaattgtgcgaaaatattaagaaaataatttttcaaaattaaatacgtaactaaaactagaagtgatcagaaaacggttatggaagacataagctttgtacatgcaattatat

SEQ ID NO: 329927 - DNA, 1095 bp, Cannabis indica
ataagtatcagttgggagtgctcaaaccttctcattgcacttttttttataatttatttttattatttaggtagaagactgagtttagattagggtagtcttgactcttgagtggtcgagtgttgaccatctccaaattaagggtggaggacataggcactacggcaggaaaggaatagcagtagctcttaatttttttaatataaacagcccataatttattaaaaaatgctattttccaagtcaccaatacgaattttatggattagaatttaaaaaatttaacaagtcaatgacaacaaaataaaataaaaaaaaagtacaaatacgatacaatctgtttaatacgaatttgatattattttttaaataaaataaaaattattaataatattataactatgtaaaaatatatatatttagcgattcaatgttaaattaaaaaaaattaaattttctttaaaaaaaattaaaactatttaaaaattttagttttattacatatacaaaattatataaaataaatgtacataaatttttttaatggaaccctaaatttatcatttttttttcacaactctagctttagtataacaaaattggtcaaagtgggttaacacaaatacgatacgatcttttacgggtcgggtcggattagagttgaaaaaattaaacgagaatatatgcactaaaatctataataatatccctcaagcttgaacaagacttgaaaattaaattaaaccacctttgaaaaaattattaattttgtcaagatttattcttttttttagtcaacatacgtacattaattaaatttttattattcaaattctttattatcatataattattcacatgttttattaataactaggtaaaagttatgttagttttatttaaggtgttaggtaaaatatagttgtgtctataaatatgtacattgttattaataattaaaaatacgttaatcttaatatatacactcatataatagttattcttactgtgaataaataatttatgataagtcataacaatatatgactttaacatttattatttgtttttagaaaattcaaaggaacaatatat

SEQ ID NO: 329928 - DNA, 739 bp, Cannabis indica
ttaacagaatatttttttttatttttaagtatattctgttaaaccaagaaatgtcgttagatagacacttttaatatataaagatatatattatttgggtaagtctatataacatccatctaatgaggtgttttggtagacacctaattgttttagcatatagaaaaaaaaattaatataattttttttatggtcttatatattatagttatttaaaattatttgtgaatttttcgaaaaatttcgaatagtttataataaaaaaaaaattgtgtattttgtcgtacgcacgattttttttatatacaggctaagtaattgtttaaattttatttttagcccggtaaattattcgaaattttttaaaaatttacatgtggtcttaaatagctataattaattataaaaaaaaaatggacaattttttctaattgctatttttatggtactccaattcatattttaataatatatgaataaaaacataattaattttttttatgtatagaacatttaattttttatatagcaagtaactttttaaaatttgtatatataaaaaagttaaataaatatcaactcaacaaacacatccaacaaatataaaatgttgtcggaaggaaaatcaatttagctaatttgcaaaaatataaaattaaaaataataaatattatcaaacttttcaaaaaaaaaatccactctaattttaaaataaataaataaaatttacaaaatata

SEQ ID NO: 329929 - DNA, 488 bp, Cannabis indica
ttttcaaacataagcttatggcataatttaaagtgccttggaagtaaaagtagtgaatggatacattataggtttaaataagtgacaaaattttaaaacaagcttaagctcaaacttgataaactaaggataataacatcaaagtaggcttgaaatgctcaaacaatccaaagaaaatttcctataaatcatattctaaataagcattgtcaaggatgatcgcctcaatagaataactcatgtaatttatatcctattcaagcaatcattttgcaagccaagatagtgcatttatgatacaatccaaatattaacaatttacatctatacaaaagcatccaaattaatccaaatagtcaaagaattaaacacgtgactcacatttttaatctatcccaaaaataacaacaatagcataatcgatatcaatttaattaataaccacgctacactaaacaacaacaattaaaaaaaaaaactaagctaaa

SEQ ID NO: 329930 - DNA, 1611 bp, Cannabis indica
gcaagtaaactctgttgtagattgtcatatcagtaaaaccccagtgttctgataaatctaggaatctttaatcacatagtcatgtttactttccactgtgctgacaacacaataaacaggatcaagtatgtgaaaagggtttggatgaatttataaatcaaatagacaaataattgataaggtgaaccaaaacatacacaaatgaatgaaaaatacttctgttttctttattgatattgaataatccggattacattgaaatggagttttatttagggcataaaacccaacagggtcatcatagatgttctagtcaaagtggataaatttattttcccaactgattttattattctggacatggaagaagacagaaatgtttcgattgtccttgggagaccattcttcgcaacaggttaagcattgattgatgttcagacgggtgaattgaagctgtgagtgcaaggggaagaagtgatcttcaatgttctaaaggcaatgacttttccaaaggccagcgataactgttctttttagatcttgtagacactatagcggagagaaaaagttgatgaaagattcattacaaatgagtctaactgaagacgatttgaatgagcaagatggaattgaggagatggggtacgctgaaaggcttgactcctatgggccattgaatagaaagtactatgaagagttgggagttgttccaaagaagcctgtgccatctacagaaaaaccaccagaactagagctgaaggtgcttcctgatcatctacggtatgagtttttgggaaaagacaagaatcttccagtcatagtgtcagcttcactttctgatgtggagactgataagctgctaagagtactccgcgcacataataaggccattgggtggacattggctgatatataaagggaatcagtccctcaacagttatgcatcgaattctaatggaggagggagctaaactgactattgatgcacaccgaagacttaatccaccaatgaaagagattgtcagaaaggaagtggtcaagtaattagatgctaaggtggcttacccaatttcagacagtaaatgggttagcccagtgcaagtagttccaaagaaaggtgggatgatagtgataaaaaatgaaaaaataaaatgaattgatccctacaagaacggtttctagttggaaaatcttcatttgactacaggaagcttaaaaaggcaaccagaaaagactattttccttttccattcattgaccagatgctagaccggttggctggaaaagagtactattatttcctagatggctactctggttaccatcaaatagccatagcactgggagatcaagaaaagacaaactttacatgtccatatggcattttcgctttaaggagaatgccatttggactatgtaatgctccaacaacatttcagaggtgtatgatggtgatcttttcagacttgattgagacttgtatagacatctttatggatgatttctcagttttcggttcctcattatttgaagaacttggagaaagtgctaatcagatgtgaggagtcaaacttggtacttaactgggaaagtgccatttcatggtaacag

SEQ ID NO: 329931 - DNA, 1042 bp, Cannabis indica
ttggaaaaattgactgtttctatatattctgcggagttaatagtttaattgagaaatttgaataattcttattattattgattttgaatggttatggagggtagagattgactcttaattattttttaatagcgtactatctatctttatttgcttttcagtttatgttatttgatctttatattaacccctcattttaattcttagttctaattcttgaataataaattgataatagtcctcgtagattcgacttatatctatcgttatactgaagtaactggtaatattaaaataaaaatagtaaatttgttgtgggaaacgatacgcattaaatttttagcgccgttgtcgggggctatttaattcaatttgttattcatttttttcttattacgaacttgttctcctaattgtgattttaattttcagatctttcgttgaaaacatgaaggtatactatcaatagtataatgatccatattatgtatcaccacaagtgtaacaatatgatccctactacgacagttacacttcataatgtggagatcattccaatacattatatgacaaaattaatcaatatgttgagccaaattactatgatcctctttcacaaccacataattaaggtccatttattaaagatttgataaaggatctagcgagtaacaccattccatttcagtagcaagctcacatatatacttaaaattatgttcttttttctcaacaacctactcctattgtgccatatagtgaaaagtcaattattgttgagctgattaaaatgataccagctaataacatgcagattcaacaaaatacctttcagttttagcaaagctttcatgaaaatgcagagctttcaacaatctctacaaaatgttgggttttatgccctaaataaatctctttacaatctgattagttatcaacacaagaaatttgaagtgattgatgtctgcatgaattttacatgctaatggtttaatatgtttattacttttacactacagaatcagttaaatccagatcatat

SEQ ID NO: 329932 - DNA, 600 bp, Cannabis indica
agccatggtaatgatttactttcatgaaatatgaattaaaacaatgcttgtgttgatttggatggtttcatgttggtttctgtgcttatatgatgaatgtatgtgttttactaaatttttccataaaaataattttattttctttctgaaaatattttatttcgatttcttgtgaaaaattaagcaattttcttttttacgaaattatgaatttttgaagtttcgggttgaattggtgtcgatggtgctcaatcacacgcacagagcactcggacaaggtgctcgtgcgcgcgcgtgacaagggacaaaatcctgtctgaacccgcttgaagccccacgctcacacacgatgggatgatgcatcgcgcccacgcgaaggctgcaggcgccgagaaaactcggcgggacaccctgctgatgccctcctgcgcgcgcatttgaggctgcgtgcaacctcttgtacgcctaagcttggcagaaggtgcatcttgcaccaaaatctattttttggtgcatttttttccacaaatttttgattgttccaatttttcaaaccctaatttcaaaataaaatattattttaacatatttaaacttaaa

SEQ ID NO: 329933 - DNA, 1492 bp, Cannabis indica
ttgggcgcctatccaagttgagtcagaagtagactcggagactggaagctccgatacatagtccgagttagaggaggccgctccaatgaagggaataagatataggacatgtttaatcctccctaaccatcgtttaggccattatgacgtgcgagacaatctgatgaatggtcttggcgcgccttcagtagtaggactagatcatgtcctaaaatagtctcccatgccagacatattggattctaagccgcctaagacaaggtgggttttgccagctttcgctctttctagtgaggcctttgacaaggtcattactagtggccttgttgggggtgttcattgtaagattcctcgcaagaactgtagggcacacaggccccctatgggctagctgccacatagagcatggggcagtgtttccacttcatcattacttcctggatgtcgcatcctacttggagatgtgcccaacatagctcatgccaaagagcattaaatatttgttggcgatgttcattttgtatagggcacttggttggcctccacctaccccttatgagattggatacttttctgagttaaagtttgggctgaagcagaacagaattggctatctctatttcagccagcttaatcgccaatggctgggtgacaccaactgcaaggccatgtcaaaagtaggcaagtatgccaaaaatactttatggtacaaggccttcacggaattgtgcaccaagagtttcagttggtgcctctcttcagatgttctatccctactttggagataagggatagagcaaaccacatcctttctttgtcaactgaacaaagaaatattattcgattaaccagtgtggaaaacttccggatacatggcttgtatccccccgcttctagggttgcgagaatgccagctgctggtgttgtaacgccctgtcccacagggacgccacgtgtgtgcttttacaaattaatttatagttaatctattagtttacgaaaagtgcggcttaattaaaataaaaacataatttttataaaagaaaactaatgttaagtacggggatcccctgtataaaaacttttacaatttgttccaaaagtggtattacaacatcgaattatactttcaaaatacagtcaaaaggagtggatcctgtccactggaaaccgaggcactgcggttgatatgtacatcgttgggagacctctgacttatggctgatccactttgcccttccctttatctgcaccacgaagcactcgtgtgtcacaaagactcagcaagaaagcaagtaaaacacaaacattatataacacgagatatcaaacagtgcatagcatacaatattattattcacaataaacgcttatacaacacatattcaagcattacataacaactattcgtctaataagacaaactgttcttgatgtctcataaagcatccttaccactcgtcacccacgagcttcatatatcactatcgtt

SEQ ID NO: 329934 - DNA, 910 bp, Cannabis indica
tttttttttttgattttaacaaaattcgacatagaaatcccaattgcaattagcgctgcaacttaaattgcaacaaaaaatcgtatagaaactactattgcaactagcgctgcaaccactttagaaatccaaaccgtaaatttaaaaaaatagtatatggaataatttcccattatttatttttattaaaataaaatcaaatatagtagttattaataaaatgaacaaataaaaattaagtttttccttaaattatagggtcacaatacgtcttgatatcattcttaaaatacatgcatgtatgcaaaaaaatcaaagattggtgagcaatttattcatcaactaataataataacttcgataattaattaacttatgtgcacgttttaaacttcaaatgacatcttagtttgattgataaactatattctttgactttgcattcattacaaaagttttattaactcaagaaccaaagaatattatgctcaaactcaaccaaaaccaataagtacagaaaaaaaatcattatatttaaatcacgaaactggtgattaattaaaaatataaattaaaggacaatatatgataatacaataattttttcttaatatgtttggttgtttttttttataaaaattaaatacttaatttcattataaaacaaatctaagatccgccactaagggattttaagctcaaaatctgattttcttttttaaatattgtatatttaagtgtggtaatcaataatcatataaaaaattttgtttgtgttttgtacaaatttgtttgaaccatttgtccaaaaaaaaaaaaccttgaaaaaccgtgtttttgcaaatgtcagttgtatatgtgaaaatataaaaactgtaaacgtttgcagcagcagaaagtaattctgcta

SEQ ID NO: 329935 - DNA, 851 bp, Cannabis indica
tattaataatcatttaaaatacaaaaaaaaaaatataataataaaattaagatcacaactatatataatatcaacattatatagaatataaagattcaggaataaaccaacattgttgtgtagttcaggctaacaacacaaaaaaaaatatatataaaaatagtcacaagcaataaacctacatttggtttaagttctgactaaacaacataaacataaaaaagcctacagaaaattattaacatattatatcatatcctgactaaacaacaaaagataaatataaagtatttttcttgaattcaaatcactctgcttttgctttcttccctctagcttttgccttcgtcttctttggagattttggtgggctttctggctcactttcaacattctcaatctgtttcataagtccaaacttatatagcaacacagaaagccttagccaatactcctcaacatcaaagtcagcatgaatattcttcccctcaatgaaatactcagcaaaagcaacaacaaacgatccacaatcactagaaacaacaaaaacaaaacagcaatataagagatgttaaaataacaacaaaactacaaaattaaaatagaacagaaataattaaaattcatacttatccacttgttcaggaaatacttcagcattgacaatagggaaatgtgcagtaggattcacagatgctagtaaggtataaggaagctcatcataaacacttaacagagagaaaaataatggcaacatgacagaaaattacatatataacaaaataaatcctatagacaaataacacaaacataaatataaaaataacatacgtgggtctcttaagcaaacc

SEQ ID NO: 329936 - DNA, 1094 bp, Cannabis indica
tatttatagttaaatttgtttagtaatcattcataggtaatacccattaaaaagtgttaccatatatatattttaactaatatctactctactctagtttattattataatcattactcataatatacaaactacttctaaagaagcctcttggttcttcctagtagcaagctagaattggtctcacacagtatatagactacattatgtaagaaactaagaggttgtttagttgtgtttttagttttcaatttttaaaattgagaatagaaaacagttttttgttattggtgttttgactcacattctttcaaactatttttagaatttttttttactaaaaaaaattaatattctacaccatatcgttacatgaacccatcttactcaggattggactccggacccagacccgaaccttaacctcagacccccgcccgaacccaaactcagaccctagcctgaacccagactcgggtccgaacccaaactcaaaccctgaccccggactcggagccagacctcagacctagaccctgaaccgcactcagacttggacccagatatcagacttggacccaaactccagactcggacccaaacccagaccccagacccgaatttgaacctggaccctagaccctagaccccgaaccttgacctagacctcgaaccttgacctgtaccccggcccctgactcgaactcggacatcaaactcggacctggactccgacccggaccccaaactcggaccctaaacctaggcccggaccctggatcccagacccgaacccgaaccccggactcggaccccgatttagacccaaaccctgacccggacctggatccaaaccctggacaccgacctggaccctgggcccaaactcggaccaagacccgaacccgaccctaaacccagcctaggacctcggacctagccccaagtctagatttgggtttgagtctggagttaaggtttgagtcgggatcagggtcgtggttaggctccgagtccggggtccgagtccaaggtccgactatgtgagcaaaaatataaaatatattatattagacaaaaaaaatatttttaaa

SEQ ID NO: 329937 - DNA, 837 bp, Cannabis indica
tatcagatcgctgacctatctatttcggcaatctaactcttcctagtgagatcgaaggatgtactcttggtcatccatgcatctcgagaattcgcatctctattgagcgagtatattacaatcagcagcgcgtgttcttcaaggagttcacgtctgtgttgagcgagtacatcgcaatcagcagcgcgtaactcttcaattaggccggcttggcagacaacctctcgaagtctggctaactcgagatctcacgtggggctcaccaattcatggtcttgtctctcctgcatagtactagggatgaaacccagttgttgttcctgagggtgctcctcaaggattcttccttcaattagaggcgcctgtggagggtcctccctaggaggcagggaccgactattcaggttcaccgagatgtttgcgccatcctggccaattgtagttgctagatttatggtgcctactatggtgataggattggccacatctattgtgttcatagggatggctggaacatgaacatcatgatctgtaatctgtgggtcttgagggagacccaaggatgcagatggtgcgattggtgttcttctcgtgttaaccatggtgtttgatcagatatgatatctatgctctcaatgaaagcaccaaactgttgacctcgaaaagtgatcaatcgacaacagtcgtatgaatctgatatttgccacgtgttacacaataagaacagtaaagtaaataagacaaggatttttatagaggttcagccccctaagttagtaggtaatgacctactcctcttttggttgtattgatacctagagataatactattcaaat

SEQ ID NO: 329938 - DNA, 552 bp, Cannabis indica
gtaccattttcatcttcatcttcattattattcggtcttggttggttgggtttaaaagctgttttcgggcttctgaagctctaaaagcacttttgttgcgttgggtaaccagtaaattttagacgaagcataacccagctaagcaaggccttgttcttcatattataaattttatggattttcggtacaataatatagttttctttttttcaaataagttattttgtgggaaaaattgaataaaaagttgaaaaatatgaaaaactagttaccacatggataactaagtatctttagggtaaccaaacgggtaattcgttaccttatactgtttttcacatatttcttaattttttccaaaaaatttcccataaaataattttagaaaattctacaatgcacccattggaaaaggggtgcactaatacaccgttatctatttcggtatttaaaagaatttttaagtctaattttttatatagtcgtgtacattatagttatttaagatatcttgcaaaatatttaaaaatttcatacgctaaaatagggttc

SEQ ID NO: 329939 - DNA, 596 bp, Cannabis indica
agcctttactgggtcaagcgggcatctcttttattgcaccagaggcatatctcggttgacgttcaaaacatgggtgattacatgggggcttattccggtcatgtccccctggcaccatgcaaagacattcgtagtcgcctttagtgtgtctatgatcttgctccgtccctccggttctagattttttcctaggcggataattttggacgggtcgaggtcgcacaccctcacttcctcgatgtcctccataggctctaaagttatttcggatccaatatggggatccaattcgtcttgtcctgctgccatgggatccttgccccttcgcaccatcagaactgatagatgtactacagccttgtaacattgtcttgcttctccttggttccacctcactgttcctactccggcctcctgagtagggaatttaaggcacaagtgtcgaatggaggtaattgctccaaaattgactagagccggcctgccgaggatggcattgtggctgatggggaagtccaccgataacaaaggtagcagtatttgtaaggtgctttgtggggtggtcaggacacagggtgacgggaaggtctcacttt

SEQ ID NO: 329940 - DNA, 1232 bp, Cannabis indica
tgaaatcaaagtaaaattacaataaatccaaactagagattcatgggttgagaattagtagggagtgcttacatgtactcatttttgttaaggattttttggtctgcatcccggcttgttctctatttgagacggagcagaaattttgaatataaaaataaatttatgttaaaaatttaaatatgtaaaagtgttctattatataaaaattaaaatagtatatattattttttattaaaaagataacttaaaaaattataaaaataatattaatatactaaaaaaacagacacatattattaaatataaaatattatattaaacagataattaaaatattaagtgagtcccgtcggggtgggagtgtcattcccgtctccatcacgtttaacggggataaaaaatgatctccatccttactttgttctccatttaaacgaaaaatctctattccattaaaaacgggtccatcagagccatctcataaaaaaatatgcatccctagtccaagcaaagcaggtcattttaaatctccttctttttttaatatatttttataaataaaaaatattcaatcaaaaaatttatgaaatatattacaaagcacaaaatcaaccaaacacttactaattaattgatatgtaatactattaccctgaaatgtaataaaagcatctctaatagaatattattatgtatatatattttttagaatatgtttataatattaaactttaatatggtagtatataatgtaattcaaatttaacatatgtgaagagttgtgtaaaatttatcatgaaatatagtatctgctaaattttatatcacggtaaatattacttttttttatttattcttttatcacttaatttaatttttaataattttttatacttttaattatatatttattatagttcatatatactttcaataaaaatttaatatttttattaaatttttgtacaattttctattaaaacaaaatttattttacactaaattataacataattatttaatttaatctaaatattgatttactattttttagctaaatttgatacaaaatttaaaatatttactagagatagtctaagtaacattttttgcaaataattattgttacttttacaaaattattaaattaaaataacctaatttaatttatgagaaattatttcatatactattttttaatttttattttaaatttacagtttgagttg

SEQ ID NO: 329941 - DNA, 1278 bp, Cannabis indica
ccgacatgtaaattttgagcatggaggttgactaaaaaattataataagagatttacgataacactcctcttttttattatagtgtaatagtatcacctattgtaatatcctaataagtctaatggtaaataattatagtttataattatattatgggttaatcaggtaataactaggattatgatcctactagttcaacataaattttaaatttgctatacgtggacaaataagcgtattttataaattacggagatttatatagtatatatgaatgcaatatgagttactagtgtaataaaaatatttctagtttatgtgatcttggagacttgatcggggatttaaaatgtcataatagacttaactaataaaatttatgggaatattgtgataaattaataatataagtattgagataattaagagtacgtgaaatttaatttagaaccctaaaagtaaaaaatttctttatgactaagaaacaataagacaatcattaataaaaagtatttattaatattattatattattattataattattactgttattattattaatatattattatatttttataaaacgtatcagtaagtttaatatatgtatgtatatatattatatgttataagtttataaacagtaaacgaacgaaacaaaatcttcattctttcctttcgataaaattttctctttatatatctattttcttcgattttcaactcaaaatctagcaatttaagctccggtagtagcaagatagcgaattcttagagcagaaaaacttaaggtaaggtttaatttcgttttaagtttaaaataattagtttcttataggagttttgtgagttagaataattatgaagattctgaccttataggattgttctcgggtagtcatgggactatagttttaatattttcttgctgaaattgaggtgatttttgggataaaaatcaaattttaaactttttaaagctaagtccaagcttcaatggaatttttcgtttaaaaactcgattttaatttctggtacgtaaggatggtagtatttatgatatatatgtgccatgtgaagtttggagtgatttagacaggttttggtagtttttcggtgagtgcgaaaattggaattttcgtgttctactgtttttgaaaacttcttggtgatcatcagaaattatatttttgtcataactttttactcgaatgttcgttttcgacgttctatataccatttcgaaccatgtgatgagctctacaatatggtgt

SEQ ID NO: 329942 - DNA, 1085 bp, Cannabis indica
aagagggaaaacatgattagattattaatcatgaatttgaaattctaagctatatataatttttaatcatttcacaataatataaactattctcctagcttggaccgaacacaacgaataaaggggccggtcgagtgttttctttctttagattatttttcttttatatatatatatatataaatatatttatatatatatcttcttttttttttttgaatatatatatatatatatatatatatctttggattatagccaccttccttaattaatatatatcttaacaaataacagtacatattatacctaataatatggcttttttcgtaataaaatgatatatgacttttaatttgcatgcatgcatgatatacgacattttatatatatttatctaggaaaatttcatattgcagaaaaaaaaaaacgtgtattgtttatcaaaaaaatgtagaataatttacaagttttatataaagtcttgtgaaataatttttttttttgaaacaaatgaaatatatattttttttttctgaaaaatgaaataatttatttaaaatatattatttcaacatattaaattatttaaatatttttacaaaaatttgcaaaatattctaaattatattacgaaatatatcatcaattaaaaaatataaaataataactgccaaataaattattctgtttatatgtatttaaataatattacaatttattaataacaactccctatatactgatcagttgttagatattgaaattaatggctgatctgatttattaataaattaatgccacaccactccaattaaaaaaataatattattacaatttaccttgcataattctcaaaactagtttaaaagactgttgcactggctagataattaagtagctattttgttatatatgtgtattaatatcgatctatatatggatcattaacagtcaattagctcgttatattaatatatatcactatatctaataatcaattgtatatatatctgcttgtaagttgtaagttaagttgataagattaagtagcctccattatcgataatctctctcaatcaaga

SEQ ID NO: 329943 - DNA, 746 bp, Cannabis indica
tggtcaatattgtattaaaaaacaaaagttgatcaaacatgtctttaaaaaatatatatatgaaaagtagagacttatgcttagaaggttcaacttatacaaatacatatccattgatagtcgtcattttcttttgtgacactgcttttaggcaatggattccactactagggccaggtcactgcctactctgtttttgggttctttaaattgttttttatttacttatttattattatatttcatgtaacctcatcgatagtaacttgtgattaatgaaagttaatttaggttatatatttttattatgctaatctcaatgtgcacatggtataagttcagattgcaataatatatgtacagagagatttagttatttaatgcctattgcataataaattatggattagttaattgaaatttagtctacattgattctcaatatcttgacttattatatctgccttctcaactggcactcctctaccaaaaataatgataagaataaacaatatattactcatatgatatggtataatgaagtgacccttaaccccaagaccaaaataatattattgagtaaattataacatatcatatacaacattgtgaggtcaactttgctacataatactttgagtaattagcggctaaaccctcccaactcttattttacttgcaattaaccatccaaatttaaattttggtgggaaaacttaccaaactcatattctgtttgcattttt

SEQ ID NO: 329944 - DNA, 516 bp, Cannabis indica
tacaaaatagtaagacaaataaacatttccatatagaaacaattagtcatatgaatcattaacatttttatcattattacaatttaagatataaattttacatctacataatttattaaaattaattctcttattaaatatttcatatagaataattttatattaacatttttatataaattcctcattttttttttaattttcaaaaacataagatattgtgaccgccctttttacagttgtcattctacgaaacaaaatgtaaattttttcataaataatagttaaattatttctttctattaaaaaagaaaaaagtctaaataattaagacactcaagcacactgaattgcatacatgatatgtccttgatagttaagtgcatgcttgacttagaaggtctattacaaaacacaaatggagtgcatctaatcagttcaacaatcaatatattatggttaaatattattttagactttatgttttgtaaaaattattaattggactttctattt

SEQ ID NO: 329945 - DNA, 552 bp, Cannabis indica
ggttttgagatggaaactcatgttcttatatcttatatatagtttaatacttttatatttaatccatataggacaatgttctccaatatcactttagctattataattttttgttgatatttttggttaggctttaattgattataaagacttcactatattaagtttgattttcaatagtaactattccaagctacttgtttcttttctaaatatcaaaacaaaacaaaaattttatttcgataattttagtaaaaaattgaccctacatttttctttctagtgttctatatatagggtttacatggtagagtctcctttctattccggtgtcaatcttgttcttttttggagggatggtatacaatgggtacaatgaacaataatgtccttgagattgagacattttattactcgatggctcagcttgatgagttgaatgaattctatgatgtgatcgactagataggcgcttcttgatgaaggggcgatagttgtggctaagacgattaatgtgggacgtgttatctctcaacatgttccatggattga

SEQ ID NO: 329946 - DNA, 634 bp, Cannabis indica
tcccccatacgatccacatgtggccatggtggccacaaagggtcgaatcatagtggaggaagaggctgccctgcctcctgtcgaggctgaacttcaagtagactcggagactgggagcttcgatgtggaatttaagctcgaggaggctgctctagtgagggggaggagatataggacatgttttatactccctaactgtcccttgggcgattatgatgcccgaggcaattttctgaatggtcttggcgtgcctttagtaataggactagatcatgtcctagaacaatctctcgtgctagatatattggattcaaagccacctaagacaaggtgggtttttccagcttcctctctttcaaaacaccatatctccttcaatttttatcaaaatcgagttccgtaaaaaaccaaaattacttataagaaatccaaataaattattttcattgaaaaattttgtaattcacattcaatcatcaaatcacacaaaaaccaacatgaacacgtccaagtcaacaaattcatcattttaaatccatatttcaagaaagtaaatcattaccacgactttgaggcctagttgttggggattattttactaaggatctagatttttctaacatgtatatttcat

SEQ ID NO: 329947 - DNA, 1398 bp, Cannabis indica
ggaaggaaggaaggggaggctgcagccgttccgtgttaattagttttagtattagtagtagtctatagtgtggggtttattaaataaaggctttttccaactgagtccaacctaaaagagtaaagatgcttttaggatggggacatttggtgaggtatacttgtaattaagctacttaactagttacttaaccatattggtatttattaattatatttattgagcgcccggccagttggagcctctttacacacttttccaacttagaacactaataaacaaaatttgttctcacttctgaattgaccattgaccattgcaaagttttagtttctgaattttcttttcttcccaaaaattttcttaagttataagactcgttgtaaaaattattcttcacttacattattatcattttgttaaataatgtactgatgtatcactatcaggatattaatatggtggtagttgaaaaattgatttagattaaaaaaaaaaatgtaataaataatcatgaattatgagaatttatttttattctaaagctaattgttgatctcgcttttagccaacgacagtgagtcaattaataagcgataagaaatgtaattaagatagagcaaaaaccagtaagcaataaagaacacaagattttaaagagttcggcccttttggttcgggaatagcctactccccttagattgtattgacttgagaacaaagaatacaatgtttcctctctcaaagctctcacatgaaatctctgagtattttctcttaggtctctatttaaagcaattctttcgatcccttttacagttaggatggatcaatatttatagggctaaatgcatgaaggaaggttttccttttgtttgcaatatctataattggtaagaacatacattacatatttagaatacatgaaatgagggattcagacagcttgccatatccgtttgatatgatctcatgattgtagggattgcttgtgtgcttgagcttcacgatatcaaaattgaagtagttaagtcttgatacactgcttggagaaatgacttcgtttattgtccggatcatttgcccttgccctgctcggtcagccaaactttgattcgtacagatgtatggttgaggtttgttcgaaatatctctccagccaaatgtagagaattgtagacacgcgtcactagtacacattgccacgtcatggtgcgaaaaatgggataacatttgccccccaagtctgcacgggacttccaaagtccgcacgtagacttcacttagtttgaatttcgtgtctgaacggtggcacgtgttgatgcgcctgttggtgatccggtgtggttctgaccaaaggtctcttcaatattcaacccattaatgctgattaaattg

SEQ ID NO: 329948 - DNA, 556 bp, Cannabis indica
gattgtatttgttttttaattgaatttttagtctaaaacatgattttcaatataacttaaagcttaaaacatatacaaaatactacatacaaataaaacattaacaattatttaagtaatagttgtactacataaagttattcaactttttactttaaatgtatataatttttgttttaaaagtagttaataaattaaaaacaataattaaaatgtctttaaatattctacacaacaactcataagatgcattttttttctaggattttctaattaggcatgaaatggtatagcaaaaagtaataaatagccaataatattagagtagaaataatttatatataaatataattataatttatgtagttaactgaattcgtccttaatcagattttcataacattatttgtcatctaatcatatccaatttatatttgattcactccaattgtaattgaatacactacataaagctactactttagtgataatttttcagtcacagcataatttttttgtgactaaatgtgacttttagtcacaacaaaatgttatt

SEQ ID NO: 329949 - DNA, 537 bp, Cannabis indica
agaagccataataggttggttcatggttgaaaaattcaaagggttcagaaaactttccataggctcaaccgtaccgaaacaagtcccaccagtcatgaaatgatctccaccgttggatccacttcctccacccaaaacgacagcattattagttgcgtttagaaagttaataatctcatccaacgactgaagtctatgagtgagttcactcatttgggctctgaggattgaattctcagactcaacgttaagatagtgttgtgttgtgatgttgacacttgtcatgatctgatgattctcttttctaagctgtgaaacctgagccgttagatcatctaaatgcttttttttcctcatccttgatcttcttgcagattctctgtttgatacattctttttcttctttctttgatccatttaaagcctgtaaatcttcttctgaacctgagttttgaaacgacctgatgatgttccacttgatgaagccattgtgtgagaaaaattattgataataatattggattaaattattacagc

SEQ ID NO: 329950 - DNA, 581 bp, Cannabis indica
tgtacacgattatataaaaaaaataaattaaaaattatggtaaatattaaaacagataaaaatatacccaaaaagtacaaaagtagtggtgtagtgagtggtgggtggtgagtggtaaaaggtggggttattgttgtttggttatggttgatgatctttcttttcaatcgcccgcattcatcgtactctttatgatatgtccacgtatatatatatattatgtatatgtatatgtctcccaacccattccccaatgcatcatataccctctaaaactccataatccataccctatactttattactatatcacttctttgaccaacaataaaaaaaatgacaaactttattactctatatatatatcacatgaatcatttccttcttatatattataaagtaataatgtatagtaacatcaatctaataatattaccacttcactattattattattaaaataaaaaaataacatatataaataattttaacaataaaattaaagaataattatataaggcaccattttttataaaatatttacatttttacgtttaaaaatatttttttacatttttacg

SEQ ID NO: 329951 - DNA, 1255 bp, Cannabis indica
aagagctgaatttggagccgccaggttgagatccacagggttcaggccagccccatcatcacaatgctagccagcctggtggacagcatcctggccaaccacctcctccactagtcggtcggctaacacctcgcaatgtgtacgcgatgatgacccctctcaataagaaacgatctggtctatctccattcaactcttgaacaatgccttcccacgagccaatgttctttccacaaaggtcagactgcccatgtacaataatttggctcgagggttgagcaggcaaaactcataagtaagttcagaggacaggataatgtaatctttcttaatggcttgctggccatcaagagcctcctacaacttcttcttgttatccttaagatcagtttgtaatccagagatgagagtgtcctggttggtgttctcgatgttcctagaactaagcatgacttctaatctagagaccattctctgtctctctgctaaaaggacctcctgctcagaattggccttgtcttttgcggcaagagaagcctccgagaccttcacacactccttgaaagcgtctgaaggcccctttgagccctcacgagctgagctcaacttcatcagggccttaaaacaaagcaaaacaacattagtatcaaatagtcaaccctggttggccagtcccctccttggactgctatggccggccagacccttatgtgaattcccaaggctggccaaccacatgcaagaaacaccatcatccaagttgaaatcataactcaccaaagaaaggtcctgaagtccgacagagtatagcctgtcagccacacagtcacctagctctttcaaagcctcatccaagaaagggataggctactctatacgccgagtggctgactcagcagccttctgatcagcaattgaccccgctcctctactaggcctccgtgtaccttggtcggcaggccgaaccatcggctgcccggctggtccaggccctagtggagggggaggcactgatggtccactagcatctacaccatgggaggtcctagtcaccttggccctcactcgtccggtaggctcatctgaaggcccacctacgagacctctcagcctagaagacatgtctgcaaaaagaaagtggtgaagtcagaatgcattcataaatattcaacacaagaataaaagcattgtgttataaactagcaaataccatcatcgtcagaaaagaagcgatcagagttcacaactacagcct

SEQ ID NO: 329952 - DNA, 521 bp, Cannabis indica
gtattttcacaccttttaacttccctttttataaaacgggttgaaaaattgcctctaaagcccataattgtagtagtggtgggttgcttggacactaagagagattgcccgcaactcacaaaagaggaacagaagacagcaccaagctcgctccatgcaagggtgttttattttactcaggctgatgcataagctagtccctcagttattacagtacttagttagtattaattgtacatggaggatggtgatcttccaacttcagggcaaggaattgtttgtatttgtgagatcagttcagggatcccgaattccattaatctcggtattgaaaacaagagaattagtacaagatggatgtctaggatttctagcagtggtattggataccacacgacctgaaacaagtcagccagaagacatcagggtggttcaggaatttccaaaacgttttcctgatgaacttccgagtttaccactacagagagatagatttatattgatttagcatctagagtcag

SEQ ID NO: 329953 - DNA, 720 bp, Cannabis indica
agggacacttcatcgtagtgttaagcaccataagtgcctcatagcaatgctattatagaaaagtttaggtcgcacttctgaataatctgtttagcatttaaatcagtttgagtgagacttggtttgatatttttatttgaaatgaatgattggatttatttttagttttttctttactgtaaattgtatagtctagaaagaaagaaaggaaggaagaaatggatgagtgaattgattgtggtgtggccttttagttttaggcctagagagggggaccatccttggtccatgggattcatatttgtcctagtgctggtacatagttgctttcatatcctcttcaaaactcaaggacaaaggacatagagccttttgaggtatatcttttttttcttcactctcttcttatctttattaatgttttggcaagacataattagattattagtgcttagtttatgagactgttataagtgaagaaatgccagtactcttcaacacatttacacactatatttggtagaggggagagaaagagagagggagagggagaaaggaatggagatgattgatggagggtaacccattcctttccttccaaatacacaatttttagtccctccaaaaataggagaattgaagaaaaaacataaaacagttatattaaatgactttccactcttaaataaatatataattatattaaaataataatatagt

SEQ ID NO: 329954 - DNA, 1127 bp, Cannabis indica
cctagcaacagcatgtgctagacggtttgttgatcgtttaacaaaacggattttaacaaaaggcaaagaaagcataagtgaaatacaatcttgaaccaaattcccaaacacagaaaaaagaggtgagcgactccggatagcttggatagaaactaagctgtctgactccagctcaacatgttgcttttctataaaaacttatcattagtcatgtctctgtgatatagttttgtgttttttattttgttttgtgtcattgttagttagtcttttttgttctttgatgtcttgccataaagtcactgtttgtagtttagaatgacaaattttctgtgactgaaagagttgttagtggtgcagttatgtaccttgcacaatagttgagtgctcaagtaaagaaaaataagaaccggctacaacagtttttactattgtatttttagagtagttgaagaaattaaatataaatgttcttaaagttaattatgatgctataatcttttttatatgatgttattttaatttcttttgtcaaccgatccacgaatcttacggccgattggttagcttgttttttgtggactattatttggttagttggttactaaacaatttaactataaatatatatgtatgtgttaaataacacaatagatgacactttttttttgttgttgaaatgaatcacaataaatgacactgtaattcactcttttttgctaacacttaattgcagtgtatcttagctcaaagttaatcacattgattttctaaattagaatattggtaccacaaatgctcagaaataattttgatgcctttagtcaatattttgattatttagaagggtggagaatgggagaactgtccatgcagttaggagagatttttcctttggggatgtgattgtgaggaatattgttgacaatgtggtggaaggcctcactgtcaaagttcatctctcctcccctttaatgacatgtttacttaaagaggataagaataaatgatatggtattaatttccatacaattatttattaagttttgaaaagagagaaagtagtgagatccacacaaattagggagaaaacaaaaggaaagattctcccaatacctttctctttc

SEQ ID NO: 329955 - DNA, 1119 bp, Cannabis indica
agttaaaaggagaagagaaaggcaaaagactgagaaattttgctctgaactttactgttttattgctcaatattcggttgctatacaagaggtaaatacacatatttataatgcacaagagaataatctagaaagggaatattcaggggaatatattttgaacaagatattcctatcttttaggatatcagtaacggtattgtaccaccacaaggacaatcattagctgtcatcatcattgcaatcattgtggtcctcaaattctgttatgacagcaccattattttcaacacgccccctccaagctgtgctgtggagagggcagacaatcagcttgttcttgagatagtgaaactgagaaatgctaagtgactttgtgagaatatcagcaacctgttcttgtgttggaacatatcgaacttccacttctttattttgaactttatctctgatgaaatgcacatcgatttcgatgtgcttggttcttgagtggaagacgggattggaagcaagctgccttgcaccagaattgtcacaccaaagtactgcagggcctttacaattgatgccaatttcagcgaagagagattgaagccacaccacttcagtgcacgcttgagcaagggctctatactcagcttcggtacttgagcgtgctactgatttttgttttcgagaactccagctaacaagattgttaccaaaataaacgcaatagcccgtggtggattttctgtcatctaacgaactggcccaatccgagtcgcagaaaccttcaatggttaagttgggtgagtgagtgaacaatattccttctccaacagatccaacaagatatcgaaggattttcttacaagcattccaatgattttgtgttggggcttgaagaaattgactgagtttatttacgggataagcaatgtcgggtctgctaagagttagatattgaagggcacctatgacacttctgtaaagagttggatgttcaaaagagtgcgctgtcttggagacttaatttgttgctttggttcattggtgttggacacggcttagcattggacatgtttgttttcttgaggagatcaagggtgtacttggtttgagataagtgaagaccat

SEQ ID NO: 329956 - DNA, 931 bp, Cannabis indica
catatatcccgttttttattttagcgaaaactgggataaaaagccttaaaaaccgggattaaaggcatttgtttgtagtagtggttgcttgccagagtctggctatttccaccaccatgtctatgtggaaagacttgtccaacttcgggtaggggaaggtctgtcctagttcctaaagaatttggttgaactgtttatctgtagaccctactcgattttaactgccttatcatgtcaccagcttctctgttacagcattctagctctgcttgatgagatcagaagatgtactcctagtcatccatccatctcaaaaactcacgtcgttattgtgcaaatgcatcgcaacgaatagcgtgtggttcttcaattaagctgacttggaagacagcctctctaagtttggccaacttgagatcttctcccaaatccacgtaaggctcgcgaattgctggcttgctgattcctgaccccgtttccctagcataaaattagggactatagtcaatatggtgctcaggagttgctccacgttggccaaaccctcagtacaaggtgccaaaggtggatctgccccaggcagcagaggttggccattggaaccaaccgggttggcagtgtcaacctgaccaatcgtggtggtcaagtttgttgtacctgccgggttggaagggttggccacattcgttaaattcatggacattccaattgtggctagaataaaaacattgggatcaacattcatagggtcttaaggaacacccgatgaggtaggagttgtatctggcccgatgaggcaggagttgtagctggcccgaagaggcagaagttgtagccggagttctccttgtgttaaccatggtgttagatcaaataacttgacaatgctttcaatgaaagcaccaaactgttgacctcagatttggtcaac

SEQ ID NO: 329957 - DNA, 589 bp, Cannabis indica
catatatttttttatatatattttctcattctactaccatatattgatattgtattgcttatatataatatttttaaatgttaaatctttttttaatggtaaatgttaaatctttaaataatacatttactaaagtatttatctaaagttaatttttttttaatatgcataatgcatgtaatgtaaaaccatgagtccaagtcaaaaaaagtcgcttttggggaggagggaaaatttgctttttcaatctttttcttaagaggactaagataaaaagttttatttatttattttatttttttttttgagaaaaagaataaaagaatgaattatgattaattaaataatgaattgaattgtgattgggtatttcccattttaaacttagctgtcaattatcacggaatctgttgaaagctcatatccataagccatagctagccaccgaccaaagcaacggaaactcccactcccaactcttgctgatgtcattttcatttctttattcatttattatttttagactaattaagattggaaaattttacaatgcaccttcttaaaatggatatattgatacatccctatc

SEQ ID NO: 329958 - DNA, 1359 bp, Cannabis indica
aactaaataaaaaaatattaccaaacaccacctaaataattaatttcattataacatttaatttcttatattaattccaatataataatcttaaacaatattattaactaacatttcacctttagcatgtattactgatatctaatagcatgtataaatatggtctaatatcgagtctcatataatttaatataataactcttagagcatctcaaataaatagctattacaaaaaatcttacttttagttgccaaaaaatttgtaacgaaaagtgaaaaaattgtgactaattataaattattattcctatagtgtaactaaaaggttcatggttaaaggtattagtcacaaaaattacaatttgttgtaactaaatgtacttttagttacaatacttgtggtgactaaaactaaattagtaacaacttgtatctaaatattatgttttagtcacaagtaatattttgttatgactaaaagtcacatttagtcacaaaaaatctatgttgtgactaaaaaattatcacaaaagataatatgagccaaattttagcccacaataaatatcacatttttaattatttatttatcaatcatcaatactagagaaaattacaaattttatggtttttatatttttggtgtaaaaatatggtttttttcttccaaaaaggttattttgtgagaaaattaaagaaattgttgaaaaatatgagaaaatcaaagagtaactaagtacccttatagtaaccataagggtaactagttaccataagagggtaattgggtatctcatgctttttcttttttttttttctatatttttaacttttttctaaaattttctcaatttttttttgagaaaaatttatatttttataaatttatactttaaaaccataaattattgaaaaaaattatatttatatttatataaaataatataagatactactaacgtatttttttttttttttatttatttattaagatattaaaacaatataaaaaaaaattaaatgttttctattttttcaaatgagtattaatgttagtatttatttttatagttattttgtactttgtgtattggagtacaaatataaaatttggctaaatatagatttatgatatattttggatcaaatttaacttataatacaccgtccataaaaaatgatcgatgttaagaaatattactaatcgattgtttggcaacacttttaagtactattgtgctatagacactaggagtgttcacaagttatccgatccaatccaatccgcacgatccaatccaatccaatccgcaaaatgcggattggattggattgaaaaatctaaaatccgcacttgtg

SEQ ID NO: 329959 - DNA, 545 bp, Cannabis indica
ataaaaccctaaccctagaatttctcttgttactgccgtgtgtagtgaggaaggagaagagtgtttgaaatttgaatgtttgagggaaaagagagtggctgccgtaggtttaggaaattagggttagagaaatactatatatatatacactagggtttgctttgttttcattgggctgattccttttcttgggccgaaccattaaattgaagaaaaggggggctggttgattggagagagaaagtcttgtcttgggctgctcttactgggccgaatatacatcaaaggagagtacatgttttgaattcttgcattgaccaaagacatcaattgaagaaaaggtgattggagagagaaagtaattttctcttggctgcctttgatttgtgggccgaacctcttgtctttgggcctgcaacaaatattgcatttgttattttgaataataccaattattttatggacgcataaaataataaattttagaaaaataccaatttgcatataatattaattttgcttcttaaagtgtgttggttagaaca

SEQ ID NO: 329960 - DNA, 935 bp, Cannabis indica
aatctgaaaatgtggtttattttgaaacatgaaaatgggaaagatataaacatgaagaagaattatggcctaacaagtttattttgagttagtaaagcaattacatagaggaagcaaatccgattgggtgttataaaagctacgagcaattaaagaccagttgacataggatttttattattcttattagttattacaatcatataactcagagtaatttgcggctaagcactccgaattatcatatcacttgcacttaatcttccaactttaaattttgatggtaaaaccctccaaactgctaaactgttagcaaatttaaggtgtcatctatttatttcaaatttctattcaaataagaagaaaattacttttttttatctcaaatttctattttttttttttttgacgtgatctcaaatttctatttaaacaagaagaaaattaacaaaattaattttttattatttgatttttttcaaaattgagaaatattttctttttaattttaaaataaattctgaaaatatatttactataattttaaatatgccacttgtacatgatggtagacatagttagtccatgtcaacagttaactgagataaatggatgatactttaaatttacaagcaatttaatagtttagagaattttaccaccaaaatttgaaattagagagttaagtgcaaatatgatagtttaaaaaatttagccgcaaattactctaactcattttgtttatgtactaaaaaaatgcttaacttgtggtcaagatttgtatcattctaaagaaagtgaagtttcaaatgatttttggtaacaaaaccaagatactagaacgacctgatcactgaatcaaaatgtatatatatatatatataaatatatatatctattctatataaagtgtgtctatataactcaatttttgg

SEQ ID NO: 329961 - DNA, 546 bp, Cannabis indica
tataataatttttaagaagtatcgttaactaatcgtaaggcgacacgcttagaagattctaagtactactggtacccaataacaatgtttatttgtaaaatattatattgtggtggtgttggatatggctaataagaatgcttttaaaacattgctttatactaataataataattcttcaaaccctaaaagctaaagtgtagacatgattttgtggggtctaaatgtagataaccaaaaatctaaggctgccatgcacaaaaacaaaagtcctaactcatcacctttaattataatttttaggtgcggtggtagctttgcatttgtgatctagcacaagaaaaggaacattattgttattacacttacaaaatttcatatgaataatattgaaaaataaataaaaaaaaagtttgtattttattctgttttattgaaatcaaacaaagtttattgtaggagctaaaggtcattgatgatgacaccccaccaccttgatgatgatttctctcaaattttaccttcttctctatatatctataagtg

SEQ ID NO: 329962 - DNA, 978 bp, Cannabis indica
cagaagaggttaagaaagtctaagtggcaaagctctccctcaaataaaatggtaactcatgaaaaaggttgagaaagctcaagaggctaacacttcctccacgtgacaagtacccaccatgaaaaggagtagggatagctcctagagccaacactctcccataaatggtcataacaaaaagatctcaaggcataagtacctaagggagtagccacgaaatcgaacgacggggtaaagttcatcaaacttagtctacaagaatacttaaaagaattcttatagactatggggcaagtgttgaccgaaaacattaacaagactaacctctgagattagtcaaccttaattcaagagacaagcaagactagcttccaaaggtagtcacgagtgattcgctcagcatgcactcagcatgaagcaactcggcaagttgtaacttacaaccacccgacatgctacaactacttggcatgctacaacttgcggccaatcgacattcactcgacatgcactcacttggcatccatgcgtgcatgcctcttagcatgatagcttgaatgtgtctcgacattgtatacaatattcggacattacgacgagtaaccacacatttcaaaaagatggcgattgcttagtgagctgtaaggaaaagaatcaaaaggacattacactcgagtacaaccatgctacctgctacctgacacacccaacacctgagcatagggagaggacaagtagtggaggcatctcacctgcaagctctgatgttccaacaagaggtacactgcagccactacttgtgcccccaagattacctaacaccaggaaaccgtacaagtcgcgagcccacctcctacaaccgcaacctgcaacttgcaacctgtaacgtccttcttaacacatggggactaccggggaatcaacttttatttcaaagccattaaagctccctataaatacccttctcttccattgaag

SEQ ID NO: 329963 - DNA, 1093 bp, Cannabis indica
gctaaacctcgaccaattttggttttctttgtcggcatggaggggtcgatctctacttcttctaatatctctactggcccaaagatgtacgcaggatccccaaagcgaggatatatgtctttctccttgccttggttggacccttaatgcccctggctggactcactgttctagctcttggcggactggttctccatttttgctttggacagagcggtgttgtagcattgtcgagtagactgttggtctccacttaggcccacgacactatactttgtcaaaaacttaatgcatatgtggtaaattaaagtgactgcttctaggtcatatagggttggtcaccctatcatgacaatgattgcagatgccacatcaacaattttgatctgggtcatgattgtcttttgtgcgggactttcatcgattgtcgatggtaatcaaatatatcctataggagctagtccttattccgagaacccatacatgagctgtgtacaaggtgttaggtctttcgaatgaagccccatcttcttgtacacaatcttgaggatgatgttgcaagaggctctatcatcaactatgcaacatactaccgtaatattccctatttgggtggttatgaccagaggatcattatgagaaaatctgacatgggcagcatcttcttcagtgaaggtgatggcaggttcttctacatttggctgctttggatttctttcctctataacaaggacttcatttctttgctcatgactaggagtttgagcatatttctccaatattttgtttgatccccaacgatgtagggtccgctgatgatgacctataaatggctagaaatcggtggttacaactagtcgttattttcttggacttatgcttggttttggtcggcttggacataccagtgtaagtggggaatattccttcatatcagaaactcaatttcttctttcaagttcttatactcattagtgttgtggccgaaatatttatgcaattagtagaacttggtgggatccctcttactgatgtctttcttcattaaaaggggcttcttgttgggttttgtgccctaaataaaacccattac

SEQ ID NO: 329964 - DNA, 674 bp, Cannabis indica
gtcaatattaaaaagccttacaaaatgttagcaccactcaaaagaagagatcaaacaaagcatagtgcttttcacaatgatgtggggtactataccaatgacaatagatctatgattagacgaatatagatgataatttaagtgggtggccttcaacaatatgtgaaaaggagccaaggagcaagatttgaaggatcatacacaaagaaaaaaacaagaggataattaagatagcagacgtgtgggaggaaccaacgtctaaaggaaaaacgatagtgttaaagaaaattatcatgattttgagaagtggagaaccaacaatcaaccaacaatcctttaggaaaatattactcggtaggaaaaatgaactattcaaagagtaaataggctatgagctcagcagcatgaagtgaattatattctgtcaatagataagtattttttggcagcccccattaatttcacagaagaagtattgtaatgccataatgctaaggcacactatagtgattttttaattacagtgctatctttgctaatcaaagaactttctcgaaaatcgtgtcaaattaaaacttttatataaaatactaaactttataactttacaaaattatttacaagttccgggatcccattttttaacttttatacaaaatattcaaaatacaata

SEQ ID NO: 329965 - DNA, 681 bp, Cannabis indica
aattagtttaaatttccaattcacccccccccctctcttggaaacatatcttgggctaacagttattagggaaataccgattcttaagtagctgaccaagcattgatgaaggattctcaagaagtctccaagcctgttttgcaagtagagcttggttaaagtgcatgaaagagcgaaaacccatgcctccctcattttttgttttacaaaggagtttccaattacgccagtaaattcttgagtctgtctcattttaaccccacaaaaaattgacatcaaggattctagttgattgcagacagtggccgataatttgaagcagctcatggcgtacgtcggtattgcttgcactactgctttaagtagaacctccttccccctgcaaaaagatcttttcattccatgtgtgcatgagatgccaaactttttcttttatgtcactgaaaatttcttttatatctcatcctgaatatgctagaaggccaaggtatctctcatgacaatcgcacataggcatacacttggactgccatagttatgttcggtgaaaatgacatgacttatttgtctggattaagcatcttgtacgttagcccaagatatgtttccaagaggggggtgaactggaaatttaaactaatttcataaatttaaaaaccccaaagacaattcatgcaaata

SEQ ID NO: 329966 - DNA, 534 bp, Cannabis indica
tttgcatttaattctggcgacaccctcttatgggcttttaatgctcgctcagaccctcactcttctctatttcttcctaaagtctcccaaatcatcccaaaccgtcttttctatcgcctccaacattaactctagggtaatcataccttcttctcctctgcagagagtcttcccaggaatcgaagagttgttacagagctcccctcatcactcgagatatccctctctctccaggtattttctacactcttcttttttattcactgcctatttaatccccatgtgtttgtttcgatcgtcatcctctccttctctatcaatccttttcactctaacctataccgctccctcaatggcttcatcatccaccaaccctaacatccttactgctctctctgaggaagaaagcttgattcacgatttcgaccacatctcactctcttcttcctctgatttcaactccttttgccttattttcaaactcctttctactaaaactgcaaagccagcctggattgagaaagccatgtctga

SEQ ID NO: 329967 - DNA, 845 bp, Cannabis indica
tattaatatttatattattttcttgctaataatttcaaaatagcaactacttacttttacaatttacatattcaagatgcaaaatgtgatattatatttatatatatatatatatatatttgtatatatatttaaaaaaaaacaatccaatatcttattttttattttgcaactttttttaataaatgaaaaaattttgcctttttttccctaacttatattattcactaaaaatttaaataatcattctcctttgaaacgataaacaaaaaaattaacatgagatttggaaaagaaatagaagagaaaaagcgaaaaaactaaacataatgtaatttttttttataaaagaaaatataaataaacaaaatactatgtatacattgtagaaaaaaattattataataaatatttaaaatatacacaattaagtaatatgagtagtaatatattaatagaaacctgaaatttcatattttaatattattaatttattatttaattaattaaataaataatgcgaaataataaatatggtactaaaatagttattttgtaactatataacacaactctataactatagaataaaaccagaaaataaacagtgcagaaaaataaaaatacacaaagtttttgcacatggtatcaacaatccttgcagattattactaatccacgaggccctgacctaagattaagattaattagatagatcaaaaatacaaattaattgacatgcataaatatacttcttctaattgtatgccgcaagcttgatgtatttcatcttctaactgaatcttactgaaactttaagtgcttgaactcccttcgatctcctt

SEQ ID NO: 329968 - DNA, 594 bp, Cannabis indica
aaaaaattaaaaaaaaaaatactccaacacgtaatttagccatgaaagttgactaagacattataataggaaattgtaatttacactttaattaataatataacaaacttatggctacaaaaaccccaaaatattgctaaaatgactagctattttccaactttttccggccaaagttatacaaatgtataattacaatgacatgttaatgaattatatttggagaaaaaggaaggtaatgagtatttgaaaaagggcgcataataagactttatctaaaagaaaaattgagtgccaccctaaaggggtaaaaattttattactttttctcacttccaattcaaggccaaacacaagtaacttaattaataatagtttgtttcgcaaaataaattgaaaaattacaattttaattataaattttactattgcaatatataaccaattgtaaaattataatattacaacaaaaaaattcattggctgaatagtttattaagtgatagaattaaggttgtagagcaagtgcaaggtggatacacatctattctatataaagtgtgactgtgtaacgaaatttttggtttaacgata

SEQ ID NO: 329969 - DNA, 763 bp, Cannabis indica
ttaataattattatagttattaatagttagaattggcattaaaaaaaaaaaaaactaaaaaaattgcttcgctataaatctctacttgaggctgaatcactataatttgttctttatatataggttcactcatgatcatcattgatcattttaacttatcgttggtcaattttacggtaacaatatacattatatcattttaatttagaacttctacatttcacaccttattttttatataattatcaaaaaataatttttttttcaattattaataacatttattttacctatgtttcaatactttatatcgatgcatttctttatttcatatttccggctcttctttctcattttattaactttaaaaataatttctgaccatatggatatgggttgaaatctaaaaaaaactataattgtgattgacttttcaatataaatatttcaaaatttgagaagcatatatttttttcagaaaaaaaaactatttaattactaatatagttattagttactgttttataagttatttaaatatcaaatattgttaaaccattataatatattataaaataagtgattaattttcaaaataaaaaaatgtatataaaataattgatatataaaaatagtagtttgttatattacatgaaaataattttcaaggttatctaagggtgcgtttggagagccacagtgtaattagatttgtgtgtaattggaggtaattacacaatttggcatgtttgtctgaccatgt

SEQ ID NO: 329970 - DNA, 703 bp, Cannabis indica
tttttacactactaaattatactcttcatagtatatatctcactaataaaatacattttgaaatataacttttacggttacgtgattcttctattatattttatttaattttatcgtaaaaaaaagtgatacaataaattattattgataaatgaatacaaataaaatatttcatctttttactttaatgatattaaaaaaccaaaaatataaatataaattattataaaaaaagtcttttattatatttatattatgtaaaaagattgaaacatatttaatttgtatttctttattaccatttgtactaatttcacaataaaattaaatagaatgtgatagaaagattaagttatcctaaaaattatactttaagaggtactaatattaacaagtgtatactataaaaggcataaattgttaatcacacataacgtgtcacatcaatatagtatcatcgactttaaaatacctaataatatagtaatactctaagctatatggaaaattaataaaaatattagaatttagattaatttttacaaaaatactactatatggatttttttttaaaaatactatttttttataaaataattgtaaaatattaaacagaacaattaaaattaatagtgtaacaattaaaaaataatagtagaataacagaaaaactttaagacaatacacaatataaaaaaatata

SEQ ID NO: 329971 - DNA, 896 bp, Cannabis indica
taacatgaaaataacattaaaacaataataaaaataacatacaaataataaaatattaacaacaaattaacaagaggacaataaaaatacatcgaaagactgtattttatgtaaataaaatcgtaaaaaatatttaaaatttcgaacatccatattttgtaattttttttattgtttttgtgaaataatcgtttttttattaattattatttcttacattaatatcattcttttgatataaccagtgtgtatggaatttttaacaaggctgttaaagatgtctaaaaaattattttggaaaagaatattgaactaattaattaactatattgagcaaagtatggtcattggtcacccttgaatattttgatgatatatatattttttagaaattatatatatgtccaccactttaattttaatttaatatcttacccttttattctctacacagtagtactaatttggcatgtatatattatattatatatatattgttaaaatagaaaattctttaattataggtttgaaatttattggttcataattatttgtttttattaaaataagataatattattttctttattattattgtatcacaagataaacttaaatgtcccccaattgattggcaacaagccaaaaacaaagctataatatactatatgaagccaaataataagagtgtcattttgtggttgcatagcttctttccaattttaattagtaaatactcccatgcaccccaaaaacatcatcaccatcaacactttaacattttgttggcttgggaggagatcgactctccaaattccaatagctagttagggttggaaaagtcttgaaattgatatttcttcttcttctctttttgtcttgaactctcacatcaa

SEQ ID NO: 329972 - DNA, 501 bp, Cannabis indica
acttaatatatatatttaacctaaaaaaaaaaaataacttatatatatatatatattcaaaagaatataataataataataataataataataataataaccacatgttgtttggtgtagtagtagtatagtgatttatatttattggtatcttttcttacttgggtcgatcgacaatattggtcctttctgaatattagcttgtgatgaaaagctttgagataattactaatgatctaattatagcagctcttataataactaacacataatttgtgaaattgtcaaaatgatggaaagaatttgcattgcctgattttattttttaattataaaaaacaataataataataataataataataataataatagttagatccaataatgtgaaatcatcacatgaaatggatagggtaataggggtcatgaatacatctatatatatatatgtatatgaaatggtattagggcatatgtatagatatagatatatatata

SEQ ID NO: 329973 - DNA, 977 bp, Cannabis indica
attattattattagtgctaataaataatatctttaaaaataaatttggatgtcgttttctaccactagattctacaattaattagcaataatatatacaagattaagatgcactaacaaaataaagctcgtgctccaaaataactatatatttgtttgtcttactaatatatacaagagaactaatattgttgcacaactattattatgtttcattattattaattgagtgctataataaaaaaaatataaggctcatttggcatgtcgcataagagtcgtattgtattaaataataaataacacagtactgtgtttggataaaataatgtactgtattaattattacgaccaaaatttttaatacatgtatgttgtattatttaatagtacgtattaacttgtattatattatttataagggattcggggtcaacactaatctctgacctggacctggactctctggacccggacccgaacttgagacttggacttggacccaagacccaaacccagacccgagacctggacctggacccagacccggacctgggacctggacttgagacccgagacctggacccaaactcggacccaaacccggacccaggttacggactcagacccagacctgggacctggacccgaacctcagaccccggacctagaccctagactcagacccggacccgaatccagacccaagacccgaacttagacctaagactcggactcggaccctgatccgaacccagaccctagacctgggacacatacccaaacttgaactcgaaggcttttttagcctctctgataataatactgactcgtggactaagtataaagatcgcttaattttataatagaaattagcagttaattagggtttaatttaaaattaaatttctaattatgatttatgaatttatggatacatatttgaattctaggtgtgttatttatattatatatgaa

SEQ ID NO: 329974 - DNA, 981 bp, Cannabis indica
tatatatatatatatgtgtttatcattttttgatcacttggtgaagaaatgtcatattctagatttgataataatagtttataaggaagtttcaattaaaagaaaaagaaaaaaaaaattgaatagaatataagtatatttgaaatttatatgcatggatgtttaaaaaatatactaaaatttacacattaattaatctaaatgaacgtgctgcaagttgcatttatcatttttaaattcacaattgtatataaatatattagctattattaattaagtaattaggtttgcgattggatctaaaaatcttagaggtttgggtgattaattaatgtttatatataatccaatatttaatgtgtacatgatacctctctctctctctctgagtacgtacgtactctctatattatgtatctatataaatagtgaatctctcatatcaacgtaattcacccaactaattagtacttataaagtattatcattcggtactaattaattaacataagaaaaaaaaaaaatgttgattttccaagggttagtggttatcaaatctaaacacaatggaaaatacttgacaaagttaaccaaggaagagagcgtggcaaaggggttctcagaaacgtttgtgaattttcgaggagaggacgttacgagtcctttggtgaagttcgaattggagaaagccaagacaaagccaggatgggttcacatacgttattgctacaacaacaaatacttgaccatgcaatccaattattcctggtattttttggcctcggctgaccaaccccttgaagatgatgaaacggattggaaaaatactttgttcaagcctatcaaaactaatactcgtgatgaggacgacaaacaagaatatgtctgatttcaacacgtcacgtgttgagaatcatggggttccatctcaaaaccaattggcaatgagtggagtagcccatgttcttatatatggctcaa

SEQ ID NO: 329975 - DNA, 1303 bp, Cannabis indica
atggtcattttgggtgatagttgtttggtgttgttttatttgtgttttagtggctgaaataggttaatattaaattaagatttaaaaaaatggataagataagataagaaatttgaagtcaccattctctttctttcttccttcttacccaaccccttagaggagctgcaaccctggtttttctttaattaattctacaattttgaattgaattagcaagagatagaagttggttaagcattgaggtaaactcttaatactttttcccttgaatttcttgagttttaggttagtttaggttaggttttactaggatttcgtggttgtatgtttagtctaggtttagagtttgttttggtattaattttatgagtgtttaggtttcaattagttttaattttatagctgtttcattttgaagttagagttgttgctttaagagtgtaattttggtttaagaatggtgaaatggattggtgattaaattactgtgttttggtacttaaaattgttgtatttgtgatattattatgaaatggagcagttgggcagatgtggttgagttttggttcgagtttggggaagaaaacctaagaattatggtctgccaaaaccggtcgaccggttggttctggtgcaacagaaccggtcgaccgattttcctgcaggggaaattctcgggtttttctcaaggtcggtttttggctggggatggtacctagtatctattttaggttccttaggtgctgaatggcctatttcggagctcatggaagttaggtttttttcgattacgggaattagggttagttcccggagtttcgatttgaggtatttattgaattttgctactgtgacataggacctgggatcatcaagctttgtttccactcgggtaccccgcacgcctgatttctagactgaggtaagaaaagctttatgcactggtaagcgtatttgtaagaaacaattatcatcgtttgtgactcgattatgattgaggtaatgatgtggaacgattattatcatttgtgactcgattatgatataggtaacaattattatcgtttgtgactcgactatgatcaagggaaagacatagtcattaccgttatttagaatgaataaagacacggtcattaccgttatgagtaattactcgttgaaaccgcagatagatttcttacttatcgttcgctttatcgagtagcgatggtgaaatacatagctcgtggataatgagtggtaagagtgctttatgagacattaagattatgagatcatggtgttggaaattatttta

SEQ ID NO: 329976 - DNA, 1653 bp, Cannabis indica
caaccaggtgcgacgggggttggccagggatctctagcttagtatcaccccattgtgtcgccactggccaatcagccaacattaggagtacccatgatcggccagagtacaacacttcctcccccaggggagtgaagtgcacagaggtcgatcttcaactggtagcgaccgggagtgggtggatacacccaaaataggggttcaaaaagtgaaaccaatcacttcaggaatctagatcgatcaaactccagcaattggtgtgatctacccaccatcaacacacaattaacatcagttgactgtggagtcacgggcagccaaaccctaccttttttgggtctggccggccatagaagcatcatgggcggccaaaccctgccctttgtagatctagttggccatggaggagtactgggtggctagaccctacccaatgcaggtctagctggctaagcacaacagtcaggtgtaggcttggccggccaaggccaactctcattcttaggaatggccggctagggtctacagttcaacacgggtctggctgaccttcacaatacactctcccagggtatggccagccagtccttatctctttagaatttggagcctccccaaggagggttagtcagtcaagtccccacagcaacagatccttctgtgcaagcatagttagaccaactcaggaacatgatctaaggaatagctggtccgaagccttcagaccttaaacttgatctgtcaaggggatcactattctcagcatacataaattccttacccttgccatagttaaaaatattgatatggaagatgtataccggacgagaagacccactggccacatcaaatacttcgagatgcaatttgatctctagaatgaactggtgatgtgcgctatcgtatattcccaaccacattatcggagaaagctcaacaatggtacttaaaactcaccccaaggagattcaactcatgggctgagttctcttgagaatcctacacacaattctcgtcctcgagacttgtaccatcatagcttgaagaccttgtcgaagtcaaacagcaacagcaggaacctctaaaggattacatccaaaggtttatgcccgaggctaccaaagttaaaggccttacagaagaaggccaatatacggccatactggaggcatactcccattgagtgacttctaaaacgatatctagagaatctccactaacaacatgaaggagttccttgatagagctgatgactttatcaaacttgaagaaaccatacgacaggcccaagcgggacatgttaacaataggtagtcacaaggcacctggcaacctcatgacccaccagatgcataggcagacaccagcaattatacctagacttctagtggtaaaagcactagaagcaagtgcgggaccaacaactctgggaggaacaataggaaaaaagaagaagtttaacacttctcccacaccacagaagaataaggagaagtacacctgcttcacccttctaacagagaagcatgaggccatcttcatggccacttagagaacagtcccataccgaaagtcctttcctatcagaagggatataggcaagagggacatgtcaaaattctacagatatcacaacgactttggccacgacac

SEQ ID NO: 329977 - DNA, 1303 bp, Cannabis indica
ggtgtaggccacgggggaaagttggagaggttccagaccaaaatatgccaggatttcgacgaagaatgggtgaaggggaaaagtggcgcccaccaccatgatatgcccactaaaggcaactcccctaccatagggggcagaagcagattcgtcctccccgactctatggaaaacaagaccgttagtggctcacaccttgaaggtgtcaattattttgcggaggttgtctgccgataaagtacttcgaatacctgagtatataaagtcaaattttgtgggtagcagtggttcatatcacttgggcaagtaagaagaaacacgcttgcggggagcaccggccaccggatgctgctgactgcttggcaagagacatacctgcagacatgaaagaacaatgataagaacgagccacctattttctattcctcacaaacctcttccatgctcgggtcttgaccctaggtactcttggaagtggggggtgatggaggaaaatggatgttccttgcatatagggggttcaacagcccaagagcatggcaggatatcaggcatgggaggaagggttcccttaaggaaatccaaatgaagttgacattccccgagagaagccttaagtctagaaaggttcatcctctaggatagtcatgagaaccatctcttggtgggatacatcagtgggaacctcggctttggttccttcagtgagcacctcttctgcaggtcaacaagtgcatcttcagcaatttccactgtgctcaggtggaaatcttggttgagatccattgctaccaacacaaacattaagggaaaccaagctacttgaatcgacaaactaagacctagaacaaaaattcgtcaaagttgcattccaattgacaaaccccaaagatctacatacacgcataaacctaggaaactaaaatagccagaaaaactatccagacggttctaatccccttttcacaacaggcgtttctcaaaaaggtccatcccaaagttgaaattttttcacgtaacctacttcactattcaatatgcaaattgtcataatcatagcttgaatgagaaatttctatcctatacaagaaataataaagggttcaactagggattaaagtacttacgtgttgaatgaaaaggagatggggtgttgttgtagaaattttcccagagccttcgaacccagtcaattaaacagtcgcagctggtctagaagtcaaaatcttcatctaaaagggtgttaggtattttaacctaagttttgggtcacattttatagttgtttttcttctttattatt

SEQ ID NO: 329978 - DNA, 1168 bp, Cannabis indica
ctatattgctaaaaaaaaaaaattcaaatagaaaattaagcataaaaactcaattttttctattttactcgtttataagtaattctcagagtgcacccatatatataaatatagataacaaaaagaaagtctagttagatacttctcctcctccgttcggctcaaccctagccgccaacccccaaaaggagttccggccaaagctccaccgtcgtctacacctcactctctctttctcttcgtactacaacaacaaagagcatcattcccttcttgaagagctaatgaaggtgatctctataatgttatgcattcttctttcttgatatcttatcttatctattgagtgaagtctttttgtcctttaattaattggcatttgccatagtctctttttcttctatatgtatacttaagactaattcataagttctagcatgcttttaatcttgcccttcataaatgtaactacttgattaattctaaaacagtttctacaaagtcacttattaaatccatattttctttaagattgtttattgtaactctccatcatatatttatatatcatttcttgtcagccttttttgttaggtatggttattcatcaatgttcattgaattttatttactgtttagatgttgtcattctaattgcacaattcctgcagctgccacattttagtgagtctgtcataaaattatatttttgggatcctttctaagtgtactttttcagctatattgttgtctctaaagttttaaccaggaacttgccagaattatattatttccttgggctctaatcttctaaatttaggcaaaatcagattagatatttgattcatttattatatttatgtgttagattttaaggcgtattggttcttttgtgattggtattttttgtagttgtaatcgttttctgggacaacctttatactttaagattgtcatcttcgagttttcgaacgggcaaccgcaacggcaatctttatacttccaagattgtcatcttagagttttttattagaatatttctaattaaggaaataaaataatattattgattctgataaatgaatattttatatttattgaatctggacagaatcaattacgtaatattctatatatggtcagatttctatattcattacctgatttg

SEQ ID NO: 329979 - DNA, 513 bp, Cannabis indica
taaataaaaaaaagaaatcgttaaaccaagaattgccgttagatagacacttttaatatataaagatatatatatatatttatagtaactttgaacacatgaacacatgtcatggcacgtgccaaccaatagaactaacacatactttaaccataataataaaaaaaatataatgacaagaatgattatttattttgcatttattcatgttagaaattgttccaattaaattagttatattaaaaaaaatattaaaaattaaatttatagtacgattttgagaaaatataagatttaatatggcatggaacaaaattgatttataacttttaaatcaaaaatagtatcaactttaacactacaaaaaatagttattcttagtgataattttttaatcaaaacataatttttttatgatcaaatgtgatttttagtcacaacaaaaagttacttctgattaaaatatagtatttagctacaatttagttttaatatattgtgactaaaaataca

SEQ ID NO: 329980 - DNA, 1079 bp, Cannabis indica
attccgtgggtgtaagggcccaatggaggcttgaagcggggatgttacagggtgcatatatctaattatcagaaatctactaaccacattcaatacgtatgtttgagtctcgaacattcataactataattacaattaaccatatatcaaactccacttagtactctaatcatactagtgttggtagcgttaatttgtacttttcactattgtctaacatatatttttcggtatcccggtgcaactctatatacaccaataccgctatttctgatatgttagttacatgacaatacaatatacatgtatactaaatatgtgcatatgtgcatttgaatacctattttacctcaattttaaaattaagtgggtcggtcaaccagagtaaaaaaactactcgacgatcaaaggccctaagaacattaacaataaactggtaagtgtcttgctaaaatacttttaagagacttaaattcataatctcaagttccatttcgataaatagggtggcaataccctaaatctccagcaaacacgaaaaattgggacacacccaggaattcgagccacttgatgtcaaattcgagtgcctggaattttgggcagcaattggtaacacgattcccaactgatagcccagtttgttgcagaattctaaaaattcaaattctcaaatttaaattctacccaatttcttccaaataataccaaaactttcagaataatataacaatgagtttaaaacctatttagcagcttaaaacatataatcatacataaggtaagttctaccattgaagaccaagttttaaattcttaaatctcaagcttttggcttcaaacaaaaccaacgcatacacaacaattaaagccttttgtagtataatagtatattaagtcacaccaggccggccctgaaatgtagtgggctatagggtaaaaattattttttgggcccttatttagaaaaaaaatggtatttttcaaaatcagcaaaaaaattatagtaattttaaaagggcaaaattttttttttgggccccttggactaggtggaccctaggcacaggcctagcccg

SEQ ID NO: 329981 - DNA, 1688 bp, Cannabis indica
cgagatggctgagcgacgcaggctcttgctgggtcttccatatggtctcctatcagctgagttccttttgaacgaggtcaacttgagtccgtgggcctcctcactgagaacaagtataatagtgattctaaatatcccaagtatgcattgtggtagcaagttctggtcccaactgacgaggtaactcaggattacatggctcgagtgcactaccttcagaacgcagttccttaggaagccgaagaaggagcatctcaaggtaatcaatgtagttggtcacccacagtgcttagggtcgagcgtaccacattagtgtctttttgagatagccagtataatttctatacctggaatcccttcctcatagattgcattgcacataggtttggtagttggtacccagaattccacgttcaaattagcactacatattattatgggatagtcgatcagtacgggatcatgctggataggtcaggtcatatagatttgagctgggatttagaactaattaattcctactacatatttaggatcacaggatgtaaagactttagtgaatattatagtcctccctcttcgtcttcttataattatggtaaatcccttaggtgggaaataatctccccaatttcccttttttcttgtttttaaacgaatgttaacacattgttttgtctcgcagaaatggatcacgaagaccttcttcattcctcgagcaagaaggggaagaagaggttaactgccttggagacttcctctaatgtcaacgtggagcccctcaaaaggcctaggaagacaactgccaataagaagcgagcctcccaagccatagaccttgatgcccctgagaaccaggctcaggctcaccctctggccctcgcgcatattgaagagcccattcccaaggcaaatcaagctgtggcctctttgagccaagcacttgagaccctaccatcaaggctgggaatgctggctcagagcattctgtgcagtaccctacggcttgttgccgtcacctctgatccttccttcccaacaattaggatctcataaacaatgatagcctaaacgagatgctcgatagaagtgtcacctttggcctcttggtaaacttctgtactcttctcgttttacttctctttttaacaaccttaaaaaatacttatgcatttttctttattttcagcaaactttcagcttctttgtcgccccacgtcggggtctagacaggaggaacaattagagactgagatctagaaggtgattggtcaatgagaggccatgtccaggaaatggaacgaagcttagacgaagatctactgcttaaacaaggaagtcgaggaggtgaagagggccaacaaggctgaacttgaagctgcttagaaggaggcgaagcacaagtccgaggtacgccagaaactccaagaggaactcaatgcagccaatgcagcgctcgaggagaaagaggctaacaccaaggagcgatgcaatgccattgccatgcgctccatctatcgagctttgatggcgaatccaaaaatggatttgagtttcctgggaaaggccctggaggaagcccttgaacactgcgagcaagctaaaaggcagaagaggaagctgaggtagcaagagaagctataaaagaagaaccatccaaaatcccctactatgtaggcttggttttt

SEQ ID NO: 329982 - DNA, 1348 bp, Cannabis indica
aacaataagcaaaatacatgtgtacaataataaaatgacacttaacaatgacaaaataaaacaacttattagcaaccaaacttatatttggtatacaaagtaagaaaaatgaaaagatagaaaagaaagaaaatatcgaaaattggggtgatagaaaagataatttaataataatttaatcttaaacttatatttgtattttttttatcttgtttggaagagggaagcaaagaaaaaatgtaaatgtgtaataataatttaataattttatataaattaattttaaaggtaatttaagggttttttttttttttttatttaataaattagaaatatcccttaattaatactgaataactcataattactaaaataatcatcttattttggtcaaattttaaataacaatgcatttaatccaaccatattaattattattattattattattattattattattatatgaatgcatcttcaatattatatattttatatcattttttaaaaaatttctccatatataaattcttttttggagaagtgtaatactaatatattagttctttttaaggaataatgatagtcataataaatttttgggtatttttagagtacactcatgcaccactttttaatttttgatatcttaataggtatataatcttaattttttttatatatatattatataatgatttgaagtgtagttatttaagacatcttgtaaaattttaataaattcaaaataattacaatacaaaaatttgaattatctattttacatgcgcataaaataaaagtgacacatacacttatataaataaattgttttaactttatttttagcgtattaaattacttttttgattttttttttaatttataaaatattttaaaaaactataacgtagactgtcatgaaaaaaaaaaaaaaaaaaaaaaaagaagattaaactatttgaatttaaaaaataaaaaggagtaggtgggcgtagcatagaactccctaaatttaatttttctcatatttattaagggaaaaatttaattggttgtcctttttttttctatttttttgttttttgtccttctctagacattattgattgatttatgtttataatatatacctaataaatctttaattagtgtaatgttttatttataaactctacatttttgtcatttgtatttgaaaaaagtaagaaatacataaacataaactataccaatatgtcaatcaataatcatggagactcaaaacaattattctctctctatgggatgaatttggttataataatattaattcagtaagcgtacgtaccaataagccatccacatc

SEQ ID NO: 329983 - DNA, 812 bp, Cannabis indica
aaaactgattaaaaaaatgttactaaacagaaccgttgttttttgttttaaaaaccaattcacttttagtttttaaaaaacactaaaccgacttgtgttttaaaaattattttttgtttctcatttacttaaaaaaaaaaattagaaaaacaaaaaaacaaaaaataactaccagacatgctgttagtattttttttttttttttggttattttttgttcacaattgtacatatctttcatttatatacatatctttggctttgtgcacaattgattatgaaccgttaaaattgctctaagggtatacctctaaactaattttgatataggtcataggtgtgaaatcagaggtttgatgtgattacattatgtatggtaatagacctaatgaatatattttgatgtggtcctaagtctttattacatgccattccatctcttcgacttgtatttatgttctctctcttataatttttttttttgtatttatgttcttcaaaaaaaaaaaaaaaaacaattatatttatctccaatatattttctatggcatgaaaagggaaagaaaaaaaatcacaaataaattatgcaatgtttggcatcgtaactaaaaaactattttttgttttaaaaaacagaaaattatttttaaaaataatttgacttgtttggtcttgctttttaaaaacagttttcagaaaacaatgttacaaaaaacaagaattttaaaaacaacaaaatattgttttctgttttaaaaactaattcaacttttggtcaatattgtttttaaaaattactaaccaaatgtgac

SEQ ID NO: 329984 - DNA, 1448 bp, Cannabis indica
aaacaccaaccatccaatgatatatatattgatgataaagatttaaatattgacatgacatgtcacatttgtacaaagataaagacacaatataagaattagagatatattatgaatctgaactattgaactcattaacgatgtcatgattagaaaatcaaagagataaagatgaaaatatgaactacttagaaaaatttagagaaaatgttacagatgatacaatgatttttcggcatttttaataaaagagttgaggttctctttataggtgagttctattgattttcagtgcatatggtttcaaagggtaaaagctagtagtttgaggctttgcaagaggtactattcgggggtttaatgaatgtttaagagtatctttctgtaccaccactactcatctgagattacagatgtagtaatacctttttgatttctctttgtttgtacacagccttttatgccgaatttaagaggaacataatatttgggacttccaaggttaaatatatgctctccatcacagcttgctagtaatttcagtttcgattaagtgcctcaataatcgcacctatctcaagagtcaaggagtgccttttgtctcgaaatggtacttatatacaatgatattcctttttgttaatgagtgaggttctatatataggtcagctctattggctgtaagtgtatgtgatccaaaaaggtgataagctagtactatgaggctttgaaagaggtagagtgaaacagaagatagtgacggtcgagtttgatgcatgttagtggcgtggagagggtggtgcaacctgttaaagctggttaaatactaattaaagtcaaaatgacttcagtacaaagtagtgtatcaaaaagtcgacataaattacatataatataatgagtacgtgaattttgacattgatttggcggtaattatacattgtgttcttgggtcgatacacttattcttatttagagtaaataagtgtttagggttctagctaaacatttaattataaatatataataaataaagggaaatttgcggcaaaagtccccaaaaagttcacgttgatacagattagtccccaaggtccaaaaatagcggcaatagtcctcaaggtcacactttttatttgtccgtcgatacccagtttgacagcctcgttaagtactggcaagaatgccacgtgttgaagtattattggtccaaattttaattttaattaaaaatataaaaatattaaaaattaataaataaaaagtttaatattatttttattttcttatttaaaattaatttcttttttctttttcttttttttttctttttcctttttcttttttttttttcttttttcttttcttttctttctttctatcttcttcgtcttcttctccttcttctcactggccatcaccatcaacccccaaccttaaccccaaac

SEQ ID NO: 329985 - DNA, 601 bp, Cannabis indica
atataagttgacaagaaagacaaaatttataaacatgtgataacatatttcatagttttaaggattcaaagatataaattgtcaaaaaagaaaagaaaaaaacatccatgtttgtatgtctaattaattcaattctttcttgagacattggtcaacaatttaggaggaaataatggaagaaaataataattattatttattttttaaaaaaaaaatcaaaattatattatttgttttcaacattatggcaatatttttgtgtagagtggtccaatatctcttttacttgcatatttaaataaacagttacaaaattaatggcactaatctaggtggccaaaggctgtacatgagagattaataattaaacataaatttattataattaaatttaaatataaataatcatacaaagcgacctaataaagaaaaatttattataatttatataatttatacacaaatttgacatatatttataaagtaactaataatttcaattaataatctttatttaacattataaaaaaacggttacttttagtgacaactttttagttacaacataatttttttgcaattaaatgtgacttttagtcac

SEQ ID NO: 329986 - DNA, 820 bp, Cannabis indica
gtaaaagaaacaaaatcatgtcaacagccccaattatatatcatgttttattattgttgttgctttttctttagaaagtaaaaacgagaagaacttaatttgtatttcttttgaataaaaatttaatttgtattttgatatgaaagagatgcttatcaatacaattcctaactggtaacaatatagaattggatacaaagaattgtaaaagctctgaaatctttatgagctcaacctttcatttatatagagaaagattacaaaaaaaatggcaaacataacaaactctgttaagacagagtacaagtggatagaaactaacaatctgtacaactgtaagaaataacagaatacaatgaattaaaaaaagtttgttattatcatcccccctcaagcgaaagtgagtggagcacactttgagcttggatttgagatagagaaaccgatcagtggagagagtttttgttaaaatatcagccgtttggtctattgatggcacataccgaacctcaatttctttggccaaaatttgatctctcacgaagttaagatcaatctctatatgcttcgatctggcgtgaaatactggcttggcagcaagagaggcagcccgttggttgtcaacccatatgattggagcagctgggagatgcacttgaagttcatgtaaaacagagtgtagccacttaatcttggctgctgtattggctaaggcacgaaactcgctttcggtgctagaccgagcaaccacttgttgcttctttgctgaccaagatatgagatttctgttgggttttgtgccctaaataaaacccattac

SEQ ID NO: 329987 - DNA, 637 bp, Cannabis indica
cgagtttatattttacataaatacaaatctaggtctataccatatgcagccgtacaccggtaccaattattattattattatcattttcaatcaaataaccaaaaaatttaatgataagaaatcaaaagtacattggtcgaaaaaaaattacttccaattaaataatctcgttttttattatgtagtgtacatctagtgaaataaaatacaacaaaactagatatacacttaaaaagataaataacaataaaaacgatcttatgaagggagaagacaatagaattattcactaaaaatatcgaactctttaaattcaaaagaaaaaaagcttttagaaaggaaaacctttgttatatctaaagttttaagaagagaagaggaataatatattttgtagtagagtaacataaatgtaacaaataaataaataaacccgaccacacgtgacccggtggacccgtccacccgtgaacttttagttcaactcaatcactacacgggcaagaaatcattttttttttttctaatttttacatattcaaatttctaatttttttaggggtttttttatttttacatttcaaaacagatattttttttttttttgtatttttacgaaaccctattgcaactagc

SEQ ID NO: 329988 - DNA, 589 bp, Cannabis indica
aaacacagggtctaaaatggtatttaccctaagaataatcattttcaaaattatgtctatggattttctaatttatccataacagaggtaataattcctctactctatcccataagttttaaatataacctacacatttcatgtaacatataaattctatataaccaattctcatcttcagagtttacctaatataattagctagttgacaggtatgcatcagattaactaccatgagccaaatattgacaaaagcaaccaactatttacatattaactagtcactaaaaaaaaatacattcttttgcactatcttcatgtatagacattacatgtgattatgtataaatactaagataatgcttctcaataaaccacatcaaaatgcctataagcttaagttggatgttacaaagtcattcaaagatagttgttagcaataaacatgtttaggtccaaagcaacatcaaagtccttgcaatggacatggtgtctccttcattaaatttataataaagaagagttgtaagacaataccatgtgatgtgatgatatcactaccccacttcataaccctaactcactctat

SEQ ID NO: 329989 - DNA, 1230 bp, Cannabis indica
ataataattaaaatatattttctgagtaaccgcaatacgtaccagtcttttagatttgtgtggattgagtaaaaaaaaatgataatagaatttttattttagatttatttacttggtttaaatttaaattgtaatgttatattgttacatttactatacataaaagataagagagagatatatagtggaaattacattctatacccactttactttatatattttaatttttacttttattttcatattctttaagatataaccacttttatagatgatgtccctattatatatacactttaagttagtgtaatttatatgctatatttaagtgaaaagtgaaggtatattaggcaacccactcacaaaagtagtatatgttaatgaaatataatataagaatattttttattaatggatacaaaaaacaggtattcctcatcttagtaagtttaaatttaaattgtaatatttaaaaagaaataataaattttattatataacaacacttaatataatataaatataaatttataataaataattgatggtactttattatcgatgatatcaaaaaaaaaatttaaaaatttactaaaaatttattaataatctaaatacaatggattattgatggtactttattgatggtactttattaatataatataaatttaaatttataataaataatcttaaatttattaataaatttatatgtattgaatgcttaaaaaaaatgtgtattgaatatcttggggtggtaagaaacctccaagaaatagtcggactcttcatggaaagtttgtaaagaggatcttgaaagggcactgaaaatggtcaatatgacctttgactttggaaagattattgttattttatttatttatttatttatttattttttttttatgaataagattattgataaagtagtggttgtggaacttgacattgatttactttagaaaaaatggtacgattaaaggttattttgaaagttaaaatgaagtagaagatggccagtatggaattttcatgaaattgcgcaatgcactttccatcttaaattaattagcaaaagcaactttataattaacacctacttattatcaaaaataaaatcaatatatcatatcatatatatatatactgctaagtcacatatgttaattttattttaatattataattttaaaattaataatatttaatgtagtgataattatt

SEQ ID NO: 329990 - DNA, 1238 bp, Cannabis indica
ccattatatatatatataaaatataacatcaccactattatatttaactttatatatagatgttaactcagagtgaagtgaacgtattataaaatattaactttaaaaaatattctacaaagtaaaattgattgtaggtgtgttcatttaatctgcaatctgtgattctaaatttcaatcaattcggaccaaaccatttgagaccaaatcaaatgaatccgacgtgaatgatttgatcaatccagaccgttttaaattctgtgatttggtcacggttttaaaaatttcggtagcggttcaaaccaaaccaatctgtataattattataagtatacttaatatatatatatatatatatatatatttttaataaaatgttaatatttaggaacaactttaagtagaatgttgatattgagtttatattgttacataaattttttttattgttacttgtattataaatttattaaaagtaagaaaaaaaataaccgaaaaaataaacagttattgtaaaaaaaattaaaataactacgaaatacaagttatggttcgaaccaaaccaataccttttaagtggtttggtttggtttggttggatcatttcattggtccagtttggttttgaatttttataaaaccgtaataatggtttggttcgaaaaaattgaaccaaactaatccgtgaacacttttaattgattgtgtcagcatagggttaaaaatttgattttacactaatgtggtagctcccaaatctaaataatatgcttatgcaacttgataaaaatatacagtatgttctttgaagcagtcaccatcattatatttcatcatccctaaattttgtaataaaagtgtcatataaagaggaattgattaggcttgcctaatttacccgtcctctctatgaacttctcatggcattaagaatatgacaaaataatgttccacatgctcaaattcaattgaggaattaaatgatgatatgaccaggctacatttggttgggtgggatacgaaaatgaaaaaattgaatataatataggaaaattctacaatgtaccccttaaaatggatatattgatgcacccctatctgttttagcatccgactaatttttagtcaaattttttctcatggtcatgtacgttatacttatttcaaacatcctgcaaaattttagaaatttggaaagtttaacatagccgaaattatgttcaaacagtgtgttgcac

SEQ ID NO: 329991 - DNA, 1351 bp, Cannabis indica
cccagcaaaaaaattattgggcctaaaagattggtgtggcctacttaagtagttgcttaaagccctgaaaatactacctgggctgggcctactaacaagctctaaaatttgtaatttcttcttgaagtgtctactgtctaaccagttctaaaacatatataattggatcttaattagtattacgtattaaaatgcatgccacaggttcttaactgtaaatcacgtattaaaatatttcattctggaaagccagaaaaaattaatatgtttgcaaagtgattattttttggaaaatttacacaaaataattaaaattacattttttacttgtttacagatcattttttaggaagtaacattatttttcatattgttgcaatgttatactatatttatgtaacttaaaaacaacgtgttaataacgttatttttagaacaacctaaaaattatccgtaagagaaaaaaagtccataaaaaagttattaaaaaaaaatccgtaaaaacgttaaccttttaatgttttggggtatttttgaaataatccctcatttttagaaatttttacacaaagtacttaaaatcacactcttttttttcttttttacatttttaatgattttgctttctacagattttatgcttgtaactctttcattaaaacaatattgtttttaagttgctttcatgtaacagaaatatagaaagaagaaaataataagtaaaacaaaaaaacttccatattttataaaaaagtaaaattcataaaaatgttaaaaaaaaatactttagatccgtattcttgtaaatgtttgtcattttcaggtatttataaaaatacccctgttatttaaagaccatcttcttttgggcccaaacatggcccattacttcgaaatttgtatttaccagataataaaaataaaaataaaaataaaaattatcgctaaaccccttttgggagtaactgtaatttgtagggtttaagctctctctctggttcacagaaaaaccacatggtgagtggttcagtgacagtgccccatcatccatggcgattacgggcttaggtttcacttgcccataccaagttcctcttcgaaaccctctctttcataacttcattcgcaaggcaatttttcctctttagctcttcctcctttctatatgtcatacatatccgtatgcagaaatgtttaagcgccaatttcttttaacaggtgtggccacgctcggtagcgtcggccattgaagcacttgaagggccaaaacatatcacaaaagatagtttttcagattcttgtgattcggttcatgaaagaggtaaggaaaaaattttggttgtttaacttg

SEQ ID NO: 329992 - DNA, 516 bp, Cannabis indica
ccccaccgagtggggggcatcctaaacttaagaaggcgttcgtcgaattctacaggcctaaactggaaattctcctggaccgaaggaacatgatagacctttaaaggagacttagcagaaccagatgtgctgccatttggagcaccaatgttaggaaccaggaccaaagacttaggcgttgagggcatccgacccgtgcccacttccagccgaagagtcctcccgactacagcttgggccttgatgtaagccagctcctgctccctcctaaaaaggtcttttcgtaacggtcctccgccgaagcgataatcttagcacagagtgccttctctgcggccggggtgggtacgtttggacggaggaccttggaaagattaaattcatccaccgactgtttctcggagatcaacttagccttccaacagttctccgtcgtgaccaagtccccgacgttgagagccttcttgtaataggtggagaaggttttggcacgctggaggaacaactgagtaggcg

SEQ ID NO: 329993 - DNA, 597 bp, Cannabis indica
agaaatagattatagatagagagatttgaagtcattttagaaatttaaaatttaaaccttgattaaggtgttgtgggttgtaaattattttgaagtaatggtaaggtgttgtaaattattttggaataatgcaaaattaattttgaattgatagatctaggtttctctcaattgaatttatagatttaggtttctctcaattgaagaatttagtttgatgataatagcttagagcacttacattagcttttatactctattatttaaaatagctcactaaaattttattttatttttttattattattttatttcaaacttttatattacaccatacatctatttttttttatttttctttacattcaattaaatatcattatataaataaaatacagaataataaaatattattaaaatattatctaaaaaacaaatagtgcttctctaaacgtaaaaaaaaaattgtagcattctttaaaatttgagctaaaataactcatctgaactaatttttttttatttttctcttctctattttttcactatataccgctcatactatatgcgagtgctttttaaacattttttattgtg

SEQ ID NO: 329994 - DNA, 973 bp, Cannabis indica
atataaatataaaataaaactatttatatacataggacattatataaatatatatatatatattgccgcatttatacgttttaggttgtcaaatctttagttttaatggattgatgggtcaatgagatcatatttggatatttgaatgaattgaattgaaggtcacttattgctatatatatatatatttatataaatatatatatatatatatatatatatagaaaagataatgcatagcacgaaatagtttcatcatgattaaataattacggataaaaatacaactatatcataaaaaaaaaattatttagatattgaaactaaaaattataaaattaagttaagaaattattaaatattttaagcttgctgaattaattaaactaataaacatattacaaatatcatgttaatgtaacatgttaattatgttttttttattattatttttctcttttttctttttattctcagcaacaagttatgttaatataaatatatatattatatgttgcatgttatacattaagtattaattaaaacacaaattttaaatacgtttaagattctcaaatatttgataaacacgtatccaataatatacaaactatactatttacaaaaaaaaaaaaagaaaaataacaaacaatactatatatatcattgggaccatataatatacatatataatatatcaaagcattgatatgatagtactcaaaattggaaaattattaaatagaaaatataaggtgcctccccctctggaccatccaatcactcgacaacgttgtacgtatatatataaaaataaatatttacaatattaattattatgaacttcaaatattttcttagggttttttttctttgaaaaagatcttattaaactatacataacgtcatcgaatttaataaaaaatatatatgtatatatatatatatatatatatagagagtcggacgaaaa

SEQ ID NO: 329995 - DNA, 849 bp, Cannabis indica
tatatatatatatctatgtatatatatacctgataaaaattgaagaagaagaagaagagatatgagaagtgtagtagtagtgaaagccatatttggtatatgagaatatgatcactaattaattggcataagctacacactactatacctatcttctaatctaaagctatggaaaggcttttcacgatttatgcttatatattcaatcttatatataatgaacattattcatgcacatagtgatattagttattatatactttttaggccgcaatgtatgtttccacaactaaacgatagagagggagccagagccactacatgtagtagtagtcaaatatgaagaaaggaataaattaatatatatgtatataattatttaattcatatcgacttttgttgactcgccactcttctcatcattttagggtattcttaccgtacacttcctcaccaatcaactttcaatcaattttgatttttgatatacttggaaaaaatatttactttttttttttttattagtggtatatattataatatttaaaatattttataaaattttaaaagttaaaataatttataataaaaataatatttaattagtttaggtcaaaaataaaaaaaaaaaaacaacaacatactatttaaaatttattttcagcatattaaatttttttgaaatttttaaaattttaaaaaatattttaaataattaaaacaaattagactaaattttttcataaattaccacaaatgatagaaagacatctgtgcactacttttaaaagtgtacatgcaatagtaaaattttccattagtctattattatatatatttatattgaac

SEQ ID NO: 329996 - DNA, 459 bp, Cannabis indica
aaaaaatccctttagaggtgtattatagactttttgatttttttttctttcttaatttttcattccaatcttattcagtttttatgtggtttcataaagatatataatatttaactatttgatttctttttatttttgggtatttgaatagttgtataattttttttcaaatacaatttaatataatcaatttatttgtataattaaactctgaaaaataaatttaaatgaggaaaaaacaaacagtctattttaatattcagattcagataaaatatcttattatttatatgtgcattcagattcagacatctgaatcttaaaataaacaaatgcaccctttgtgatgttgacttatcttatccaagttcaatatcggtcgagtctaatgtatactccatacatctgatactagcatactttaccaatgccctggaaaggacataccacttatccaag

SEQ ID NO: 329997 - DNA, 495 bp, Cannabis indica
catcaaaaatattcattcacttcaaaatttccaagtttggcatatgaacaatgacatgatttttttcattacaaaaaaaaaaaaaaaaaaaaaaaaatagacatgatttaatgattatgccttattgatatatataggcgaattttgtgctttatgttttgatcatattttctacctaagtctagtactccattcatgtcttaaaaattccatcattatcttttttttctttcatgctgacactatatctttgtctcatatcattaaattaatgttattaactaaaaagactacctactcaatagattcatgtactaaaaataattataaatatattttattttacttcattggacgaactaaacctatgacaaaatttaagatgtttgacattaaatttaatattaacaagaaaaacagagtccattctaggggcgtaaccgtagcttattttagagggttgacaatataatatttatttatttttaaagaaaa

SEQ ID NO: 329998 - DNA, 1007 bp, Cannabis indica
atattaaaaaacgcacaaaatggttctgccatgcagagcaagtactcgagtagctaagtatagtgtagtagactagctctttgcttaatctccaagtcttagtctcttcaccattattcttcattattttacttgtttctttttcctctttcttctgctttccttctaattcatagaaattgggttttcattcggttgcaaatatttaagtcggtcttcatatattttcgaagttagaatcaattttgggcaattattgtgagtttcaatttgttgatcgatcgtgttaagtttaaccacttttgtttttgatttattgtatattgttttttttttttttatttttttccaattctatgttatctgaaagaatttatttaaaaacgtttaatccagtgtaacatttaaaacggcaaacggaaggggaagaaaggttaagtcatatgtttaccaccaaaagctagctatttccgtctcaatggcatgacaagttcctttagacaagaggaacacagtcatagcttaagttgggagtgattgtaatactgttttaagaagaatctcctttccagcacgagaaaaaaatttacctcccaactattgatctaattgataatattgttcttaataaagtcaagaataacatttttattcctcccaacaatattcggtaagcctaagtaaagactaccattgagagcttcagccataccaagattggtgcagatctgagctctaagggcaccttcaacatctgtactaaagaataccaaagactttgaaacattcaccttttggcatgaagcttcttcatatgtatgaagaagagtaagaacactctcagcagctcccaaagaagcttgacaaaacaagtaactgtcatcggtaaaagcatgtgggtaatcgaaggagccgtcctagccacacgagaaccttgcaagatgcgattatcttcaaatttctgaatcaaagatgaaaagccctccgcacaaataataaagagataa

SEQ ID NO: 329999 - DNA, 478 bp, Cannabis indica
agcgggtattttcacaccctttagcttccctttttataaatggacgtaaaaaaacagcctctaaagaccaacattgtagtagtgatatgactattataaataatttatatacaattaatatatagtaattttttttaataattttataagtaacataaaaaattatgtaaaatctaaattagatgatataattctataattattaatattttattatatggattttacaaaatcatatagtaaaaaaaaagtcataaataggtatcaaatattaatatatcacacgaaaatttaacatttccatttctccattttaagttagctagtttataatatatgtactcatcactatattaattatgactaaagcatgtaatgtccatcaacttcaattactcattttgatagtttgtaatgttataattaatgaaaggttaatagctagcctaatcaatatatactcattaacaaaattaat

SEQ ID NO: 330000 - DNA, 500 bp, Cannabis indica
aaataatttttgaatcaaaagatgtcacaaaaataaaattgggcaaacgggtatgcaatgcatatatacccctgcgcgcgcagatgaagggggatgggcaagggacaaggctgcgtgcaggctgtgttggccgagggagctcagcgtgagcaggccttcagatagggccttgtacaagaatcgccagtcagcccttgtctaaagacgcgtgctctctaagtgatgccacatccccgcgcccgcacacttgcatcccaaaataagatattttaatccaaattcaaaaaatcataactaattcgtaaaaaaaacaaaataggttctataaaagccgaaatctattaattttttgtctactttccagtagaaatattttcagaacgaaaaaaaaattcacaccatatattgtgatttctaaataatgatcaaatttgcacataaaccatcatgaaaccatccaaattaacacaaacatcattttaagtccatatttcatgaaa

SEQ ID NO: 330001 - DNA, 993 bp, Cannabis indica
tccattttccactagtttattttttccattttttactagtttcagataaaataatctcattctatcatctcatgtttctataatctataatctatttttattttcttataagcaagcaagaattttatttctctataacgtattttgtcaaataattattttttgtcttttttttttcttcttttctgtaaaaaatacaacaatagatttttttttctctctttacacaatttgtttcttacgttttattttttgtatagtttcttacgttttttattaaaatgcagaaaataaatattgaactaaagacaagcttgtaaaagctttgagaactacatgtaatctcttacattattctgaatttgataactttgtaacaaaattttatgaaaaagcttaacaagaccaaatataaaacatatttttccatccaatatttaattagtatttttaatttctctcttccctataatagaaccattcccttttcctattggtccaagtgaattttgcgtgtaaagaagagtgaaactcattgccaactccaatgaatcatatgcatgaccaatcatatttttttcaattaatttttatattaaagttgacatttttctccactaatctagtactcacaagtataaattagataatatgtacactcaaaagtcatccatatcaaaagttaaaaagatgtctctatactatagaaacaaaaccaatgtccctaccatagaattattctatatttgcaatatctcgataagcctaatggtaaataattagagtttatatttatattatgaattaatcaagtaataagtaaaattatgatcctactaatttattttattataaaatttaaattttttctataagtgtagtaaataagcattaatttgttaaattataaatttttatttgaaatacgtggtatataatatgagttattttgtgaaataaaaatattttaaggttcggcgaccctggagaccc

SEQ ID NO: 330002 - DNA, 1509 bp, Cannabis indica
aataacatacttatattaaattgagatctcgttttacaaaacatttacaaacatttcacagtgcatattacaaaagtttatcgcctagcgactatacaaaataagctcagctatcccaaagactgtacgctccagacctaaccgccccaacatgtacaatcttcatatgctcgctctcacgactgctcgaccttagccttgcccttacctacacatgcaaacaatatctttgagtcaacatactcaggaagaaaagtataaaaaataacatagcaataacccggattacaatcaggcacctatacacccaaccataaccctatccctgtgtctgacacggtactgagtctagaacgttcgtatgacagtactactgaccttaatatcagcctatactcggtacgctagtcgtactctagtcgtaccgatgtgatactgtcaagtagtacagtactatcgaccataatattagcctatactctgtacgctagtcgtaccgatgtgatattgtcgagtaacacttaacccaacatacatttatcaatatccaatataaaaataaatatattgatactgctattataatgtaatctaacaggcttaaccaacatgcacactaaacatgtaagcacatataccattatactaatcttacctcattaccgaattcaggtgtgtcggccaacctaagtgaaatagctgctcgacgaattacaggcccctaaatcacataattcgtaaaattggtaagtgacacgctaaatcacttttcgaggacttaaaattgaaactaaaagttatcttatcggtggataacatggcaataacctagatattacaaaaacgggaaaaactagggttcccaaaaatgccctaaccggtagaccggttccccaaccagaatttcagttctgtgggttttcttggggcccaactaatcgaccggttcctacaggtctccctaaaccggtcgaccaattcagtacaagaaacactcaaaatttcactacaaccacaaatcgataccaaaccacaccaaaccttccagacctgcttaatataccacaatgaacataaaccaagcaataaaatatcccaaaacaatcagatgcacaaactaccattagagagcaaagcttgagttcttaaaatcaaaagcttgctcaaacaacaccacaacccacaaatctaactcaaactatcttaattattcataattaaactttagaaaataattataagcactgcatacagccacagaacccaaatctaagaaaatcatgcataagtatttggttatatgtatatattataaaattataataaaaaaaagaagtattgacaagtgtacttatagtttatgtcttttactatgttattttaagacattatagttttattggttaaatttttagggatagttttgtcttatattgctcccttactttagtaattcatggtttgacaaaacattacacaaaaagctgctacttttagtaacaacataat

SEQ ID NO: 330003 - DNA, 883 bp, Cannabis indica
atgagccaagttttctctttaaatatatcaccataattgtaaaaatattaatttaaagcctatttctaataatatgctctaattatctactaaatcctgtaataaagttagcggtcattacacataagcactttgtgtcctcactagatttttctacttatatcatccagttgtatttggatgaatggttcttggggtctgttcttctttcatacaactctatttgagacattctaaagtactccagcagctgtgcatctatgattattttcacacatggttctgtgtcctcttctttcgagtcaaacacagtttcattttgttgtcaggagatctattcaaaatcgattgcttaaataaattaatattcactataattgattgctttaattatttttaatcttagtggaacgatgtcagtaatttggctgctttattacttgtcgatgtgtgcacttgtaagtatatacatataaaagttgcaacaagtttttattgctgttgttagggactaagaaattttaattttcaaagggaaatttgattttctatacttacatataccttatattttatccctaaactaatacatatcaccattgaaaatatctaaaacccaaaaatacccctctcaaacttcccatacttttttttagtgtaaaaacataaaaaaaaaaaaaaaactaagtagtcgatgggtccgatggtggtccgatggtcacctgatgctacttttgtatgtacaaaaacaataaaaaaaaaaaactaggtaagcaaatctggtccgatgggtccggatggtggtccgatggtcacctgatgctattttttattgtataaaacataaaaaaaaaaacttaggtaagcagatatggtctgatag

SEQ ID NO: 330004 - DNA, 557 bp, Cannabis indica
agtaagaaaagagaagggtccctattcttggaaactttgtatatcaatggtattttagttgtagaggcttggtgtacacaaaatatgaaggacttaggaaaaagataaaggaagggaagtaatattcttagcagccgtccattaagcaagtaagcaattgatccctttaccctagcctatcacattttttatataggctttaggatttgttaatgatcctccacatgtcggggtgtcccattaacaaatcctgtatttcatcctcgataacgaataaaaaattacaaataaataaatatctataaaaatctccttatttctaggcaaaaatcctacaaacattgggaaaatagttattttttgctagagatgcaacaaattaaattagagagacatgggatgtcacctcttggcttggaattcatgacattggtgagaagtgttggaaatatgttttttggggtgccactgctcccacatgatgccacatgggcgtggcattgttctccaagatcccacacttaattatactactcaattcttgagtaaagtgtatc

SEQ ID NO: 330005 - DNA, 1294 bp, Cannabis indica
agcggcggagtattagcggcgggcttcgccgctaatactaatagcggcggaccaatagcggcgggcccgccgctactagtattagcggcggagcaattgccgcggacggcccgccgctaatagtcttcagaaaaaaaaaaaataccccattattagcggcggaccccactctccgccgctaatacccctgttattagcggcggagagtgcccgccgctaataattccgccgctaataacataaattgttgtagtgtccgtaagccagacccaaaccttagaccctagagccggactcggaccgagacgtaatcccggacccgaacccagacccagacccagacccaaaccgagcctcgaacacggtccgagtctgggtctttgtctggagtctggggtctaggtctatgtttaggttcggggttcgagtttgagtctaggtcagtgttcgacttcgggtcttggtttggggtcttggttcgagtttgggtccgagtttgggttcgaggtttgggttcggggtctggggttctcgtccgggtttgggtccagggttcgaggtatgggtgtggtccagggttcaagtccggagttcgggtccgaggtctggggtaatcttccacagctgacttcccttgagaaccgacaaaggaagtaatacgtacggtttgtctattgagacttattttaccagtatttaaatttactattatgtatgtttgattatcacataaataatctaacatcctaaaatatgaaatcattaaaaaacaaaaaataacacatataagattaagaaaccttaaaaagatagcaacgaaaataagttaatccttacattctatcactctaacccttaatactcttactactgtagtagggtattgctaagtgatgaacctggatagcttccttaaactcgaaagtaaaaaatcttcacaatcttctttagagaattgagtaccaccttgagtagtgtgcattgatactcaaatcactaatggaacaatatgaaagagagaaaaaactatataattttgaaaattatagaaggaaatagagagagcttttcttgtgaggtttaggctaaaatcactttgaaattaggttatctcacaaatcatgttccttataggctctctattagattatagttctattatggggtagaaaaataataatgggccaaaaccataagcctaggccgaaatcactatagggccttttggtattttttttttttttttctatttttatttcattaaatgaaataatcttatctttttccaaattta

SEQ ID NO: 330006 - DNA, 474 bp, Cannabis indica
aaatttcgagaattcttagaggctgccataattggtatcgggtttcatcacaactattggtgtggttcgtatcaagggttatggcttctcaaaggccctctggatcatgaagcaaagtgttattatggtcttgcatgagcctaagtgcttctcgcagattttagagtttacttttgcctccagctagcctttaagtattagtagtagatgaaaccttggtgttgggagctgtttgatcagctgtcgtactagtgtttccagtctcttgtacgcctagtgtgatccaagccagaggggaagtcattccgtagcctacagtaggaggttgtgcattaacctactcgtgatttgtccctggtcgtcctctcgtgtttgcaggagtttgcctattgggatctgtcaccattcggtcgccttgatcagcaaagcctccccttcgagtttgtacaaccatcctatttacctgtcaaaact

SEQ ID NO: 330007 - DNA, 1108 bp, Cannabis indica
atctccacactagtatataaataaacaaataaatatatacataaatatggacttagttaattaatacgaaactagagtattgatttagaaatctagatagagatttccaagccacacacgctcctagattggcaagaataaaatatttgttaactataaataaagagagacaacaatttatagtagttcactctctgtatcgcgacagtaatggagctacattgacttcaatttttatttcttacgagatggcattatagaaaatgttaagtgtttcacctttagtttctagagagagaaactagagaaagatactctgaccatgtggctaattttttgaatgtgaaatgagctaagggagctttcctgttgtaggtgaaggaggcccacaaaaataggaaaaattaattcaaaatatgaaaaaaaaattaattaggctaattttgactgtagatgatgatctaatggtcaaaattaacatctaaaattggtagtcagtttttggtgcccaggtcgcgacagcaggatcctttccaagtaagttgtggcttatttttataactcccttgggggtaaaatttggagttggtaacttcaaaattgcaatttaagtgtgagacacggattgatagatcattgaattgacttcaaaatgcaagttgaattgcgtcaattagatcaatattgagtgagttacgaccgttttactgaagattgttcatgacccaacgccaagttgacatccagcgcccaagagatgtactttatgtggcctaagtgatactttgacatcacttagtttttgtgttctggtaaagctcgtcactagttctcgaagatgttgctattctgcagaaatgagagacgcgagactcttcatttcttagtaagtttcccatgttggaaatgagaaatgtgaagttgtaaatttgacatctctaaattcatgtatcttagttattgtaaaaaaaaactagatggatggtcgaatcaaaatcggataagcagaacccaacgcaccaggccattgttgggattttatgccctaataaaactcatttcaatctaatttgataaatttgttatcaataaaagattagaagtcatt

SEQ ID NO: 330008 - DNA, 955 bp, Cannabis indica
ggtaaaatatttccaacagccccaacatagagcatgccatacacttcgaaggaagccattcatactctatcgattgctccaccaactgcttcttctcattgatgaaagagattgttttatgaggattatccgaaatttcaatgtcagccaaaactctagcaaactttatcattgatctctcctatgtaaccttatccatcattatgggtttacctatagtactcacaagagcacttaggctattcctcccccaatactgtaatcctaggccattaagcctaatccaaactggaaccgatttgatcatctgtgttgaatccatgtcagtggaccaaggcctaagcactaccggttttttgtcaaagtgtatcacccctgtttcaagcacaagatcacgagttgcctcatccctgaaactaactagggtaaagccagaatgcattctcactatcttttcaatgcccaaatttccccacactctcttcacaaatccttcaaacactttaaaaggtcgattagcaccatgaactatacagaatatagcatttttccagtacgctgtctcaatttcaatttcatctagatctaatttagcaactttctgatccccaacacaaattagttcagtatattccagtctagtagaaggagttctaacttgactggcattgaatttgctccatgtttccttcgcactggattggaaatccatctgctccatctcctctgcctagttctgcaattttggagtcgattttgactctagtttatcgcacgcaatctgttctggctcttgttcttcacacggatcatgaaaaatctccaccgaaatttgttttggatttccatcttggatcgaaggtggatcttgctcagcaagatctacaatcttggtcggagtagcaggcttcgatacgagtctcttcttcttcgtcatcgagagagagagagagag

SEQ ID NO: 330009 - DNA, 626 bp, Cannabis indica
ctcgaactcgttaaacctagtgtcattcttttctgttttactgcttaattcattacttgaatcttgagatctcttggtaaattattttttgattgtgtagtatgtttgttggttcggtaaactgatttgtaagtcattaattgtttccaacaaaaatcaattttgatgttgttgtggggagtgacaagatgatggtggttgttgtggctagaaatcatttgaaagaagtattatggattagaaccaaattcctctcattcatcgaccctctggtaggaaaagctaaggcttgtcttttagctttgaattcagtagtggatcaagaggtatcagtttgtgataaaagaaagtgattcaaacattgtgatcagtgccttaaagggaattatgtctagataggaggtgcaaaattaagttactgtctggttgaatactttcaatttgttgttaggttgtaattttactaaagctcatagacttcttaattttgttggtcataatattttcaaaaagggcttttgctgtaaaacactactgactatttaaagtagggttggacatccaattcaatctattttttttctaatccgattcaatctaattagtaattagatttggaaaattat

SEQ ID NO: 330010 - DNA, 1218 bp, Cannabis indica
attaacatcatgaaaaggaatgttattaaataaatattatttgttatgaaaagataacatggcaaatatggccaaaagataacattgacatgatagttgatatataactattaatttatatataatatgcaatatttatttgactttttcaatttgtttctactaactcttttgtttttaaattataatatattatatgaaattccatgtatctatatacctactaacatattataaaatgtgtttcataatttaacaactcaaaataaagaaaaagaaatcagaaacaaatcagaatttaagggatcagttgaataattttcaaattaggaaaaaatcaataaaaaaaatgaagaaatcttaaagtttttaattaactaattattttcataataaaactaaaaataatcaagtgtttctctatttgttgatgtgggaacactttattggctaaaaaaggtccctacttgagaaaatactttacctactaacatattataaaatacatgtgtttcatatttcttaaacaactcaaaataaatgagcattagtactattagtgcctacatcacttgtagtctattttgattggtctttaaaagttactatactaaatcatagaaaattgttaaaaaatattattagtgtctaatatattttttggtgtcataccgtattattaagtatcgagtctcatataacttaaaaaaataatttttaaataatattgctaatcaatcgtagggtgccacctatagaaggtgttgtataccactagtgcctaatagcaatgctcctaaattatatagaacctaatacttaattgtacgaataatgatattacaacatagatagtgttattaggcaccattagtaccttttagtatttctatggtaaatattaaaagatactagtggtgtctagcatctttcaagatgtcatatcgctaaaagcatcttcaatggaaatattttaaaaaatacttgataacatgaatatatttttgacatcttttattagatgcttacaagaatgtcatacaataacattttttatatcttctcttttttattattttgtgataaagtaagaaaatttaattataatataatattattttaataatttttagatgtgcttaccattagaacgttttagaacaaaaaatatcaaatataatgtgaaagagagataaataaaatattatatttttttag

SEQ ID NO: 330011 - DNA, 1681 bp, Cannabis indica
aattattttaaaatttaatattttctcatgaattaaattacttattaaaaagaaatataaatttaaaattttaatttataaaagaaattaaagtcaataaaataaaagatactaaacaaaaaatagtgttattttccgataaacatacgccacttcttcactatctcctcacaattttagtggttttttttgttttgaagatactccaccacttgtatgtctagattttgaattgacaccataaactacctcaaatttattacttaaaatactacaaaaactctgtagagactttaatttttctgattgtcttggtcatagaatcgagaagcctttcgattctaaggcgacgagtagttattgaaggacgactatagggataaagaccgacgaataagttttggtgattgccccatattatgttaatatgttctatcagcataggcggaatttgtgatagtagtatatgatcatgatcatgatcatcacccagtacttttccaaatccaatattcatcaaatcatttatcttttcttttatgagatcaagtgatgtttgactttttgaagcgatatcattattatagtttgatgaataattgaaaatattatggaggcaccaaatttgatctatgatcaaactaagaacttcatctgaaactgtagtaattacgtttgatgatgataatagttgacaattaattggaggagaattatgaaaaggagatattagccgattgaattgtgcttctttcagtacgtgaaggaatttactaatgataactcctttataaaaatagtaacatcctatttgcttaaccctagattccaccctttcaattagtaacttgtacaactcatttccttggtagtggttgtcgtcatcatcttgttgcctcttttcaatctcaaacatcatcatcaaccacaacaatttaaccaaaagatgggagacttccttaccgtgttgtcgtaaccaatcttgaatatttctgtgtcttctctttgcttttacgatcaatttcatcctcttaaccatcttcgtttgtaaacaatgtataaaagatgcattgttcctaaaataactttctttttcttcatcaaataatactaatctttgcttggcttttatttcctcaaaccaacccgataccactctcaagtacttaaccctaaaatcatgtacaagttcttcttctatttcttttccgcccataacataattttttagattattgatctcctcctccatgcattccactaacttcttcaatctttctttatcattcgcattgatgaaagctaccctagggaatctcaaactttccatctccgtctctcccttaatatggtactattagtcttactgcttccttttatagtagataaaaatattgttttttttaacctaattaatcatacttgaattagaagacaaataaaatatctacaaaaatatatatatgtattagattttaaaaagttagcatttttggtaaatatcaagttttatacttataaaactttgttatattttttcaggtaacgtttatttttaaaagtcaatagtaatattgtttataagctaataatacttgaattatctgtagtttattaaatatatttcctttacatttttaaattttatattagttttttttttttttaaataattgacctt

SEQ ID NO: 330012 - DNA, 723 bp, Cannabis indica
gaaaattagttctaaaccattgacagaaaagtgactcttgtaactcttaattggattgatcaagaactgtgtaacaaaaattttgatgatcaataagttaatgatagttattgttccaactaaaatgtatagtattagacttagttcgaactcgttaaattcttggtgttctcttttctattttatttcattcaattattcttgtgattctcagagtgataggttcttcaaattgtgtttgtttgtttatgtgaacttgcatctagtgcctttattgattcacaacaataaatattatattaaattttttttaaaaaattataagatttgttaaacaacctataacattttatcagagaaattctcatactggtctactttgtgttaaatgcagtaacaatatgattaaataaagacaaaacatacttaatctataacattatctttattattattatttaaaaaatatctacttcaatattctttttataagagattgatatatatatttatatatatatatatatattaggaccaattttcgtagcataatttattaagtttaaagttatcctatcaacaaataataaaaataaacatataaaagtacgatataactaagtatatgcaaggtaattaaaaataaaataatatttttcctagaagataacatccaaaatcacacataaattctattagtaagcataaaaataaaaaaaaaat

SEQ ID NO: 330013 - DNA, 664 bp, Cannabis indica
agagagagagagagagacagagacagagacagagggattttacagatgctctgtaaatggggaaaggtgaattgcaaaatctgcggcaacagcagagccatgatgagttcgaccacaatcgagactcttcgggatttttctgtgcgggatgttctatggttctctcccgattcgccaaagatttcagtttcaaatgcgtctttgttttaattttgactctatcgattttggtctctgggatcttctggatcattcctcatcgtgtaaccacctacggatttgatgcccaagaagccattaaactcagtggtaattctcttctcattcaattttgtccttcttatgtttcattcttttagcaaatgggtatcgctagttttcgtatctctgggtctcatagatgattttttggatgatttgagctgtgatgggttctgggtatttgacttaatagactaaatttttgtaattagggggcttcgtttgataagtggttttttttttccgctttgtctctgaaattatatttgtggaagttgcctcttttatttttccatttttttttcttgatttgcagtttgaggctctttgttgttttgaagaactgggtatttgttagttcaaagtactacacacgggggattttttagggtttttttttttt

SEQ ID NO: 330014 - DNA, 863 bp, Cannabis indica
aaaattggcatagtatacgttctccttaaaattaaaatttgaactactttggtttttgtttagttatgtaacaattaatatttggtgtcattaaaattgagcttcattgatttttttctttttttaaaattattaagcttcagttcttaaatcaaatgattgatttttccagaagatacaatacaaataataatattatttgtaatagaaaaacaattataatagttttttttattacattacctttggaattatttttattacaactgatagtttaaaaataaaccaaatactattttttaaaatatatatataaatagagcaataataatttttgaaattaaaaaaatcattttaaaattaattttaagtaattttaaattagttttcttttgaaatgactttaaaataatttttataatatttaaattattagaacagcatttaatagaaataagtttgtcaacaaaattttagattgcgaggtattgctaagaaaattttaatctaagaaaattttaattggggattaattgttacaaaaaaaattgattttaaagaggttagctatatatatttttgaaaaaatttataatgcacttctttaaaagggatgcaccgatatatttctatttgttttagtatccgaaataattttttaaccaattttctttcatagtcatgtaaattatagttatttaagacatcctgtaaaattttaacaaattcagaaaagtttaacacgccgaaaactacattcaaatagtgtgttgcacaagtaactattttattttatacgcatgtaaaataaagaaatttttacaccaaaaatacaaaatgcattctttattactgaaataccc

SEQ ID NO: 330015 - DNA, 948 bp, Cannabis indica
aataatatagtgtagtgtttaaaaaaattgactaagcttatagaatatcaaaagtaagtactgtacttgtttaattaaagagagagagagagttaagtgttgactaaatattggtattttgacttttgaaatgacaaaattatcttttattacattatatttactttcactaagggtaaagttatcattatgattatgacactattatcgtacttttataatagtaggatattattattaccatatatatagattgatatatatttttaattatattattatttaaaaaaaataattagttgtaatatatagatagatattttatttttgttattgttattattatagagtaatcgtattcctacttttatttaaaatattttagttatttgttattaatataatattatttgttttagatttttttccttgaaaaatttataaagagccgtgtgtgtatatatatcttaaattttaggtcggtatatagataaatagtaatattttcataaatatttttctcaattaattattttaatatgaataaaaaatgaaaaaaattaaagaaagagcaaataaaagtatttggagtcattttagataatttattattattattattattattattattattattattattattattattaaactattaatttaaattaatttcctaatcattacgtttgattttagtcacttttggttagttatttaatttattattattgttaaaggttaaatgttaattaagtccttagaataatttgttagagatattttttaaaaattaaataacaaaaaaattagatgtggttaaataccgagtattaattggatatttaaatgagagaattaaaggagtaattaataaatttaattcttgattaagtttaagaaaagagataattaaaattaagattatttagttaattttactaa

SEQ ID NO: 330016 - DNA, 632 bp, Cannabis indica
attttttttttcaataaagaaaggaaaaatattggagggttatttttaatttttttaatatataattaatttatgaaaaatgatcaggacaatcttatacttttcttttaggcttaaagacaaaaatttaattaacctttaattttatgtaataattaattaagtttttatatgatatgtgaaaaattagaaagtgaaaccttgactagtttgttttcaaaaaagttaggctagttcctcagtgtttgctactaaaattattactttattaaaagtatactattggtaaaaaaaattaattagttgaactaactaattgataatagattaattagtaactagttaataatggattaactattgcatgcttcttaatgtctagtatgtttccgaaggaatggctagtcaatcaacgatacctttggactcccgaatttggagtatctttggactcatgcaatttacactaatttacagggttcaacgaacttgctatcgattatttaaaagaattgcatgaacaaattcttttaacttgtttgattaataatggcatatttactaaaaagtaatgagaatcaatagtaaggtaatcattaccttatatttgtttacttgcattattaaaatta

SEQ ID NO: 330017 - DNA, 719 bp, Cannabis indica
agctcatcaataaattaaaaaaaaaaaatagttttaggtatatttacacattaaattaatctaaaataatttatatatatttttttggatcgattaagtacttcttgtattttttggatttttattgtttgaaatattattttatgactaacataataaaatacaagaacctatttggtaatattgtatttaattaataaaataggggtgtcttatttatgttacaaggtgatgatattttacatgtgtataaaataaaaaatatatatttactataaattatttaaattttatttttgacacgttaaattatattataatttctaaaaaatttacaaaatatcttaaataattataatatacaataatattaaaattatgtggatctcaaaatttttagagaggaatcctaaggcaaatacaattacaaatatatacaaccatatatattatggagatctccattagagctctagaggaaccctattgtgtgaatgttgagacttgagtattgagtgagtaaatttgtttctgcccttgtcctctccgacttcaagagactaagcttgacaaagatggaaaaaaattgaatagagagagactgtggtgtggggagtttgaatggtagccaagtcgacgaatgtagctgttgtggttgtggttgtggttgttggtacgctagagtgagagggagaaagaaatgtagagagagagagaga

SEQ ID NO: 330018 - DNA, 1161 bp, Cannabis indica
agagagagagagtttggagagaggaaggtaacatgtcatattttttttccaattttgtaaaataataaaaaccttatgaattatctactagaatgaggtgtaaaatcaaattgtttaacttaatatggtctcacaaaaagacaaagagtcaaatggtcaaaaagaccattttatctcacgtaagccataaagtcaataaaccacatagagaagggataaagggtctccttggtgaagaccattaactccttagaacccccattgaactcttccattcatcataagagagtagtgtgtgcctctaatgcatatcatcaccaagtgaacaaatttactagttttatttagggcattcaacagatcttcaacaaattaccagtctaccgtgtcataagcttttcttatgtcaattttgatggtgcaccgaggagagacattttttcttctgtaattctttataatatcgtggagaatcatcacatattgagctatagatcttccttgaacaaaggctccctggttatgatgaacaagcataggcagaaccacaacaattctaacacataatagtttggatatgcactgtagattgtaagaaaaaaatccaattgatctataatctactgcttgggctggagtctcatgcttgtgaattagggaaatcattgtgtgttatgaaattcaaatggtatattacctaaattaaaaaaaaatggtgacagcttcacatatctctcctcctacaatcggtcatattttcttgagaaaaacctgaaccaaatccatcagggctcggagattcaatgtctggaatgttgaacaaagctatcctgatttccttgttggtgactggtttcaataggccaagttattgatcaagagataaagtaggcccctgatcaatactgcttatgtttaaccttgaagtggcactacttttgctccccatgtagccctgaaaatgattcaagaaatgcttaatagctccagaaaaagtttctacagtctggccttgatttgttgtgtaggatgtgattctatttttccaccttcctttttttaagaaaagcatgaaaaaaggtaagtgtttgtgtcccctttctgcaccatgtattttcttctttgtttaagaaatcatgatacattttctcatggatagtg

SEQ ID NO: 330019 - DNA, 424 bp, Cannabis indica
aaaaaaaaaaaacaaaattaatcatagtatcttgatttttagtcactttgatcagtgtatactatgatattttgaagagtccaccctacatgctttcgctaatgctacatatgaaacttttgttgggaaaaagtaatttttagcatctgaatagcatgtcacaataccagtaggtatcccttcatggtactgcaaattaaacatgaaggcaaaattaaataacattttaaaaatatcataggagattgtgatgattatatattggacaaaaaaaaaaaataatattaaaacactacaaatagatgaagaaaaaattgagttaagttgtgaatgggtgatatggaagaattcgaaagttatatatgtgtgtaatgtggagttataatttaaggtggcgtttggtaacatttttttaatcagtttt

SEQ ID NO: 330020 - DNA, 744 bp, Cannabis indica
tttttatataaatttaagaataagttcttgcatatatttttcacatgatggtgtctacattattacttttaaaaattaaaattgttatctttaatttttattttgagcaagaataatattttacatgtattttttaaaaaataataaataaataaataaaagttgataaatttaaatattttttaatttattttgtttttccaattgcaagaataaaatacaaagcactatcttcctcctcatttaatacacttaattattattaattatttcatttatttatgagcaaaatataataataataataataataataataagaaataagaaaattttataatacgcccttttaaagaaatacactgatagatctctatctgttttagtatccgaaataattttaagttaaatttttctcataatcatgtaaattatagttacttaagatatccgacaaaaatttaagaaatttaaaaagtttaacacatcaaaaactacgttcaaacagtgttttacattcgtgactattttattttttacattaaaatagattgtttaaatattatctttaatattatgaattatctcaaattttttgaaaattttgtaggatatcttaaatagctataacgtacatgaatatagaaaaaaaaaattagactaaaaaattttactagataccgaaataaataaaaaatatatcagtacattcctttttaagagtagtccattctagaattacct

SEQ ID NO: 330021 - DNA, 771 bp, Cannabis indica
caaaaaacataaaaacaaaaaaaggttaatctagggactaataattatagtgtttatgaaggtcaaatagcttacaaaaaatttgttactcccatgtttacacgtttgcccttcttgttttttagaaaatttttgtatttttcaatttttttctttctaagtttttatgcatttttgtaaattttctaataaaattctagtgttaatgaagctcataacttgaaagggcttacataatgagattatgttatgatattaaaaaaaagaaaaaaaaaaaagaatgatacctctcaattaagattaatagtataatttgtttttaaaaataatagagacatgaaaataacataataaatatgaaatatctctgcctaaaatggaatcatatctcaattcaaggtatcattccattttcatatctcaattcagagaatcacaggaatcgttccattttttcattttctctatttaaaaatatataaaatatattgaattgttttataatatatatatttcactaaattttatgattttttaaataaaatatatttagacaatataatgtcctattttttcttgaaatttcaactatatctctaatatttttataaaattatagtaactatatttcattcatttttcttataaagaatttcatccttactttcaaggacatgcagaacctcatttcaccaccataatagctctctatgaagatactataaatatataatctctgttaacatgtcaaataatgttttgacttgtttc

SEQ ID NO: 330022 - DNA, 1089 bp, Cannabis indica
tgtggcaccacttggacaaattcgcctaccacttacagttggacaagctttgaggagcataactgtgatggcacaattcctggtgatcgacgtcctatcagcttttaataagccctatattacttgaaagctatcgcattagtattccatctgtgcgctaagttcccaactaaaagtggagtaagctgtctaaggggaaatcaaaggatcacacgggaatgcaacaaccttgctctatctaaggtcaagaaggataatacctctggccagagttcagataaggggaagagcattgcttaataagaatctgcccaagccagggacaaagacatggatccctgacatacgaaaataaatacaaatatcatgccaataaaagaattagaagaagtggaaatcgattcaggtatcgcgaccaggaagctcgaaattgataaaggtttgttgcttaaaataaattagccttaataaaatttctaagagcaaaccttgacgttttttcttggtcacatgaggatatggtacgtattgaccccacgatcatgtctcacgccctgaattttgatccaggcttccatctggtccaacagaagagagactactggataaagaatatgcaaaacactaaaagaagaggtagaaaggctacacgcaaacaagttcatcattgaagctttctacccagcttgggtggctaaccccgtactagtacccaagctaaacaaaaaatagcgagtatgtattgactttaccgacctcaataaggcatgccccaaggactgttttctactctcaagaattgatcagctagtggacgtaacagtcaaacatgaaatcctaagatttatggacgactatttggggtacaaccaaattagaatgcatccacctgactaagaacatacaggctttcgaacagatatggatctatactgctataaaataatgccattcggtctgacaaatattggggctacctatcaaaggttagtaaacaagattttcgaaaatcagatcggacgtgtaacgtccccgcttcaagcctccattgggcccttacacccatggaatgatgactcttatacacga

SEQ ID NO: 330023 - DNA, 679 bp, Cannabis indica
ggaccgttattttctaataaataaaaataaaaaaatcaataaaaatatttaaaattccataaaaccgtattttataaattttttatttttattatttttgtgaaatgatcccaataaaaaattagtcagaaataatgcacttcttctgtaagttttcttgcccattaataagacacatgctctgtaccctatcctaataaaacaaataattgatgagttactcaattcctatcatatgtattttttattatttatactcaataataatacaatagatgatcgtgcaatgcagagttcttccatttataattgaaatcatttttcttttttgaaagctgttgaaccgttttttttattattaattagtatataaaaataataatgataataaagagaatgctagttcagaagaaaaaaaaaacgaaaaaaaattatatattaataatgtatcttcactttttattccattaacatataattgcccactacttacctcttcattttctaatcaatatatcttacagaagagtctataaagaaaaaaaaaaccctagcaaaatttacagagaaatattacaataaatttttgagtattcatattctcatcttctagagatttctatagggcaggcccgaccttgggcatatgcggactaggcctgtgcctagggcccaccta

SEQ ID NO: 330024 - DNA, 511 bp, Cannabis indica
tacaatgttatattttgtgtcaaatttagtacactttttaaaacattatttgaacagtaatttttctgaagtgtgctaacacataacaatacaacatatttttggtactccgttgaagctttttaatttttttttttttactttactgaatagtattatacatgtaaagatagctactaaaataaaatagaatgcagtatgagcagtttgcactaaatataaaataatttaataatttaacgttataacaaaattcttaatgttgttcatacataaattcataactagaaatgttccaagaaaacaattaaaataataaaaatttaaaatacaaaatacataaataactctataccattttataatagctaagtcttaaaatttatgttcatatgtgctttatatattctttataaatattttaatattaatttttgtccttgtatatgtctttctctctcaatatctttcgtttaatattttctttaattttaattaataaatattcttt

SEQ ID NO: 330025 - DNA, 1212 bp, Cannabis indica
aatgcaattacaatgcaactacgcagaaacttataaactagaacaatgtttctatgtacatggctctagatgaattcgaattttctttgttattcgtgatttgatatgattaaatccactattgaaaatctagaaaataatgttaatgcaacgggagaaacattagtttgtgtattgatacatttttctttgatttatacttgatttgaattgatcaggaactctagatctatttcagacagatctacactttatgaatctgaaaattgatattataatgattagttttctgcgattttatcttaattcagggttaaatattagtttcgaactaatttttctacctgattttgcataaatttaaaattatatgtatttggatttttttcggtctttttctcaggtgaagtcgccggagtctatggtgattgtccgtctagcttggtttcttttaggttgccctgttggtttgtttgttggaagttgtcgttgttgaagaaggtggttagtaaggctgaatggttagagcaagaggtatttttataaatttttattgttgggttgtatgaatatttatagggtctgcccaatatttatgtaatattttttttcattttagtatatacatgaaaaaaagccctttaattaatttgtttatgtttctttgattatgtataaaaatatacttatgtgatgtctaaaaaaatttaaagtgtatgcataaggaaacaccttttttcctttgagatatacttagcatgaaatataaaatgctttagttttttaaacatatcactttattatactattattattattgagcattataaaaaattaaatttgaactcatgaccctttcctagaggtataaaactactgtagaaagtcatttttttgtgagaatatattaaggggtttaagggacaagaagattaattcagtccatggagaaagaaaaaatagtgatatactctttgagtccttaaatattgtccatatgcatacaaaacacaggaattgtaatagtgttcaatttattttatataagactaaacgttatatacactaggaggaagaaaaaaaacaatatttattggattgaaaataactccaaatattacacataacaaaaaagactgcacaatagcatagcatattagaaagggacaaatgagagcatagtaatagtcttagattttcagcctaaaagaa

SEQ ID NO: 330026 - DNA, 656 bp, Cannabis indica
aaaaacaaattagggttcacgagtaacccgagtttaggtcaaacttggtaaaaatatttggtcttagtttgagcattgtatttttcaacttcttaaaaacatagattttttaaaagaaattttagggaaaataaattttttataaatttttttagattggaagtgaaattcaatgatttttcagtaatagttatagaactcttgcaaaactcgatctttctgtaaattgtggatagaaaagtcattcctatataatattaaacaattattaattattacccttattaaattttaatctttaatgtttaactatattaagttttgaaagtaaagtcattccaatacaattgaaaataatttttaatgtttaactatattaagttttgatcaattttattactacttaatttttgaaggaaaaatcattccaatacaattgaaaacaattattaatttttacctaagttttaatcgattttattactactcaatttttatttatcatcattactctcaactaaacacactttagtttcttaacataaacgttatctattatagaaagagtattactacactttttttttttttttgtaaagagaacgaaaagtttcaaattaaaccgagaaaagattcatgggatccacagggggaaa

SEQ ID NO: 330027 - DNA, 1030 bp, Cannabis indica
agggcataaaacccaacacgatgctgcctctacatccttacctcaaaaggattgcagactattaccacctctggccgactcaattcacacccaagggcatcaagtacttattcgccctgttcatcctctacgccactcaaggatagggtgagccatcctcgcataacactaactggctttttgattttaagtcgacccccaagaagagcaggtcggggtacttctacttctcccaactggacaataagtggctaaagagtaacgtagaccctacggtcaacaaattaggtcattttgtggacgagtactactttgtgacgggcatggagaccgtccacgctaggttccagcagattccatccaaggagaaggcaccagttgacgaggtcatagacctttctgaggagcgacttgctgtggacccttcagctcagaaggtcataaaagtcaagagctctagaggagggagctcggatggatctgagtaggttagggtcccttcaacaaccatagcgctgtgcacggaggcctggagaggcaaagacatgcttcaacactacctgacccgctcacttctcgaagtgagtgatcaactgtctggagcggacagggatttatccttggaactggtcttaggaggaagtttgaaggaagttactcgggtaaatctcctcctctttttagggtaaataccattttagaccctgtattttgtaaaagctaccaattggaccttctgttttgtaaaatgacaaaatggaccctgtattttctaaaatggtacaaatatgaccctgaactgattttgaaccaaaataaaacttaataataatccgatctaaaggtgttatgacaaaactgtttacatttttctgtatctgttcgtgttaagaattgtcttcaagttggttatattaaaaaaaagttgtcaaaattaagctcggggtcctatttttaccattttgaaaaatacatggtccattttgtcatttaacaaaacagagggctcaattggtaacttttgcaaaac

SEQ ID NO: 330028 - DNA, 546 bp, Cannabis indica
ttctttctctaggtacaaatttaccaaattgtggttgtaacaaatttgacataaatagcatgatacaaatttacatcaaaattaatagttactttcttatttaacttatctcatcattcgaattcattattaacattactttttttttttaaaaaaaaacctttaaaataaaattgttaattttattattatttctattaactgtttttattttatatcaactttttaaacatgtgcattggagtaaaagtataaattataaaatttgccaaatatgtcactgatttcttatgtattatatttagcataatacttgcatctcctgtccaattggagatagaagtcttaaggtctggtctgcacacacaataacattgcttctatttttcacttattaatttgaattttcattgtcaaatattcatgacattcgttaacaaagaataattacccaatgatatatggctgtttaatatttatatattattattagggatttttttaggaatatactatattaggtaagtttttacaaaaataacgtta

SEQ ID NO: 330029 - DNA, 867 bp, Cannabis indica
ggtgataataatatttatatacaattaaagtatatattaacactatagctagggttttatttatttcaatagcatataaattaatgcctcacgtacgtacgtaccataattttggggtaataaaatacgatatatatatcataacattgttatggtatttatcattttgtaataggttaataattttttataatcttatttattaaactaattaaatgctcaataacatttatatatatatatcatgatatagacacattcatcatatatttctttctttctttcccttttttcttaaaaaaataatcgtcatcatatagttcattacattatgctctccaaataataatgataaatgcatgcccccaccacttcctaaaacttatataaagtccaaaacatatattataaaggacaaaatacaaaaccctattatattatatatataatataaataaagcaatatgtatataatataggagattggaaacttattgggagttgtcaaggatcatcaaacactaaccatctccactttaagtataatattatccgctttgggcttaagctgattttgtttttaagcaccttctctaaagacctaatgccaatagaaatatatccatccttatatactcatgattcttattatttctagcaaatgtaagattttgtttacattcccaacaatcctctcctcaaacacgggactacatagcttcccctcaaacgatcttccatcttgtacctctgttatcacaaactgaacacgctgcctgaccttcattgtcaagaagactttcgacacaaggcaccaaacaagatctccaatccgtccactctctaccaactagtatactttcctcc

SEQ ID NO: 330030 - DNA, 496 bp, Cannabis indica
atcatatatatttaaaaataaaaactgcatcaatatataatcacatttatttatagaatatatatattgaaaccttaagtcactattacaaaattgggttttctccaaggttaattaaggggtcaattatgaaaatcgttggaaaaagtaagcagagatttttcccacggtttataactaaagcaaagaaatcgtgcggggaaaatcaatattgccaacaatggagaaccgtgcgcaatagtaaatgtatttttttttttttttaaaaaaacaatgaatgtcaacagtttataactgttcagaatactaagaatacaaccgttgggtatacttagtattcccaacagttataaactgttgggaaatcttctttttaatatacaaaataaattcagatttaatgaaaaaaatattttttttgcttgtttcagatttttttaaataaaaaaagagtttgtactttttttttgtttaataaaagaaatttatatataat

SEQ ID NO: 330031 - DNA, 797 bp, Cannabis indica
ttaaatttaattatttttaatttgataattatagactaaaataataaaaaagcccccacgaaattaaataaatttagtaagagtaattataatatatgtataaatattttttaataataaataagcctccacaaaataaaatttttggatccgtaactgcgtgtacgatttgtctatttagcttttttttttttttttcaagaaacaaacttgactattagcttcgctttcataaatttaaaattgtgttacaatcatattcaaactcaatcaaattaatgaaaattttattaggctttggggttagtaccaactcctctaatatgcccccaccaccgtacttttataatttttctctttctttctttttataaaacaataatgcaaatagttataaaaaaaaaatgctaaaaatatttttttgtctttattatcaatcagtgatcatttgctatattttcgcttaattagtacatcagtttaaactcaaatcatgcagaggcaaaattttataattatttgaagttagctaaaagttattcttcttaaagatgaaattatttatagtctaaagaatttacattaaataatttagtgccatgaatccaaaaattaaatctttaattacaatttatacaaagtttaaacttgatggcacaacatagtagaatactatagtcgatgtttacaatttattaggccagcatgactagtataaggaaaaatttatataatagaataaaaaacttgaaaaaaaattcaaaaaataattcaaactaagtatttttttttttttt

SEQ ID NO: 330032 - DNA, 1996 bp, Cannabis indica
gttttgacttgaagacaaataaagaatagcgtaagtaagtactgaaaagttagaaggaaaagtaaggggataaagaaaaaagagtttaccaagattccatgagaaacactcctctcaagcatattctccaagtccccattattaatcaaatcccttcatgggggaggaaagccttgatgtgatgccagtaggctgcgccaaattctccagtatactttgagccaggactgttagcatcgataggaagatcctcgagggcttggcttgaagaagtagaagttggttcgcattgggaaggggcttgtcggtgtttgcggagatcggagcaggaatcggatcctgggtttcagactcagagaccttgagattaacggattaggaagctcgcttcttgttagctgtggtcttcctctgccttttgaggggctccacctcgacatcagaaggagcctccgaggtagtcactctcttctttcttttcttgtggacgagaccctcgaagttcatttctgcgagacaagataaattgttaccatttattgaaagacaagtaaaaagaggagattggggataatttcctgcctaaggaatttaccaaataactagaagacgaggtatcactagaagacggggtagaaggaccataatatccactaacattcctacaacccgtgattctgaatatatcataggaattgattagttctaagttccagctcgcgtctaaatgactcgccctatcaatcatagtcctatactactcggttgttccgtagtacgagtcagtacagctaatttggacatggactctgggataccaactatcaaacctatgtgtaaagcgatctacgaggaggggatgccaagtataaaagttaatgcggctatctcaaaatgtaactagagtgttaggctcagccataagcagtgtgggtgatcaaccacattgattaccttgggatgctccttcactggcttcctgaggggcaatattctgaaggtattgtgtcggagctacacaatctcgagctttctcctcatctgggacaggaacctactgcaaagaagaatacttgagatatttgtaatcacaagtaaactccttgtcagttaggagatccacagacctcaggttgaccttgattagaagaaagtcacaggacctaagaccgtaggggagagttagcaggagcctatgtcactcgatcatctcaggagtaggagtaggtcttttcgagaaagctgtcaaaaataaagcaaagttgcaatcagttaaattcgaataaaatgcatggattaattaaaccaagtcttgttcaaataaacacttacggattatatggaaactggttgtgccaattggggagaggctgattgtccaaaagaaatcatccttaaaggaagttttgtttggcaaatcgacaataatcttacgatcaccagtgtgaatcccaagatagtagaaaccccctgttgcattcttcctcgctggaacgaccttgacggagtagagatactctatttccacgggagtggggcactcccaattcaagattttgtacagaaccctcaaacttgcaaggattctatacgaaatgggattacattggaacggggcaagcccgaggtggttaatgaagtccttgaaataatcttgcaaggggattattgctccagccttgatgtgttcaaggctccaagcaccaatcccaatcgagcctcttgtactggtgtcgccactggtccccttagaggtttcgcgtgtaagtcgcgctggtgggtaacaactaaactcgcctgctactaccgatctaaccctgcagtctcgcctatactcgatacgacaagtcctcaatgtatcacctacataacctgcgatggctcgcaccttcgactctattaactttgcctcaaagtgactttatggtccagggaagtccgtgatttacgtggctttgaagacatgatttcaaaattcaagtcacctggttcaaaa

SEQ ID NO: 330033 - DNA, 539 bp, Cannabis indica
aaccctgtgctgtctgacacaactgaaaagtgggctcttctggttaattgaggtatttgaccaatgatactctcaggaagcagagggcagtaagataagctttatcagcaaaactcttccctccacaaattaatctttgttcaactgtttagaatgcctttctgaaaaatacagtgaccccacatgatattataaacagcagaacatcaagtaaagcctcaattatcttgttttacaagcctgctgaagctcttacttcataatgacagatacaaaaacagctgacttcccaagaaacaataccaaaattctagtctatctttaaagattttacttgcattgaatgaaaattcatcatatcaaaattagagtaagatgcttccattttattattatgaatatttcatactatgcaaaaatgtgcaagaaaacaaaataataaagacttgtgtaaccaccacccaataaaatgctagctttaaaaaaaggtctagtcagtcacatcgggatatgaaaacttatctcatagtagtgttgtg

SEQ ID NO: 330034 - DNA, 531 bp, Cannabis indica
ggtatatttatatatgccaattaaaacccccatgtaaattattataggctgcactgcaacacaattatttatttagcctttctcgatctattaatggtgttaaattatttgttttacaagtcaactgtatatgtataattgtgtactaataataataataataataataataatataaatcatctatagagactattgtatgtgtatataatttatttggggctgaaaataattaagaggggtgctaaggaaactctcttttatactctcttttaccctctctctataaattagtgacaaatgtcatcctttgatattagtgtattcatacttaataattagacataatattattgcattattacatttatgccattataataaaattaactcactaattttttacttagagcaactccaatgccaaaacttaaatttagtatttttaaatcaaaactaaaagaatactattttagtactattttttttttcaataatcacaatactaaaaattacattaaaatttatatt

SEQ ID NO: 330035 - DNA, 830 bp, Cannabis indica
cttgatttaatgctagcatgaaaatggttgtgttgtcatctccatctctttcccaattcgccttagctttctgcattagaaaagactgataatctttatgtgctttggaaaactcatttctggtaactttctcctttgcctggagggtcgaatttagagggtctagcatgagcttttgttgacattcctccattactgcttttgttcttataactgctgcttgtaggtctgtgtatccctcttgattaatttgcttgaaaccggtttgagtgctttaagcttagccgtgagctggtacattagagtcccctgtataacttttctcccaaactaccttcactttactttcataatcggaaagagaatgccacattttaaagtacctaaaaggtttctttccattatgcagaagctgatgaaaagtgatgatggccggtgtatgatcaaataccccttcactcatgaaaactacttcagctcctgaaaaaagatcttgccaactctcattagccattattcgatccaacttagcatagattctagcttctccttgctgattattgcaccaggtgaaaaacttcccactgctttttacatcttccacttgacaaaaagaaacacaatctctaaataatgagagattatgctccttcattaaaatctcccatcactacccaaggtgtttgggaagcaattgcttttaaatcctgccataatatccttctaccctcttcatcattaaaaccataaacaaaagtaacaagaaaattcttaccatccatagtagctacttgtagatggattaattgacttgtacatttgattatgtt

SEQ ID NO: 330036 - DNA, 534 bp, Cannabis indica
aaataaaaataaaaaatttatgtgaaatttttgttattaaaaaaaactataaatgatttttaaaaaattatgaaaataaaattgatcatataagtactgaaattatcacaaaataatatgagaaaaacgaaaatttaagcttaagtttttaaaatattgaggtatacttttcattttatgggattcgataaaatttctcttaagttattattaagtgattttggtgagattacttgattacccttaaaaactattttgagaagatttaattattaaggttaaatttgttatatttttcctattaatttgtatgagtaagataatggtatataaatataaatactaagtagtaataacatgcaatgcatgttgcttaaagttgctattacctagttatcaatttaaataataatcaaattaaatctaatacaatttaattatattttttaaatatataaaatttagggaaattactccatatatattttttaatttttttaaaaatttacggtttgggttgctccggtagtttct

SEQ ID NO: 330037 - DNA, 1089 bp, Cannabis indica
ttgcagcgatttgagtaattttgtcgctaaaaatttaatttaattacttaaatattttcgctgtaaatatcccttttctgtactaagaagctttacttaaaatcaatatacaaaaacatcaatgataaggtcataatattctatgaaatatcatagaaaaaacaaaaacaaaaaaatccaaattcttttcagttccatttctaccacatcttttttgttttcttctcatataatggctttaatgattcaaaaagaacctttatgtgatatttgtagctaagtggggtagggcttattgtccaattgcaattatgattgtggtgactttctttagtttagtgttgtaaaatagtgacatttgaaaaacaaaaatagattgattgatcaaagagtaagtaatgtttgaattgtttctttttctttttactagcaaaatgggtaatggaatatttctctaacaatgtttgcataaacaattttattactttttttttaaatacatttttattactttaaagacataattgttaccaagcaagcacttgaaaaagcacaaaaattaaagcaaaacaaaagtgattttttttctctcttttctagtaaatagatgatattatgcaattttattccaagccttttggcacacactaaattttattttattttgtattttagtcataggcataatgtgagaaaattaagactaatagtacagaattaaattaataaaactttaaaatattcaaccaaattaacaatgataagattaacaacaaaaacaataatcggaaataaaataggggcaaacagagtgttaaaactataaaacgttaaatgcagaaaataaagaaattaacaccaagacatatattggttcaagtccaatagatcaatgtgatctatggctttactccagttttggaacaccaccgtaatttttctttattgattgagcaagaataggtacaatacagtcgagacgagattctctgttgattcttacaaagtttttcaactcttacactttcaccgaagaatcttttttatctgcagttaattcttcttacaaaacacaaactctctctctct

SEQ ID NO: 330038 - DNA, 872 bp, Cannabis indica
aaatagttatgccttttggactttgttatgttttaataattaaaatttataaaaatagattttaaagtattatgatttcagaactaagagcactatatatattttactatataatagtttttaaatattatttgttaatgagaaaaattaagagttagttttagcttttttgagtatgcatgcattaaatattattgtttttaattagatcaatttttaaagtttattatttcagaataattaaatagaagatgtttatatgtcaattatttaagaagtagaggataatgatagcaatttttgctaatgtatataaacaattatgtgcaaaattgtaaataaatggaaaggataattaatctgtaatgattgtgataaaaactaaaaaggaaaatattatttaagaattacttttttttttgtaataattaacattatttatgaattattaagtataaatataatagaaaatatttggcacaccaatgagcacatataaaccatagtttttacaatcaaagtattatgtgtagcaatatttatataaattttttatattttaaaaaaaaaaattaaactaattaagatttttatctctcaaactttgacgtgtactaaatcatgtcctctgaatttttttggtcatgaaaattctcccttgttggatataagaacttttatttaattttagtaagaaaaatctaatatggatgaaagtttagaagacataatttagtatatgtcaaagtttgaggggatatgatttatatagtagatattgttgaccgaggttttcggcaactatcaaaatataattataataatgagctgtaagaaagtgagatgaagactttttacgtggttggggcgtt

SEQ ID NO: 330039 - DNA, 558 bp, Cannabis indica
gaatagtatacatttatatatatatatatatatatatttaacagaggatatattgaatagagttgtatatatgagttgaaatttttgacacggcataaaatcgttacgagtttgggaggtacgagtacgactagatagggaaaagcttataatataagtttgggcataacacagtacaatgctataaattgacacgatatgaggcgaaaaatgtgagcttaagcaagacaagcctgaaatatacaacatgtaagcacgaatagtctaacccaaaagcacgacttgaaacttaaaaatttgataatagtaataatgataatttgagtattttttagtaaatatttcaattttaataattgtaataggattattaaattataggctaaataggatgtttgctctctgaactttgacatgtaccaaattatgtcttctgaacttttaaggtcgttaaaaatgcccctaaactattgagattgttagatttagggacttttttccaattttagtaaaaaaatctaacatggatgaaagttcaggggacataatttagtacat

SEQ ID NO: 330040 - DNA, 1302 bp, Cannabis indica
aacaatctcaatagttcagggacatttttaatgaccttaaaagtttaaagggcatgatttggtacatgtcaaagttcaggagacaaaaatcctaattagcctaatatttttattagcctaatatgagaatggagaataaaacttaaaaaattagtatataaattatatatacatattatataaaataaaaattattaaaatggaatcaacttataattttatgggatataataaaattctccaaaatctaaaatcaatgagatgatagtaaaccccctataattaaatcacactcatggattaaaataagggataattacataaagttttattttttataaaaattttacaagattttttttatacttttacggttttctttataaacaacaagaaaattattataaaataacagaaaaataatatcaaaacaacaacaaaaaataacacagataaaaaaaaaatcaataataaattaacaagattataacataaaaaattgtattttttgtaaataaaattattaaaattgtaaaaatgtttaaaattcccgaacaaccatatttttgtaattttttgttgtttttgtgtaattgtaaaataatcccttaaaatagagagtattttacagtataaatacctaagtgtagctcataattgtaaataaatacctaagtttagtttttggcaataataataaagttataattcttgaacttctaactcttaaatgttaaataaattgtcacatggtacttcttaattggtctaagtcattaaattttaattttttaaaaaaaatagtttaaatattccaataaaaaaataacacgtgaataatgacttaacatttaacggttagatatatctacagagttcaagaaatatattattactgctaaaaattaaacttaaatatttatttaaaacaaaaattaaaattaattatttaatttatgttgcaaatcaatcattatattaagccactaagactagtttattagcagtgagggaaagacaaaaaagagagagaagtcataagtaggaatgattaagctattaatagctacgccaaaaaatcaaaaaatgatcacattctaatatgaatatatatataatatataataaaaaaaacaaattaaaacaagatagaatagaagacacatccacaactattaaagaaaatgagtggcttagatcgaccgaccgacgaaagaatgagaactgcatgcgccatcattaatgtctgtacaaacgcttaaaatcattcacttgtctatatatatatatatataccaatca

SEQ ID NO: 330041 - DNA, 989 bp, Cannabis indica
aaggatcaatcaagcccttcagatatttggacccctcccccccatggtctcgccaagctcacaacagatgctgcaattgataggcgttccaacaaatatggttttgtaagaattctcagtaatagcgagggtgctaccattactgccattgctaccccttactcaagtgtgggggaagcccacattcaagaagtaaaagctctaatcatttctctccaatggttccacaaagaagcattcccaatacactttattgagatagattgtaagactttagttgatgcaatgacaaatacctcgaatatcaagtcagcatttggagatcttatttcctaactgaggtcacgtctttccctcttcccaaacattcaactcagccacattcaaaggataacaaacacgattgcccataacttggccaagagggtgtttgggactgaagaagctacttactggatttgtaatgagacttgctgctactcttcaaatcttttagtctaattgcctccttactctaaaaaaaagtgtagtatattagtgtagaaactcaatagttgccgaggcaagaaaacaagagaaaataatagaactcaaactaacagaaagagcttgtaaaacaaagcttaatgttctcttagatgctaaccttttatttatatactagtttgattattcaattacaaaatcaagaatcaaatttttcagcccaacaataattgtaactaactagccaatcttttaaataacagctaactaactaaatagttaactaatcccttacaaaaaaaaaaaaactaaatagttaactaattaatttattggttaacattccctcaaatgaaaagggatcttgatcctaagcttatatataccatcttcacttatcattttacgagcgaccggatacacgagtttgaaaactttgttaagatggaattgagagtttaagagagaaaagattgagacgtagagagaaaggtgcagagaaa

SEQ ID NO: 330042 - DNA, 552 bp, Cannabis indica
tttaaaaaaaaatataacaaaaaaataataattaaaaaatggaaagaaaaattttaataaataaaaaataaaaaggcagaaaaatccaattctaacaccctgcaaaaagcgaaacagtgatttaaagcggtcggtaagaccgttgacggtcaggaccaaataacttatttgaaaaattaattaaattttaacaccaatattaattttgttttacagttacacctttttttttatctaataaatttgagattaatatttaaacttacggggtattttagtaaaaaattattaacattttttaatagggaattttatttgtacccataaaataataaatacacattattattaaaaaaatatataaattttaaataatttttaaaaattactttaatatattttttaaaaaaaaattctcacattattttatattaatttcaatacttattttgattttatttttataacttttaataactcatgtatattttttttttattttttcttaaaaaaatttcatataattttttattttaatttttttgtcataat

SEQ ID NO: 330043 - DNA, 542 bp, Cannabis indica
gttgtttaattatgttttttttttggggtagttttttatttttatactttaaagtagtttattttttaattataaatttacgaaaatttatgtagtaatcaacgaagtagtttgaatcacaattaaaatttaaatagcaacccacataaaaattattggaaaaattcaaatcgtaaatttagaaaaaaaaaattaaaaaatagtataaggagtaattttttttccttattttgctcatgaacttttgacactaccttattttatcttctaaaatatacagaaaaaattattttcacccgaaaaaagtataaacataccccaagacaaagtttatcccattttatttattttgaaatagccccattttatttattaaaacattattttttataattacatccaatttattttccaaaatagttcttatttgaaaaataaagtacaccccactcctcccacttactgccacaatttttgctcctcccatctaattaaaatatataattgagttactattatgaaatattagtattatgtaatat

SEQ ID NO: 330044 - DNA, 1698 bp, Cannabis indica
aaggacaaagaagtagagcctatatgagtgatgagaagactcttaccatcacctacagcaagcgactcagttccaacataaggggtaggggaatcaagggattcagaaccatttgtggcatgaacatttgcccctgtatcaacaaaccatagattgtcatctccaaaatcaggtaaaatggtagtgtgaggcacctgatgctcattttcagcttcaagctcagtgaggtaggcacgaggaggagcagattgggtggagcatagttcttgtcaaaatggtagtggcacacagcagccgtgtgtccactctttaggcacaattgaaaaataagtctggtatgatagacaaaagaaccacgagtggtacctcgacaaccatttcttgaaaagttctcagggtaatttccacgagcaggtggtgggatatactttcctgagtttgatttgttatttccaacagtgagattggcctgaagtttcatagaaaggtctgtcatagagctgtgatgctctaaccggctctcatgggacattagtaaggcttgaacctcatcaagagtcaaagaatcacttcgtgaagtgattccagaaacaacaggatcaaattcagcacctaatccattcaagatttgaagcacaatatcttgttcacttatgttagaaccagcaattattaaagaatcagcaagagattggactttatcaacatagtcagatatggacagatttcctttgtgcacattggaaaactgaccttttaattgaagcaatctggcacgggattgactagcaaacctctgttcaagggctctccacactgcagatgaggtatgatgattagctacagatgcgagaacaccctcagtcatggatgaacgaatccatgacagaaggagttgatcgcgtttcttccagtgatgaaaggcagggttgagagttccattgatcaagaattggggaggcgagataccactgaacaagatgtcatctagatcgtgaccgatgaccgtaggcacaacctgagacttcaagaaaggaagttagtacgatcgagcttgatcgtgagagaagtagaaagagaacttgaaaagggattccaaacagaagggttcgaatcagcggagtgtgcagacacgtctggggcaggagcagtgactgtctgaggtggatcggagggtggaatcgacgactccattgaaggcgactgataccatgtagaagctaacaagctaaaccagaaaatggtagaaaccaagagcagagaaatctcagagagaaagtaaaaacagaggaaaattagctgaaagcttaacccttaaaatgagttaagtccctttgtttatactactcaatacaaaaacaaaagagttagttattgaacagtctttacaagaaacaaactaactaaccgaaaaattaataacagaaaactaaacaaactgttagttaatacaaaagccgcttactccttaggagaggaagacccaaagaaaaaaaaaaaaactaagcagaaacgtagcacatattgtgtaccaaaacgatactcattatatatcttaaatatttaataagacaaaatttagactgaatcgaaatgatgactgcaagtgcaacagatatttaacattttcaagtgataaataaaatctgagaccaaaacctcatcaaaagattaaaaccaacaactaacacaagtcat

SEQ ID NO: 330045 - DNA, 544 bp, Cannabis indica
aatttacccatcattcaatcacctcttcggaacagctgtctaaggacttcaagaaatatttctaggcagtaagagataggcaacccgaagtgtcttctcttactaatataaaacagtagtcgggcgagacacttaaggcttacttgagatgtttcagtacagctactgcaagagtgagaaattttaacgacagtatccaactcattgcccaccaagcagggatcacggctgatctctcaactgctcgaggcgagctatgggatgacttgcttggtcgcccagtgaagaacatcagtgagttcaatgaaagggctcaagtgtttgttcaaaaagaggaagtaaacctagcactgtctcgaaaagtaccgtctcgatgaaggttgacaatccaggatgctctaagagaaaagataactctaaggattcagtcaaggacaagaaaaactgaaaaagcatagcaagtacgtgcaatctacaccatttataccgagcttaatgaaactctggaaaacatctatctcgcacatgagcacagggtcgcatt

SEQ ID NO: 330046 - DNA, 698 bp, Cannabis indica
ttttttttttatttttatgaatagaaccagttttacttagtcacagctgccaatatgtatcattttgatcataaggctatttgtaaaaaattatttatgaattgaacctaaaatatgtcacgtaacaaaaagtcatctaaatttaaatcacaacataacatgatataaaatttgaatcaaaataaatattatgcttttatatttactattatattaattttagttaacaagctactttacattaaataactgcattattattcttaaattttatatttatctttgcatagtaaaaattgatgtaaaaatatcacaaaattattttttgacaaatataatttaatttttacattttatggtccatcctctttattgacattagagagacaattataattattagtattttcagtgtacgaaaatgaatagtttttgctaatgtattcatggtttttgtttttgtttttaatatgaaactaatgtattcataattgatttatacgatattcatggttggtggatcttatttgaaaaaacactatcatttctaaatgcttttctttttttctttttaaagaactatccttataaaattttatgctggtattaaaaatgatctttgtgcagcgttatttttttaatatgtgttattattttattttattttatgttgtaatattatttttaatatataatta

SEQ ID NO: 330047 - DNA, 844 bp, Cannabis indica
ttatttccttaaatagaaaatcattttcttaattagaaaataatttccataataaaaatattctaatacttagctgccacaatatatcacatttggaggaataggaataatttgtttgatttccaatttcttaaacacaacttctagtatagtgaacaaagttaaaagagatgttaaatataggttgtatatgcttaaagataagaaaggatccaaaaagtatagtaaggttgagctttcttttttttttcagaaaagtgcttgatggtgtatttttgttcgattaatgaagttttttctttttgataaaaaaattattaaagaaaaggcaacatatatagttaaagatatcatcaaatcacatacattaaaaaaaaagacaacaataatttaaaagcattataattaacaaactattactcaattcataggcaggcattaagacacaacatgataaactaaaagcaaatactcttgtaaagaaaaagcaacatatatagtcaaagaaaatggttgatttacaacaatataaagtacaacttaatggttatttctactttgtaagcaaatactcttgtaagtagtaacactacaagtagtgatggaaatttgacttgtaaggtacccaacctaaatggggcgggcgagaattacctaccttaatggataatggggcgagatgaggtgcagttttatgtaaaaaaattaacttaaaacactaacttttatctaaactttacattatattgtgacgtagaaattttacatttatactatttcatttttgtcttttcttttttttttttcttttttgtttattgaagcttttataaagctgtttttt

SEQ ID NO: 330048 - DNA, 937 bp, Cannabis indica
tgtaggtgttctactggtggatcagaagaatccagttttgaggttttcttttctgatattatggttttattgtctagttctcttggggtatctctgcatgcccttaggatagacaatgaactgttatagatggaagaaaatcctcctctgcttgcgtaactttgttacctttgttattttaacctgtatcggtttcctttaaaaaaaaacccttcaaaacaaaataaaaagaataaaagaaactattttcttcttacattgatcttcatgtgagcctagaaaaggaaacaaagagattttctcaatattggtcaaatatttcctaaaataataaaaaaaaatagtataatcccccatagtttgtatttatgataatcatgcatctcattataaaaacattattatttaagattgtcctatatattttatgtatattgcatttagtgaaatggataaacataaaatggtatgttcatttaaaatagtttaaataatttgataaatcacaccaagtgactatctcttaaagttagtcacatttttaacagaagtttattttcttaaatagttttcaatttttgttttgtaatatggtattaattaaattatttttaaacctataatatagaatttaattaatgaattacaaaaggttaaattaaaaattaaaatctttttcaaaataattttaataagaaaaacacatgcttttaaaatggtgagtgggagagggttgttatcttattatgaaaccaatagtatttgaaaaaccgtgtttttggaaatgtcaattatatataagaaaatataaaactgtatgcgtctgcaaaagcataaagtaattctgctactgcagaaactcgttttgcagtgacaaaatagaacaggcagaatataaaatatttgtagaaaaataaataacttgacacaagagatt

SEQ ID NO: 330049 - DNA, 698 bp, Cannabis indica
ttagtaaaatttataaataagacagccttttttttacaattccaattgattagctcaataaattacttgagtctacaaggaaatattatcccatataatgtggggaccatgggcctatgtaatcaagctccttataagtatatccaaaatttaccaaataaattttctcaattattaattcctcctaactccactatagattcagaattgcactcttgattacatgaaacgctctatataccaaatatagatatgttatttataagattgcaaccaagctattgagttctagaatcagaaacatccttcttgaaataatttttcattctcaaggaggctttattaaagggaggtttatagggcataatctaatgatatgtcaggacttggtgaggaactataacaggaaagctaataaaccgagatgcatgatcaaacttgatattcaaaaagcttatgataccattgagtggggattttaggaggagatgcttgaaggattaaattttcccaggaagttcatacagttaataatgaactgcatcacctctcctaagttctctctcatgttcaatggaactctacatggtttctttgaagctaggagagggcttagatagggggatcctatgtctcatcttctgtttgttttaggtatggaatacctgttgggttttatgccctaaataaaactcttt

SEQ ID NO: 330050 - DNA, 707 bp, Cannabis indica
ttttttccctattaaatttggcatatattaaaaattatgtctagcacaagatataaatagtgttaaatttagttcccaataaaagtgtctctagagtgttaaactagtgatataatgctttattttagcacttttaagaaaattagctcttaaatggtttgctaaatttgtttcatgctaaaatttgtgttaaatttaacacaagatagaacattatactaaatttagcatacaatatatttttttaattatagttttgctattaatcattaatgataagttttaatatacatatcttaattataatattgttttatttttttttaaaaaaatatttaatttattgatgatcatcaatgatatattatgttttgttataatttgcaatataaaatataaaatgttattgtgcattgaaacacaatagtaaatattattgcaactatagtatttgttttgttttttgttttgtgctaaatttagtacaatatttacattaggcataaatatttaagttgaacttcgagttataaataaatgtcgaagtttaattgttagcagtaataatacttaagttataattttaaaaattttaaaggtacttgactgttaaatttaagtaaattgccatatggcaatctctgattggtccaagttattaatttttttttttttttggaaaaaaactagtttaaatgtaccaataa

SEQ ID NO: 330051 - DNA, 682 bp, Cannabis indica
atcctctatatatatagtcaccaaccaaagcaaaacaaaacatatcataccacattgtacaatatgccatggtatcatcccatatcatatcatatcttactacgctacaatataccataccataatattaggggtgatcatctaattcaatctaatatttttctcttaatttgatccaatctaattagtatttgaatttataaaatcatcatctgatccaatttaattagaactcaaaatccaatcaatttagttttttaaatggatatttaattacacacttaatttttaacattattttaaaaatatgaagaaaaatacctaaaaaattatatataaaccttcatttaagtttaatactgtataaatatatcatccttacaagtttaatgcaaccaaaaatttgaaataactaaaattaaaactcaaaatccaatccaattttggattgaatcaatgttttaattagatatccaattgcatgcataatctttaatgttatcttaaaaacacgaagaaaaatacctaaaaactatatataaaccttcatttaagtttaatattatattgctaattcagaaattaagactagatttctaagccacactcgctcgcttgttaggctatttttagcctatgttatggatcctatttatgtgcattcttagctgtgttgggacgg

SEQ ID NO: 330052 - DNA, 606 bp, Cannabis indica
atataattgtgatgagacaatatatattaatagactcaaattgaggacctagcaataaaactctagttagctaggcctcctcaaaggtctcaattatctagaaaaattacacttctgctttaattagacttcacacaaatgtttagcctattaactaagagaaatactaaagggcactagtggtacctagccacaccttctaaaatgtcgtatcgttgttgtttgaattaagtattgtcttccacacaatttaacttaataactattatggaatatcgttaaccattcgtaagacgacacctcatcattgtagtactaggtaccaccgatatcttataacaatactcattaactatagatcactaactatataggctaaaacaatacaaattatctatcaacctatattttaataaaacatttaaaaccttaatgtaagctcaaaataaaattcttacacatattacatatatgttgttaagtttgctctaatgtaactgcatattgagctgcatttttactgttagtactacatggcatgacatatatattttaattataatctataattttagtatatatattattaattaaaaataaaataaa

SEQ ID NO: 330053 - DNA, 635 bp, Cannabis indica
ttgcttgttgcaaccacccatgattttgaaacccatgattttgaaaacgtacatatcctttgaactcttcgcccaagcaatcaccactaacttcctgtgagattcttttgtcgaagaatgctcttaatttttaaattcttaaaatagagattatgaaagtaaatcttgttttgagggatacagttcatgttaatcctctcaaaaagttaaaaattgtttgagaataattctatatttcttacacaatttcacttggtccaccataaataatatactctacaataaatattaaaatatatgtatatatgatgtgggactgtgaagtcatgtttatatattagtcacctgtatatatccttagtaattaatattccattcctacgataaataccaaagcatagaattggtttgcattggtatgaaatcaaaaccaaaaccaattaaacgttgtcagtcagacgatcaaagtggcactcaattaatggccgatataactacgtgtttgggcagcttgcttcacttgcgtgtaacatttccagacaagctatttttattgaggggtctatttatttttaaacttaaaaatatattttttttatatatatttttacagaattatacataaaaatctctat

SEQ ID NO: 330054 - DNA, 1028 bp, Cannabis indica
agagacttcaatcaataacttttataaaacataatatctaaaatagtatttattcattatattattattaatataattaattattaaggtgataaagtccaaacgtgtacttgagtttgatgtagggcttattttggtttgtatgtaacacgtgatgctttcgatctactaccaaatatatcttggcgtttgggaccacttgcatatgcagaactactcaatgcataagaatacgcatatgatctacttccatacattactgatgacatggaagggtacgaggatgaggatgaggatgaggatgaggaagaagacgaggaggaggaggaaaaggaggagaagccgcgatatctactatcaacataagcggcccttaaggtgggccgctgagatgaagatcttgaatggaggctattattagtactaccaattcttttgtagattagtgatgatgatcttgaaggggctcttctcgacatattgatatatattaattaatgatttctagctattgctcttgtttttgctattctcttctatacatttaagtgaattgattaagagaagtataacatatttatagatgcatgcaactatatggataattaaaaaaattaaaaaagaaaaaataaaaactcaattttgaacaagtcgatcgtgtgtgtagataggtcggttctggccaggctaaatctgtacctaagacctatctaactcaaaaggccaaaaaaaacttgttctttaaagataatattatttttcattaaattttaaaaatatagtaataacattacaacaattgttaataggaagtatttgatattgctctagagttagttttagtttttttttttcgtttttttttttttggccaaaaagtatataggctctacagttaattgcatgatgaattctacattataactttgaagggataaacataaaccaggtcaatttgtaatatattaattaatttttataaaattttaaataatttatggtttcgaaaaataagcaactcaaaacaa

SEQ ID NO: 330055 - DNA, 731 bp, Cannabis indica
ggttatggtgattctttggaggatttggttcaaacgtaataaaatggtcaataacaacattgaattgtctcttgtactcactgtacattaggcccacaattaccttggatcatttcacaacaaataggtttcgacggcagctcccccacctgtcagttggtagtggacgcccctgctggcgggtcagtaccttggatagccccttgtcaagcagtgctaaaatggaaatctccaccacttggctttctcaaagtcaatacggatgtcactattatttctttgggtaattgtagtggcataggtatggtgattcgtgattatttgaaaattgttatagcttcggtaagttggtatttggatggttattttattcctaaagtggttgaagctttggctatccgcaaagcattgattcaatgcatctcttttgggtatgttaacattattattgagtatgactgcttgaatattgtgcttacatttaaaaataaagtttctgtcaatatttctgtctagttttagatgatatttttagtcttcgtaataggctcgaagatgttaattttgtgcattgtaacaaatcttgtaatgatgttgtccattctttggccaaactcgctttaacaacaggaaaaaatataatttagtggccacaaaatcttatttgtattcagaacttaataatagcgagtacttgttatttttagtatttggtggttgagatttttttt

SEQ ID NO: 330056 - DNA, 747 bp, Cannabis indica
actctgaagtcccacaacacgcatgcgccaactctgagtcatccatctcagatctaccttctagcaaggatggagcttcgatatgggtgaatgattttccagatcaacgacgaggcggaggttctcgatctgccattaaagcaagtgatttttttttcttcttctctgtctctcttattccatctctccctacgcagcagccgtcggtcctctctgtggctgtcctccatcaaagccgaagacccaaaacccgttgcgaacttgacctcattctttgtagcgattccccctctcctttaccagaaccctccatcactccctccctaaatagccatgaggagatttagttttcttgttcttattattgactttttttcctttacgccatgaacaaaaccaggtggaagaacaccattgagagaccaaaccttgttcctattattttttttttgctaattgtttgggattcggaatgttaaaagaaatttattagagatttcaaatgttaaatgggaatgtggaatcaattttttgtttgggagctgatttgggttccattgatgcacgaaagatgatgaagaagttagagagaaaaaaacaaataggtttttgtttcttttttctttgtttggatatgagatgtgtgattgtgtttgaatcatggtgatggtggttggattattcaaatggtggtttggcttccattttggctgtggatgggtttttggggtggtcggagaatggatg

SEQ ID NO: 330057 - DNA, 1504 bp, Cannabis indica
taagagccattcattccgtgggtgtgagggcccaatggaggcttgaagcggggacgttacaagtagaattgaaagttactccaggacgaggtccacgggtaggtagaggtccatgagtaggacgaagtccttgagcaggacgaggtccgtaagtaacaatggccaacaacagtcggatcttcgtaatcacttgaaccagaagaaacctgacctttgtcaacaactcaattaaaggcgagaggatcctatccacttgtgaattaatgagttagaggataaattcaagaggtatcaagatggtggatatggaaaacaatctggatacaactcggatgaggtacttgagcctttccattcagacattatgaatattgaattcccccagggattcaaaaaccctcacgtctcgtcctacaattgaactacagattcggtcactcacttaaataattttaatactttcatgcaagccagcaatgtaacgaataatctatgttgtattttattccttacctcactggttgggggcagcgagcaactagtttaacaaatttacccatcattcaattacctcttgggaacagttttctaaggacttcaagaagcagtgccaagcagcaagggacaggcaacctgaagcgtcttccctcacaaacataaagcagcaaccaggcgagacgcttaaggcttacttaagtcattttagcagagctgctgcgagggttagaaacttagatgacagtatccaacttactgctctgctggtatggatcactactgatctctcaactactggaggtgaattatgggatgacctggaaggttgcctagtgaggaacaatagcgagttcaatgaaagagctcaagtgtttgtttggaaagaagaagcaagaaaagatatgaaatttttaaagactggctcgtgaagtaaacccagcactgtctcgacaagtaccgtctcgaccaaggctaacaatccaggagcctctagttcaaagaggaatgataacttaaacgagttagccaaggacaagaaaaatcagaagaagcacgacaagtacgtgccaatctacaccatttacactgagcttaatgaaactcgagaaaacatttatctcacacatgagcatagggtcacattttgcaaaccagagcccatgaggcatgcatgcgagacataaaagagacgcaaccaaattttgcaagtatcataatgatattaggcatacgacggaagaacatcgtcaattgaaagacgagatagaaagtctcatctcacgaggccactttcggtaatatgtgaaacgataaggcgatggatccaaccagccgaattcgcccaataacccacgcaaccaggagttataacctctttcccttgaaggaggggatattctggttatctcgggagggccacattgttgggttttgtgccctaaataaaacccattccaatataatcagatttactagttaataaagatcagaaataacattttatgtt

SEQ ID NO: 330058 - DNA, 1304 bp, Cannabis indica
tatttattcggtcacatggtcatagacatataaaaatcctatatcatattttcatatttttgttattcatatatataagatgtgtgtgtgtgtggtgctagggttgtgatgcatcgatattgatcgatcccaaagatagggaaaaacacaacagagaagtttcgcgccccccaaatcggtctgtagctggatacgaagtgattgatgaaattaaaaacactcttaagacacaatgccctaaaaccgaagtttctgtgctgatattgtggccttgtcagccagagatgctgtgtctttccaagtatgtaattatatattttataattaattaattattaatgggagtatattattatatatatgtatatgattgtatttgtatttgtatttgcagagcaaaaggcctctgtggccagtttatacaggaaggagagacggaagagtgtccgtagcttcagaagcttcaagggacttgcctgctggatcatcaaatttcaccactctttctaaactctttgctagatttcgtcttgacgatactgatctcgttactttatctggtatattacttattacatgtcttaattaattctctctcctaatttattttcacatataaaattttttgaaaaattttggaagcaaaattattacatttttttttatatataagagatatacaatttataaaatcacataatcttataccattttcatactcctaaattttagttaaatatcacataccatgtatattaacatatttggtaattcttaaaacttcgattcttgtcaaaaaaaaattgataacatattttgtataatctcaaatctccctttaatttaattataactattaatactttagtgtatgagcattgttattaggcaccagtggtgcctagcaccttttcgacatgtcacgttgcgattgactagcgatactagctattatattaaactatatgaaactcgatatagttggaccaatagcgatattgacacataagaaagtgttaagcaccactggtgccctttagcatttctctttagtgtatagtattcgcaataaattaaagggataaataagaatgaaatgtaggctaattaaatcattaattatttgtataagaaaaaacaaatatttaattatatttgtttatctaactagaaagcaaaaaaacatataattagaatatcaataatttcaactttgtttctcatattatttatttatcaaaatgtgtggaaatcgatatatttctttaatattgatttatgtcaagtatctatgcatgtatgta

SEQ ID NO: 330059 - DNA, 1085 bp, Cannabis indica
ttgaacttgggctttggtaacataggtaatgactaagattatagacaattttttaataaaataatattttattgtactgattagcacaacctgaatgaattatgttaattatcaataaaatataactttttaatcatagtgtctgaataataatataattatcaatttcatacttccaatgttgaatactagtaaacatcacttgcgtagacattatcaaatgaagaaactataataaattaagaacattgttgttaggcaccagtggtgcttagtatcttcttgacatgtcgcgttacgattggctaacgatactctctaaaagctattacattaaattatatgggactcgatacttagttagagcaataacaatattgacacataaaatggtgctaggcaccatttaacatttctcataaattaattggttagtccgaaccaaaatggctcccaatttttttgtttaatgaatgggggtgctacttattttaaaattaattaggcacctaattaacgtttcaaattttaataatagaccaacgaattaaaaattaattaaaataatattttgactgcataataaaaaattaattacatctgttcatatatatcatcatatataaaacaagattagttaaaattattatctaattttgacgtaataatttataatataggtgacgtttaaattagaggctctgttcaaaaggtcaattagttacgtgaccaaagatgactccaatttgggagatgaaattgggagttttggtaggaagcacgagtttgcagatataacatggtaccctgctcagcaaaaagctgtttacagagttgatgacagagttgttagacatttgtatgtataaactgaaatatatatgtttatgtataaagtgcggaattaaatcaaacatatatatactatgaataaggatcgaaatacctccagccattgaatctttgagctttagtcccacataagcatgatctgcaaaagaaaccgattggtgtgggtaatcgggcttcctcgctctctcaactctctttagatggaatttgctgttatgaacagaatgagtgag

SEQ ID NO: 330060 - DNA, 2627 bp, Cannabis indica
gagtattgagtagtgtctcaaagtctcaactttttcttctcgtaaatttggggtccagtcaaagttgggttgggttgggttgggggaacttgattctcttctccccaaaaataaaatataaaaactcagcctttttgtatggaaattggaatgaatgaatatatgaatattggtattggattacacaccttgtttacctttgcttttgtctttgtctcactcactctcctctttctttatttttttcttttgtaaaagaaaagaaaagaaaagaagggtttttgtttatgagatgaatgggatgggacccaaatcccaatatgaattcaagaaaaaaaaaaaaagaaagaagaagaagaaggtgatggtggtaatgggaattaataggaggagataaatacaatcaatattattattaataataataattaatatatgtactggcaaatgtttaaagataggtacttatttgttaattttgtttaataaataaataatgttttttatatgatgttaaaagtggatgttgggtaaacatacacgtctttgtaattgtttgacaaaaaaacatcaaagaagaaagaaaagtagtatatatttagggtaataataaagatagaggggttaccttattacttatcttaccatatataaaataataataataaatcaaattatatatttgtttaattatttatagaatttagaaaatgaccctttactttactaagttattttatgtatttttagcgggaaaagaaagaaagatatgtaatagtaatactaatagtttgagtaatttgtgagatgaatgcttaaatttaatttttagttgtagataaataattaagtttaattttttatggcaattataattaaattataatgtatatgacctttaagtattattttttattagtatatttaaattaattattaataaaaaataaaaatttaatgacttaaatcaatcaaagaccgccacgtgattattgacttaacacttttaaatttaagtatttatttacaactagacttaaaatttttatggaacattagttattggacataagtaatgcccaagattttttatagatgacgttttatgattgactattgatatttttttaaaagttattttcttaaattatatgagttttaatacttaattatactaataaatatattataccaagaaagatactacataccaatacttagtactttgtaacaattttcttaaagataaatatttataccataaaatatattattgtaatttatttgaaaaaaaaagtagaaaaaaacaaataatgtatttatttaattattaaagagaaaaatagcgcggggcgcgggacataggaaagaccatagagaaagagagcgtggcataaataattacctattttaaatataaatataaataaataatgttatgttatgttttttgtctttttcttttttgtttgtattaataataataataataataataataataataggtgatgatgatgatgatacatattaattaatttgttgtcaatatcctaaaatgctttgcacacgagtgtgtgtatgtgtgtgatgtgtattgtgcaagtgtgttgttctaacttactagatttgcactttttcacttttttattttatgcaattaaatccaaaattaaaatcttattattattattatcattcatcacatgtgtatgtatgtatgtatgttatgttatgatatgatatataatcaatcaattcaataggaggaaaccaattgatttgatttgatttgattttgttgagaataattatagtataaactaattaagtaattaatattaatatatgtaagtatagattattagatagcggaatagttgcatggaaatggggctgattttggttgggactgttccctccctaactctattctctatgctatgctacactactactactactaattcattattatttattatttattcaaaaataatatatatttatctttgagtatatattggatactcttagtagtgttagatgtgtttttgcgattaattaacaatacttttaaaaattattatgttaaattatatgatattcaatactaatagcgatattaatgtataaaaacatctttaaaatggagatattctttaagagtgtaaaaaacttccatatcggttaaaaatatattattttattttatatctctttaacattatttttgatattttttgtttaaaaataatccaataataagtatttttaaaaattattaaaataatattatataattaatactaaataatacatataatatactaataaaaataaataaataataaatttgaatgacgttaattattaatacaaatctaattaattggcttattgattaattaatttaaggcttttttagtcgtatagatttgatatttatcggaataataatgatatatatcaacatccaatataatatatatatatatatatacactattaattcaaacattacgtatattactcttttgactaagtcataattcgtattgttataaaataatataaaatatatacaatagagagaagaagaagaagaagatgaagagagaaagagg

SEQ ID NO: 330061 - DNA, 806 bp, Cannabis indica
aaaaattatcactaaaaatagcagtattttgtagtgatagttaatttttagaattttcttgttggtaccaaaatttttagactattcttacaattactaaagtgtctagagttttcttgtttgcttaagtactcttgaattttttagaattatctttcacttgtgttagtagaggaaattatgtataacaatgtagaagctagtcatttaataatatttctagattagtccatatatagagtcctataaatagagacataattctatcattttgtaccaagtcacaaatcacacaaggtgagatataaaatatatagcttcttccattcaagtattctctccaaagttcttattttccaacaggtttgaaaagccctctaaattcttctaaaaattaaagtacctaaaacgcttttgggctccctaaatttctggataaatagataaggctatgatcaaagttccaaaaaaaaaagggtaacttcaacagtgttaaaaatgggtaaccaagaagaattagcaaaaacttgatctagatttgcataatttctttattggccatcttgcttattgcaaccaagaaaagaagttcctattgtacttaacatcttctaaaccacatttactaacacagttttgaaaaggagccatcttatttacatttcctccataattgaatctttcctccactacaaaaaactgcaacttttagtgataattttttagtcacaacataatttttttgtgactaaaagtgatatttagtcacaacaaaatgttacttctaactaaaatatagtatttag

SEQ ID NO: 330062 - DNA, 722 bp, Cannabis indica
tccgagtcctgggtcgagttctggatctcgagtctgggtttgggtcccgtcttcgggtcccgggttcgagtcccaatttaggtctgggtcccgggttcgagttcgggattcgggtcctaggtccggattcgggtttcgagtctggattcgggtcggagaattagtgttgacccagaatcttttataaatattataatacaaattaatacggaccatttgttaagtattaaataatacaacatacattgtattaaaaattttggttgtaataattaatacaatacattgttttatctaaacataatgttatttattatttaatacaatacgactcttatacgacgtactaaacgagtccttagtgtgatatttaatattaaattattagtattgttacataaaaaatatacaccaaacaaatacaattgttagaaatggtctaacaaattcattaatcaaagattcaccataatggagaaagttgcttttaattattatatttaaaaaatggattaatctattttaggtttgagacgaccatcgttatattgtcgtttggattgtaaattacgatctatataatatttcttcttattattttttttagggatattggcggctaaaccacctaaactttacggtttgtaacacttaaccaccaaaattaaatttttaggtcggctaaactacctaaactctggttccgttttgctctgcacacc

SEQ ID NO: 330063 - DNA, 785 bp, Cannabis indica
atcaaatgtctactttgggcagttgatgaagttctatcgattcgatacactaacagtggcggactcaagattaaattttagggtggacttagttatacatttaatataattcaaaacaataaataactagctaaattttagtggaatgatcatttagcagtatctctctatgctagtggtcataagtttgatcctagtttgaactttatacttcatttgttttttttaataaataaaatattgatacacctagaaaaaaaggggcaattattctatttaactactatgtatatatgaaaaataacaattgtatattaatgtatttataaatcttagggtgggctttagccctccctcaacacccctaagtccgcctatgctaataccaaaagatcatgtctgtaaaaattaatatgaatctcccttaaagtattttaccttccattagttaccaagggtcgacatgtgctttttatttttatttttttaaattataatagttccatttagagttattttgtttaatagtttccttattttaggaaagaagaaggaatagaaaatatggaaagaaaaaaaaaagtgactcccatgtcatcaggtaataagttaaaattaaaaatattaattttttaaaattaattaataattgtaaatataaaccattagatttaatctaatggccaataataaaatacccatttatgggtaataaccatttagagcatgtatatatatggaagaggttttaatggttacatttttattgtaactatcatggttac

SEQ ID NO: 330064 - DNA, 697 bp, Cannabis indica
tatgtagatgttatattatgatcggtgggtaggatttgactaataacttattgttgcaatttgcattatttgttagtggaaaatgttatttcatagcgagaccaattaggtgtgtttatcaagtgcaatacgatatcatttaaaacttttttttaatgatatatcatataagactgtatatctactatttatatataaattatagccacgatgcacattattggatatgtatgtaccacaagtaattattagatgacacattattcctttgaagtggagcaatatgagtaaaccacaagaatacatcattttcagtgagtcttccaatagaagaagtattcacaattattaatgttaaaaaggtgaaaaagtataaatcacacttcacaaatactaatctatatatgatctaaataaaaactatgtatgtgactactaatgtgataatttttaaatcaaattaagtagcactaaagatatataacgtagagagggaatattatgccaccttgctgagtcatccaaaaaatttactttgctgagacgtatggtgatggttacactaaattattataaataaatatgttttacattatatagtaacattatatagctaatgataaagtatcggtctataatataaaccatggcatataacagagaatagtatacctcccttttttttaactttttagaa

SEQ ID NO: 330065 - DNA, 588 bp, Cannabis indica
aatttaagctaagcggtctttacggaattactggagtattttagagtactcggagttgaccaaatacctaaaaaaattttagtggctaaaaaatggtaaaataattattattaataaaattttattattaataatatgattattattattattaaaagttttaaacttatcagattatatttatattaagtttaaaaacttaagaaatgaagaaatgaaatattcattctttggtgcgacgaaactctcaccctcaccatccgactttctttaattttcaaccagaaatcttgcgatttaagccctattagcagccaggtagtgaattattgaagagggagagctaaagggctgagatcatcgggaatgtttctccacttgagttggctgacatccgtgaatctagattaaaggtaagaaaattataatgtactacatggcatgacaggtttcttgattgtcaattgtttggtgcgacaaaactctcaccctcaccatttgactttctttgatgttcaactagaaaccttgcgatttaagccttgttagcagccatgtattgaataattgaagagagagagagagaga

SEQ ID NO: 330066 - DNA, 665 bp, Cannabis indica
aaagagggtaaaaataaaagagaacaatataaaaagggtatacagtgtaatttcctctaatataattgaatattgactattgggttgggtaggtgaggtccaatgtgtaggcagtcgttgtttgtacacagacgtatgttgacagtgaaaacttagcatgggcggctgctagtttattgaggttagaatagtggctgatattgacccaaaaaggtaattccttttgttgtgtgcctttttgaggcccgacagaggggacatgcaaccaattttttttttttcaggattctgtcgaaagattgccacataggatgatctcccaaacactcatatgttcccagatgcctctttgacttcctttcccagatgacctctgaaggtattcgattttgcctttttgaatgcatgttggctgaatttgaaattatcttccagaacttgtgtccagcttagttctggggaagcagttatgaaatccgaacactttgtctggcttcactcatgggttgagtgattgatccatgtggacctagtgaatgggtccaataactttaatgggcttgcttgaaggtccatgtgtcatttatatccggaaaagtgaacaacgttgattaaaaaaaaaaatatatatatgattaaatataaatcatcatttttatattatc

SEQ ID NO: 330067 - DNA, 703 bp, Cannabis indica
agtgggcaatagggaaaaaaaaattgggcccttatgttagaaaaaatgtggtatttttcaaaattggtaaaaaaaatgtataattttaaaagaggaaaaaaattttgggcccctgggctgggtgggccctaggcacaggcctagcccgcctatgcccagggccgggcctaataataaccatccggttacaacaatcaaaacttattaaattatctataatttttatgaacatgatggacaagctttagctgtttttcttcacaaatgcagttgcatggcattgaatgatacaataaacttggtagatatgtattgtcattgtcatttactagtacatttagaaagtaattacccaacaatattatttatgataattaataatatgtactctttagagttggttagattagggatgaatgacccaatctcattcattgatctgggtccccacaaaccgctcttctagcctcctcctttgtttttagggctccaaatctgaatgaatctaaattttcacgaactccttctatttaaaccaagtctcatcttcaaaattcgtgagaattacgaaactgtccaaaaatcccgtcactagagctccaatatcccgtcgcgacgaagacttaagcaagaatttttcaaaactctctgccaatccccgtcgcgacggagatattgtcccgtcgcgacgggattgggcagc

SEQ ID NO: 330068 - DNA, 611 bp, Cannabis indica
tttttacaaaaatatggcataagttaatccataaaaatgtaaagattgctaaaaaaccatattctaaatgcattaaaaaatatgccatcactactacaaaaagttcatttcccgtcagtatttaaatgacatttaaagttttgtcatcagttcctccaatcgacgtgtatactacagacgaaaaaagcgtgtgtaattgtgccagttaccaaatgttagttcaaattatttcaatcgatttttgacactcacaaataaatataaaaataatttttgcacttatcttgtctatttataacagacacacaaaaaaaaaacctcacatctgaactcataggaacccagatttaagcacaatcaaaaataaaaataaataaaaatctcacatattacacaaagaaaaactatttatattgtaatctcaactcaaataaaaaatagcacaaatcaaatatataatgggtaaatacaaattaaatacaagtattacacaatatatattacataaaaattatcagatatatattgtgtaatgcacaaatcaaacatttgtagagaggtcgccaccaaccattgttgctcggaccgcgctgcaccaaccacctgcaaaa

SEQ ID NO: 330069 - DNA, 882 bp, Cannabis indica
ctaaaaattaacaaaaaaaaaaaaaaaaaaaataagagaatagaaaaatagaaagaaagctcatacaacatgccatgtcatctaccctaacaacacaattatataaatatatagatagatagtattcgtttcttaaaaaaaaaataaaataagaataatatttctaaaaggtaaaaaaacgtaaaaagtaattaagatgaaagagaaatggtagtgggaggagagaggaaagataatgtaattttccctttttaaataaatataatatgatagatttaattgacaaatagagaaagatgaggagagtttgacatattatttagcttattaaaagaaaaataatatatcacgtaaaagaatgatatatatttgattgataaatatatataaggaaacaaaatatggtatacgatttgctaaataaatgctattcacgcggctttctagtttttcttttaagaaaataaaaataatattggccacgtcaagtttttattaatttttagttttattttttttaagaaaatgtaacgtccaactatgttggactaaaaaactcccataaatatttttctagtccaacagagttggacataaaaatagagaaattttaaaaataaaaaaatataaataacgtctaatattatttttctagtccaaaaatattggacatgataatttttttttcaagtccaacaatgctggactagaaaactcccaaaatatttttctagtccaacactatttttgttggacatgaaaaagggacatagaaagggttttttgtagtagtgctttcttcacgatcttcctcaaatttcgaaatctcaaggaagaagagagagagagggagtggtcggccaaagatagggagagagagag

SEQ ID NO: 330070 - DNA, 1077 bp, Cannabis indica
aaactcttcgggtaagcttattctggctcgaacaacaagtcagatggctatggttgaccctgttattgacgaggctatcagagttaaagaggttttaagctttttcaaatagacaggtcatgaagatgtggtggtggagttggacagtttgatcacgatccaagcttcccaaagttcaatggatatgccttctgtttttgggctttgcatctcttagtgcagacgagttatttctagtttgaatattgtctttttaatttttgttaagtgatctgctaatcgtattgctcaccattttgctagagcattgtggttgaatactggttgtacctaatgggtattacccatgaatgggtagtattaagaaaattaagtttttatgattaatttctatctaattaaaatatcatatttttgcattatatggattgaggttgttccatcgatagaaaaaaaaattaagaaaaaaaaatacaacaaaaaaagataagaaaaagattgagtttgacttgagtattttgtatataaacatatttttgatatattgtaaaaagagatattcttttaatatattttttaatttagtagctaaattaagcctaaaattttaaatttatctcttattattagtgattggatcaaaatctaatagttttatatttttgaaattaatatttatatttaaatttatttagtaaccatcaataggtaataaccattgagaagtgttctatatatacacacacttttaaatttagcctgcttattttgtctgcttttatttatttatttattttaagtgaaatcactttagtacgacgctgaagtgaatttattctttatttaagtcttttataattagttgaatattgtataggagaacttacaaaaatactataaaatgaaaaaaatttataaaaatattgtgacacagcgttttttatatttttacagtacaaactttacaaaaatattgtgtttaaaatttcaaaattaaaaaaaaatcatgtttctataaaataaaaaaaaataactaaaaaataactaaaaaatgaccttagaacaacttaacaaaca

SEQ ID NO: 330071 - DNA, 973 bp, Cannabis indica
cattaaatgctctagatatcgaagggacatctgatcagtcacgtctgatcaagagtagaccagacacgtgtcacccatttgatcaacttcatgaatgaataagtccacgtgtgacgtaattatcccaatttttgtgcaaggtgacgtggcatctatttgagtgacatgtggagaagaatcctacaacttggttggaccattctacctgtaatggcccgtacagggagatttgatactcaaatttagttgaaatattcgaccagcttctgtcacacatgcacctcgcatacaccgactagaggatccgagatgataatttcaaaagatacgtctaatatattttctagcttgcaagtcatgtcaatatccttaaattaattggatagattcatagtagcaaggaagaaagaaaacctatttaagtttcccattttacttattgtaattatagaaagtaattagtttccaattttatttcttattagtctcaggaaactaattctctgtaatgcttccctataaaaaaaggagagtcatctcattatttagggagataaaatttcacacagttaatatgagagagaaatttagcaaagagtcatatattcaagagtgaaacactcagagatcattgtaagatgaagactttttggcttctctactcataacttaatacaaactaaaagagatgtaggctattaccatcatcaagtggccaaacctctataacaattttaatattttctttacttaatctttactgattattattatgtaattattcttaatcgttttaattaaatttattgttgttggctaaataccaaatcaagtgtaacttttctaagtttaatgctagagagaagaatataatcactactacaaaaccccctttagaggtggtttttaagcccttttagcgtcgattttggcgaaattcgctaccgatactgattagggcgacgctaaaggg

SEQ ID NO: 330072 - DNA, 688 bp, Cannabis indica
tgtattagtccattataataattccaacagagatgagtatttcagtacactcgaaagggctttttcagagatatttgggcgatatttgggcattagaatgtttaacatttgtatcccctgagttcatcatcagatatgtataaatatatataatgaccaaaatcaaaagcaatggcgaaactcaaacacccaaataataaagaaagtcaagtggagtagccaatacctttcccaaagctggaatagaaatagcctccaaaaccccaccttgcatattaataagcatcttgttcctgagtttaaaatgtatagttttatgtgtcaaacttttcaaatatatttatgtatcaatttgatttcatcttattataactacatacttactatctagtggtatgccaaccagcacacaaaattccaagttccctaatgcttttagcaataaattaacaatttctctcttgtaatttacaagtagatggagaaggattaaggtcaccaactctaaaacaaaaaaatataaagccaaatgagagagaatatggacttgaagatatacaactcttattcttgaactataatcttgatcatcaaggagtcagcgtcagccaagatcatgagtcatggatagtagttcaaaccaagagtttgctacccttagggggtgtttggaataggttaatgctag

SEQ ID NO: 330073 - DNA, 695 bp, Cannabis indica
ttaactaatattatgtatgacagttatgtcaccaacttagtccaaggcttgtaaagggacactcatcattcgagctagagataattgattctgatcaagttgctgagaaaagaattgaggaaagagagaggaaccagagagagagagagatgagtgactctttgtaatcgaagcaaagcttcattcaagtgcacatgaactgttcttgacagttctttgctgtaatctctggtgcacattctcaatcaataaaaaataaagctcaaaggctgtttttggccgtggagtaggcaggataactttctattattcttgttggaacctacgtaatatctatcttcattttactactttatgattgatttctttggttcatattgtttactgtgaattgagttctacattgtgcatattgttctactctatttttgtgtttgtcattgaggtttcgatcgagtcatcctcaataatatatatatatatatatatatatatgaatgaatagacaataatattatatcattgttagtaaattatttctaattaggtatagtatagtaaagacttttaaatagaaggagaatattttccttttatattattatcaatcgatttctatgaataaatattattaataataaaaagaatgacccaattagatgtgttgtcaactatatatttatatacatataaaa

SEQ ID NO: 330074 - DNA, 488 bp, Cannabis indica
tttattaagcttgctcaagcctctcagatttatgttgatcgtgttttggtggaaagcaatactcctacatatttttttttatgttgttttggattatttattattcatatatgttgataaatattatttataataatttattaatttttaataaatatttttaaaacaaaaatatgcatatataatgatatgtatatttctattaaattttaatagtaaggaatgatcttatttttttcatatatttagtaaggcgccctaaaaaattacaatgtatagcataaaaagaaataaaataaaaaagtgtcatttagttttatatttaaaagtatgtaaaaaaaaaaaaactattaagagtaaatagtatctaataactagtgaagtgtcactttgacagacactattaagggatagttaaaaagaatgtcaagggggtcttatcattaacaataattaattaaaaaacttgttgtttttttaaaaatatg

SEQ ID NO: 330075 - DNA, 707 bp, Cannabis indica
atcttaaataattacaacataaacgaccaataaaaaaaattaaactaaaatttactcaaatggttgaaacaaatagagagtatatggatagacttcttttttaaagagtacattgttgaaacattctatatatatatatatatgtatatttttctttatttcaaatggccccacatttgcctattttcagttccttgctgctgaattcagatttctgatggagttaaatcatttttgtaagagaaatggtaaaatgtactgttggtagctagaatttttatggtctcatattaatattggtatagttaagtactgagtctctcatataatttaagaaaatattttttaaggaaatactggtacttaatcataaagcaccacctataaaaaatgtcggagaccattgatgctaaatattaacactcttttcttaattttatagttatcaaaaaaattaaattatactttgaactttccgtccctctgaattttatgtggcaataggagtacttggtcttttgctgtcatggttggaatatttaggtgcatcttacaaatatacatatatatgtatatatagatatatacataactaaatgatattggaaaattttagaatgtatctagtgccaatatattaatatttggtttagtatgcgaaataattttttagacaatttttttctcgtgatcatgtacgttatagt

SEQ ID NO: 330076 - DNA, 2348 bp, Cannabis indica
aaagttcatatttagggtgttaccaacccctcggatgctcttcaacaggcagcagtcaccattgctcagcaaaagtttcttttagctaaagacaggtattcgaagtggctgaggcaacaaagtaagattcagtggattaaatttaatgatgaaaactctaatttctttcatatggccatgaggaaaagaagaatggagaatagaatcactacctttgtcaaagatgataaaattgtggacagctttgaggatgttgttaaacactttgtgaagcactttgagaccttcatgggcagcaagagcaatgctacgttgaagatagatcttgaaagtatcaaccatggaaagtgccttaacttagagcaacaagtccatatgattagaccttttaacaagggtgatgttaaaaaggccttgttcagtattcatccttctaaaagcccggggcttgatgggtttgggtctggattttacagggacatgtggagaaagattggggacgatgtggctaatgcagtgttggggttcttcgcaaatgggaggctcccaaaacacttcaatgaaacggtcatctctcttatcccgaaagtagctaacccggaatcagcaaaggactacagacctatagcttgttgtaacacaatctacaagtgtatttccaaaatgatttgcacaaggctttctgaagttcttcctatcattgttcagaataatcaaggagcgtttatcaaaaacagattacttgctcataacatcatgatttttcaagatctccttaaaggctacacaaggaaaaatatttcagcaagatgtattatgaagattgacttaagcaaggcctatgacactgttgattggcaatttgttgaggatcttttgaggtctctttgcttcccctcgcgctttattagttggattatgacttgtctggaaggtactcactatcatttactgttgaacggtagaatccaaggcaatttcaaaggcaggaaaggcttgcgtcaaggagatccaatgtcccctcttctttttgtggtgattatggagtatctcactagactttgtagtcactttgctgggaagaaagggttcggctaccacccgatgtgcaaacatttaaaactgacaaacctttgttttgcagatgatcttgttatattttgcaaagggaatgttagctcgatcaagttaatccatgaagctttctcttgcttctgcaaagctactggtttggcagccaatacttccaagtctcaaatcttttttggaggagttaatgttgagactaggaagcaaatgctagatctagtcaagtttgaagaaggatggttccctcttaaatacttgggagtcaaccttcgtcctaccaaatggaagtttgctgattgtggtataatccttgataaaatcaacaggaatctcaattgttgggctagtagaaacttgtcctttgcgggtagggctcaattgatccactcagtcttacttggcataaggaacttttggatgagcatattcattctcccatctaaggtcacggctgctattgataagagttgccgagattttctttggggttctaatggcaacaggagtaagcttcatcgagcctcttgggataaagtttgcctccctaaaggtcttggtggagttggcttccgtgatgggaaaaattggaacaaggcgcttatggctaaatttctttgggctcttgcaagcaaacaagattccttatgggtcaaatggatcaactccatctatttgaagggcagagacatatggagcgtcccaaagactcaagacactagctggtattttaaaaagatgctgaagcttcgagactctacagatgaggccaagttgaggcaggccgtgaagggaaccaaatttaaagcaaaggttttttacaacttccttgttgagaagccgaaagttctttattcaaaaggcatttgggacaaccttctgctaccaaaacataggtttgtttattggcaaattatcaacacccaactgctcactcgtgactttcttagcaagattattctgattcaaagcactctttgcccggtttgtgataatgaagaggaatctcatgagcacattttctatagatgcatcttcactaagcgggtccaacaagaagttaactcttggctaggaaactacagttggccgaactctaccattgatcttagcttcagatgtgatttcaagaagcatgacctccgaaagcgcctcctgaacatggtaactgctgctgtctattatcagatttgggctaatagaaattgttgtttttttgacttaacttgtgcttcccccaaaagtataagtttggaagttag

SEQ ID NO: 330077 - DNA, 761 bp, Cannabis indica
acttcctcccgaagtaaggcttggacaagtcttctcctgaagacccttcccttggtcaatgacgctctacaacctattctaagaatatagtataagaacaataaacaaagttaaaacctagctgaatactctaggttttacaaaaaagaaaaaaaaaactctctcccataaaaatatgaaaaattaaactagaagaggtgaaaaatatttgactcctctctaggttctatttatagagcataaaaactctagagacaaacacaaacacactttttcagttgtacaaattaaattttcctaataaaatccttgatttgcagcataagtttggactttgctgcagcagatcaggattaaatggaaatctttctaaataggaccaagatcacaatttggttttcaatacctgccaaaaaaatattatttgatttgttacatgcatagtaaaatcaaaattaacaactagaaaaggaaaagtcattttttccaaatttaagtaaactttctatatagagaattttttctcttataagagaagtttcctaaaagaaaaatacagctattaacaaaagtttcctaaatagaaaatgggcaaccatacacacgaaattaaatacaataaaaccatatttatttctcaattgttataaatagtattaattatgtggatgtccaaatcttttatttattaccattaatgtaattaacattccttttttcttagtttccctttctcttatttttttaatatttgactcttg

SEQ ID NO: 330078 - DNA, 799 bp, Cannabis indica
atcacagaagccaaagctctctcggttccatttcttcaaagtcgtcttagcccaattaagcttcctcataacccgaaaactatgatgcccttcacaaggattatcccaggcttttctaatcgtattcccacaggactcatcagacgtccaaacctccagaaatctgaaagggtaccttcgtttttgttcattccttcgagaatcaagaattagaggagcatgatcggaatgaagaatcgggaaatgaactaccccagcatgagcaaaacgaacacaccaatccgagtttgccacaactctatctaaacgttttcgaaccctgttcgatgcatccctggcgttattccaagtaaaagtctgaccaatgaacccgagatcaatgccatcacaatccataaggaagttctgaaggatttccccttcccgatttccaaaatgattgcctcccagtttctcgtcagcctccaagattacattcaggtcaccaatgagagcccacgacattttacagttttgaacaacacttgtaagccatctccagaaagatcttttgtgtcgatgatacggggtgccatagatacagaacaacatccacgggggcaatcctagttcatcatcgacaagaagactaaaaccagacagaaacacttcgatcacttggatattaagccccgctttccatcctacgcaaaagcctcctgccgttccagttgaatcgatacactttacatttgtatagccatatctagctaacttctccgtcatacttgtactatccactttagtttccgacaaaaaa

SEQ ID NO: 330079 - DNA, 624 bp, Cannabis indica
attaaaataaaaaactaaaatattaaataaaactaatagtacgtggcttggcacgtaacgatcacctaatatatatatatatatattcgtacgtgatgtaacaaaagttagtggctagtgatcaagtactacctaatctgccttgtatcattattattattatgatttatgagtgagagatgagatctactcatttataaattaattaattaattaattagtgatgtagaacaaggcatgaaggcatggatcagcaagcatgctcactaaaattaaatctaaagagagaatggtgatatccatcttactattctcattccccaaaagctaaccctatataataaatgatgaagaaataatgcattacattattttttaaataagtgaacggtgtaaaataagtatagtagacaaagaagtaaaagtatagatatgataattggatatagccattagctagctaagcatcattcattttaaacccaagctaggacatgtagtcaacattccttaatttatagaatcatataaaattatttagggtttggattgtatttggtaaaagttattgaatggaccttgtgttttgttaaatgataaatggactttgtattttccaaaatg

SEQ ID NO: 330080 - DNA, 794 bp, Cannabis indica
catcccacttgaccttccccaagggatgcacagcttacccgatatttttcctaacaaatcacggaactattgactgtcacattcaatgacaaagataattgttggatctttggctcaatacaactcctcctttgatgcttggcgtgccctggaacaaaatttgccagtcaatcgaaggcaagactactttagatcaaatctcagatctcgaccattaggaaaggtaatctttcaatcactgaatactgtgacaaagtgaaactttttattgattctttgtccacagctgatcatcctcttgatgacagtgatctaatcatgcacatgctcaatggctttggacttgagtatgatcttgtggttgttcatgtcacgagtcttgtggataatctttctttagagtctattcaatctttactactaacccatgagagcaggcttgaaagacattgctctattggagactcttcttccaacatttcaacaaatctcagcatatcgtgttgggttttgtgccctaaataaaactctatttcaatgtaatattttctattcaattatcaataaagaaacagatttattttcattacttattaagtatgtcatttggttcatgtgatcatttatatgtttatttgatttataaattcatcaaaattcttatcacattgatattcttatttattgtgtcgtcaacacagtggaaagtaatcaagattatatgattaaatgtattcctagatttatcagtacacaaggtttaactgatatgataatctacaacgtagtttact

SEQ ID NO: 330081 - DNA, 680 bp, Cannabis indica
gtaacccacgccgtaggggccaagcactctctattactgtgtgccaacatcccacagttgaagcataagtaaggtaacttctcgtatttaaactgaacccacacctccgggttcgcaccggtcttgaagaagaaacctgctgggactggatggcttaaccacacgtccacccaacacctgaggaatcctctccttacagtttcctctttacttttcccatccgatttaaccagctggccaacctttttagcaagtatgggaatgttgttttccgacagacaacgggtcggaagaccatggaactcaacccaaaaacgagctagctcgaactccgacaatcgcacctccccttcaagtggccatggcttaagattcagcaaaactccattaaccagccacggtcgcttgttcagaacgaaagagcaatctgcctccgattcaaagaagaaaccaagcactccctcctcgaactttttcatcctccaaccatcttccaaattccatatgcccaaaagaatcttttttactactgaggcagccatgttcttgcaccccattatcttaccaacacaagctttgttggctacaatgtcttcaagagtcaaatcctcaaacaactccatcatttctatttccatctcactatccctttccatcgtcttcgccaccgagtcatctct

SEQ ID NO: 330082 - DNA, 919 bp, Cannabis indica
aataagtagtcgtgattatgcaattcatgctaataaaaagtatcatcttcttctttgaaccctttttgttaggatttggaattcaaggtatgagagaaacaaaattagcaatgttctttctttctttgatttaaaaaaatggaactctagtatacatgttacaagtcttaggacaagacttttcacgatcaaattaagttctatctttatttattgagtaatttatggtgtaatatctaaatttaactttcgatttcagataaatagttaaatttaatttttgatggtaataatatcaattgcaaaatatacaattaataaaaaacaactaaaataaaaaaaaaaatactaaaataacccttattaattatttaaaaaattttaacaaaatttaagttaaataattggaattatttactctaataataataataataaatgttaaaagatatcagtagtgcctaacatctaatcgtatgtgtcaatattgctattgttctaattaaatatcggattccatatagtttaatgtaataatttttaaaatcgtaaccaatcacagaaggacttctctagaagtaccaataatatttataataagctcctcagatatctcttcagttccacacaagccaaagaaaaaagcttcagaaattggaacaagtaatataaatatatatatatatatataaataaaataaaaataaaaatacaaaacatcatcaacggagctcaaaacccaatgaaaaagtgaaaagaaaacgacgtcgtttttcaaaatccacgtcagtaaatataaaaaactcattatagcctctcaattatttatcttaacgcattgtgtttggccttttgtgttttattattattattataattattattactgaatatgcatttataaaaaaaaaaaaaaaaa

SEQ ID NO: 330083 - DNA, 1446 bp, Cannabis indica
tttttagtattttaaatttttggtaaagtaccagacattatatttttccagttaatcgagaaaaatcgagaaaaaataaaaaaaaactaaaataaaaagtattttttcttttgggactcgaaacccagtggtcgcgaccatggtgttcctgggtcgcgacccttttctatggtcgcgaccagggtcgcgatctaggcaattacagaaacccaggaatttttcagctccagtatctgcgaccagggcataagctagtcgcgaccctttttcatggtcgcgaccagggcagtttccaaaaaccacaggaatttcaaattcaagctagtcgcgactagcccatgggctagtcgcaaccagccgacaaatttctataaaaaaaaccccaatttttaccccattaaacctaaatcgaaactaatttttctcagtcgtttcaaccttttcctcagccgaaaaccacccaaaaatcaccattgttcaattcttttcttcttcttaccaatttctcaatcccaatccataccaaaacttaatttcactcatcaatcttcggtttccatcaaaaatcacaccaaaaatcatcaatttcactcccaatccgaaaatcaattgttcttcatcttcaacctcaagctttcaagaatattcaacaatggaggtggagtagtggcttcttcgggtttgtaagtatcactctctatcatatttgagaaattgattgagtatttagggatttttggtgaacatagtgattattttggaaatttttgtggatagtggaattgttgggtttatattgtggatttgatttgttattggtattatctgtactgttttggtgattttaaaaatttgggaaagtaagaattttaaggggaagtgctgcccaattttgtctagaattatttttcataaaactttgtcattgtgatattgttgggcctaagagaataaggcacattgaagaagggggaacatcttcaaacccgccacctacaggttttgatcgaacccagtttgtaagtgaggcgggacaaatctggttcatgaggctaaaggttaggccatacatcgatgatcggagtattgaattccctgagaatccttcgaggcgccaaccaaggtttgaaacaattcgtgcccaaattgaaagaatgaagtggggcagttttgtggatgctaggggttgggccaatgtcaccatggcatgtgaatttctcgccaattggcccgagcgtagaaatggggaagtgaaggtgcagggtaagaaggttccgctacagctgatgctttcaaagctacgttcgctgtctcagactactcaagagaagaacagcggcaccgaattattgaggaggaagaaaaactcgacatggtggatgtggctgaaactatgggagttttggggctgagcttctgtaacgccctaatgctaaggcacgctac

SEQ ID NO: 330084 - DNA, 837 bp, Cannabis indica
ttatttggaataaccgacgccaaaagtggcgtcgaattcccttccagaaaatttcaaccctgtagcatcgattattaattattatgctgaaaaaagcgcctctaaaggcttgttttgtagtagtgtttcttattatcgcgtttaccttgtgtgagtacttggcttcaccatcaggctgaaagttactcagattgtaactattgacctcgctttttgccaacgacagtgagtcaaactaaagcgattaagaataattaagtaataaatattaattaagaataagtaaagaaaataataaaattatagaggttcgaccccttgataatggtaatagcctattcggcctttagtttgtattgacttgtgagtagagaggcaaaaaggcctcaatctctctcgaaagctcttacactatgatctctgagtcttttactcttgaatctaaatttttctcgtgtgttttctctgaatggattttgtgtccttggatagtgagataatttcactatttatagggattaattacatcaattggtttcccaaaactaataaaaaataaaaagagaaaattatttactttctataattacaatgagcaaaataggaaactaggaaggttgccttttcttctttgatactgcatatctatcccttgaaaataggtaggttacaagaactttgttaagtttgttaaatcctaactaacttaacaacttacatttgcaaccaccgattggtatccatattcataaataccaccttcacttatcattttagaagaatgaagagagacaaaagagtttcgagaaaggtgatcttgagagagaaagattgaga

SEQ ID NO: 330085 - DNA, 645 bp, Cannabis indica
agagagagagagagaaaggcgattgacttacgtggtcgggggtcctcaatgacgatgacaggcacggtagtcattggcgacaggtctgggtccttggctccttgtatcttcaataaagagagaataatgaaaaaaaaaaaagaacaaacagatgaaaagaaagaaagaaaaaggaaaaaaacgaaaagaaaagaaagtaggaaggaaaaaaaaaaacagaataggaaaaaaattatttttttattttaatttatttttaaattaattatttatatggaccaattaaattgtgtcatgtgtacattgtgtctacgtgaataatgtaacatgaaagttaaaagttaaatttagataaaaaatataaattgctaatggtattgtaatttttgagattttaccgtcaaactttaaattttaaaaattagttgtaataaaaataaaattattgagagtttggccgaacccttaaactaaacatcaccttacaagggataagaccacgaaagaccaagtcatcctaaaaagaaaggacaaataaataatggtttccgttttctgaaaaataaaaataactcaaggtgtattaattctcttgattttttctatgaacaattctcttttgatttttctaaatatatatatata

SEQ ID NO: 330086 - DNA, 1469 bp, Cannabis indica
tttgaatgtagtaccctcaaagagtatgagcgacaatctaatggaattgtgaaatgggacaaaacccaatttgaaacatttctatatttgggttgtcctgatcatgttcttaaaccgaagattggaaaacttgctaatagaagtgaagtgtgtatgtttataggatattcagatgaaacttgaggtgcctaattctatagtcattaagacaacaaagtatttgtaaagacaaatgctacttttcttaaacatgactatatgaaaagtcacaaaccacgcagtcaagtggttatcgaggaaatcagaaatgaatagattacataaccaataattttagcatcattagttgaatgaccgatagcagttaccacggttcctagaaaggaaaccccggtacatcgtcatagtgggagaattgtgagataatctctcaactatgagcatgaagcacatgttcttgtctttgacacggacaaggacaatccattaacttacaaagaagcaatgaaagaccctgactcagacaagtggaacaatgtcatggatcaagagatagattccatgtgcaccaataaagtctgggagtatgaaactccaccggaggacattacactcatatggtgtaagtggattttcaagaagaagagaaatgctaaagggaggtacagatctttaaggctatgattatagccaaaggtcacagtacacacagtgagaaggcattgactatgaggaaaccttcactcctgtggcagtgcttaaatccattcacattcttctttccatagctgacacttatggctatgagatatggcagatggacatcaagacttcttttttaaatggagatcttgatgagatcatttatatggaacaaccagaaggatatgtgctacaaaggaaagatcgaaaggtgtgcaagttgtataaatccatttatggattgaagtaagcctctagatcttggaatatcacctttaataagactattaaagagtattgcttcgaacaaaatgaagacgaagtctgtgtatacaaatacattaaaggtaatgtagtggtattcctagttatttatgttgatgacattctacttattggaaataatatagaatggttatcagacgtaaataagtggtgagacaataaatttcaaatgaaagatttgggagaatcaagctatgttctcgggatcaaaatctatagagatagaaagcagagaatattagcactttctcaagcaacttatattaataaggtgttgaaaaaattctcaatggagaattctaagaaaggaaaattactattcagacatggaattactctatgtaaggatcaatatccaaagactcctcatgagatggaggacatgagaaagtacccttatgcattaacagttggcttgatgtatgaaatattgtgtacaaggcctaacatatgctacgttgtagggattgttagtcgttacc

SEQ ID NO: 330087 - DNA, 798 bp, Cannabis indica
tcttgctgtgtgagatcataaggtagattcctacatgaactaggagaatttggaggaatactgtaatattttgtaacattttaagagtaagccacttttacagcttaattaatgagtaatgtatacaagtatgaaacagactggaaatcattttttttggtttgaactttgaagtgtgtgataacgtttaaagtttactatatacatttctttttggcagattaaacgaggaaatgaatggtgttgacaatctagccacacaattgtatcctttatattgttttcattttcaatattagttaatgtagtactgtgctgctgcataaataatcttgatgcttccttaatgctcttgaagaaaaatcttgaggagaaatgtcgatgtgctagattcagctgtaaacaagctccttcggattccttgactctgtaaatctctgatttcttgagtatttccatgtcaaaatgatccaagaaattttggcgagtgtcttcgaacacagtttgctccttggatttggtttctaaaactagtcattacgagctttttagccaatgcaaacgaaattacaatgtggccttcttggttgatttggcatataatgtttaagaagatttgtaaattcttgctatatgtgttacattgtttactttctataatggaaaacactatggatccatggctgaaacaggctcagcattgtctaaacttttggggtttttttataaactaggtgaatgtacgtgtcgagccacgtattgctaatttcatttaagattttagtctttttaagattt

SEQ ID NO: 330088 - DNA, 2262 bp, Cannabis indica
tctctctctccctctctctctcattcacacacccacatagctattctcaatacttaaggtttaccgtctttgattcctactttgtaaccttaagagagctatatcagatccacctatagttatctgaatagtattatccctcggtatcaatacaactaaaaaggaagtaggtcattatccgctaactaagggggccaaacctctataaaaatctttgtcttctttacttttgagttctaattgtgtaacacgtggcaaatatcatattcatatggtctcgctgtcggttgaccactttttcgaggtcagtttggtgctttcattaagaacgagtggatatcgtatctgatcaaacgccatggttaacacgagaagaactccggttgcattatctgtatctttgagtctttctcaagacccacaaactgcagatcctgatgttcatgttccaaccacaactaggattcctatgagcattgcagatgtggtcaaccttgccaccaccacaggcaccatgaatttggtccctacaactggccaaaaagacacaaacatcccggtggatttgaagtaggcccttgcctccaaaggaggaccctccactggcgcgtcccactgaaggaaggacccttgggtagcatcccccaggaacaacaactggatctcatctccagtactagatttactaacatgtatgttgattataattttataatctaacactcaatatgaatttcctaatacgatgaaataaacacatccttataatgatggtagcagaatattaatgactcattccattcagttctctagcccttgattcctttctgtagcatagcattatcaagatctgaacctagatcttctctccttcagtttggttaaccacagtcttccacactatgctaggtattgctttgacatgagtggacatactctcaatcaccatgagcacaaaattttatgacgaaaactcaagaggaatttgaaaattacaatagaaaataagaggttagcgattaattcagtttgtcagataagagagagagtcatctatgaatcaaacccttaatgttctgtttatagggatttattaagtttaggtttagagcttaatgggctaattaaaaagatccaatggcttagaattcatcatcatgaccgaacccctagtaaagcccatgagttagaattttgccattattttgctctagttatttaaatactaattctatctgtttaaataattatcaaataaaattactatttgaatatatattaattagaccctcaatggtctcttaattaataaataccttgaattctcttttattctcaattaatcccttccttagtgaaaattcacaaacaatacatagccttatttcaaattctaattgattaattaaaactaattaactgagactacaaaataatattatcctagttagtatggagaccatggtcctatgtaatcaagcttacaataaatagatttgaaatttaccaagtaaatttcctaacttattaattcctcctaactctactatagatttggaattgaaatcttaattacatagaacacactattaccaaaaatagatgtgatttgaattacccattgtttcaatccaaatagtcaaagatcctctatagatgatccacatcgaatatgtacaaatttaccgttctacccttcaatatatttaatcttaaaatacttatccacatgtaaatgatattttagtaaactaatataattactaaaatgaggcctcaatcatttatctctattaagccaagctcgaaggaaatcatcattttacttctatgcatttatagaagctatagattctatatctatgattagcgctcccactcaattgatctactatgtttccaagatgtaagtattgagtcgatccaattagttagctttaacaaataactctaagaacataaataacacagttgagatcgaacctaatcatattaggattaagatctattaatctaatatcaactaagtgatattgacttagatagatataacggtaaatttatgatatcttatccaatatcaatatcggtccagtccaatgtatactctatacatccgatcctagcatactttgtcaatgtcctggaaaggacataacacttatccaaggtgtaagtaagctttattgttgattatcatgtcagtgtaaatctagtgtactgaaaaatcatgggacaaaaactttgaaacatacaatcatg

SEQ ID NO: 330089 - DNA, 620 bp, Cannabis indica
tccataggaaatgatcttaatctacatttgttatatttgttatgagtaatgaagttgcgcacaaaatttacaccaaagtattccactagtgtgcataatttaagagcacatatatgccatgtggcattgtttcttttggtggacatatatattttttacctaattattaattagtatttttatctttcaaactttgagatatatcacatttttttataaatttttttttaagtttattaaaattattgaattcaagacttttatataatttaattcaataaaattgtctctcaaaacattttaatattgctccctcaattttcatctatgttagccttttattagtaaaattggatggaaattattgaatctaataatctcttttttttgggaagtttttaaactcctgaaaaattcagataacataatttagtaaatgtcaaaattcaagaaacaaaaatactaattaatattattttgttgtttttgttaatctcaggaatagtactaactaccaataaagagaccttagcataacattatggcatgtagtgtgtgctgtgtttttagcttagctccaccaaaacatgaccattaaccaataccacatgttttttctt

SEQ ID NO: 330090 - DNA, 918 bp, Cannabis indica
attgggtatttcgggccgaactaagttcggggtcaaaatatatttttgggattttattttggcattttattagtaattgaataatctaaaaatttatttaggtgtggaatatgatgaatgaaattttttcccttgattgcatgcttatgtgaagtattggccctaggggcattttcgtcatttgactatttaatttattttcaacaaaaatggatttttggcaatatagaaattcatttgctgatttgtttcctagccctaaccgaccctctctgcctctcctttctcatcatcttcaagctttttattgttttggatttttggcttgggattgaaggtgatcttgtagtaaatttgtgcattttgaaggcctatttacttgggtaacaccttaagttaataaattctgaatttgttgaagcatgaaatgcatgttttgctttggattatgttcatgaatatatgtgtatggaaattggattaagtgtgttgtttgatgcatgatggtgttggtaacttggagtgaattgctcttggtatgttttggaggtgattttagggttgtgtttgtgttgaaatgtgattttaggttttgaatattattgttttcaagctttaggattcggacttggtgttcaagcttttttttttgaaattatgttgaattttgctcaaagtttttgaacttatgttgatggttgtgaatttgaccttgaatgcatacattgatgattttaagggtttgattttgtgttgttattttcttattgatggtaattataatctgtaagaaattggactgaatttttaagcctgttttgtttggttttgggtttgattttggcttggtgataactctatggtatagagttattttttatgcttttaaactaaaagtattgtgagaagagtagtgaa

SEQ ID NO: 330091 - DNA, 800 bp, Cannabis indica
tatgtgatgattacacttttttgggggggaatcgaaattcaaataccaagttaccaaaccacccttctaaccacctatataacggggttaaaaattctcttacactcttttagccatttttattctcaaagaaaccagagcacaaaaatctcttctctccataaaaatctccaaagaattcttgcttggagcttgatttacaaaagtcgcccaagaacattcaagaccttctgaagtgtgagtaattcctcttctttttttatttgcttaaaatacatgcattatgtttaaatttcttccatgaaatctaagtttttgaagtggttcttcgatgattgagattaggagaaactaggtgttgaccctaaaaagtgatcaactgatagtagggtcgtatggatttgatgatttccacgtgttacacaaattgaatagaaaagtaataaacccacagatgtgttatagaggtttggcccctttacttagcgagtaataacctacgccactttttattgtactgatactaagagataatactattcaaatcactataggtgggatgtgatatagctctctataaggataaaaaatatggattaagtaggcagatctctaataagagagatgactatccttagaagtgtgtgagagggaagagagagagagagccctagggggcgtgtagcagagagagagaaagagagagtagagtttctgacataaagcaatttagaagctcaggattaggcttagtgacttagcttttctaggttagagtttaggcctttatataggaagcc

SEQ ID NO: 330092 - DNA, 2078 bp, Cannabis indica
aatcataagttttgttgtgactaaaaataagattttttgtagtggtaatcaatagtgtcatactaataatagtggaacactataaataatactatatatatgataacttttagagtgtgttaaaataaatttagtgtaaaatccatcaaatttgacatttcaacgttttattggaattggcctaagtaccctcattattatgttacgagagcatgaatgagattatatcattatataacgagaatatttttcagtatgaaaaaatttaatagagtttacttttataaggcataaataaataatgcaaaaaaatatgggattaaaaaataatcaaagtttaaaatatgggaaacaaaaaaaagtaatatataattttaataaaacttctaataataagttttgccgaaaaaattaccagcgccagaaaagttactagtgctagaaaagtcaccagaaaagtcattgtcaccagaaaagttatcgtcgctagaaaagttgtcggaaaaatcaccgaagttgtcgtcatcgtcagattagtcatcgaaattagaaatctcagatataaattaaaatagaaccggtttcataaaataataaataaaaacaaataatacaaaataactcaaacacattataattaaagtaaaaccggttctatgcctaattcatgcatctcgcaaagtaaggccctacttccaggcacatccgataaagatgttaactaatcaacccctgagacaagtttcatcaaaaccaaatgcttatggaagattgataaaatggtctattgagctggtacagttcgacataacttatcacccaagaatatccatcaagggccagactttggccgatttcctgattgaaggaatagttccagatgaagatccaattatcccgcgagatgcagacacttggaagttgtacgtggatggagcatctaatgaacatggctcgggatcaggcgtgatattaatctccccagaaggctttaagtttcactatgccttaagatttcaatttgacacttcaaacaacgaggatgagtatgaagccttgattgctggtttaaagatagctgaagtgttaaaggtcaaaaatcttatatgccatagtgattcgcaattaattttaaatcaaattctagtcgaatactaggcaaagggcttaaaaatggcaaaataattagagaaggttcggaaaaacttgggaaagtttgattattttaaaatcgaacaaattctaagagaacaaaactctaacgccgacgccctggcaaaactggcctcgcaaaatgaacttgatgaattgaacttggtaccggtggaagtgttagacgagctgagtatatgtgaaaaggaagaagttgagatgatagacagcttgcctacttggatgacacccataatcaactatcttctcaacgggcaactttcagctgacaaaaatgaggcacgaaaattcttgtattcaatgactcgctacacgataatagaaggaaattgtatcgaaatggttattcaatgcctctcctacggtgtgttctccccactgaagcaaataagattatcaaagaaatccatgaaggcttttgtggagaccatggaggttggcaaagcatgtcaaagaaaataatttgacaaggatactaactggccaactataaataaagacacacacgaatttgacaaaaaatgcgataaatgtcaaaggttttcacatatacctcgcgtcccacccacatatctaagaaagatgacctcgccttacccatttggagtatgggagattgatttgattggggcacgccccacagggcaaggatgagcaatgtacgtagtggtggcggtcgacttcttcacaaagtggatagaggcggaacctgttgtttccataacctgcaagaaagttctcgactttgtcgtcaagaacataatttgtaggtttggaatacccattaagatagtatctgagaacgaaacttagttcgatggtaagttattcactaagttttgcgagaagaataagattattaagagcttctcgtcattatcaaggcctcaagcgaatgggcaagt

SEQ ID NO: 330093 - DNA, 1396 bp, Cannabis indica
atatgttgacatcacttaaaatttcttagttttggtgaagttattaacaagttctcaaagatgtcactttttcttgaaattaggtagactcgaaatttcccaattttgttgatattccaccttgttgaaagggtgaaatatcaaagtgtaaatttgacctatcacaagtcatagttctcgtttactacaaaaataatattcaaatgctcgagacagaatcaaaatttgataaccagaacccagcacaccaagccatatgtcaacttgggcactgggtgcttcacggggtccgttttgatacttttaaggcattggagattgcaaatgaggtctcctatcccatttttgaccaaaataagaaaaaatctcgaagcagaatttatgtttgaggagcaaaaacatgcgaaccaggttgcatgtcaacctaggtacaagggcaagtgcccatgtcaacctaagcattgggtccctattttgaccctcagatgacctcatttgctccccgagatcacttgtatcttcattatttttgaaaatgaaaaagatgtctagaacacttttcgggaaaaatgactggaaatagcccaggttgacaaaatgttaacctaggcgttgggtccatattctttcaccaaatggatccgtttgattctcgaaaatactcgtatctcagttatttgtgaaaatagagaatatgctcagaagacttcttaaaaaaattgatgggaagtagcctaggttgacaaaatatcaacctcgacgtttggtcacagttttggcctctaggtctatccgtttcatttctgaaagcacttgattcttcttttttgatggagaagaataagatgatagggatgcttcttcaatattgtgcttgaaagtgtcccaagttgacaatatgtcaacctgagcactgggtgcactggtgcgctaggcaccctaggcgactggtgcaatggtgctcaaaatagaagtgctccgattccgattttggtacctcaaatatgtttgtgacacgtcttattcatgtcaaagtacaaattttcagtcattttcactaagacggacccaaaaactaaaatcctagttggaatgtcaacttgggcattggatgaaaatctcaagcacccaggttgatttttgagatgctgttttgtttgtttttagctctggggcccaggacttgaatgcttcatgtctttatggtatagaatactgaaagataatgagttagaaataactaggtggaatctaaacacctattgcagtgttcccgaagtcaacctgcgtgcagggctaaggacccctcccaagttgactcctatgacttgggactactcaaatgcaggttgttttttttcttgccacatgtcaaatatttatgtccacgtcacca

SEQ ID NO: 330094 - DNA, 782 bp, Cannabis indica
atgaaggcacaattatgccagttagtgacgaggatgattggaaattgcctgatgacatatagaacatgacagttggagtgcttgctgagaagcaaccagtagggcgacccaagaagcaaaaggttggaagaattaagtcaaaccaaacttcttgtaatggtgaaaggattatcataccacgaaattgtggcaagtgatgtgccaaggggcacaacagaagcacttgcacctaccaaggttaaaaatgaatgttgaagttaatattattatgtgttttactgttatgtattcttgttgaattattgttggactttgttaaacatttgtggcataaacaagttttcatataattcttacaaattttcatatatagaaacccccattataaaagaaataattttagtgataaatagagtgttcaaatcgaaaagcctaaagattgttcaacaaatataataaataaaatacccagatctcagctcaatgtgaaaccgactcaacttgtcccttgtgagacagtgggagttcatcacttgtcataagataaatctgtgtttaggcacaagtaacaaactccaattaaaatagctttgtgataatttacatggttttggactaaactgttgctgtataactagttagtcataaattctgtacaaggtgatgtggcatccagcatgatgacacatggagaacattgagaattcagaaccggtaattttccctcaacatactactaaaaaaatagtttttcttgacgtttttaaatagtcatttaaagt

SEQ ID NO: 330095 - DNA, 559 bp, Cannabis indica
tataaatatatatataagttgaaaagatatatagatgatgaaacaagtcaccataccaagaaagatggggaaaaagatcaaattggtaattaatttggtgacagtcaccatccatctccaaaattcctaaagtctaataacactgtaattgtagatggaaattgttcttataaattaactaaagtatatattctttcccatattttattttcttcaacttacaactatattacattccaaattaattataagagactgttactttaattggactaggatgatggtctattattttctctactatttaaatataacttattaaaaaaaaaaaatcattagtcccaataaaatttctaacccgagtcatgtggttgcaccaaattagtcaagaccctacaaggctacaacaactgctacttggcagttgtttatagggtactgactaacccgattaaacaattacgtgactcgagttgtgagtttcaatcgaaacctgcaatagtgttcgattgtaacatgtgtatatagtggagggcgatctgactaaagggagctattt

SEQ ID NO: 330096 - DNA, 1758 bp, Cannabis indica
aaagcatagtcgacattgtattaaagcacaaatagaaaaggttcatgtggatttttaaataaaaaagttcgtacagaaattcttgtgggcataaaccaagttctctttgatccaatgtcattacgcttcctctctcaataattcattatttgagcaaagcaatcaatgagttgccatttacacaaacagtatcgattatgttgtgattcatacaatcacagtacaaagatgacaaactaaaataacaagattcatgagcaaagcattcgaaatcaaatgcaatacgcagaaatgaaattaaaccagtaatggtgcaattcaagcttaaaaaaatgggatcaaaattcagatattaaggcacttagtcttggatacacattaactcaactttcaattatggttatgtctatttatatacataacaaacataactaaccaaactgtcacaactcacaaaacagttaggtaacagtaaataaggaatgtgccttaaaaccaccaaaaaccaagtcttactttctagaccataacacaatagattacaataattaaactaatgaactaaaaattaaaaaacaaccaaatggcattttttacatacactgtttgagatattggactctggtcttatgcattgaaatccccgacgatcaacctcaaccttcccaaaataggctaacacttcactgaaacacaaaacaaataatcaaatacaataaatatactgatatcaacgacataaataatattcaacaaacaagagattacctcggatcattggcgcgagagaaaatgtaacgaaagaactcgcacatttgattcgaataaacattgttgacagtgaagggctcaatcacctttcctccaaaatctttgaatttttctaaggcagcagcatcaaaatcatccttggcggtctgctcaacttcctctttcacaataactgggacttcttctacccaaaagttgatatcttcaaaagactcttcaaaaacagccttctcaattggaacatcgacattatattctgatagattaagtgaagggacacttagtgcatcatcgacaacctcttcggatttatccttcgtcctttcaccatctttttggtccacacccacatcatccttcttctcggtctcccccttgaaagaaagcgagcgctgaactttactcatcttaggtatctcgaacacttcatttatattacccttgccaaagtaacttgagactagcttcagtaacagctcttttgtactattcaccttcaaatcaaggcggaagacctcatctttcaactcacagatagctttgtaaattgtatcatttgttggttgcccaactacagcggattcaaaacttggtactaacacataggtattagtcaatttcacctgcttagtacaccaaaaaagttagttagcatatctccgaaattaaattctaatgcattagaaaattgaagtagtaaatgtacctttccactagtgtgaccatcgtggtctcgaatccacttgtacactgatttacactgttttatgttccaaaagtcaattggagccacagtgcggtccacatgactagcagtccagtccacatgagtcaaatatacaagctgccacaaaacaaaagtacatatatctataagccttgcagtacacaagcgaataaaattaataccaccacaataaggggaaaactgacctgtaaaagtatggtgcagccggaaacatttttcgtgttcttagtcttgtaccg

SEQ ID NO: 330097 - DNA, 937 bp, Cannabis indica
tacaagctttgttcagtgcttgaaagccccgttaggcctgtgagctacaattgattaataccaatgaagtaccaacaagctttactcaatgattttattcattagatattaaattcatttacattcatggtgatagaagttcaaagaaaaagaagtagtagttctagacatttgtttttcatcaaagcttagctgagtgatccccactacacaaatgcattgttcgactaaaagtgtagggaccataccttagtgacggacctcctaaagatgtctttgtcacatcttgttggcttaggaggcaattaattcactttcacaaggtaaagtaaatcacactatgaggcaacttgtttagggagcagtgctttattattgtcacagatgctccccattctagtaccttggtatcaacgatggattcaattggcagtcatagcaaactccaacctatttatccaaggttcaaatgcttttgtgacaatataaggtccctccccctctcattgggagtcttcactgacgctttcttaagactcataagacacatcttcactgctactcccatgttcttgataattgttggaaatagagggagaatcttcgtcaatgcccccactcctgaattgtcttaggaagtagagggaggttcttcatcagtgctttctttcttgagatcttcttgagaaatagcaagggcaggaatagaaagcttacccactataagattttgatgaaaaagaaggtgggaagcttggatcattgaaatagcgcaaaaatcctaagaagaatggtgcttgtgggttcagccccttagagagaaggaggagctttttctagagcaaatttctagtgagaaaaagtaaaggtgaaaaatgatagtgaaaaaagggtttcctcccaaaagtcacttatgtagtacatgtgggcccctttt

SEQ ID NO: 330098 - DNA, 971 bp, Cannabis indica
actttaaaatgaaggagtttagaatatttggtgtagcgtattttggtatgattatttaagattatttaagttttttaaaatttctctattttaaagttgttgtgagtgctctagcaatattagatgactttttaagcttttcgttaattttggtaactagttaaaaaagaatagggtcaggggagtgacatgagtatttttcaggggggaattatgtcctttttttttttttttccaatttgagaaaacttaatgtatagttttttttagggttaataccattttagattttatgttttacaaaagttacgatcctttgttttattaaatgataaaatgaactatatatttttaaaatagtacaaataagatcttgagttcaatttttgacatattctttaatagccaacttgaagataatttctaacacgattagagtagatgtaaaaaatgtaaacagttttgtcatagcacctctatatcggatcattattaagttttattttacaaaaaaaaaaaaagagtttaaagtattaagtagtactattttataaaatacaaggttcaatttgtcatttaacaatacagaaagtccactcaataaattttacaaaataagatgttcaaaataatatttatccttttttctatgaaactttagaaataagaatttaaaaattaactattaaggtgggtaaagtggatgacaataaacttgtatggtgagttaaaaaaacaaacaaacttgtgtggttataatttttcttttattggatttattatattttgattttttaaatgaaatattttatttattttatttagtttttcaaaaaaaagaaaaaattaatgtttctttgcaagtcttacgtttacttttttggtaactcaaacctgaaatatgttataatatttgtaaaaattacatattttatgaatttttataaaatggcttattattattattatta

SEQ ID NO: 330099 - DNA, 1795 bp, Cannabis indica
ggtacactaggccaagtttgccgaagtgacatcgtaagcgtaggaggcgcttctattgaaaaggaagcttgttggcaggggtgtggaagtagtgcagaggtcattaaattcttgttagtcatgacagtggttgagagttgatgaccgagatgattcaaagtcggatagacatggaatgcttcagttactacatgggtgtgtcaagaaggatgcacatggagactaaggggggaagatgccgcaatcgttaaaggatgattatacttggaggtgttcgcatgtgactttcatttgatccatatggaggtgtcgaggcagttgagtgggatgtgttggcttgtaaaagcgcctgtgggtgtaagtcacacaaaggcatcgatagagatgtagagttgtggaatgaatgcatcaaagaagccagtaggggtgagaagaccgagcgcaagcgttaagatggcgctagagtttgagtagaggctagagggtcgtgccagtgagacttaggagtcatgtgagccggcaaaagtaaagaggggtgttagagtttgcatgacggccagagggttgaatcattggaacttagtacaccgtgggagctagaagggcgtgacgcaagtgtgaatcagttggatggttcagcagacattgcatgcatatggaaattgataggggtgctatatgagatagttaactcgagagtcacatcctgcgagatgcacttttagatggcattgtgtgcatgaagagtttggcggtcaggcatttgcatgtgggcatgttgttgaggacgccaacagatgaagtcggggagagaccttcatggttcactcaacaggctagttattcattacaagcatcgagatgggtatcatggagattgattgttgttcaggatgtaaagtcaagaagactcgggacacaggatgtcccagttatctaggatgaaagtctacaggactcaggtactaagataacaccatggcaacgttggcctaaggtgaaagtcggtaggactaaggtactaaggaaacataaaaatgtcgagggatgaagagtgagaatgatcgaggtattagttaaacatcttcatcaaagtgacatttggaatgcagggaccgtatgagagtatacggttagcttccgagctataccttgaggggtattcctctgagaaataagttcttcccaagttgaagtgggggagcccactaattcatatgtttgaagaatgagggtacttgttcagttttggtgcgggaatccagagggaaacactacaacagatgggttgttaagtgtaaagacttgcatgattgctgcaagctgcagatagacaatatgcaggggcgcaggctgagatcaagattgagctagtttgtgtcatgtatgggcatgttttgtgttaatgggacaccggtgttgtatgggactctgtaagccaaattgttcagatagcatatgccgatgggagataacgtatcaggatgacttcaagtcttaagactaagactttgtgttatcaagtttgtcaaaagttagcgagtcatcagagcatgcaaggttgattttgggagatggacttgtgacacagttttgagaaccgacacaagcaggagcaagagggcaaatttgtggttatgggtgattgaaagatcattggccatgttaaagaagctcagaggagcacgtatgcagagggtcagaggggccttttacatgaatttctgggtttgcggtagggccagagggtcaatgttgagaactttgcgaagagattttgtgcaagagtgcactt

SEQ ID NO: 330100 - DNA, 751 bp, Cannabis indica
aaacatcacaaaaagagaaaaaaattagggttcctagagttgtcccaactagtaaatcggttcagtggggtttcttggggaccaaccagttaaccgatttcctaggtccccctcaaccggtcgaccagttttgtgcaggaaactccaaaatcaatcccaacaccacaattcaatcccaaactttccaaaagcctccagaacacctgtatataccataatgaatccaattcaagcaaaaaacctcaagaacatgcccagaaatgaaaaacaccattagagacccaattcaagttctctaacctcaattttgtacaaaccaccctacaatctgataacacaagataaaactacacaaataaacctatcctaacttcaaagcataaaattaaactacttgcataaccgcagaacctaaatccttaaatcaaacaccaaaacccaaacttgagctaaggaatattaaaaggtagaaggaaaaagtgatatacctcgaactagagctcttaattccttctcgaattctcaaaaataagctgaacaatccaaaccttagctaccttcttaaacaatcgagagagaaaaagataattggagagagaggaaggtatttcttctaagttcctttaagttatccactaattcatattaatcatattacctttactacagcaacaataatgccataaaaagacaaaacaaattccataccatatgtaacaccctaactaccataggcgtattacgtgatttt

SEQ ID NO: 330101 - DNA, 684 bp, Cannabis indica
tcctcacggagctatatttttgaattgtctttttctttgggaggattgtcagtcacgtgatcatctttgtcaatactcctcaagtacagtcgaatcgtcttgctctattcctaataattcgaaccaatcaattatggtcaatgattttagtcatcatgcgaaccacatcgataacaaccactaatttcaaatctaattttatctttgcaataatctcgaaagcaaaaaataattgaaagagaaaatgaagaaagcgaacactaaagaattaacactcaaacacgaagagagcaaaagtttaaaactacaaaatgacaagaaccgccagatgcaaggaggacggggaagggcagggagtgtgtcgagcgctgaccgtcactgaaaaagatgttggacacgccctcacgcgccgacgcgtgggattctagacagcgacaatcgatagtgcgtggggcccacacgcagtgaatctagatactaaaatttgggattttgtaggttggcgactgggaaatccttctctatggctgatgagaataaacttgcactccaaataggattcccgaatctcttttttatttttttttatgaaccttaatttcaaatttctaatcacaattctaagtattgctctgatatcatgtagagaatggtgaatagaattgtgtggtattccataaaata

SEQ ID NO: 330102 - DNA, 1676 bp, Cannabis indica
actatatgaaaaaatttgaaaaaaaaatattttggcatgtgatttcagacgcaaaggttgactaagaggttgtagtatgaggttgcaattagcactcctctatttatatatatagtactatgtataagcagtaatctttctcattttccagacaattaatattgtacatagtactatatagtaatgttaaaggggcaaaacgggaacagtagtatactacgctatatattttattgggacacgattttgtcccgtgatcatgtactttcacggaatatatttcagatgtacgataaccgttagatgggagagttatttgatctgagggctggggttgatctaagggtaattcggattaaaaaatggtaacgtaccctaagacccatctaatgtaccctgagacctatctaatgtaccacgaaatacatttcatgaaagtacatcacggaacaaaatcgtgtcctatattttatataacactgtcaattatagtactgtatattttgaatcacatgatatggtagctattatttaactaagaccataatataatatggagaattattttatatatatttttttatttacagtttaggttattacggtagtttttatgtgtgggttgctcgttaattgttacatagatttttataaaaatacaaaaaaaaaaaattcaaagtgtaaaaattaaaaaaaaaaaatcatataatattatgcaactaattaacaagctaactaacaatatatatatcatacagtaacattcttatttcttttaagacttgtttagtagtatgttgtatttaatcatattgtattgtgctatacattatatttttgtataatgtactatgttaatttttaatttatactaatatattgtataattatatgttcacaaaaattaatatcacattttaattttacataaaaatatatatacatacatataatatagtattgtgttggatgagatcgatggatcgagaaacataatgttatagctagattaattagtgtccagtctaaacaataatatttgatcactataaaaaatcttacttttagtcacaataaaatttatgactaaagataaaaaaaaagttgtggctaaatataaattattattattgtgttgtgactaaaaggtctgtggctaaaagtattagtcacaaaaattacaatttattgtgactaaatgtgtttttaatcacaatatttgttgtgactaaaactaaattagtgacaacttgtaattaaatactatgttttagtcacaattaagtcacatttagtcacaaaaaatttatgttgtgactaaaaaattgtcactaaaagtacaattttttatagtggaatatacttaaatatttaattaactccttttccaaaaaaataaaaatcaactttataatgtcttataacctaaatttgacaatatatctattggttatataatagagttcttggtttatcagaaattattgggtgactttttcttttaaataaaaaataacaaattattagatgttgtcacgtatatataaggccagcaagggtcagcatcatgtagttagttaaacctaaatataattaatccacctaaagtgttgcaattaataataaatttgttcgtttatttttttattaaaaaattatttttaaattttgatatt

SEQ ID NO: 330103 - DNA, 786 bp, Cannabis indica
cacgaacgatggtttcaaaatgtggtccacctacacatattagagagagagagagagaataagatagccaaataaggaaaatacctcttaaaccaacgattaggacactggaatggaaggcttgtgggtcaataacgtcagaagagaaggttgcaaagctcggtgaggcagaagattgattggggtttcagtccgtctatcgtccgccatctatgggaactaggaggctaggaatggtggttgctttgtcgtcttggaggtggttcacgcgcaggtggtcattagaactcagaagcaaagagagggagaagaataagaaaaggcatgagtttggtggctttttttggctaagtgatagggccatttttctagatgtaaaattgaagagaaataaagaaatagggttttttattaaatagggagactctaactgatgttttaatctaataattatttttttcctttattacttattatttttccttttcctatattgttcaataaatgaaaaaccggctgtcaactttattttatttcttttaatatttttttattatttattattaaaagtataattaccgctgaatttttgtttttagaaaaataagtttatgacatagtagacgccaggtgggtagggatacattaacccagtcacgcttagtgtgtcactatatgacaatattttttaaatcaataaaaattagaaaattttaggttttccccttttatgacctttcatatttttagtgacacacattacaggtgactaacactgaatgttta

SEQ ID NO: 330104 - DNA, 934 bp, Cannabis indica
acccccttctgtttttttcgttcagtccgacccacctctggcgagaacctaggtgcttcggctccgacgaggtctttggtggtgagacgagacagagaaagagaggcccgaagagggagggctgagagatcagggtttcagaaagtttaagaaagaaagaagaaagagagaaaaaaaaagtaagacaaaatatttttaatattatttttcgatttttgtggttaagtgtttaaaaatttaaagttcgggtggtttagccgtcaatatcccaaaaagaaaatatttttaaaattattgttgatgattttttaaatatttataattattttttaaaattaatattacgtggaccactaaaaatttgccatgtgtacaagtgtgtacatgtggacattccactgtggcacttaactgtgatttttgggaggaggggtacagggcaaaaaaaaaatgagagtttaagtagttttgccttcaaaaaattaatttttgtggttaagtgttaaagaatttaaaattcagttggtttagccgtcaatatccctttaaaatattttactaataatcaatccaatttaattacaactaatcaatctaatcacaatcgatcgccaaaatattagatatcaaattaattgtgtttagatcagattttatgtttcttttaaatatccaatctgatcaatccaattcaattacaattgatcggtggatataatcacaatagaccgccaaaatattagatatcaaattagatttgatattagttttataaatatccaattagagcagatcgaatgtttgatgaagtgtccaaaaaagccaatgcatctaatatcaaattccaactaattagtatttttattcagttttaaatgaataattaaattttatattattatactcgtatatataaaaattaagattaaaattt

SEQ ID NO: 330105 - DNA, 1578 bp, Cannabis indica
tttgtagagtctctattgagcatccttgtctaggctggtgttggctttttgcatggcatgcttttggatctttgaccttctctctctacatatgtctcatattctcttctttgtcacctcttccttgtacctgccattaacaagtttcaagcttcttaagcttttggaaactttttaactctcatgttactttgtaatctctttggtatattgaccctcatgacagttttggaatgtgtaatgtgtgactttttgatagaatggatttgattttggcatttgctatgattcttgactctttgagtcataaagaatataaggcacatattcaagttttgaaagaaaaacacacattttgattcaaaacttacctgaacggcctaggaggtcttgcttgagacctggccgaccctaaggcttaatcatgggagttggctagctttaaggtcttaccctataaagcttacctgttcatacctgggtttggtgaccctggccagttcttggctgagtaatggtaccctggccgaccctttcaaggcttgagaaccttcgccagcatgggccttggttccaagtgggtagccaattttctatccacttgtgactttggcaagaatttggctttctaggcacatacaaccttagcctcatacgtggtttccttagaaactttgtatgaagcttaatggtgagtctattatagttgaaagttcaacttaagaatcaacatgcttggatcgtgtaaggaacttcgccttagtcgtagccaagtacgtggctcctatgagagctctgttcagttcttttctggctatacggttctagcagggccttgcctcatgcatgcgaactgacttcatatctagcctcaaggctttcatgttcttgctttggcctatatgccctctatttttgaacactactattatttagccttaaagccatttatgacagacatatgatcgtcctggctatcttcttatggccttgacatgtaagggtttggatttactatgtcaagtcgaagtatacctgcacgacatagaggcaggtttagtagcttattctaagcgttagtctccataagtttgttgtgcccgtttgatgcattatacggtatgggtacccctaagcgaccatgcaagcaagtctcttggtcccttgctattcaccaagtttcacagactttgcctgggttcttccttggggtgctatccatagatgcatgtggaattgaaagaataactttaagagattgatcttgtgagtaaggggtttagacatagttgatctcacgtgtaacaaaagcttacagcttagtgtctgcttttgaaatcacgtagtggctacccctacgcggcttagcaaagcaaaggccatcgttgaagaacggtgggagaccacgccaagaaggtcgtgagtactagagtttttatgggttcctgcacgatgaaacgttagaggaacttaattgataagttggctagtgaaagtacttaccgagatgttccctatttcagtgtttgggtagaagtcctgactccaagttctcgttgtactcgccagacttgtatg

SEQ ID NO: 330106 - DNA, 1492 bp, Cannabis indica
ataaaattaaaattaaaaacttagcataatcccacaaaaagacaaactaaggctttgcaaaatgacaatttttcccttccatactaatagccactaaaggtcactaaagggtaatttggaaaattctacaatctggactaatcccgacattcccaatgtctaacaataccgccccgctatgctaaaatactaggatgtgagattaatagccaaacaccgtgttccaatgttgccgggcaccgaacatgcaaaaatatgaaatttctctatatgacatataaaatgcattctgaatgaaaataaatcactataaattaataatttagtgttaataaataatttttataattaaaccctaattattaggtaatttccaaatttaagctaagcggtctttacaaatgatacccaactaatgacctgtagcttgctgctgtggtgtttgccttgaagatcttgcgatactctctctatagggagaagtgggagatttacactaatcacaagagcctgaaatatttcttcactcagaaagatttgaatatgcgacaaaggcggtggttgaatttagttaaggattatgattgaaatattttatcatcctaggaaggccaatgaaatgcagatgccctaagtaggaagggtcccggacaagtatccaacatggttatgatttcatctcagttgggagataacatgatcagatcaagtattgagtttgctgtgggaaacattaataatttgacattgcatttagatttgttagattaaattagagatgcccagttagtggataagaagttagtgaattaagaattagttaagactcaagaagaagttttagctggccaagctaaagatttcttactagaaggtaatgggaagctactatataaaactcgagtttgtgttccaaataaaatggaacttagaaatgagattctcgaggaagctcataccactcactattcatgtaacaccctaaataatcaggcacgctacccaaagtatttatgaaatcctaatccctaaataggattactaatcaaaatagctcagaatttaaacttttataataaacagaatgaaaataaaactagtaataatttaaactttacaatagttgggatcccaaaaatatttacaaactttattacaagtcttcttctttcagccggcctaagcggcaaaataaagtttcaaaatacatcgctggtagacccttaacccgcttggtctgatgtggctcggacatgtacattcttcgcccagctactgaactcatggctgatcagctaatgccttaccctttcgtgcaaagtagagcacccgtgagccaagcccaacaagacagtataaatcataacaataataatatgctcatcatgctatttacatagtaacgccgttcatatatgtctgtgtgtcacagacctccatgttacactcacatgcctatttatgtctctgtggcgtagacttatgtgttgcg

SEQ ID NO: 330107 - DNA, 556 bp, Cannabis indica
aaaccacaatgacagagacagtgagtacacctatttaagtaaggtacgtgtgtcaaatttgttccgaagatggaggccaatgcaagaagaacctcaagaatagggttgagtacagatcctagtgggtcaagatcaaggacccatgggcagagcagatcaactaaaacctatacacgtgacaggtaagcatgagatggggatggttcaccctactattatcgagatgatcaagagtcaaagttatcaatctaagagttattctataacaaggttagtaagaaattacgaacaaagaaacaagaggcgacgcgaccctgatctacgggagcatctaaaccgtagacaaccagacctgcatgatcacttgaatcaaaatgttctagatcttcgtgattgattaaaccagaatgtaggtcaccaacaataaggcgagcaacagcccatgaatctgatttagttaagggtaatacagttagaggataagttcaggcaataccaatacagggaatatgggaaattatcaagatatgatttaaatagagggagagagagagag

SEQ ID NO: 330108 - DNA, 1370 bp, Cannabis indica
ggcctaccggccagagagctactgagttagccactcggtgtatagatagggttgttcctttcttggatgaggctttgaaggagttgggtgatagtgtgcctcacaggctatactctgctggactttaggatctttctctgctggggtaatgctttcagctttgttcatcttgttggcactgtataagatggtcgaccattaagctgcttgcatatggctggccagccttggacaattatataggggtttggccggtcatagcagtccagtgaggggactggtcggctaaagctgtaatgtttaacattgattgttttttttctttgtttttaggccctgatgaagctgagctcagctcgtgatggctcaaaggggtcttcagacacttcccaggagcatgtgaaggtcttggaggcttcccttgccgcaaaagacaaagccaattctaagctagaggtccttttggaagagagaaagagaatggtctcttgattggagatcatgcttaatgccgggaacactgaaaatatcaaccaggctgctctcatctctgggagcactgagaaagttttggaatagtaaaatctcgaagaggctcaagattttatggtggtgcatcctgtccaaagctctccctgtccgtgcggtgattagtaaaaggtttccaatagaggacaatagctgccctctttgtggaacagaggttgaatctattgaacacctgttcctttcctgtaatgtgacttttcacttgtggcggtcctctccttggggcattttccccttatgcgatactgggattcggatgtgggactgggttaaattcttgtgtgatcttaaaagcaaaggcattaacacggaggaggttttcctttatgcatctttaattattgatactatatggcggacgcgcatgacaaggtacacaataattttcccattgatattaaaaagtgcattgactctatttgtttatcttttgcagatcaccatgcttattttctcccttgcccttcttcgagtttgaccgatatctggcatcccccaagattagctgaagctgaattgtgacgttagagtggggctggatagcatgtgcgctgcggtggttgcaagagatcattttggcaaggtaatctgggtcattacatctaaactggagttttctgatgctctctgtggggaagcagtggcttgctgtttggctctggagacgactatggctcgcggcttagaatttattgtggttgagagtgattcgagggtagtgatcaacactcttaatgggaaggagtcccgttgggagcttgagaactatgtctcattttgtattagatcctctcctttttttgttggctgtactttcaaac

SEQ ID NO: 330109 - DNA, 1980 bp, Cannabis indica
gtttcaacttccacatcagttaagtgattcgtcttaatccaactgaagacttccttgacacctacagcttctgctatctcaggggccaccaacccaattttactatttgagtaagcttcctcaaaattgccatgtttatctcgaacaatgaagccaaaaccaaaccgattttcagtttcaaaaagggctccatcgacattgatcttgaacttagttgaaacaggtttagtccaatgctctttaccactaccaaaactaacatttagtaaaggtaaggatccatttgatcgagcatttttccaattgtcaagactagtcttagccgatcgaatcacctcagaaactttagttgatttattgctccataagagatcattacgagccatccaaatacgccataaaatcattgttgcctcctcagcaactaccttcggtttctgcaccagaatattacagaaccagctacaaacatcagtgacatcgccatcatgaacatcagccgaggaaaggttccaacaagatcttgcaaagttacaccgaaacaagacatgtgtgatagattcgggttcagtattacacattggacaggttaaatccacatgaacatacttggtatttaattgtagtttcgttggaagacatccagcaagaacacaccaaaccagatgttggactttcgcaggtacattcagttgccaaaccttcttccaaaaagatgccccatcattaatcaaccagtccccattaacaacttgaagcagcttatatgcattgtttgcagtatagccgccactcctttcctaagaccaagaccaacagtcgcccctagtggaattagtgagctgaattgagaggattagatcactgtcatgtttgttaaatacatctctaatcagctcaacatcccactttcttgatccaatcttaaaaactcaatcaacaatacggccaacaagactaggatggtatgttgtaataaagctattatccacagtaggcagccatggatcttctagcacagatgtagttttcccatcaccaattgttctaacaacaccaatcttaatgagatctttagcttctaaaatacttcgccaaatgaaactcggattcgaacccaattcagcttgtagaaaattaccttttgggaaatatcttgctttgtacacttgtgccaccaaagaattctcattagtaagcaagcgccacccctgtttacccaaaaaagccaagttataatcccttaaattctgaaacccaagaccaccaacatccttatgacgacaaagtttttccaactcatccaagaaacacctttagttgaatctttagcttgtgatttccaccaaaatttggccattaacccctcaaggctagaacatatctctttagtgagaagaaatacattcatagcatagctagggagggactgagccactgactttattaggacttcttttccagcttttgaaagaaatcttgtctcccaactttgaatcttcttgatcatcttatccttgagaaatcctaggatagcgttcttactccttcccattgtgcatggtaaacccagattagagctattttctgaagcaggagccataccaagtaacccacacaaataagttcgatcattttgctgaacattgttgctgaagaaaactgaagatttttcaaagtttattttctgtcttgaagctcgctcataaatagcaaggagtcgaagtatactagccacctccatttcattaactttgcagaaaatataactatcatctgcaaataacatatgagaaacaataggagcatttctagctacacgacagcctgttaaccactgctttcgcacaaacatattgaccagcgaggtgaatccctctgcacaaataagaaacaaatagggagaaagtggatctccctcacgaatgcatctacttggggatataggacccatcactctacctgttgggttttatgccc

SEQ ID NO: 330110 - DNA, 740 bp, Cannabis indica
ttaccttttgcatctcataataatttctccaaagctacttttgatctaattcatctagacattttgggaccttgtcatataccttcggttgaaggatacaaatattttctaaccattgtggatgaccactctagaacatatggttatacttacttcgagcaaaatctaatgctcctcttatcattaaattctttttcacttttgtacatatacattacaaaagcaacatcatatctgtaagaacagacaatgccaaagaattaacacttactagtttttatgctaaataaggtgttaccaattacaattcgtgtgggtagaacactataaaatgtcgtggtagtgagaaaatactaacacattttaaatgtggctagagctttgtcattttaatccaacttaccatcaggaccggccagagggtggggcagccggggcataggccccaggcctcacaattttggaggcccacaaattaaaatttatgtatttatatatatgaaaaaaactatgtatataatatatatataaatgtttaattcatttattttcttaaagaagttacaacacaattagtatgtatgggaatgttgatagagagttgataggttcaatcctccaacttttcgcttttaattattttaagaatcaaatagctttacatacatatattttatgtttttttttttaaaaaaaatgagagtattaataataaataaaaaatatttattatgtatttt

SEQ ID NO: 330111 - DNA, 1208 bp, Cannabis indica
aacataaaacttaaatttcgttggtatcttttgtaacaatagtataattatattgatatgtgttattatcattgaccctaattattaatttactctagttgtacgtaaataataaaatccctaaaatatattatagtgattgattagtttaaaggagtttctttttcataaatatgagaaaaaataataaaatgtacttttatgtaacataattaaataatgtaaaaaaatatggaaataaaaataaacacagattataatataaggaaccaaataatagaccataaataaagttggtaaaaattttaataggaaatatcgtcagaaaagttactggagcagacactagtgtcggaaaagtcattgtcaccagaaaagttgacggacaaatcatagtcatcgaaaaagtcaccaaaaaatttattagagttgtcactgtcgtcgaaaatgtcatcgaagtttctatcgtcaccagagttagatgtctcatatataaactaaaatagaattggttgcacaataaaatgagtaaaaacaaataatatataataacttaaaaattaattataattaaaaaatagagaggatatgagttcctgaaagactgaaatataaattaaaaacagcacttgtttcacaacaaagtgagtaaaatcaaataacacataataccacataaacaagttatataagataaggtgggaattaattccaaaaaattgagacataaatataagagtaatttgtggcgaaaatacgtaagtgtaactttgagttgcagttaaatacccgtctttgtttttgcggtaaaaataccttctgttagggttttggaacttccgtaaatacctagccgttaaatgtcaagtcagtattcacgtgtcacttagtcattggtccatgtcattaaatttgtatttattatttaaataattatacaaatatttaaaaataatttttaaattataagaaaataataaaaaatatatatatataattattttttttttatttttttaccttgatttcttttcattttttttttctttgaattgaaaaacaaactaaaactcaagaattgaaactagggctgaacattttgaacgggtttgacccgaacccgagcaacccgcccgaacccgaattggtgaacccgcaaaaaaaaattttaaaaagtttacgggcgggttgggttcaacccggtaccc

SEQ ID NO: 330112 - DNA, 1251 bp, Cannabis indica
aagacaacccaggactagggaacgagaaatctctcgtggtaacgagagaaatcctgggactcaagttaggacaagtgggttgccactaagacaccgtcaatgtccttcttgcactgatagggaggaggcgtatacaaaccccagcaggggacatgtatcaaacctctcccaaaggagaaggcctgtacatgacaaggcaagttctagctcgggacgtactagatctcgagatcatagtcgatctacgcaaggaggagatagacctcggcgtagtaatgatcaagagagtgtaagtcatacaaggagtacccaatctaagagttacttaggtacggtcaacaagaaactatgatcaaagacggccgaatcttcgggagcaattgaatcgaaggaagcccaatttacgcaaacagctcaattccagctaaaagctagaagatccaatccaactgcgaatcaacgagttgtaaaaaaagttcaagaaatatcaagatgggaaactgcctgattacgactcagatgaggagctcaaacctttccatccaaacattatgagagctgattttccccagggatttaaaagccctcacgtctcgtcgtacgataggactacagatccgatcgctcaccttaaaactttaatacaataatgcgagccagcaatgtcacgaataacttacgttgtatttagttccccacctcattgattggggcagcgagcagctggttcaataaattcacccatcactcaattacctcatgggaatagttatctaaagatttcaagaaacaatttcaggcggcaagggataggcgacttgaagtgtcttccctcactaacgtaaagtagaagccaggtgagtcactcaaggcatacatgagtcgatttagtacaacagctgctagagttagaaacttgaacgacagtatacagcttactgctcttcaagcagggattacgaatgatctctcgacggctggaggtgagctgtggggtgacttacagggtctccctgtaaaaaacatcagcgagttcaatgaaagagctcaagtgtttgtacaaaaagaggaagcaaggaaagagatgaaattgataaagactggctcgggaagtaaactcagcaatgtccaagctagcactgtctcgacggaggctgacaatccaggggctctagcataaagaggaaatatgactccaaggaattagccaaagataagaaaaaatagaaaaagcacgataagtacgtgcca

SEQ ID NO: 330113 - DNA, 480 bp, Cannabis indica
ttggggacttttgccgcaaattttcctaattaataacaaataataaaagtgacatggggatttatagatgttcgatccccttgattagcgggtaatgacatactccctttttagttgtattaatttttgagataatatcacgcagattacaggctggaatcttgtatattctagctatgactcttttcaatgttacaatagtgataattgagtgttacagattcagaacaagtgagactttgtgaagaaaatagaataagtatagtgagtgaatgaggggggtgtgagagagcgaagctatgggcgtgagagactcagagcccaggggccctttctatcttgcctaatgcactttatacagttcagggctcacaaaagatcatcactcaaacaagtaaatatccctctaaaatagggaaaataatatctttctatcttatatttaaattacaaaaaagataagtaatattcctaaagaat

SEQ ID NO: 330114 - DNA, 1543 bp, Cannabis indica
ttttttttaacttaagtttcgtttgttaatgtttgtgtccgaaccaaagctaattcgctgactacaagtcaaaagtttgcaacactacgtcgtttcgaacattctctctttttccttttttttaaggtaggatttttaccccttggactttcacatgtaccaattatgcctctgaacttttaaggtcgttaaaaaagccccatgaactattgagattgttgaatttaaggacttttgtccaattttagtgaaaaagtctaatatggatgaaagttcagatggcatgatttaatacatttcaatgttcaaggggcatgatttggtatatatcaaagtatgaggagcatggtttagtacataaacaatcactgaaatagtaaattgaatgaaattagacaaaagtccttaaattcaacaatttcaatagttcaggagcatttttaacgacattaaaagttcaggggacataatttggtacatattaaagttcagggtaaaaaatcataattaaccttttttttaattttaaaacgataaaatcattttggattttttgttttacaaaaattactaaatgaactatctattttgttaaataataaattgaatcttgtattttcttaaatgatataaagcagtaccctaaattgattttttatcaaaataaaagttaataataacatgatctagagttattatgacaaaattggatacatttcgttatagtgagattttctcacctagaaactcgagaccggactcctattgaaaagacacgtgtattcactttcctcgaggagagctgagatgtcgatgagagacccctcgaatatgaacctcgcctgaactagattcagcgagatgatgcgaatatgactgagtctaatcgcattcgtatggcttgcataatgtaggaccaaggaacagtttgaaactcgcatgtaccagggtagatgcgagtatccccgagatcctcctgcgaaaacgtagagatcaattctctactctgcgagctagtccagttgacccgacagccttgataaaccggtacagactcgcatgtcttagtttattggctcattacaagatgtccgtataaatgactttaagaggacgaagacatcctagactcgagtagtcccgaatgcattttaagcctacgagcttatgtaagaatatgaacagccaactcgcgctatagaagtcacatacgctgttgtatttagtgaattaaaatggaaactgttcttcatttattttgtttacgttttttagtttaatatttgtaattcaatgtacaaacggattgataatgaattcaatctctgtgtaaatgaatggacacttgctttgtatataaaggagtgatccaacatgaaatggaaaaagacagaaatccttgcaacagtggactaagcaaaccgtgatctggctgaaccactatactcccttgtgttctttatatttccagtttttattaagtattttgtctcgttaacttgaatactcgccattctaggttgagtactcgcataaactcccc

SEQ ID NO: 330115 - DNA, 1011 bp, Cannabis indica
atcgctagtttcttgtagagcattggcattattttttgcagtgacatcattattttggccgctcacagttttcaccctgagcccttgtccccacgtgcccagctggtggacgtgaaggaactttaattttgtttattccagtaaatgagattcgaagaagagctatattgctagtaagatatgttttacgtatcgtacaaacaaggtttgccctcctttactatcgagcaacttgttgagtttctacgttggtccattgctcccagatgcaactttaaaactctttttgttgttgctcaaaagactcgtgaaggtgatgttgcaactgagcaatggctttcttcagctgttcaacctcggagttaagctctacacacacctcgcgtagaggtatttgatcactggtagtactaatggttgttggattctgaaaaaacgtgacattgataggacctctcaagtagaggtggatggtccataggggttcgctattccatgtctcagttcttttagactctatttgagggttcacttccctaggaaggacattaaggggtctctcacttctgatctaaggccttttggactctcgttgaggttttgctccccttgtcaaaacatcaataccaactcctcactgagcagtggcattaatatcatgtatggtagcatgattttgcacgtttagggttttaccctgattgctggtgcccacatggccagttggcaggtgtgaaggcacctttcctctagtagacaagactatcgaggttatcgaaaaggtgtcagcttgatacacatcacatattgaatgagccaaatcaactctcctctccttttgagaggctcactgagtctgtgacagccagtagttccgtgatctataagggaaaacatcaagtaagctgggcaatcccacatcgcctgcggaaggtcaagtgggatgattctgagactgtgtaggtatgggactacacagttaaaaagagcttaaatggattgattggtact

SEQ ID NO: 330116 - DNA, 500 bp, Cannabis indica
gtgaaaccaaaatgaaagtttttagaattttgtcgctatttacctgtttttttatataaacaactatttttacatctctctcttatcctttgtgaagaaaaattacaaatgtatccttatcatttgtattatattatgatataatattttgtcatttcatgatttatgcgcactatcaaactccttccaaattttgtttttaaattaatttattttgatagcgtttttgttttaaattttttaatcacattaaatttttattttttaaaaaataaaaatatgttctatatcacttttatttttcaattttaaaaacaaaaaataaagtatattctataaattttatttatttttttttatttgttgattttattcaagttggtccaagaccgggtctaaggttacgactaggggcgagtcgaagtctggggttggatccggattcggttttcaaggtctaagttggagtcggagtctaaaatattaattaaaaaaactgt

SEQ ID NO: 330117 - DNA, 948 bp, Cannabis indica
gggaatgttataaccttgctgtagccaaggctaaaaaggaagcatcctctagccagagcacggacaagggacaaaacatttctaagtagggaacttcccaaggtagggatgaagatgtggatcctcgacttggggacccaagcagcaatgttggacctgtggaagaactagaagagatcgagatcgatccagatatttcggccagaaagctaaaaattggaaaaggtttgttgctcgaagtaaaatcagcattgataaaatttctgagagcaaacctggacgttttttcctggtcacatgaggatatggtcggaattgatccttctgtaattttgcacgtcctaaatattgatcccaacttccgaccagttcaacaaaagtgaaggctgttggacaaagagcaagctttagccctgaaggaagaagtagagaagctatgaaataacaatttcataattgaagcttgcaagaggctatggacgcaacaagggtaagggctcactgcaataagaagattgtggctgtaatgaagggtgaagctcgctgcggggaggacgtgattcctacttttcaaaggttttatcttttttttttttttaaattgcagatttttgaggggatatacataagacttttagggttcgacaccaataagaaggacattgcgataccaattattctacatcattatttcttttcttctccgtaatctcatactttttattatgatttacattataatgtctagttcagagtagttttttttagttaagggttatttaaaaactcaagacatgaatttttaatttctatgatgaatgttattttcttagtttccattatatcgaattgcttctattcttctattttcaatgccataattattgttttaatcttgtttagatgatcactaaatttaggttttattttaatctattatcatcttag

SEQ ID NO: 330118 - DNA, 1538 bp, Cannabis indica
aatcccacatccagtgatatccacgtgacccagagtggaagtactggctatcagtcccatcaaacatgttcagtccatctaaagtattatttgatgaatagctggtacaaccacatagcagtcagatttatcagatatgtagcaagaaaacaaaataatttggaattgccaaacattgaaggaaaaatgccaatatattaatccagtgagaaattatggttacatttcagctcatagctatcacgaaaatgggtgtactcaacgaattgagaaagtttgcactcagaattctgaaaatgggtttaagtttgaaaatgaacagatcaactaagtgcaaattctttgatattaagaatctaataaacaaacaatttcaacgaaaatgaaacctgccaaataacatatgctaaaccaagggatgcttcaggagagggtacaaagtagttaatacctgtgaacgatatccataagaacaagcaggcctaactcatgggctttatcaatcagcgacttcaattcatctgggatttcacagcgactgctaggtgcaaaaaaatttgtaacatggtacctacataacaattaaaaataaatggatacatcttaaacaatagaagattaagaattatatatataaacactacacattagagacaagtgtcatgcatataataactactaatttgttcaaacatacacacctcatattctctgacacgaaaagcaggacttaatcagacgagaaaattttagatggccatttttcaattaatactaaattaatcatcaaaaactactaaatagttaatgataatacataagaagaagaagaaagaaatggagtaagaactttgaaattatggccattccttgtgcctcttccccaattgacagcaagtattctctaactttaacaacaaattcctccccaacatatgagattttgacaaaataataaaataaaataaaaccttttatgagtgtcaaacgaaaaaacatgaaaaccaaaaattgttagattgaaaaattcagagtcaattggaaacattcactatggattgaacaccattaataaaaaattagtaaaatactaattatccaaggtttttatccacattgtaaagccgtgaagatggcaagcaagaacttagcaatgtgataaattactaattacgcctaatttttcataatattcaacacaatgagattattcaaagtgctgaattccactaagaataaattaagtaaatctggcaaacatgttcggcgacccaatccttgtcaatggcgaagaaagaagaatcaacagatgactgtgatttggatttaggatataaatttagtgttcaaaatctaaatacttgtttgagaaaaattaataatataaaccctaacatttatatagtaattaccagactctccaaactctaacatttatttatatagtaattaccagaaaaataaaataaaattaaaccttttatgagtgtcaatttttgtgtgttatagagcaatcatcagagttgatagagcaatcg

SEQ ID NO: 330119 - DNA, 712 bp, Cannabis indica
taatttttgtttttttttatttaagatatatatatatatatatatatatattgcaaccacaaagaagagatacaaatagagtacatgttacaataaaattagaaaatctttggaacatcgccattccaaaggaccactctctcaagccttatagcacctttagctaaattgtgagacattacattgtgatcccttaattagtacatgaaggatagctgtagaaggaaaaacagagagacatgatagaatttgttccaccatatcagataaaggtgacttatctttccattgattttcactttatgcataagaagcagacaatcactttcaatgcaatctaaaaggaaccttacaactatacaccagcgaaggccacaaagcaaagcttttgcttcagccaataagggggataaattaccatcaaaaggagaggacatagcatccacaatatctcccttactgttggtaactactgctacaattccaaccttatgcatttgatcattcaaagcatcatccacatttaatttaaaataacctggcttaggagttgctggtgtagaactgtcatggctacaacctgaaaacactttaggaagagtgtgagcatgaaaatcctgggcatctgaaaacactttaggaagatatttcttcatgtatattgaagccaacttgttccagagacccaaggccttgtcttcatctaaaactt

SEQ ID NO: 330120 - DNA, 661 bp, Cannabis indica
ctatatctctaataattattaagtttgcaaaatatgcttctttagctctgtacagggaaataattttgaaggggaagttccggcagagtacttcaatttgtcaagtcttcagtatctgtgagtacaccgtgcctttcacttggtttaattttctccatatagttgttttaacgggtccattttgtttatctctattttattttgctttgtataatactgcagattcataagtgaccttcataatagccatccattcaaattgccacattctgcaaatgtttccaacttatatacactgtgagtaacaacatttcaagttttcaaggcttgttaattagttaagccttcaatataaacttgttggaactttttaattttttatgtaaaaatgaagatttttggtttttttttcattaagtccttgcattgcattaaattatttctttagatatgtacgagaggtgactaaggttgttctctctaaataattaggggaaattacactctatactctttttatattgttctcttttatttttacccactttttaaaagtttattatttttacctcttttttcaaatattgtaccaaatttacccctatcacttcaagatactcttcatgtgactctcttatgtaagggtattttgggtacaata

SEQ ID NO: 330121 - DNA, 790 bp, Cannabis indica
atattaaaatcatgacaattatgcccttaagtcataaattttattccaaaatagaccacataaaatctgacttatttatttgatgacccaacacacattttatatatacaattgtgaccccactaaatttctaacatatcattcatattctagttatatttttattccttctaactaaaccctacctaatagggcgtttgttatgtgagtttgagttagagaaagtagaattggaaagaatatgaaacccaagtcttagaaataattaacattactactatttttatttaaaaacaaaatccacttagaaacacaaaccctttattatacaactaataaattatacactaaataatattaagcaccattaatatacaacccattataggtagtaaatcgttaacatcacattggacaaaagattgtagaacctctcataatgaccattggagatagaatattgctcaaagctcaccgttaccatttgttttggagcattgctacgaagcatctctagtattgatattctattaatagttagtaattttttttataatttttactagaataaataaatagaacctgatatcaaattgtattaataacgatattacacgtcacaagtcacaattgaatgcagttttatgtattgttattatttatgacagctgaaaagcaattacccaacatatttatgtagtaaccattaggattagggaacttactttttggaatttgagttaacttttacaaaaataatgtcatataaattttttttcaaaaatactat

SEQ ID NO: 330122 - DNA, 679 bp, Cannabis indica
ccaacctcaccagcagccacttaaaccttagtgcaaaattctcaaaattctcatcttacttactatttaagtaattataaacctaggggtaaaatgatctaaaaccataacccaacataaacccggtattcataatatctcaaatatttgtcccactacgaataagttctaaacttatccatatgactctaacggccaacaatcgcattttttatcatcgttgagcaaaaatcataaaattctataatttataattagcataaataatattcctacattttaataaaatttatgctaattatgaattatacaatttgatgatttttgcttagtgatgacgaaaaatgcaatggttggccgttaaagtcacatgggtaagtttagaacctattcttagtgggataactatttgagatattatgaatactaaatttaagcggagttatggttttggaccattttacccctaggttaataattgcttaagttggaagtaagaggggcattttaggaattttgcactaaggtttacgtggctgcatatgagattggcagttgggcatctttatttgattcaacctaaaatcctaagtattattggatttaattaatttaagaaaacttagagatattaccttgctctctctctcttcccttcgacccaagcacaaaccaacag

SEQ ID NO: 330123 - DNA, 817 bp, Cannabis indica
gtctgtagggttagtcgtcaatctaggaagtggtcagagtggcatacttatgtataagagtgattattccgtggatgtaagggcccaatagacgcttgaagcggggaagttacaattatattgggctggccttataaatttttatacagcccaacaataaaaaattacaagaatacttcttgctctaactatttagccgcacgaaccaccatcttcaacaacgacagcttcaagcaaacaaactagcacgtcactgaaaaaaatatatagccagacggagaatcaccataaattttgacgaattcacttgagaagaagaccgtaagcaatccaaacacatacaatttcaaatttatgcaaaatcgtgcagaaaaattggtgtgaaattaaaattcaacattgaattacaatttaaatcgcagaaaaataattctcctaatatcactttttagattcataaaatgtaaatctgtctgaaatagatctggagttcccaatcaatctaaatcaggtataaatagaaaaaaaaaaaatgtatcaatacactagctattgtttctcctgtttgcattaacgttatttttcaaatttttaaatggtggatttattcatattaaatcacgaacaacaaagaaaatttgaattcatcaagagtcacgtacataaaaatatttctttggtttttaagtttctgcatggctgcattgcagttacattaaaatttactaacgctctgaaacttaacatatcaatgattacaaactgataacgatacaataatttttatgatatttgcaagtgtttcatatcgacaatc

SEQ ID NO: 330124 - DNA, 596 bp, Cannabis indica
tgatacattattaacgttatttttgtaaaaacttacctagtatattcctaaaaaaaatcccttatttttatttggctaatttccctatatcttataaacaaaagaaaataatacataggaaatgatattaaatatatctatttttttgttaatttattagaaggaaggaaacaacatgaaaaaaaaaaaaaaaaatccatttttacaattcagatgatgaaagtatttgaagtcaaataaataaataaatgcttttgtccaagatttttatttatttattttttaaaatttttgaaggacttttagtttttggaggttgtctttttactttggttaggtctgtcggccttctttggacttaaacatggtttggttggagttgtattttgttactataattcgatttttgctactgcgattagtattgtctctgtgacatagttttgagtattttagtcttgtatttatgatatagttttgagtgttttcattttatttttatggcaaaattccaagtgttttagtcttgtttgtgtgacatgattttgtttcattgttggttcttctttgttcttcgatgattcaccatcaaatcg

SEQ ID NO: 330125 - DNA, 701 bp, Cannabis indica
ccaatagaaaaccattcatcaaaggcttcttgatgcatacacaaagccacatccgtcaaactagatgaaaatacaaactgctctttgattcttggtatctccttactaacatcaaccaaaggcctaccaaaggattgcataggctcaaaaacaagaactttatctttttcattgcttttgtcctaacaaatgcgagaaagcaatacaacaagatggtaaaaaaatcaaaattcgttcaaccatgaaacttataaaaataaatagggctctaaaaaaacaaatatgtgaataagaaattaaatataacaaccaatgaactaaccttcggattacttttctccttaaaaatagaaaaaaaaatattgaaacaaacaagaaaaatatatcaaaaattgattgaacaatgaaactcacaaaacaataaatgagctttttttttcagaaaaaacataaaaccatgaacacatcttttctatatcatctattttctcattgataatatccagaacagcagcgtaatgctatcatcagtagtctagctacccatagccttttcatcagcaacatcgatatcatctccacccttgtcaccaacttggccactatcttcaaacttcataggagcatcatcattaaacaactaaggctcgttaataaacttcattaagttgaaacttggacagtaatcatttgaattctac

SEQ ID NO: 330126 - DNA, 515 bp, Cannabis indica
tgataggttcaattatttttgcattggttatgtataatgatatttgggagcttgagagtatatattgggtttataatcaagccaaaaatttgacatttgagattgatatgaacgtaacctactcacgtttggttgatcttttgtacgaagaacttgatgttgacaaagtgacttgaaattagaagtgaattacaagtacataaaagacttaatgtatctccctgaagttattggaaataatgagcgtataaggttatttttgtttatgattgcgaataaaccagatgaatttactccattatttgtgactttggtgaagaaaaatgtctgcattgatcctagtcccgcaccaaaaactattaaggatacttgtagcgaggttgacagttttgttctaaaaacaaatctgtaggtgttggcggctggtgtgttacctgaattaattactatgatgtcgatgttggaaatattttaccacgatctagatttactaccatgtatgtttcattaacatc

SEQ ID NO: 330127 - DNA, 684 bp, Cannabis indica
aaatttcaaaatctaaatttatatatgtacactcagtgatgaccatgctatacttgaagtctatcatatgatcatgtacaattagattacaccaaccaatcatttacgtactaatgatgggtaagatatggtgattaaagatgttattttcaaattaaatttataagtgcattgctagtggtgcctagtatatatattttatataaattaatatattaaattatataaaatttaatatttttttttatgaaatctttttaaaggaaatggtcctattaaggtcggcccagtgaaccatggtggacccaagtagcaccggcccgttatccttccactgccgagagcgggaggtattactaataaatcatttacctactaataataataggtaagatagtgattaaagatcacattttgaaattaaatttataacaatattgttataagacattaatggtacctaatacaatagaggtgatatttcataaatattaatacattaaattataccaataatgatatgtacattaaaaggtgctaggcactaggggtggacatccgatccaatccaatcagtaattaaatttggaaaatcatcatccgatccaatccaattagaccttaaaatccaatttaatccaattactaattggattagactggttttttaattggatatctaat

SEQ ID NO: 330128 - DNA, 1051 bp, Cannabis indica
tttttttataaaatttcatatttaatgtaatttttactgaaaataaaaatatgcatgtaaaactagaagtgcaatatttaggcgagaattttgtcatgtttccttaaataaataaataaaattgttttaatttttgtgcagcacaatcattctgaataatttaccgaaggactatttcttcttaagaaaacaataatgtaataaagtgtataatagctatgacttaaacaaacaatgtcaatattggtgccgacaaaaaatagttgttgtaaattaaaacccaaatatttaggttttggaagctcagctgtcctttaatgagggcatctatttgcttggtttgttaagctatttttatttaaataagtaactaaaaatccaattgaaaattcaaattttaactaaaaatacaggtggccaaccatataatatagctaattaaattagtgctactaataacaattaattaactacaagtctacaacttgcatattaatagttatgattcaagacagttcacaccttaactttataccaaggactatggagttgtctttctttttctttaatgtgttatttaaggtattgtttgctaaattttggccttgttcattaaagttgacaagtaatatcctagttggagttcaacaaaatattatttaaaaataaatgatcaatatttaacaattctttcactgtaaatttatcaaatggtcaaagatatgtattaggaagacaccatgtatttccaaaatggtctgattatacatctttatatatcatgatcttatttcgtttctagcaatgtgaattagtaacaatcctcctctcaaacaaaagaccattttgtctctcttcaaataattttccatccgtgcattctccaccttccatctgcattttttgtatgatatttccactttggacctaagccctcaaagttttgtttttgtgcacatttccaaaagacatcataccaatagagataattaagggggtccaatacataattttttgaaaaaataaaatttttaacattaaattgctttat

SEQ ID NO: 330129 - DNA, 1218 bp, Cannabis indica
caggtggcaatcttgtgtgcaaattacacaaatcaatatatggtttaaaacagtcctcacggcaatggtacagaaaattatccgacgctctactccaagaaggattcaaacagtcccaagcagattatactctgttcactagaggatccgaagatactttcattgccttacttgtttatgtggacgacatcatcattaccggccctaacatatccatattgcaccagttacaagattccctacacctcaaatttaaactcaaggctctcggaaatctaaagtacttcctcggatttgaaattgcaagatcaaaagaaggattattcctatgccaaaggaaatataccctccaactcctcgaagattcaggtttcatgggaagcaaaccttctaaaacacctatggatcctaagcttaagttagacaatgaacaaggggaagcattggacaacccatcccactatagacagcttgttggaaaacttctctacttgactctatctagaccggacataacatatgctgtaaactcccttagccaattcatggcaagcccccgtaccactcatcttcaagctgtcaatcatctcctttgctacatcaaagggaatcctggacaaggtctcctctattcaaagacatcttccttgcatcttcgtgggttctcggattcggattgggcatcttgtcctgttacgagacggtctacaaccggattttgtatatttttaggagattctctcatttcctggcgtaccaagaaacaaccaaccatctcaaaaagctcagccgaagctgaataccgagctatagctgccaccactagtgaaattacatggttacaatatctcctacatgattttcacataccacaacctcacccagctttcatctattgtgacaatcactctgctattcacatagccaacaaccctaccttccatgaaagaacaaaacatatagagttggactgccacttcattcgtgacaagattaacaacaacaccgtcaggctgattcccatttccagtgctctccaacttgctgacgccttcaccaagcctctaacttcaccagttctaggaactcatatttccaagatgtcggtctacgacatacactctccatcttgaggagggggtattgagttttactctattttccttcctatttactctgttttcccccttcactgtctttgctggttttactggttta

SEQ ID NO: 330130 - DNA, 810 bp, Cannabis indica
tttatatatccaccgcgaaacgcgggatgtttactagttataaatatagatataatattgagagagaaatggtgacaagatccaagtaaggtatagtttgaagtgagtccaagtgttgaataaggtaattaaaaatgtaaatttaaaaaaaaaaaaaaacgcgtaattgggtcccttccaaaattaaccttctttccatacaagaattattataagttaggacttgttttaacttctaaagaccaagctaagacagtgttgaatttaggttattattactcacagaccacagtacttgtaacttatattttatacatcatgatgacgttgtttactataaatatatataaatttgtattggtggaagtaaatggtatattaattataaattagaaagaaaaagtagaatttagacaaaataaacaaatacaagtcccattcaaccattgaccaaagaccatcaccattttcaatttctctgaattggcttcaaactaaatttattattctgcatatacatcactacacaccaacatctctcattataattattattattattattattattattattattattattattagggataattgcggcaaaagtccccaaaaacttgaggttgatgccgattagtcctcaacctcaaaaattggcggtgaaaatacctaaggtcccaatttttgtttgtccgttggtctttctttctaacagatccgttaaatcaaaataaatgcccacgtgtcaattttttattagtccaaataataattttaataaaaatttaaaaactaaaaaaattattt

SEQ ID NO: 330131 - DNA, 2102 bp, Cannabis indica
ggcataaaacccaacaaagagttggagagagaaaagattgaaaggtagagagaggtgcagagaaaaaagagagattgggtgggttttgtaagaagaatctttttagatgaagaggattcttgggtgaaagtgtgagagttaaaacactttatgagaactcatcaaagaatctcatctcgactgtattgtacatattcttgctcaatcaataaaaggattacggtggtgttccaaaactggagtagagtgatagatcacatcgatctatcagacttgaaccagtatatatcttggtgttgatttctttatttcctgcatttagtattttctgattttacatgctcagtttgcctgtattttctattgattattgttctcggtttgataatcctatcaatgctaattgtttgattgtttaaagtttcattgatttgattctacaccattagtcttaaattttcccacaaattagagcaaggtaatcggtcaagaatgcagaatcaagattctttccgctgcaatcttgaataaacttgaatgtcatcaatggtgagatttgaattggagaagtttgatgggactgaggacttttatctatggagagaaagtcttaaaggaatcttagtggactagaaagtctctaaggttcttggagataagaagttactggcagaaaagaaaccagaggaaaaagtagaaatggaggagatggcgtactacacgatcattatgtatctatcaaacagtgttcgaagaaaactcactgcagaggagacgacgaaaggagtttgggataaattggaagaattgtacttaatgccatcgattgctagcaagattaatttgctagaaaggctatacgggtttagaatgatttcttccctttctttaaatgagaatattgatagattcaattagattatcgcaggtttggctaacataaatcacaatcttgttgagatcacttccaatcgcatatcaagaagttaagtctgccattaagtatggcaaggatgttattgcattggaagatgttcttgctgcacttaagtcgaaagattttgaattacaattggcaaaggaatccaagaaagaagaagtgtatttggcatgaggaagatcactcaagaaagagttcaaagaataaacaccattactctcaatcaagatcgaagtccagagggaaggacacaaggaagtgttacttttgtggaaagtctggacacttgcaaagattttgcaagaagtacaaggagcaacaaggctttaacaaatctcacaatggagataggagggacttccagcaccatcatcatgggaaatactctgctgcaatcgttgaagatggcgatgatttattcacggacaaagagttgttctctatcctggagtcatcaatgaacatggagtggattctcaatttcggatgcactgatcatatgtgtccaaatcgagagtcattttctgattataaaccagttgatggaggtaaagttctaatgggtaatgaacattcgtgtagggtcattggaattgggaaggtggccatcaaacagtatgatgactgaattaaggtgctgacaaatgtaaggtacatctcggaccttagacgaaacctcacatacaagtccatgcacagaagcctgaggatcaccaaaggttctttggtagtaatgaaaggtgaaaagatcaatggtttatatgttctccaaggagaaactgtcccagctggtgaagctagtatggtgaaagggctagaatcggatatgaagttgtggcatcaaaaacttggacatatcagtgaacaaggcctcaaagaactgcacaaacaaggtataattgaaaatttaaattcttgtgccattttgtgaagcttgtgttttagggaaacacataagctgaagttcactctagcaacgcacacaactaaaaggatacttgagtatgtgcacactgatcgggggccatacagagtgcctactcactctggtaagcaacattttctttcaatagttgttgattataatcggcatgtttggatatacttgttaaccactaaggatgagtgtctagaaaattttagaatttggaaaactcaggtg

SEQ ID NO: 330132 - DNA, 1088 bp, Cannabis indica
attgccaacttatctattttctcagctagatgattgttacagaaatcctcaaaccagacaccaaaatcctcattgccatcattaatatgcatacccaataatccatctccaaacaagcttttgtaaaagagtaaccaaccatgatgtgaaagatggtttcgatccctcccttacacaaagaacaaatgatgtaaacatgaacccgcttagactgaagagagacaagagttggaacacaattagagagagccctccaaagaaaattcttgacttttggaggaattttcaaataccagaactttctccaaaaactagaattatcatgcatattccatcttccattacgcacttgtaaagcacgataggcactctttactaaataaccaccaaaagtttcaaatgcccaataccatgtatccaatttcggcaatgcaggcaggggtattttccaaataagttccacatatctgggttcaaataagtcctctaaaagctcctcatcccagcacattcgattaatctgaaaaagattggagacattacagtccttaagagcctcatgagaagaaaccacatagggattgtccttggaagggagtaacggctggttaagaacaggtatcgaagttctagaacccactcgccatctagcacccaatttaaccacatcatgagcttcagttatgcttctccaagcatagctcgggttagctcccagctcagcatcaagaaacgaaccttggggataatatctatcttaaaaaagacgagccacaagtgaagacgtattggttaacagacgccaaccttgattgcccatcatagataagttaaaatccctcaagttacgaaaacccaaaccacctttatgtttatgcaaacacagcttatcccaacttttccaatggattccaccaccttgagaggccttagaatgccaccaaaatcttcccattaggtgatcaatgtccttacaaatttcaaggggtatcaaaaagacactcatggtataagaaggtaaagatgttggaaatttattttaccaagatcttagatctactcacaagtatgttgtttaacaccctaaa

SEQ ID NO: 330133 - DNA, 881 bp, Cannabis indica
tataattacattcaattttcatgattgtttataaaaattaaagaatttgaaacatttcaattacctctaataatataattattgtgtacttacttaattaaacaaacatgacaaacctatcattaaaccaaattacactaactagtaaaaatatataatatgtatttagtatgatctatgttacaaattcataaaacactaagatgatgtttgattgggagaaattaaaacatagtaataataaaaaaaattattaaattttttcttatcatgtatcgaaatagtctttctatctatttcaaaataaaataattattctactaaaatagtagaaagattattccattggaataatattccaatacttcaatatacaactaaacaaaaatagaataaaaattattttcatttcattccatttcattacctctaattaaacgccacctaacatattaaattacataaaatttagaatactattgtaacgaaataatataaattacatacctgattgatcttgaaataataattagaaaaaaatggaagaatgctaactttagaaagtctttttctctttaaatcactaataataacataatttgtatttatagagttaagaacctaataatataaccctaaattgaactggacttcaattaaataaaaaagcccacagacgcagatattaagttcctttaacaatagataattatataaactaaaaccgtaaaaccgtaaatataatttcaaaataaaaatcttatattccgaacaaattttcttgtgaacaaataaattgattaactattattagtttattattaaattattattattttatttgcattatctttgtgcttgggaaaatggcaaatggtgaa

SEQ ID NO: 330134 - DNA, 1413 bp, Cannabis indica
tggactaataactctaggatttgcaaaaacattaatttgtaataggctcaaaattgtctttcccttatcttttttctttccctttgctgaaggaataaatggtctcatccaagaaataatcagacaaattgagtaagtctttctccttagaagttggattgatattctttagttgcgacataacaataataaaaaataatcaaaaaaacttagcaatcataatttaacaaagaaacggaacaacaaaaaataataacaagaatagtaaaacaactattaaattaaaaaaaaattagatacatacctacttcaatgggacgattaaatataatattattcatactttgcaacttcaaatatttaacatttagctttggcattttactccaattgaaaattttaagaattacaattagggatgtacgtcagtcagtttggtcggcttatattacatatttttaatccaatgtaaagaccgaattacaaaattctaagtacaatctgcccaaataaagaaaaaaattaaaccgaccgacaaggttggtcagtatggtagggttaacccaaccaacccgacgaaaaaagtatttttttttaaaaaaaaaaataataaaagaatttctaaaaagtaaaaaagtgtttcactataatcattagtaagaagaaactcataaattgtatcacttatcatttttatgcatacatatcatatatatatatggaatacttttcaatgggtattacccataaatggatactaaataaatttaactataatattaattttaaaaatattaaaccattagattttgatccgatgacaaataacaaaagagaaatttaaatttttatgtttaatttagctacttaattaaaaaaatatataaaaaagtaactctttttacactacataaaagatatatttatgtaaaaaaaatatttaagtcaaactcatcttttttatttattttttttttttttgtccaaagaattttattttatttatttttttttttctagtcgatggaacaacctcaatccatataatgtaaaatgataaattttttaaattacaaaattaaacataaaaacttaaaatttactttatattacttattcatgtgtaatactcattaaaaatgtacacatataataaatatatatataaaaaaataaacatacctcaataactttttttttactaaatggaaacttacactatatcagcatcaaaatgaaccttcactttcggaggttcaccctcaccctaaaaactaattataaaaatatgataaatagaatggaacgacataagtatataaaatcaaaacaaacaattgataagatatgaaaaaagtcctaaaattcatatctactgttagtcatgcatatagaaaaaatctaaaaagtaat

SEQ ID NO: 330135 - DNA, 705 bp, Cannabis indica
attatattaaaatggttttatttagggcacaaaacccaacattaacaattgtattaaatttaataaaaaataaataaatgttatattttgcacaatatttatatttgtaatccaaagtacaataatattataagcaaattagtctaaaaaataaaatatcatgactattaataaattaaatatttcaaaaattattaatggcaatattataataaaatatatgtattaaaatatgtaattaataattaatgacaaaagtgtaatttaaaaagtaatatttcttatatgtcaaatttggtaaaatattatattatgtgccaaatttcgtctaatttttaacatgtgctaaatttagcacaacttatagcacactatgagaaaaacttttaattgaaaaatactaaaaaaaatatcaatacaccacctatttagcactccattagatatgaactgacagcgaagtcatatttattattgatgcttaccacatgttatataataaaaatagaaaagtaaataagacaagagattttatagaggtttgacccgcgtagttagcaggtaatgacctactctccttttagttgtattaatactagagatataccactgagataacaagggttgcggaatccgaagtggctctcttaagattacaatgtatgaatcaagtaggcaaatatcaagtgagagagagagagagag

SEQ ID NO: 330136 - DNA, 1282 bp, Cannabis indica
aatattttttttttttttattaaaaggatcatttgacataacttttacaaaaactaaaagttattttctaaaaagaattgtttggtaaactgtcaaaaatatctaattgaaaaatttatggttaactacaattaaaagctaaaaatggtacaactggtgacttttaataaaagttattttgattaaaattctaataatttttactaaaattattgttgaaattttatgccctaaataaaactcatttgaatataattttatttgtcatcaatcgaagattagatgtcgtataagttaacatattaatttcatgattacagtttgatatacaatttctgataatttcacaacatatagttattcacaattacagtgatgtcatcacagttgaaagtaattgtgattatatacttcgaagtttaagtcacatgatttatcagtgcactggatttacactaacgtgataatcaacgataaagtttactcttcaggacattggtaaagtatgctagtatcagatgtatggagtatacatcggactagaataatattgaacttggataagatatcctaaacttatatttatatctttataagtcaatatcacttagttgatcttagatcaatagatcttaatcctgagatggttaagttctagcttaactgtgttatttgtgttctttgagttgttccttaaagctgaccaattggatgggaccaatacttacatcttggaaacatggtagtacaattaagtgagagcactaatcatagatacgtaatatatggcttctatattgacattaaagtgaaatgataatttcctttgagcttggcttaatagagataaatggaagagttcttatttctataattatattagctaattcaaaaatcatttataggaagccaaatgttctaaggatataataaattgaacggcagacagtaaatttgtccttactcgatgtaaatcatctacaaaggattttggattatttggattataataatggataattaataacatatctatagttggaatatttagagcgttctatataattaagagtgtaactctgaatctatagtggagtcaagaagaattaataagatagggaatttacttggtaaattctagaactacttattctaagcttgattatataggcatatggttcgcacactagctgataatattagcttgtagacttagttaattagttttaattaaataattagatttctaaattagactatgtcttatttatgaattttcact

SEQ ID NO: 330137 - DNA, 420 bp, Cannabis indica
atatttatttatttacttttgataaattaaacagagttgataatcatcctcataatatatgagctgaaattgtagtaatcatcatcatcatgtgtcgacattggtaaatagagttgataatcgcttaaaattgtactcatcgtgtcaattagtagtctgataatagagttagtatgatttaaagttttgtgaaatttacagtagtttcacccatattttctcctagctgtcgataaaacttagtacacataaatgaaaattaaaagggttgaaaaaataaaggaactgtaacagtgaattctatacacccctttgaaagtatttcttacatgggtcagcagaaggggctgaaaaatatgcatgaatttctatatctgattctgattgcaatagatcagaaaaagaataataattatatta

SEQ ID NO: 330138 - DNA, 1155 bp, Cannabis indica
agccgttacaaccaccacatacatctcagtcgctacaaccaccacatacatcttagccgctacaaccacctcagacatcacagtcgctacaaccaccttagacatcacagcgccatccatctagtcatttagagttcgatgagaacgagagatcaaatgactttttatctcagttgtagaaccaaaggactactattatattttttttttggaagaactattatgatgttttttttaagttgttttagttactaatatttgtataaactatttaattttattatgttattttgctcttatattaatgaagaaatttatatattaattattgttttttattatttgttattataattatttttaataaattaaaaatcaatatttcaaataatataaattatatattttttaatataaaaacattatcgcctctaacagtcaaatacaacaattctgacaacacatttagggccgacattatgggtattagaggtgacattgtcacctccaaaagtgaaaaatagaaatttgtattttatcttttaggaatgacattgtcgcccctattgtcaggcaacttttttgtcgaccctaatagtactttttggcatgaattattagaggcgaccttttaggggccgacatgtcatctctaaaagttattaggggcgatttattgttgttttaggtgtatttgttgtacacgtctactactaaagagattgtatggttaagatgattacttgtagatatggatgtcattcactcttgtcttactcctatgtattgtgataatcaaaagtgtcattccgattgctcacaactcgatttttcatgaatgcacaagaaaaatgagcattactgaggacaaatttcgttggtaaaaacccctgttttcgtcagtattgcgcatcaatgaggacatttcgttggtaaaaagtcgttgggaatacttcgttgggaaaaacgattatcaacaacgactttttaagtcgttgggaataaaaattatcaacaacgacaatgtcgttgggaataatatttatttatttatttattttttacatctgagtgcatcaacaacgacattgtcgttattgatattattatcaatgacgacaatgtcgttattgaagagcttctacgaaaaaaaaa

SEQ ID NO: 330139 - DNA, 932 bp, Cannabis indica
gggtctggcccgcccaggccctcaaacactcctatcatgttgaaccctgagaccaagaagggcaaggagatgcttcagcactaccaagatcggctacttcctgagatgaacgaccagctgttcgaaggggacgagatgtctgtggagcttctgatgggcgggctcctgaaggaggcaacccgagtacgtatttctcctttggtttttatcttgtatttttgcccgtgcaagttttaatcttttcctatgcagctcaatttgaagatgacttacacatactcccgagccaagtctactgccctgaaaactatcaccaccactaccaatttgtagaaggaggtggatgcgaccaaggaggtcgaggtcgtaatggcagagctgggtgaggtgaagaaaaaattctagccgccaataatcgagtcgaggagctgaagaaggagattcaggagatgccatttaccgcctaggtcgaggcggataacgaggttctgtcctaggaggtcaatgatctcaaggatgagagggagggtctccgtactcttctcgcaaatttaaccacggatgagacgaacttggaagaggacgtcaaatccaggcagacgagggaggaagagcttttgaaggaggtcgaaaattagagtctgtcgccctggaggttttctacgaattctggaaggctaacccagaaggaaactttgattacctcagtgataccaaagaggcatatcttatttaccgtgcgggccaggcagcaaaagataaccctaaggcagccaattccacagctctgactaaccagaacaccgagaccccaacctctaatgaccaagtcgatatgtacaaagaacctgggactcctgctgtgtgaacctctcttttcttctttttttttatttgttcggcccatgggcctttgttaaatacaatatgac

SEQ ID NO: 330140 - DNA, 977 bp, Cannabis indica
gacataatttattaagataaattcgttgttactattaaaacttaaaaatcatgaacaagcatctatctgcccaaacacaatctcctaaactagtaatagaggttgccagtgtgtagacaacaccattcgccgatcgtgaaatagtgctgtaaggaccaccatcaacaacaactaataaagaatagatatctaataaaatagactgataactaaaattaatatgaagcttattaatccacccaattgccacagtagaatcactattaataatagaggcaatgaaaccaaattgatgcgcaagagacaagcccagacgaatggcaagcaactccgccacattagcaggaaactcacctaacacacctgaggaccacgctaactggaatcacacccgctgcatcccgtatcactctcccaatccgacaaagcccttccccggaaccattgaagcatccgtcgctagagcaaatgattcaggaggaggtggcatccatcgagtaggacggtttgcaattgggcttgcaaggcccaaactcaaatgaagccctctccgaccattctccttaaactccaccggatggttatggactaaatctggaataacatctaatcttgattgcttgttgccaaataatattgagtttctatcatactacgaccaccaaagagttgtaatcatcaattcaaaagcctcacaggatagcttgtcaaagagacataagagaatttcatgcattggtccataaacacatcgacagagtactaaccacacccccaattgatgccacattagaatcaaactagagtaggaaaacaaagcatgctcaggagtttcagattcttctccgcatcgtgaacaacaaagaggtacctgaactttctgggagataagctgtgttgctactagtacagtcaaatagaacctacgccaaacaaaaactttcacctttggtggcatattaagattccatactcca

SEQ ID NO: 330141 - DNA, 1443 bp, Cannabis indica
tttcaaaaaattatctaaattttctaaattgatttttaagatcatatattatttaactaaaagaacacaactggaatttttgaaaccggataaacaagtaaggagttatgcacgttttaagtcgaaaaaattataaaaatgttcactactccctcaaccgaaattctaattgggaatcggactttaagatgtggctaatctggaattttgggtcacaactagacttctgatttgtagaaaaaaaaaaggcctaaaaaaccgtgttaacagctataaacaactagttttcattcccgcactatataaactcatttttcactcaaaaattgaggttggttgagttagtattgatcatattacatctctaaaagagttctagatttacttcgcatcattctttcataaacactccaactacacactcttgagccaaatttgttcttatcttctcaggtgtgcttgcaattctctctaggatttcacattttatttcatcttattagagagagttttctttgtatttcaaaatcaaatatcaattgtattggtggagttgaggttggcactggtagaaaaacaactcggttgtaggtgaggttgacaccaattttgtaaacaacccgagaagagtgagattgtccctacaaccatccgagagtgagattggcacttcaacaatctgaagaggttgatagtcctttggaaaactattgatttaagtacaggttgcactggtagaaaaacaactcggttagtgagattgacatttcaataatttggtgagcttgatagtccttagaagaaaactattatgagaggttcgggaaacgccttggtgaaaaagtctttgattgtaattagtcaagcccgtcaacttggctcgatagttgaactcaatgctaggtctatagttttgaagaccaaggacgtaggtggcttagttctactgaaccttgtaaaaatcgagagtttgcaatttttatccttaaactgtttacatttcaagtttattatttgtttaaacttgtgattatctttgttaatgcattaaacttgaatatttacatgaattgtctttggagtttttaaatttctaaagttagtttaaattttcaattcaccctctttgaaacatatcttgggctaacagggaccacgattctcggatgagcagctgaagggttaggtcctcctaaaccttcccctctaagagaaagatgttgggttttgtgccctaaataaaacccatttcaatatataataagatttaattaataaagatcagaaatgacattttatgttgcatggttcacatgatttatttcatgattgtttaatgtataaatccaattaagtccagaacatatgtatttgttcatgattatagtgttgtcagcacagtagaatataatcatgattatatgttcaaaaagtttaaattcc

SEQ ID NO: 330142 - DNA, 1247 bp, Cannabis indica
tgttttggtttggtgttgtgatatttttttagtttcgctagctctggtgacaactattaataatgggaaggtatttttctaatgtgatgaggtgctatttgaagacgttatctttttattatctaaatttctgggagcagttttgtcccatgtggcttgcgataagaattatgcagcttatcgtttggcaaaacatatcatttggttagacgatgagctatcgtagttcgaagagattttactgccgattgtagtttgctggtttgttaatcatgtgtgcctctatttaccatgtaaaaaaaaaattatatcatcaatgacggaggtacataggtgctatagggactttagctcctcaattttttacttataattttataatttttttttatttttctttacaaatttatatattggccctcttaatttttttttttttttacattttggccccatacttctctcctctctcattatggtcaatatatataaatatataaatatatatttatatatatatattaatataagaggttattgttacgtacattgcacgtatatttagttatattttatagcttttatttttattatgtgtatttttaaaattttataaattaaaggaaactatttattattatttttttttttttagaaagagatatatttaaagtttaaaatatgagaaaaataaatataaagtttaagaatattacaattaactatactctagattttaaaaataacaataaaaaataataatattacaattaatatttaatatttatatatatttaaattaattaaaaattagtataagttcaattaacttcatacaaataatattaatatttatatatatatttaaattaatctaaaataaatattattaatatttatatatatttataaaattaaccctgctaatactgttaaatttaacgaaatattttgttaaatcaacaaaaatcgttagataactgcattttatattaaaagagatatataattaaaaatattttgctatatattttatttaatgagaatattttttctttcataaaaaaaagtatttttacttgttttatggttgttatttttttaaaaaataatatatatatataaatatatatatttttagaaaatttcacaatacaccttaaaatgggtgtaccgatggacccttatctattttggtatctaaaaaaaattagtctaatttttttatggtcgtatacgttgtagtt

SEQ ID NO: 330143 - DNA, 737 bp, Cannabis indica
agggcacaaaacccaacatggctagtgtagagcaagctaagctctgagcaaggatgctcaagttgttactggggacatcgaggtctaagaaattgaggaccatgcaaagtatgtcatgcaggtccttctgctggagtggaagaagaagaaggagttcaagttcttcctttttgtggatacaacaaggtcggagaacctgtctctaagctgggcaatgtcttggtggcaggccaatattatgtcaaggaggagtgtgaggaggcccaacctttgagcaccaaaggaaagaaggttcctcagttggtctcgccttcgtccatacttacttataagagattgaaaaatctctttgatgagggtatccttggcggagtggaggctttcttaccctatccttggcagctaacaacgagcccatgagatgggtcatgtgaatgttctggggcccatgcttaacaaggcgcaatcttgcccttgcatctgtacttcaagaaaatggtcaactactacaagatctacccgacccagttcattcccaaggtcattaagtatttgacccattgttcgtgttatacatcgcacagggatggagccagccttttgcccacgacaccaactggctttttaacttgaattcaattccaaagcatatcagatcaggatatttttattttcccaaaatgagcaccagtggttgagcagtattacagataaggaggttgttggaaattatttta

SEQ ID NO: 330144 - DNA, 713 bp, Cannabis indica
tttttttatggttaggctctcattgacacacgcaaaatctaagtaatatcttatcatagaagaaaaaaaaaattaagtaatattatttgaatgggcagctaattatggactttattttatacgacgatatctaattggaagaatacggtcctaataaaattaacttgacaaaaatcaatttgcattgtcctaattgacaagtcatttagaaattgtatacaagagtattacggtacaagtactcaaaaatcaaccaccttagcaactaggcatagagggattttcttattcatagttagaccaaacacttcttccatattcaaatcctctcttttcattccattgggaagttcccaatcaaaacgacacaaaagattagcaagtgcaagctcaatcaacacagcagcaaagttaatcccaggacaccctctccttccaacaccaaaaggcaataactcaaagtgttttcctgtatagtcaattgatgatgatgatgagttctccaagaacctctcaggccaaaactcatttggcttttcccaatgattcgagtccctcccaatctctcctgcattgacaaaaacccttgttccagatggaatgtcgtacccttttactctgcaaaactctgttgtttctcttggaactagtaatggtactggtgggtggagcctcaatccttctttgatcactaattttatgtagtttagttt

SEQ ID NO: 330145 - DNA, 886 bp, Cannabis indica
aaaagatttcacagtaagactaaattcaacataatattgattgagtggtaatgacaaattttagatgctcttttttacacattttcaatgtagtagtaaaacttattaataagacataagcttgggtatatgtaaacttcccaggccttctcgcacgatgggccttcaaagaatgagaagttttcttttataataacaggtaaacagtacacctgcataaaattttatcatacttaaattaaaatgttttggtccacaatgtttacaagtatagactattgataatattctaattcaatattatattctccaaaattgattttacattggattgaattttcattgctactctatggctacgtcttctaacctgtggggatggtagttgggtttttagaacactttgattgaacttgggtaagctaatttggcaattttcaaatactgtgtttgtgtttcctagcaacaactatcaggcccggttttggtacgggccggtaccaaaattcgttaacaaatggaatccatgttttaatacaaaatcccctttttttaggggaaataccaaaaggctttctaatttagtaaaatacaatttgacttataattatcataaaatatcaaattttaaattattaatgtcattgtattgcccaatttgactaaactaagtgagtattctaaggattcagcaaaactaagtaaataaataaaaatggagcattctaaggggatttttatatatatatatatatactagctaaaaagctacgtgcatagcacgtatactaaatttattgctaaattttttctatgttagtgaaaagtgatacaattaaaaattaaagaaaaaaatattattagttattaggtgagattattatta

SEQ ID NO: 330146 - DNA, 2302 bp, Cannabis indica
tacttgggccaaattgggaaggaccatacgaaattgaggatgaaatcggctctgggacctccaagcttaaaagaatggacggaaccacagtgcctagggcctggaatgctgatcacctccaaaagtactatgaatagttaaaaacaatgtttatattctgtaaaagaacctgtgccggacaaatgtatgcaacctcttatgtaattttttaagactaagtgacctaaaaatttcttttcatgtcacatagggggtattaaggcatatcatacgggcaaatataaataggataaacataagataactaaaaggttaaatacagttaaaaacacaaattgtttaaagagtaagaaaatccaaacaagaaaaggcttggggacgggccatgaaaagtctccccttaaaagaaagaagaattgtcttataggtaaggggaagaacaagataaaaaaaaatgagaaatatgcataaacaagaaaatcacttagtcagcctgaggaggaagatggggacccgtgcgctcttccagcactgcatcaagcctcttctttttctcctggaagcggaccagaacctctctaggtttgggataaaaaggaagacgaaggttatagtcattagttgtccagcacatgaaaaacccatcatcaaagtgcttctgacaatgttgacaagtgactggggcaaggagagcatccctttttgccttagcagcttcttaacgagcctgctctttgaactcacggagctccttcacttcaacagtcaatttaactgttgtttccaagtccgtctggtgcagctctcccaaagattttagcttggcagtcaattcttgaacttcttccttggaatcccgaagatccctcctcaccgcggaaatgacctcatccttggccttcagtgcctcccggtggttctgctccataggagactccttcttctaggcttccatacggattgcctttttctgctcctctggttctcagagacttttaattgcctcctccatacccccatattcgtacatggtgtatctgtgatcaattaacgtctttgagagatgaccgacctgtgctgaaatcaaggaaaagtttgagtgttggcaaaatgctaacaacaaagctcgatactttatgctgtccagcatggtcgacaccttgaaaataaggttcgccaatactctcatggttgcagatatcatgagcaacttaactgaactatttgggatggcatcagatcaagctcgttttgaggcgaccaagaattttattaatgcacggatgaaacctcatcagaacgtgcgtgatcacctgctccagatgactagttacttccaggaagctgagaatcatggagctactatagaccagacaactcaagtgagtttgatcttgaatactttgactctagcttttctgccctttacatcaaattatgtcatgaacaagttgacttttgacttccacgagttaatcaataaccttcagacatttaaaaatttgattggaggaccacagaaaggagtaattaaagctcctagttctggcactgctaatagtacggctatggctgaggcaaacattgcctctatttcgaaacccaaaaagaagaagtggaagaatagcaagaagcctcttaaagttgttaatacaactaataagaaaaaggctgctaatcccaatgtaaagcaaaaaggaaagtgcttctattgcaacgaaaatggccactggaaaccccagtgtcctaagtttttggcaaagatacaaggtatttctatccttgctataaacccatgtattttagagaattattatccccttgggttattaattctagatctaataaccaagtttattttcttcttattttaactccaactacttaaacttggattgctatcctagcgagttgagtctggttggacaaaagggtggagattgtctaagtgaagatgaagctcaaatcttctttaatttttgatttaattgttttagtttatgaacaatttagtttcaattattagtttagaattttattccctatttcatatttatgcagacaattcattatgattttttttttgagattattaaaattttctctttaaaaggttttcattatgaattgcatttatgaaattgagcttcatatttctttaacttgtatgccaatagcaattatattcatatgtctatcatgtttgtatgtgtttgtgttttattaatgatacaaaatctatggtatattaatctctgcaaagagataataccacataaacacttagaatttaaattcaatg

SEQ ID NO: 330147 - DNA, 911 bp, Cannabis indica
tgcatttgtgaaattaaccctttcaattaaggcaacgtagcgaatacctaatcaggaacttcttaattttcatagaaattaaatagtagatgacgggcttagcaacttctggagaagtcaagaaattgccaaaacggcgggaagaaaagttacaaatattcttcattaatgggatcaatcaaaattgattatttgtttatcttctaatgatatcttttgaatgaacaaatatgagaaaagatgaagttgaatgaatcaaacattcttttactctcaaaaaaacattctagacttttaggtgagggataattttgatgacttaatcaagccactttttgcataaaaccttccttgtattctatgtatatttcaagcaagagattagatgtatatataaaatgaggaatgtaatctatttatgcaagcatctacatttacctattattacagttgacattacaaaaggaaaaaatggtctttagttaccattaggtaatcacataaatgtatgtaaaactctttactaacaaataaataaataaataatttttttcttttacaaataatagactctgttgaaagatctttacctaaaataagtcgtatttgtaggtaaaaaagtgcagtagaatctacatcataagttcactgatgacaaaatgtataagatggggagtatggtgagtgtaacctacggtcttgtagtcctcactgtaaaaaaaaactatatctttatatattaaaagtgcctatttaacggcatttcttggtttaacagaatatacttaaaaaataaaagaatattctgtcaaatttaacgattacgtttgatctcccgttaataaataaacccaataattacaccgaaaaaattaaacaatcttttaaatattaataatctctttttaaat

SEQ ID NO: 330148 - DNA, 1104 bp, Cannabis indica
ggcatgagtcctagtggtgatgtttgtacctgtattgattggggcagcagtaggtgtaatgggggttatgatatggtagcaggtagttgctcagtctgaggttgagttgaggttgaaggatttaggacaggttgaggtgtgggatcatgagttgtggtagcttgttttaggagagaaactgaaggtatgttggttgttggagctagaatatttggttcaagtgaatgtgtttgttagccatggagaggggaaggttgagttaggacagggaatgaagagtgaccaggtctaggttgttgagaaacttgggctttagatgtgtggtgagaggggttataaacttggggtttaagttggaattgggtaaatatatttctgtttgagacatgggtaggctcaggttgcaaatccatatttgggacataaacagatacaattggtgtgctagtaaaaatattgttgctgatagtttgaaaattagaattggggcttttgctagtaatccttatccaaaaaggcatcttatagcaaatgtgttgttagggctcgatatggaatatctctctattttgcttttgcctgagcacaaaatagatctaacttagcaagaattgcaaggttctcttcttaattttgacaacaagcttgagcatctagaagatgtctgtccaaccaataaaacactaaataacccctcttgtaattttggtcaaagaccatccaactctaacattagggggaattactctagaagaggaagtagcttcaacaacaactaaggtcgtgggaattaatattaaggtaacactaacaggggtggcaacaacaataataataatagtaacagtaatcgtgtgagaggcagatacaataattgtatgctactgcagatacaatgacaattacatgggccaaccaccaaagctaggacaaatacagtcagatgactgcacttgttgctacaccttaaactcttaatgatgatgcttggtatgctgacaatggggctacgaatcaccttactcctgaacctgagaaaatgaccaacaaagcaaactatcatgctaaatgacttgcttcatgctccttcaataacaaaaaaaa

SEQ ID NO: 330149 - DNA, 591 bp, Cannabis indica
ggaggcctcacattcgtatcagaaagccccctgttatggtcttaacttcaacggggttcattaattgaaaaatacttaaaaaaaaaggatgtaaaaaagcctcccactcctaaaaagatttcaaaacttacaacagaaaatagaaggggatagagaaaagactttcatattgtattatatgacaattaggagacagggttggagtgcccctctctcccatgtcgtgacaggaaaaatttccttcctcactgaggtgtagaaatcccgcccaggcatgggcagagggtatttctacatcagtagcactagcatctgcatgagcatcaacaataacatggacaaaaagagaaggctagagatttcccaggtgaatagaataccatgccattatattaaaatatttgtaatttttgtttttgacaacaatattcataataaacaagccctactttgggtttaatgaggcaaggcctagtggtggtggctaaaggcactaatttaattttttattttttggaaaaaaaagtttgtttcttttaatgtgaatttctaaatgttcatctgagatgtctcaatcaatgagttaagaaa

SEQ ID NO: 330150 - DNA, 948 bp, Cannabis indica
tgaacataagttagtaacaggagcaaagtcgttaatttctaatcttaagaacgttaaaacttgggaattgtgagaacgttgctgaaaataaagaaaagaaaacgtctctatttaccaattaactaaatacgtttaaaaattattttaagtaatattatgtaattaaataaataaataaaaataatactgtaatttaataaataaatcttttctaaaaaaataaggtgcatgccatactagccagtttttttttgaaaaaggactaatcgtaagacttcaaaatgcacctttttattttttaatatttcatattgtataaggtttaggtgttcagttttttctattaatttattaatgttaatccatatgtatactttgtcaaaaaataaagagaagaaaaagttatacatatgtacatatgcaaggcaaaattttaattagaagaacgattaattttcaaataatgattaggattttgaaacaatttaagagtgattttttttctgtcttggtatataatttgttttcaatgtatgtattttcgttaaaacttttattttgattgttcttatggaaaaaaaaaacaaaatctaaccattagtttctacattttactgtttcatgccaattaaagcactcttaagaaaaataataataaataatcaatcaagaaactcttttaaaataaaaattcaaaaaacacaaattctattgctctttttcattgtttttttttcaataaattatgaaattttattaatagcaattagtcaaaataatagcctacaattcaattaaaacatctcctttggagataagactaaaactagaaattagaaaaaaaaagaacaaaataatcaagtcacctgatctcagatgtttgaaaaaaaaaatgaaaaaaattagaatgaaaaaaattcaagcatcacagttaatcttaaaaaagtc

SEQ ID NO: 330151 - DNA, 1379 bp, Cannabis indica
aacataaaatgttatttctgatctttattaataagtaaatttgattatatttaaatgagttttatttagggcataaaacccaacaattaatcccaataaatgagtgaaaattgttgcttatttatttcaaagtattagtagcgagtcattacttccagagactagccctaatacgaaagattctctagccatttttttaataccgatgggaaaaactattactggtggatcatactagtgttaaacctatataaaaccccctcttcatccttcagaaccctttctccctttcttctccttctctttggttgcacagacccctctcctcctattttttacaccgtctagccatcgctttgccctcactccaccctcgctctatcctcgctccagcttcacactgccctcgatctaccctcaacaaatattttatgtttgtattcttttttataacttcctatagataatttctaattcattttatcactctcattgtcctcctccatatttttagtccacgacaccattgacattcaaagttaggaccatcatcgattgtcctcaatatctgaaccgaaccactggactgcggtatgtatatcaaatttatataattttttgaatgtagatcttataaaatattataggtgtaaatatatgtgttttgtagtaatactttttagtatattatattcaatattatatgtatatatgttatacccaaaatttggctggaggacacgtgtcaagataaagggaatgtgattgattccattactttttatggaataactcattaattatgtaagtattagagtatatttgtaacctgctgactgtaaggtgttaggcaaggaatcaatgtacaaactggcacttagtatattagcgagaaactatatgtcgctaaatacgaatagtgaggcaccaaagaaagcaacacatatcaatcgtgaaagtccttagagtacaatgaacaaactaagtgtaaaagtcagatcgactcaagaacaagtaaaggaggtgaccgtctcaatatgggaagacttcatataacatcattgcgttagcatcggtgaggcttacaatcttgtcgagccagaagatagcattcaaacaaaccttgaagaattctttgacgataagaaccgcgatcaacaccaaacaaacatcatcgacctcagaaggaagaatgatctcaacttttgattaagattaatggaaccacgtttctgtattaaatcccacgattttagggataattgtcgtaaacatattcaggtcaactttgtaattaactgtccactatgtaattataaatagtgataaacaagatcaaaaaagggacgaaaaaaatcatacaagagagttcctaaaaa

SEQ ID NO: 330152 - DNA, 1159 bp, Cannabis indica
tcgtagtttttagaaatatatatattataaccttacacaatctattaatacaatacaagaccaacagtattgtattaaataatactaatacagtaaattacaatacgatcgtaaccaaacgactacccttaaactattattttaactactcaattaacattattaaaacaatgaatacacataaattacttatccatatacataataaattaacagacatgtgtgagttagatcgtaggtttcacacttattaatacgtattaaattatttaaagcacaagtttcccaacgaaaatgatgaaaaaaaagtagaaacaaaaacatctacattattgaaatgtttgtttcttccatcgccgtcttcaaagacatcgctgtcaattgcagcctcctctctggtcttctctattcctattctacttgtgatactgctactacgtacctccttctctcgtcgtgggccttggcttgtcctccctgctggggcgggcaagtgctttttgggctatttccttatgtgggctgttgtctccggcctcatttcccggcctgacgtaccgatcatgtgccttttcatgctcctggcggcccatgcttagtccttcttcaatagtgacatttatttttttcaatagtttcttggttttaaaaatttaaaaataaattacatcacataatgacaattatgagattataattggagttagtgctttgtagaattaatagggtttttcctctgttgcaaattctgctctttcgacggatttgtcttttccgtattaattagtaacatggaatgcatgttagttgtattagagttactattaccgaattattaatttatataatattaataaaactaaatccaatactattcaattatattttttaaatatataaaatttaagttagtttaaaatttgtttataaaaatatatctaactaattttattaaataataaaataagtaaattagtttagtttttttaaataatataactaataaatttattttgaagtatgattaattaaatgaattaacggctaattcaaatttaaattaagatttatataaaaaataattatctaatttgattaatacttttaaattaaatttaaatatttaaaactattcttttttcaaaaaataaaataatta

SEQ ID NO: 330153 - DNA, 624 bp, Cannabis indica
tctcatctttcaccttctttgcctcccaaatgtttgttctcttcttcttcttcccaaattccaaacagttcttttgtcgaacagttagaggacgcaaacaaagccacttctcaacccactgcgacgctctccattgatcgctctggtctacacactccacctggtaaaatcactcatttttcctattgggattttcgatttgttgctctttttttgttttttcttgtaatgagtaaggaacttaaattatttatttattatttttttggattggtagagcattcccatgaatctacatctgattctgagctcgtcaaacatctcaaaggcatcataaaggttctcatttccaactttttctttgattttgtgcatattttttgttttcaattatcgtctcaacttagtatttgcaaaatttgaatctttgttggtgaatattgatattgttatcatttcacaataatcagctgagatggttcattagagccattgtataatgtaatttacattagagataatttgcttgtttgaggttcattcttgttaagaggtacatgatcataacaaaaaaaaaaaagactaaaaactctcctagatgtcaaaacaaataaggatgtaccg

SEQ ID NO: 330154 - DNA, 705 bp, Cannabis indica
tgacgtactcgtgtataagagccatcattccgtgggtgtaagggcccaatagaggcttgaagcggggatgtttcatttatggtctaaataagggtcaaatgcataaggggtcttataaaataatttaagattattataatatgaactataagctacaagatcttaacatatttacatagattaaatctaactatgagttaagaataatatataccttttgtagcttatcaggatatccttgtatctttttcgtacattcaaataatcatctaatctaacaaatttgatttggcaagaatccacactataaatcttctaattctgcctcaacactacatgacaagtgtggtcttgtaggatcaatttcataatgatggatttattatcatagtgtgaactcaaatcataagacactctgatgatgagagagagggaggaacccacaattaaattacacaagagagagggaggggggggttgaccacttatttttctatattttagattattgtatcgatcatattctaatcatttttcgtatatcatatatatagccatttatttaaccccataaagattaaaataataatttatttaaatctaaatgcaaataaataactaagtaggtatgtatttatttatttaatgatttaataataaatatcttatcttataaaataattaattaaataaatagtttatttt

SEQ ID NO: 330155 - DNA, 512 bp, Cannabis indica
cgagagtcactcgacatgcaagcgataagagtcactcgacatgcttacaaccagacccattggacatgcttacactaagggaaactcggcaggcatgcaatgagggtcactcgacatgcaagcaacaagagtcactcgacatgcatgcaccaagagtcacttgacatccatgcgacaagatccattcaatatgcttgcgccaatggtgacttggcatccattcaacaagggccacttgcccataaccacttggccacaaccactcgcccacaagggaactcaaccacaaggtcgaaactcgacatggatgctatgacgaccactcaacttgcttgcaagttggcgtgcatgtcctacacttgattattgcaataactcgtaacgtcccacaatgaaatgagcaacacttagtaaagttgttaaaaaaagaatcaaaagggaaaggcaagcacgcggatgagtacatatcaaaggtacaaacaacatcacctgcaacatctgagcacaggttt

SEQ ID NO: 330156 - DNA, 738 bp, Cannabis indica
tataaaagggatagttagaatagaaaccctaaaattcctctctctatcgatctctatctttctctcccccctatttggtgcggcgatatactcctcattctctgaccattttttttccttcttccagccatgctccggccatcaaatcctcaagctctaccccagtaaactctgaagcccttaacctttcccatcccttgttccctcttctgttgatcagcgacgttgctaggtgaacgatgatggtccaaatggaccacatcacagtgctcgcaacgcccaaaatttcgagcgatgagaagagcagagatctcgacgtacgaccagagtagtcaccggtggccattcgcaggcctcgacgaacgacgaccatcccttttgcacctccagtttaatctttctggggtttgatattaggcaattcatttgtagtttttttttttttatatagatttagagattttagttttgatttaaattgtatgttgtttgtgtccacttcttttattgttctaaggtttatcatttagttcaaatgatgaataaactttttactaatgtttactcattttgtttgttgattctgatttttattttgtaatgaagaaaagagactttttgtgtatagatttgttattattaattctgtatagatttttgatgaattgatttttgattttgtataattgtgatattttttatattggtttattaataatattataattaaaattaaaa

SEQ ID NO: 330157 - DNA, 942 bp, Cannabis indica
tgacgtactcgtgtataagagccattattccgtgggtgtaagggcccaatgaaagcttaaagtggggacgttacaactcgcactacagaaaaatagctacatttactaacaacttgctagtcaacataaattttttgtgattaaatgtgacttttagtcacaacaaaaagttacttgtgactaaaatatagtatttagatacaagttgtcactaatttagttttaatcataatacgtattatgaataaaaacacatttagccgcaataaattgtgatttttgtgactaatacctttagcaacataccttttagtcacagaattatgatttataagtagtcacaaattttgttgtaactaaaagtaagatttttttgtagtgttggtgtattattttaaaaaaatacaaagtgaattgtcattttctaaattgaaaggtccaattgatgatttttgtaaaacacaagtgttaccaaatgattttttcacctatataacaagtgcaatctcatatataattgacatatggactcatacccatgaagagtaaggatgacgtgtcaaggatataaaccccgataaatgaaatatcttcgcatgatagtagaatgcaagaaggctagtggctgagacaatttctaatcgcacattatgcatcacataacaataatataaaaggaggaactttacttgtatctttagccttagtgttccagttggcccggtgacaagggcgcaagccaagagattcaaagaagaactcgacaacttagtcaacagaattttaaaacaagaggagaccgcagtcaacactgaaggagagcaaaaatttgtgtttctcatcaaagtggactcaatttagacccaagttgagcttatcacgctttccaaggcaattggcagctttcttttttaatttttttcctttattttgtctttgttt

SEQ ID NO: 330158 - DNA, 917 bp, Cannabis indica
aatattatgtgtgatcccatgagaatgtccaaattgcaataggaaaaggaaaacaataaataattaaagaaactcaatcgtaaatgtacacagaaaaacccaatagtattttttttttggatttaataggatttattttattatatataaataaaaactgaactcaaaaatttctcataaattattttatttttaataataaaccattttatttttaatataaattaaaagtcaccccatgaatttctcataaatcaaaaattctgttacatagtcacactttatataaaatagatttttccatttttttttcaagaggaacgactgtcatctcacctttatacgggtccgactataactaaattatatatgtatataattttgggtagacacacatttttctcacaatatcaaattgtcttattatctctccctaaatatgtatcctaataatatcttctataagccaaggatgttggcctaaaggtcatacacacacacacattgattgacggtatactgctataataattaaggagacacatgcattgtcgagaaaaatttacttaggagtagaaaaagaacttaattatatctaatcatttattaaagaaattttaactgtaaatattttttcatatacatatgtataaagcttgttaggtggggcatcgtttctgcccatagtgctttttgttttcgacacttaagaggaattatattctattttttttgttgaaagacaagatgtgtactaagtatatattttatctattttgagaaattttaaataatttatgatgtcaaatataaaatttaaaataatcaattgtacaagttgtaaaacaaaatacttacttgtgtaactgactatttaaattaaattttttgcattgtaaattattttgatttttttt

SEQ ID NO: 330159 - DNA, 1374 bp, Cannabis indica
gacattcccaatgtctaacaacccgtcccaaactaataacatactaagttgtgatttctactgagccaaacgccgagctccaaaataccgggcaccggaaatgcaaaatatgaaaactattgaataacataaccatgcatttctgaattccataaataacagtaataaattatttaaatagctataaatgatttcataattaatcataaacaactgctaatttccaaattaactaagcgggctttacaaattatgtgtactgttgtatatatatgtctttgaattaaatattatttttgcatatatatatgttacagtatatatatttatgttactgtatatacatattttattaaagttttagacatatttatatataatgtttcagtactgtgtcatatatatatgttacagtataatttttgtagtgcagacaatttaattcaaattttggtgttggtttatgtctaatattttgagtaaattaattgaaacaatatgtcgccaaagtgacctcttttgtgtagattaatttacttcaaatattaggatggttgtgtgtttgtaattgatgcatatattgactaacctaaaggtaagtaatattttgctaaatgtcaaacatacctgtggcgataaatgtgtgacaattataaggtattttggacaatacgttagtccaaagattaatctattgtttgacacagttttattgtcaatatttgattgctacaccaagagtaccgcttacagttaatattactgtccaaagacttgatattaatgtgtgtttggtatcttgagatgggattaaccaatttttgaatttattgtttaattatgcatattaatgtgagcttgttttatttgttctatattcagctagttcatcttctgctgcctcaatatctgctaacattaattctattcctatgcttaatgggaccaatttcaaggattggaaaaggaacctacttatagttctgggatgtatggatttagaccatgcactaaggaatgaacaacctgcacctctcactaaggaaagttcccatgatgataaaagggaatttgagaggtgggatcgttcaaatcgcatgagtctaatgattatgaaacacagcattccagaagccttttggggcacagaatccgaaggggttactatggctaagaatttccttgaacaaattgaggaacgttttgctaaaaacgataaggttgaaatgacaacacttcttggttctttaatgaacatgaagtataagggtcaaggaaatgtaagggagtacattatggaaatgcatcatattgtctcaagattaaggacacttaagattgagctttcagatgatgtacttgtactcatggttt

SEQ ID NO: 330160 - DNA, 1313 bp, Cannabis indica
tgggcttttttccatcagaggtttggatctttgcctccgacctccttgcccgacaattttttctgtaacgaccgacaggtgtaactgatttgctaatatattgcacgctcaaaaaaaaaaaaaaaactgtccttgcaaggttctttatttcttgaagccctaatagtaataattacttttttactaataatttttcttttttagaatgttcaataaaaattaatattaaagtgtgcataccgaacatgctccacaacgtttttttttcttaacacaaaactccacaacattaattttgggtttgagtacaggaaatatgttgtctaaataaattgacgtatcacctaattagatatgattttttctatacatataatagtataagcctatcgcctacatatatatatatatacattggacaaaaactaatcacacaataactcattgaagttgatcacagcagttagcatatattataaactaaaactctcatcatttccaaaaatggccaaactcttcaaacaaccaccctaaacctactcatctcactaacttttgtgttctctttcttgagactcaccaccgcaaatgatgattactacaacttagtacaaagaaaacacgggtttaagcatgagaagctgacccattttcacttctatttccacgatacagtaagtggcaagaacccgacgaacgtccaagtggccgaggcgccaacgacgaacacttcggccacattttttggcatggtcgcagtgttagacgaccctttgacggtgggactagatccaacttccaagcaagtgggaagagctcaaggaatcatggcaatggcttctctgtccgatgtgggacttttaatgagtttgaactatgttttcactgaaggtaaatacaacggtagctgccttagcatattgggacacaactccatactttcggcgcttagagagatgcctgtagttggtggaactggacttttcaggttcgcaagaggctatgctctagccaagacttatatggtcaatgccactagtcatgatgctattgtggagtacgatgtttatgtcttgcatttttagtattaattgagaatcatcgtatctttacatacatatacgtatctttatatattaaaagtgcctatctaacggcatttcttcgtttaacagaatataccttacaaataaaagaatattctgttaaatttaacgtaggtttgatcctcccgttaactttcaaaaatatataaataaataaacccaataattaaaccaaaaattaaacaatctttttttaaataaaaaaaa

SEQ ID NO: 330161 - DNA, 784 bp, Cannabis indica
tctatttataatcactatgatgtcaatttttactaactctgtttcaagaaaaataaattctaagatgcctctttaccccatttaatgcacccttctagaatcatgccaagactggagcataaaaatacttaaattgtgtaacattttaattacacaaattagcttgactgtcaggagctatgtgcttcagaggggaaaaggagattaactatgaaattcccttttccagcctaaggaaaaaagaaactaagaattctcttaatttggcagaagaacaacataaaacaaaaggaccctttctcttaataactattataaactaagcaatcatcaaccaaatcctatacaatgcaccaagaccaaacttgaattaggcacataacttgtttataaattattttctctacattctcattcagatttaaaacaagaggaatcgaatataaaatagccaacaaattatgacaatacagcactagttattgattaagacttaaatatgacattcccatgcaaacattgcagtaaagtttttttaattattaatattttattttgaaagatttcattaactcataagattaaaaaatacacaaattgaaatagcatcaagcccaaatgcagaggagatccctggccactagactagtgtcttgtaaagttatgccaacttagctaaacagggggctatggtatgacattcctatagcagtgcaaaaaaaaaaaaaaaacgaagtaaagtactttggtccaaataatcatttcaaaggaagataggcccaaa

SEQ ID NO: 330162 - DNA, 529 bp, Cannabis indica
tttttataaaaaattataaatttatgagttttatacgtttttataaaaatattagaaaatcaagtaagggtaattagatacattcaggtaaccagaggggtaaccagttacaataagaggtaatcaggtatcgtatgctatttttctatatttttttttacttttttctaaaattttctaaacttatactctcaaaatcataaaaatgaaaattcccttcttttattgacagtagtatgaaactaaaattattcgaatgactgacccaatttgcaaaaacctttattcttttcaaatttgacatctttatacatggattcgtaccaactaccccattttgcaaaaaataattaggtggcgtttggttggaggtaatgaaatggaatggaatggaaaagaaacaattttcattccattctttgtttagttgcatttaaagtattggaatggcattctaatggaatgctctttccaccattttggtggaatggctattctattttaaaaagaaaggaatgaccattccaat

SEQ ID NO: 330163 - DNA, 2345 bp, Cannabis indica
atgaagatggtaaaggttaggcaaaatatatatatatatatatatttgaataggtatatgggatataaatgcccacgtggtatgtaatatttattaggtgacagaggtgaaaactgaaaagacagccacagcctctctctcacactttccaattttaaaataaataaaaagtatatgtcttttgacttttctagcagctagcatgaaaatttgtgcttaattttcgagtttcggatttacaaccgaaactatatttgtcttactttaaaatctgaacctgacacccgtgtggagcactttcgggttagatccgacccgaccatacgggtttttaatttttctaacttttttgggcagcgtgtcggggcgggtggctggatttttcgggtttacggatctaaatgttcagccctactttacattgtggcgtgccaagatgagggctttgcttgttcaacagggtctacaagctgctcttctggtagaaagaaatctaccagagggattaactccaaaagagaagacaaacattcttcaaaaggctcatagttcttagagaagtgtcaaaagaagattcagcagctggagtatgattgaaaccagagagtttgtacatgacaaagtcactagctaacaggttatttttgaagcagaaattgtattctttaaagatgatatcagggaagagcattgaagatcatcttaatgattttaataaggtgatactcgatctagaaatatagggatcacaatcgaggatgatgatcaagcaatcatattactgaattctcttcccacgaagagttatgagcattttttggataccatgatgtatggtaaggattcactgatattagaggaagtttagaatgcattaatgtaaaaggaattgaagagaaagttagaatagcaagaagaaggtgttgggaatggattgttgatcaaaggtaaaactccaaagaaggatagtaaaggtcagaacaattcaaataaaggcaatcataatttaaagttcaagaagagatgctttgtatgtaataaaactactcatctaagaagagattgtcttgtcttgaagaactacaattctaagaaagatggtgatgctgatgtagtttcagatggagaaaatactgatggatacgacagtgctagtcttttcaaaatctccaagaatggatcagaagatgtttggataattgacttaggttgttcttttcatatctgtccagatagaagccagtttttgagttatgcaactgttaaaactggtactgtgaagcttagggataaccaatcttgtccagttcttggaattggtactgtcatgttgaaatctagatggaggaaagttactgaattaaggcatgttcaacatgtaccagatatcaaaagaaatatgatctcagttactatgatggatcaagatgggtgatttattaaagttgaaatggtatgttgaaggtaataaagggatctatgacaatcatgactggagttagttggaatggtatctatatattgaatggaacttcagccaagaaccatgttaatgccaccactcagataacaacagatcaacaatgatttggcacaaaaagcttcgccatatcagccttggtgacatggatctatgtgtgagcaatgtgtgcttgggaaatcaacaaagatcaaatttggaattggaaagcacacctcaagcaacaaaatagactacatgcactcagatttatagggaccttcaaggactctctcagaggtggagcaaggtactttctaactgttatagatgattataccaaatatgtgtggattcatattttgaataataaaaatgatgcctttaacaagttcagagagctaagagccatgcttgaaactcaacctggaaagaaattaagaaattgggaactgataatggcctggagttctgtgcagatttgtttaatgattcttgcagaaaggttagtattggaaggcacctaacagtcccaaggaaccctcagcaaaatggccttgctgagagaatgaatgtaatcattcttgaaagggtaagatgcatgttaatatgctctagtttgcctaagattttttgggcagaggctgctgtcacattatgctatctaatcagtggatgtccttcatctacaataaatttcaaaactccaactgaaatgtggtgtggctatgttaccagctatgatcatttgaagatctttggatgtgtggcttatgctcacattagacaaggaaaacttgatcctagagctagaaaatgcattttcttaagataccttgaaggagtaaaaaggtataagatatagagcatagaagaaggaaatcat

SEQ ID NO: 330164 - DNA, 1070 bp, Cannabis indica
accctatctattttagaataaatcctctcatctccaatctgcttattacaccatgtataaaaatttccaggatatttcacatctttaaggtggcactcattaacataatcccaaaattccgaagagtttttacacctgacattgctgcctattctttcatccctacaaagaatatcattaaagtcaccaaggacaattcaagcatcatctcttgctatatctctcaagtacccccataagactcttctcccaacctcatcattaaaaccatagacaaaagccacaaaaaaatttgtttttttagccatagtttcaacgaagagatgtatgagttgacttgtacactttaaaatggtaacagtaaaactattaagattccaactaactgtaatatatcctcccttatgccaagcattattcgatgtaaaacaccaacctgaaaacattagaatttataaggctcccaagttcggagccttaaccttgtctcgagaagaccaacaagccctacttgactagactttgcttttgttgggtattgatccctcggacattccaactcaaaatcttatccattattgagagaggaacctccccctctcctgtatcaacttcttccacttgcttgcccttcttcccattattctatttaccagattgctctactactgctgcattattattatttttttcttttgcccccaaaactaagaaagagtagctagttgaagcagcaataggttccatttctgttcttattttccagcatttggtgacaggttggaaaccttcagcatcaacattatctgtttctcactctcttttgccccatcatgttgcttgcctaggtttttcagcacccactggtgtcactactacaaaaacaccctttagaggcggtttttaagccctttaggcgtcggttttcgcgaaattcgctaccgacgcctatcagggcgacgctaaagggtttatttgaaccgacgccataggtggcgtagcaaccgacggtaaagggtctcgcgaatttcagtttttcgattttttttttaatttaattatattatttt

SEQ ID NO: 330165 - DNA, 2214 bp, Cannabis indica
tataagatttttgacttttaatgcttcagcgattctcaagcaagctaacaaagcttcatactcggccttgttgtttgaagtgtcaaattggaatcttaatgcatagtgaaatttgaatttatttggtgacatcattatcactcctgcctcagagccattctcatttgatgctccatccacatataatttccaagtgtctgtatcgtgcttgacgagtggatctttttctgaaattatcccttcaattaagaaatcggccaaagcttgatcattgattgatgatcttaggtggtaggttatatcgaattgtcccagctcgattgactattttcttaatcttcctgatgcatcaggttttgataaaacttgtcttaatagttgacccgttaagacttttacgggatgtgcctgaaattaaggtcgtagtttgcgagatgcatgaattagacataaatcaagttttccaagagggggttatctcgattttgctcccagtaaccttttactaacatagtaaacaggttgctggtgtttttcctcttctcccaccaaggctgcactaattgcactctccgagacaactaagtaaaggtataaagtttctctagttattggtttggtcaaaaattgaggtgttgataaatgttttttatatgcctttaaatgcttcctcacattcttctgtccatttaaacttcttattgcctcgtaaaatattaaagaatggtagacatttattagttgattttgaaataaatctatttaatgctgccattcttcctgttaaagtctgcacttctttcagttttgtgggtgaaggcttcttcattaaggccttgattttttctagattttcctcaactccccacgcattaactacgaaaccaagaaattttcttgaggagactccaaaagaacatttcttcgggttaagattcatattgtattttctaagtatttaaaagcattctgcgaggtcttttgtatgatcataaaaatttatcgactttatcaacatatcatcaacgtagagttccatatttcatccaatctgcttttcaaacatcccattcactagccggtgatatgttgtagcattcactaaaccaaaaggcatgactctataacaataaagtcctgtgttggtcaccaaaattgtacgttcttgatcagggacatgcattttgctttggttatatccaaaatatgtgtccatgaatgtcatcaactcgtgtcctacagttgcatccaccaactcgtcaatccttggtagtgggaaacaatcttttagacatgctttatttaagtttgaaaaattaatacaagtcctccaagtgttgtttggtttcgagacaagaataggatttgaaatctatgaggggtagaaggcctcgcatatgaaatcattggttaataacttgtccacttcttctttaagtgccccttgcctcttagaatctaagggttgcctattctgcctttttgctgggtaattggggtcaatattcaaatgatggcaaatcagcttagggtcaatccctatcatatctgaattgatccaggaaaattgaccttggttttcctttagaaagttagttaactgctattttagtttttcatctagatttttcccaataaacacacatttagtgggattgtctggatctaaaataacttcttccaattcttcaattggtttgaactagtttttttcgtcttggattctagggtctagatcctctttcttcttctcgccttcttctgccatgaccaccattaatttatggttggctcttgtactttgaaattctacgcgataacattcgcgagccaacaactggtctccttccactacacctactcctgcaggtgtttagaattttagagataggtatttgattgaactaactacccctagtccaatcaatggagggcgacccatcaatatgttataaacttatggtagatcaacaactaagaactcttgcatcagtattgtagacaatggttgctctcctacagttaatgggagtctaatgatgccttgactggcaacactatcaccagtaaatctgcataagctcaccatgccaggttttaactttgcattttgtagcccaattttattcaacatatctttgtaaaggatatataccgagctttaattatccaccaacactcttttttattctcttgttggcgagttgaactgta

SEQ ID NO: 330166 - DNA, 793 bp, Cannabis indica
aaaaaaaaaaaattaacatattttttaaaatttatataattagaataattagttagaatctttaataagattattgcaatgattaattgattttcaccacttaatttgttaataataatcttattgtccaatttaattttttgtaatcaaagtaattaatccatgtaatttttactacaattgaaaatattcattaacaatttttgtcattaattagtttgttagtttgttaccatgaagtgtgataactaaaatataagattgtgaaacttaaatctaaataaatgtatcgagtcttctttgatttttaccattgatttatgttagctaacaaatctgttaatcgttttttagttagttgatgttagttaagtgttgattcttgtttgttatgtatgttaaaatatacttgtactctgtatcaaacagtatataataaaatgtctctagctaactatttctagttaaacttttcttggcatcaaattcttggttctgacttttgctatgcttttccttctttcttctttaactctgttttctgccattgataagctactacatggtatcaatcgccattgatcactgtcactaatggcatccactggaactaactccggcgttcaacttgatccttcaaactccacggctaccgctgctactactcaaccacatgctctagcacactgaaatcctttttccaattctctctctgcctccctcactgttgagtcttgtttgttatttctgttaaaatatacttgtactctgtatcaaacagtatataataaaa

SEQ ID NO: 330167 - DNA, 508 bp, Cannabis indica
tcttcactggaagctgtgggacaacattggaccatgttgtgttgatcgttgggtatggtcaagctgaagatgggaccaaatattgggtgattaaaaattcatggggagaacaatagggtgagaaaggttacatgagaattcagagaaattctggtcctgcacaaggaaaatgtggtattgccatgtctgcttcatatccaattgcctaattaatattttaataagatcaatgttctatattgcaatggttattgtttttatgcaatttggaagtatgatcttgtgtgattatgattctcttcttaccttcaacttatatctaatcaataattatgttaatattaatggtgagcactgtcacatttggttatttactatattcttctttaaatatcttaactaacttagattcactataataaaataataactaataaaaataaatattactaatttttttttggaaaatcaatatgaaatattacataattgaattcatgctaaacaa

SEQ ID NO: 330168 - DNA, 901 bp, Cannabis indica
ataaataatttagtatttttctttttgataaatcaaagattcgttagattataaacaaaaccttacaagagtagtatagttcacctttttagttatatttcatatttacaaagttacaatccactgttcatctattcaattgacattcttaagctttaaactatgaatcctacttttgacttcatgaattatattctaaccaaccccttccacccgcctgacttggtgtagccaaagtgctttatttcttatcttccaaattaacttgatacactaaagtagcaactagagtgggattgaactctccacccaagctgcttcttaatttcacacatagacatttgtaactaaatgggcaatcaaagatacatgctcaatatgttccatatcatgaccacatagtaaggaattgctatcaacaacaatgttatgcttaagaagtctttatttgatttttaatctattcaacacaaccagccacaaaataatactatgctttggtaaatttgaaccaaccccatacctcttcgctccaatggacaagagtttgaggaggactcaaaaccaatatccttcctttatggagtaggcctctctatcaaattgttgctgatcaatgcatgccttgaatttgctctttaacagctacgattttcttccaataccagcgcaatgccaattgattatcctctttaatatatattagaggtattcatttgactgaatctgtactattttgctcatggtgcatttgatccacactaagtgcgaattttatatgggaaatttacacagtttactgtgttttcccattttatttcttttatttcaattttatgttattgttttgttttttttttagattgattgggacatgggctcaattatttatttaattttt

SEQ ID NO: 330169 - DNA, 817 bp, Cannabis indica
tttttttatttaataaaaaatttcaattgttttcagggtaagaaaacaaattatcgggtttaaaagggattgaattcatatatactagcaagtaattaattaaagtaagtgcttacattttttttttatttgatgtatttgtgcaagtacaggtatataaactaatttttaattatatgtataatataataatcatggtcttcataagatatcgatcgcttaattaataatgtattatggtcaagtaattaattgggttatcatcccttttaagtacatgtattaggatcagaaaggaaggatcctatgttgtggaggaaaatatgcataaatgcatggatcactttcttcattgaactaattaaaaggttcaatttggcaactcttattcattcttttttatatttcattttcgactgcacatgtatatccattcacgtgtttgcttctttttataaaatatcttaaatagttaattaacaaagcacgatttatcttcaacaaccaaaaaaaaaaaaaaatgcatgaattatcagaaaatcagcgtgacttttccaccttatctttagggtttgaattttattaatgttgcagctggccttgtactgtatttgtttgtccctaatatcaaagtaatttatttaattaatacacttttttccctagtagccctatacaagaaaaatctaaaataagttgttcaataaaaaaaaaaaatatcctaaatgatgctgttgattatttttcacatttgaacaacaaccatataatatatatatataatgtaaaaagcacacttttagtcacaataaaattt

SEQ ID NO: 330170 - DNA, 1398 bp, Cannabis indica
ttgtattaggacagctaagggaatcgagtatcttcaccaaggttgcgataaacgaatactacattttgatattaagccccaaacatcttgttagaccacaattacaaaccgaagattgctgatttcggctttgccaagaaacttcggtaatgtctcctacaagtcagatgtttatagttttggtatgctattactcgaaattataggagagagaagaagtaataatacaaatgaaatttactatcctgaatggattttcaatcttttagaagaaggtgaggaccttcgaatctatatcgatgaaggaggagatggtaaaattgcaaaaaaaactagcaatggtaggacttcaatgtattcaatgccatccaatagatcgtccgtccaaccatgaaagttgtagttcaaatcttgttggaaaggaagtgaagagttaagtatgccaccaaatccgttttcatccacagacccatccaaacaaaataccaagatgccacagagatttatcacaactacggaactagaaactatagctgagtgaaaaagaaaaaaaattattttttttacaaattttgttagtcgactccattcgcatgtaattgtttttgttccattacaagtatatatacaacacctttttttttctcatcaaggcctgattgtaaaactatttaaggaactatatacccatttacaaagtgtcaaagcaatttttatctatactatttactttttttttgggcatgatactatattctatgtttaaccacatatagtttatatcctgtataagtgaatccgggctctcctcacttgatcatgccacaaagcggtattccgaactgtccaaattaagtacaccatggctgccaaatatgctgagaaaaccatgttcctaaatttggaaatgtgagctcttctaatccaccagactaaattgaaaagcactttacgatattcacattccacccaagatgggcttttacatcttgaaaacacatgttgtgtttgattgcccttgtaatatacacatacacacacttacttgtactcgatacaagtattaggttattagttagttataagaatataactgttttgacagttatgacagttagtgtccttagctcttgttcgacacttataaaagtttcaattcgggcttatgtggatttccacttaaatcatgcaaacatcatcaccaacctctcaagaagaagagaaggaggaacatgcaaacggatttgatgggaaaattgtgttgatgggatatggaagtggaataattgttattggtttttcactagggtaaattattaatgggtctggtcgaaactaggggtgtacggaggtcggtttggtcaggttatagcatatttttactaacctaatataaat

SEQ ID NO: 330171 - DNA, 1247 bp, Cannabis indica
acatgtcaaagttcaggggacaaaaatcctaattagccttaaaattgtaaattgatatattaatatatgtattatgtacataaatattacataaatagaatctcgtaaattattttgcttcatgagtcatgactctaatattatttactgaaatacttgcaaaagattcatataggctaataactatataaatataactaaaactaataaattcttgataattaaaacgtaaatagttgttaataatgttaagtacgtgtgtaaaatattttaatttatacatcaccaatttttttcatattcttgttttagaaggtaaaacacatacaaaaacaaagtgtatgacaaaaaataaaaaaataaaaacttatctactaacaacaaatttctttagtaaatgctttagcctgaataaaaatttctttagtaaatctgctatgacctgaaaattagactttaagaattaattatgttaaattaggtaaaatagattcaattgaaattaattaccttaaactttaatcatgctctcatcttaattaattgctttatttatttattttgttatttaatttttatttagattacttagttttaagatactttcatttaagagtgtaaatgggtcgggtcggatctgatccagctatgatccgacttgatccagatcatgtaagaatctgtcccaccctgtcccgctagatcacatactcggatcggatcagatctgatccgacttattcaaatcgaatttgatccggcccgactctttttttttttaaaaaaaaagatttttaatattaacttataattttatatccattttaattttgtattagtattattaaatgcaatactatgttggtattgacatgaattaatagattgtgtaaagatctgggtccgggttcgggttcgggtcccgagtcccgagtcccagtccgggttcggggctgggtcccgagttcgggtctgagtaaagtttaagctacaccaaattgcactagcaataggattaacaagttgttgcagcgaggcattgtaaagtttaacaactttaaacactccaccacagcctgcagcagacaattcagactggttgaagacagttcgcaatcgacaaaactacctccaataccaattcacatttaatatttttattttttaattttttaactaaaataataaaaatattttttttaaaaaaaaatatgttctataactacatttatttttcaattttaaaa

SEQ ID NO: 330172 - DNA, 728 bp, Cannabis indica
tttatatatttttttacacattatatatatgtaaataaataaaccgtaaaatctttcttttattgtagttttataaaatattttaattttttttcgtgtgtaaatcaacaaaatatatgaacaaaaaaatataattttatcaaagttacttctattatgattttcaacttcaattagtctaaactcactttctactctattttgaactgtctctgttatttgacgttgttagtttttttttttttttttttttataacataaatatttcaataatgccatttttctaaggattatgtaagcattatctaagagacggcaaaatagagtaggaaatatatttctagtatttctccttttaattactctctttacacatgtcagtacatggcatcaatttgtaaatgttgaaattaaaaaagacaatatctccttattctagtagtcataaatttaatcctaatttaaaccttatattttatttgtttttttaataaataaaatataaatacacctaaaaaagacaaaaaaaattcaaaatttggtgtaaatttaaagtatcttaaccaccaattattctatttaattattgtatatatttaaaaataacaattgtacattaatatatttttaaatcttaaagtggactttagctctccctcagcacttctaaatcggcctatgaataaaaaagggaaatttaattttctatacttacatatacctaata

SEQ ID NO: 330173 - DNA, 1429 bp, Cannabis indica
gcataaaacccaacaatatcaaccaacgctcagtacgctagtcatactttagacgtactaatgtgatagcgtcgatcagtatatgagccaaacatacatctatcaatatccaatataattcaacctatactgataccgctatcgatgtaatctaacaggcttaataaacatgtacactaaacatgtaaacacctttgcatatcattatactaatcttacctagtttccgaattcaggtgtgccagccaacctgagtggaacaggtgctcgatgaattacaggaccctaaatcacatagttcgtaaaactggtgagtgacacgctaaatcactttttagggacttgaacttgaaactaaaagtttccctatcaatgaataacatggcaatatcctaaatattgcaaaaataggaaaaattagggttcccaaaaatgccccaaccggtagaccggttcccagaccagaattttggttctgcatggtttcctagggaccaaccagtcgaccggttcctataggtccctttgaaccaatcgaccaattcagagcaggaaacacaaaaaaattcactacactctcattttgaccccaaactttacgaaaccttcaagacctttttaatataacacaatagacatattccatgcaataaaataactcaacatgctcaaaatcaaaaatttccattaaagaccaaagtcttagttctaaccaacaacctaaacaagccacaacctagcctcaaatcacctcaaatagcataatttaaacctcagaacataaactcaagcagcaagaacaaaaacaaaacctgaacccaaaatcatacaaaaccttaacttacaacttaagaaattcaagggaaaagatgctagagtggttacctccaattagaacactaaatccttgttataatcctctgaattgttgaagaaaaaagttcactaagtggttgcagtatgcagtggttgcggttgcttacctcactaagtggacggaagccgaaccatttgcaaccattacatccaaaaaagtttcggacaatggcaaacagtttgacggctagtccttcactgattcttgtgcgaaccatggtatcatcaaaagtttctccgcagtggcgcatccccatacaaatggtcaagttgaagcagtcaacaagaccctaaaggatacactaaagaaaagactcgaggatgttaaaggaaactggccggaagagcttcctgaagttctatggtcgtaccgaacaaatgagaaaatgacaaccggacaaactccatttgccatggcatatggatatgaagcaatgctgcccgtagaactcgagccaccatcccacagaagattgacgtacaaccaagaagcaaatcacgtactccttgccgaatcacttgatgaagtcgaagagaagcgaaccacagcaaa

SEQ ID NO: 330174 - DNA, 841 bp, Cannabis indica
atctcgcgtatctttaaccttagtaataaccaacttacagggttgataccacgaggcacacaaataagtacatttccaaattcttccttttatggaaacgaagaattatgtggcgttccattatcaaaggaatgtgagagtaatgatgtcacaccaagcacgagtcttgatcatgaatctgaatttgaatttgagattggttttggttggaaaccagttgttataggatatggatgcggatttcttggtggagttttggctggatatctcttcatttccaagaaataaaaaggtatcttaataatttatttaacattcagagctgtaatttttttttctcctactatcatttacttataaatacttttcttaaagccaacttttctccattttttgatcactcgccattcttgctctcctctaagtggaaatacttttttcatgtggagcttttagaggaagaaaaataagttttcaagaacatgtttgacattgatgatgtaattatatatgaacctatcagtaggttaaatcaatttgtttagcaactatgattgctaatttttattgtggacattgttccacatagaataaatagtaaagaattgagccatatataaaaacatgagctactccactcattgccaattagttttgagatggcaccccatgattctcaataattttcaacgagagatacttattcttatgtctttagatcattgttagaggttgtttttaattttctaggagtgtccctaatgagtgctactcatagacaactttgtttttttttttttttttaaataaaagatagtgtttattcaataactttcagtag

SEQ ID NO: 330175 - DNA, 706 bp, Cannabis indica
aatccaattcaatttgcacagggacgaatatttgtactttgcagactgaattggattggatcatgcgaagtggattaaattttatattttatgaacacccctaggtgaaatgtatttaatttatctctatttatcaactatcatctaccgcgctacttgtttcacgatgaaattaaatagaatgtgaaaaattgtatttttgtatatgttaataaatttcgttaataatagtaaaaaaatacaactacaaagatctacaataacatattgaaaacttattagtgctgaacacagatttgcaattacaaaacataaataatagtgtagaatataaaaacctgacattagagaattatatgtagtatcagtgttctttcaaatattcctagtccacggggccacactcaaagaacgaaatcaattagtaaaatctcaaacaattacaaatataattgacttaaacaagtttagactccttgtaaaactttactgcaatcctttgtaattcattttgccaatctaatttttgagcaccaccaaataacgaacttccttcgacttttgctatgtgtgtgcttacttcctcccgaagtaaagcttgaacaagtcttctcaaagacctttctcttgttcaatgaacctcaacctgttctaaaaataatataagaacaataatacaaagactaaaacctagatgaacactcta

SEQ ID NO: 330176 - DNA, 455 bp, Cannabis indica
ggcataaaacccaacagcatcttcttttagcctttgaattttcctttctcttatttgattcttctttcccactgttctccttcttgaaagttttccctcaaaccagcaatccttctcttgaattgtcttctttcaattctgctctcttttttatctacttagatatcagtgaattctgcacctcttccaatgccaaggaattcttaccatacaccatacatcatggtatccacgaaatgctcataactttttgtgagaagagagttgagaactatgatagcttggtcctcatcttcaatctttgatccctatattctttagatcaagaatgatcgtgttgaaatcatccaagtgatcttcaacattcttcccaattgtcatcttgaatgaataaagtatatgttgttgggttttatgccctaaataaaactccatttcaatgtaatctattttat

SEQ ID NO: 330177 - DNA, 1160 bp, Cannabis indica
atttttataatattttttacaatgaaaatataaaaaaatctgcctcatagtatttttataaattttccctcattttaagtatttttttgtaagtttcattaattaaacaataagaaaaagtttggttatgtaaacctatgcccggccgattgggccttggggacgttttaaaataaggaaatttacaaaaatactaacttttggcctaatcttttcaatatactgccatacggcaaaaataacatttatactgtcttggccaattgttttttttcttttatactatgaacacaaaaagaaaaatgaggcctctatcttccacacccacggataaaacaaccacaggaacaccagaacaattggaaaataaccattaattcaagtgagattgagaaaaaacagtgaaatcgacgtcaaataaataatcatggcaaaacaactgcaaaacaacactaaaaaaaatctaacaaaagaaaggaaaaaaggattaaaaaaactaacaatgttctacacaacctcaataccaaatgccgtagaagttaaattttaaagcccaatcttaaaaaatcagaacaaaaaattactaaaatcaacacaaaaacaaatgtaaaataataagcggatataaccacttagaaaaacataaaagaaccacacacctcgattttttttttctagtgagctcggcaaatgtatttttaagagaaccataataaaaaaaaccacaaaataactatatagaaggaagaagaaatgtgttttatagcctccatcttctgcacccacggatagattcaccacaccaccacgagaacatccaaaaaacaatcatcaattccagcgagatgtagtaagaatagtgaaatcgacgtcaaaaaaataaattatcgaaaaataactgtaaaacaacactaaaacaaataataataataaaaaaaaattaaccacgcacaacctcaacacttaatgcaatagaggctatatttgcaagtccagttctggaaaataagattaaaaaaaaccatacccttatctttccaagaaacgtgattgaaaacttcaaaaactaaagaaaaaaatgaaaagtagatgaagaagaagaacgaaacaagaaataaaataagaacatggagagaaaactaaaaaaaaacgtgattgta

SEQ ID NO: 330178 - DNA, 651 bp, Cannabis indica
aaagatttttttttcatttttttaaataaatctttcatttgttaaacacttcattacaaaataaatttataagtatgaaagaaacatctaaacaaccatatcgatcgtaagtaaacattcactttaccacattataagctaaaaaattatgtattttaaccagaattaatcctatataatttcagatcatgtgtaaaaaataaaaatgttggggtttgaactcaagttccaaattgttacttcaagtacataccaataagctgcaacatacttttagttatatgtgtattatttttcattttataactaactctattttattttattttttgagttgggatcctgagttgtggaagcctaagacagccgcttcactcgtcttatctcaagaccgtttctagctttgacagtaaccaacaaaatatgaataagttcttttacaatgactagaccaattctcaaagtttattttagagtaatttacggtataaatacctaagtttaactcctagttgcaaataaatacccaagtttaattttttgcggcttaagttatatttcaaaaactctataggtacctgaacattaaatgtcaaattattatccacgtgtaattttcttattggtacatataaattattttttaaaaaa

SEQ ID NO: 330179 - DNA, 579 bp, Cannabis indica
tggaggctaagtgatttagaggccacttagagaacttaggttttagctagaggtgaaagccttaatataagtggcataaaccctagatttataactgaaatcccttgaaaataggatagttagcttgatatttacaaaaaaccaaaattctcttagattctagatacttctcatcctgtttgttgggcttttagggcccaattcgcaacccattcttgttgtgcacgtgtaggagagtcttatggaacctacaatgcaattcttggctagccatggccttgtgctggctaggctggccagccatgatgctctttcctagcttggccagccataggtctggccagctcccgagagtgagttggactgtcacttgatccctgtttgagtgacgaggtctttgttggcttggatactaactaggccttccttttagtgagttgtacagccacgtggcacaggttctgtccacgtaagcatgccacatcatgagaacaataattgggataacataatattttaaaaaatatcttaacttgaatctaaattaagttgttagaaaatatttaaaaattattaaaa

SEQ ID NO: 330180 - DNA, 964 bp, Cannabis indica
aattaaaacaagactggagcaaggtttcagatgtaagccaatgtccaatgttcccttgagatatcttagaattttctttacaactttaagatgagattcaagtggattatgcataaactcagatactttgtttacaacatatgctatttttgacctagttatgacagcatattgcaaagctctaacaatacttcttcattgatgtggattagctactggatcaccatcttgagcagataatttctctccaccagtcataggtgttggaagagaattagcaaagtccttggttctacacagaaggtccatgacatacttcttttgacaaagatggagaccattgtcaagatgagtaacctgtatgcctaagaaataatcaatttcaccaatatcttttaatgaaacagaggcattaaggttagatatgagtgatgaaaccacagccatagaagtgtgataagaatgccatccacatataaaagaatataaatggtatgactcttggtaatccttgtaaagagagattgatcgactcagtagaggtgaagttaaaggagataagagcagttttgagcttatcaaactaggctccaagtgcttgtcttgacccatataaagccttattcaattaatacacacagtctcttggcagtcgataacacccgcattcagaaaatcacccaacgagacaacattaaatgtcaaattcccttatctgatgtcaaattcctcacctttctctcggtttgggctctaataataactaaaagcacacttgatgaggttaagatctttgtgcttttcaaagtttgaaaatattcaaaaatatctttcatgaaatgccttcgttttttaattctagacacgggtgatactacacttccctacagtaatgttgctcactccctaataaacgctctcatcggttttcgatcttttagttttctaatctgtttctacatct

SEQ ID NO: 330181 - DNA, 1263 bp, Cannabis indica
aacataaaatgttatttctgatctttattaataagtaaatctgattacattgaaatgagttttatttagggcacaaaacccaacaaagaggtatgtcatttgatactacttgtgattggtgtaacgaggaagatgacgatatttgtcatgccttgtggttgtgtactaaagttcaaaggatttggaagctttttggatttgttaatctagtttttcagggactgccgaatgctcatgatttgttgtttcacttatggggaaaattatctaatgaagagatgatttacttcataggtatttcttggcttatttggcagcgtaggaataaactcctctttcagaataaagctcaagaggttcatgtttgggtgaggtgggctagtgagcaattggaagattattttggggaggtgttgagacctcggcaagacctggcagttcgggtcaaaaagaaatgacaacctcctccacctgattatgtgacacttaatactgatgcttccataattcaagataaaatgggttgtggtttaagtgctgtgataagagaacatgacggaaacttgattgttgctaaaactttatttcttctaggcattctttcagtccatttggcggaggctgctgctattcgcttgggggttctattggctcaaagatggtctcttccgaaggtcattgcttcagcagatagcatgggagttgttgctgctctgaagtctatttcccctccaatctcagactggggcatggtggttcgagagataatttcacttcagcaacattttattttttttacagttttcttatgttcctagagattgtaatgctgtagctaatgctttagcaatttggagtcgcatgactcattcctcttgcttgtggactgattttttgccctcttgtgctgctgctaatttgatggcagataagccttgtgtggctgtttaataaagttgttcattctcaaaaaacaataaataaataaaactaatttatttctttccaaataattgattggacaaattattatatcttctccttttatttttttgctaaaatttttttaggtcatattacaaaaacatatatataaatgcgtatctcttaatctatattagttggacatgatttttttaataataaaataataatcacatatattgttgtgacttgtgactattcattttgctaaataattgtaaacatgtgttatgattttgtttttagagattttttttttaatatatattcaggtttaaa

SEQ ID NO: 330182 - DNA, 970 bp, Cannabis indica
cccattccatggcaatgttgacacagacttggtttccattcatactgtacaatgacagtagtgatgcttccatactcattctcaaacttgattaaccctgaaagttcttgctcaatattgacctcaatcaaaactcttgggaacataagcctttctctttctcttgtaatcgcatccaccataatagactttcccaattgcccaacaattttaaacaaggatttctccccccaatatttgagatctaagtcctctaattgtatccaacttggcaccattttcacatcttctttcttaatgcttgagttcgggtcccattgcttcataatgactggttttctattgaagaaaatataacccccattcaatacttcatctctctgcccaacagagtgaaatctaattaagaacactccatatgctaacagctttaccttatccactttgtcattccatttctgttttgcaaagccttcaaggacatgtaaaggtggattggctccaagaacatgacacaccaaagaagacttccaatagttaacctcatcttctatatcttctaattcaatcttcaccttcctatcttgctgagaattcttaaatgaattgtctaaatttctcactacagttgcagatctcagaataggaggagtagggttcatacctttggataggttactgttacattgctctgtagccttgataaagctcacaaaatcgtgctgaacatcctcttgcctttgaatttctctgagtgagcttcgaggagacagaggttcttgaaataagtccgcctggttcgatctcaagctccttctcccctggccaaattcgtctggttcatcctcacttccagaaagttcgaacggttcaacctcgtcaggaaggttgatttgagattgcatctccatttgaccacctcgcttttcctggttcttcggtttcttagcatcagatttcagtttccccc

SEQ ID NO: 330183 - DNA, 1151 bp, Cannabis indica
tatcagcaaaggcctccttaatccgaacacaatcaaatcttcgtatgtatgccctgcccatatctgccatccaaaacctcaaatatctatcagcaacttcctcaaacgacggcgctttggataccttctcacgagtaatcccatcacaccgagaagacttcaacgacacgacagacaaatctccaggcctgatcacagtactgaagctctccaactccactagctttcgagggcaaaccacaattgccccgaattctagtacccagaaccgttgcccggctcttctgggtactgtcgtttctaagtcaaagaacacaatattctctgtcgttttactataaggaggaagctccattttgttgagcacaaatttattgtcgttttttggtatacgaattgatgggtttgttttggtaattggattgtttgatgagaattgttgagatcattttgattatatataatatgaatatgatagaggaagacgaaaatgatgagaagatatttcttgtcgtttgagattaattaacttgtagttcaagttaaaagtttggacgttggtatggatgaagaggtccttagcttcttgaggatgtcctatacaaaatacgaatcaagttattacaccatacaaagaggagtatcacataaaaatatgtagtaattaagaattatatattgctttttaggaacagaaaactttgatgaagagacgtggagaatcttttaatgagaaaggtagatataacaactgtttgtttcttaaacacaaggagaatgtgctgaatattttgtttttcttttttgaacattcgtacgtataaagcatatagtagtgttgtcattggttggtttgatgaagctgttaattaatttacttgtatttgaggacattgcgatcgatatgagaaaccaaacccctctccctagtattaattgattcctttgcaatgcttacaattttttactttccatcgaaataacaaacgcaaaagacggcctacgtacaataataagagcacaaatattttagagtgattttacaatacacctgcttaaaaaggatatactgattcaccttgacttgttcgacattcagaataaaaaatttagtctaatttttttttcatattcatgtacgttatagttat

SEQ ID NO: 330184 - DNA, 1197 bp, Cannabis indica
tcttggtaacttgctattcaccatgtttcagacatcagatggattctttcttagggtgctatccatagtacgcacgtggaactgaagaataaaattaagaagttaatctatgaggaagtggtttagacataataaacagaatataaacattgttatgtattaattaattggtctttattgcggtgaaactttcataaattgaatctataagcttacattacacaaatttagcttctcctctaagacagtgttattttgttgacaacttctaccggcccatctgcttgagaatgggccacaacaaagaagctcttaatgatgccatgtctgttgtagaaatcagtgaacatgtcactgtcaaactatttgccatagtttgacacattcttctagagaaggttgaattagcatatgatgttcttgataacaaagtgaaggactgtctttgaggtgattgttgctaaaggttcagcttctatctatttagtgaagtagtctactgcgatgaaagcaaactgtacccctccttttccctttaggagttgaccaattagttctattccccacactacgaaggccgaaggagactgcatcatcgtgagctctttgggtggagcccttgggatttttgaaaatctctggcacttgtcacattttttgacatagtccatcgagtctttgatcattgtttgcaaaaagtactcctgttgaattatcttcttagataggctttgctagtaacatagttattgcagaagccttcatgcacttctatcattggcttttcaactatgcctttggtgacacacctaaagagaggcatggaaaagctctgtctgtacattatcccgtctaggatcaagtagctagcagcttttcttctcagtttgtctgcttcattttcatcttattgggaaggctccaatttggaggtaagctgcgataggtgtcatccaaaatgtcgacttcttctaggataataatgttggtttcctcgaggaactgtatgaacaccaagttttctttgtcagtaatggtgctgcttgccagataggcaagtgcatcattcgtagtgttttgctctctagggatctgcctgattgtgtagcctttgacttgacttagcaagtatatgattttaatcaagtaggccaccattttttcacctcgacttgtgtattcacctaggacttgatt

SEQ ID NO: 330185 - DNA, 788 bp, Cannabis indica
ttccacaaataatgatgaaataaaacatgaaatttacacaaagaacacaactcactctaattacccaaatttagtagcataaaagtatctaagataattctattttctaggttaccaaaagtccatgacatccttcccaatctagaagatatactgagaagtcttccaatgaaaattgcttcaagcaaggttgttattattctcttgtgaaagtgatcaaatacatggtgcactcggttcaaattttatgcctccaacaatgaagcaaagtatgaatcacttatcacaggattataagtatttcgagagcgtacaaggacttgagatctataataatttctaacatgtggtaaattaagttcttggagaatgtcatgcctaagggactaaaataaaaacctacttggtcaaagtactggaaatgatacacttctagaagtatactgtaaaacaagtaacccacaaacagaatattaatttcatgccttgacaaagttggccaccatcaaagacattaaaatgttgaatgtggttctcattgactaagcctcaccaagaattcaaattaaaaccaaaagaggaatcattggatacgtttgaacatgaataaagctgataatgaatctcatggtgagagagatacttaggatatgtccaatagttacattctttaaggctgttaaaactttcacatcacttaaaaatataatattttattttatctcacttcttctcgagaagtcacccaaactttatgaaaaaataattgatttgcaagaatggagaga

SEQ ID NO: 330186 - DNA, 1312 bp, Cannabis indica
gtatggtggactcaatggaaaaggtgaaggaatcaatgtggtgttcttggctgttgtcaagtaattttctaggagaagatttcgaagtagtagatccaaaaagagagaaaaaaaggtccaaaaagaagaagattctttctcagcctcccacttgatgtatagataggctagaggatttgttagtgatcccccacatgtcagggtatctccctaacaaatcctgtatcctagtcttgataatggataaaatattacaataaaataaatatctataaaaatctccttgtttctagaaaaatatcccacaaacattgggaaagttgttattttcggttaaggattcaccaatttgaaatggagagatgggatgacacctctcagctagaaatgcatgatattagtgatgattactgaaaacatgtattttggagtgtcaatgttcgcatacaacgccacatgggctgtggcagtgtcctttaacaaccctcgctcaattccagagtaaaatgtatcgcctaccttgtaagccaattttggaccctatgacttcagaattgagccatggaagtgagacacactttgatccactttgaaattatccttctactacaagtcaaaccaggttatttggataaaaattgagagagttatgcccattttattgaaggcagtttatgatgtcttgtaccagatatgagcactgacatggccaaatggcagtggtcagccatgcatgttctcgaaccgctcgaggtgtgctttgacttgttttttgatggtgggttatattttgggagtctcgggacccaaaaaactcattttaatgtccaaaaccttaacgagagaccactgctgttatacacaaaattcggctgccatcttagtggaggacacgtgtcaagataaagggaatatggattgatgaaattgctttatatggaataactcattaattacgtgagtatcagagtatatttgtaacctgcagactgtaaggtcttaggcgaggaatcaatatacaaactggtgtttagtatattagcgagaaactatatgttactgaatgcgaatagcgaggcatcaagaacagtacacataggaagacgaaagcgacatatatcaatcgcaaaagtccttagtgtataatgtacaaactaagtgtaacagtcggattggctcgagaccaagcaagcgaggtgcccgtctcgctatgggaagacttcctataatcatccaattagcgtcagtgaggcttacaaccctgacaagtcagaagataacattcaaatgagcttcaaagaactctttgtaa

SEQ ID NO: 330187 - DNA, 862 bp, Cannabis indica
ctatataataatatagttctattaagcacgtaattaaattaatttcatcaattttcccttcctgggtcataattactaaaatgcccctagctcaccaacggggtcttaccatgttataaatcatattaattcacatatattgaactatataataatataattcctcaattatttataattatctaattagggtttttctattctatctcttaattctagggcattacagaagtcacacgactaccatgtaataatgcaatggttactttctgttggtgttcgcagtttctcccgaactttatatcgaccacaatttctgaactgtgcaactttttcaggcaaatttgttcaaggactataaatgctaaagagatggaggcgaatttatacgatatagatggccatccagagcctgaaaaagtgatgtgaactctctatcatgagatgaagagaggtattctgagcgaaagaatatcaggcacactcactttcaagaacattattctagggaccaaatgatttgaaaagtgttatcaatgctatacctgatcactgctctacagagagctggaagcaaattattgaaataaattttgagcccaaaatttattgcgcgatcgaatcaaaacaagaaaaatagaaaggaaatgaagtatttgtccacgcaaggcataaagtcgatggcagcgtctacgtaatgaatttgtaagtaaaattattaactttctattagcaaattttttttacaaatagcacatactaaccctatatttgaacaggacttccctaaagaacatgcaattcatatttggaaaaaaggccaccttaaaaaaggaacggaagacacttggattagcgagac

SEQ ID NO: 330188 - DNA, 1933 bp, Cannabis indica
aagacttcttttggacgacgggcctttctccagtaaatacaaccgcctttcgcattatacataagtttcctttctcggcaatttaaccttaaaacatattaatttgtatatttaaggtcgcttatcaaacttttgtctatttacaacgattactcagagaccagttcctactcctgagatagtcgagcgccacagaatcttgcttagtctcccatttgggctgcgagtagttgacttcttattaaatgagaagaatctgaagaacgttggctttcttgcctcgaacgaatttacttgtgattacaaaatacccaagtatacttcgtggcaaaaggttctgatcctagacaaagaggaaagtgaggactccgtggctcacacacactatctcgagagggctacccctcatgaagaaggagcatcccaaggtaactaatatggatggtcaaccacagtgcttagggccaaatgtaacaccttagtatcttttcgagatagtcgatataacttttacacttgaaatcccctccgcatagatctcataactcataggtttgatagttggtacccaaagtttcacgttcagactagctacactagttcttactatgggattgtcgagcaatacgagaccatgttggataggtcgggtcacatagattgaagttggaattcagatccactaaacccttatgatatatttatgatcacaggatctagggagtttagtgaatattatagtcctccctcatcatcttctaaagattatggtaaccttctcaagtgggagttttttctcccattttcatttatttactttctttgagtgctaatgaacttctcttgcctcgcagatatggatgtggatttggagagcgtgttcaagagtcctcccttagtcgataagaagtctacgaagagatttgcccaagctggtaaggttttgggttctaccaaagaacccaaagggaccaaaactactgccaacaagaagaagtcctcaaactagcttaccatcgagccatccaagtctgcagagaaagagaatgaggtctttgctggagggaatgccatcgagcaactaactgggtcagtgcaccaggtgaaactctctagttctcatccaaagatgattctcctcgagccctcctgtcccgtaccccccaaggttgggactaaaggctcgtaactctgctctaagcatgctaccaacggttggcgtaacatcttgactcttgggtccggtgactgggatcttctcatgcgaggcacttctgagaatttggccaaaaggagttatgaacttctgcatcagattaattttcttttcttcttgttctcacttttcctcattttatcatttttactaacttcgagttgccttctcctcgcaggcttctctcctctcttaggttacccatcattggttgtctcagcgagttgaaatgctcgagactgagcttcgtcagatcaaggagcataggggtggctaaggtggaatgactcggtggtcgaggtttcctgcacaaaggaggaggcaaaaaaagaagcatttggctgactaaaagaagatcaaagaacttgaggattctctcaagtccctccaggctgatcatgataaaaaaaacttaaggaaatggaggctgaaaccaaagacatggtcaacagcattggcagaaggaccatatacaaaatctggtcgactaaccctaatttggattttagcttcttggtgataatgctgatgccatgcttgccttttgcgagaagacaaagaaagaagaactgggcgaggaagaagaggttgaagtggaaccaaaagattaatccaagtatcctacaatgtaggcttggtttttaagttgcatttttttaatatatttatttaggaaattggccatatggccaagacaatggttttccccttgtggca

SEQ ID NO: 330189 - DNA, 1231 bp, Cannabis indica
aatataatatatatgtataatgtacaatgggcattgcttagttgcctagttcctaatatacttaataaaaaaataaaaaataataatttgggatctaaacaaaagaagaagctgccactccatggaagaagaaggacaacgattgtcgtcgtcttcggagaagaagacccaacaggaagcaccattcctatacgtattgggtaagagttgcaggtggatttgaaattgagtgaagatttgggggttagggatgcgatttgggggttttctgggtttggtttcagtcgcagctttgagtttttttttttttttggtttgtttttattttaatttattaaagatatattaggaatagatttaggtattattaatttaaaataaatatttaatgtattattttttttttttatgaaataatgggatttaatttgagtcttacacgtgtactcttttttataagtaactgaataatggaaagatgtaaaacacaacgtttggtatttaatccgtaaaaaaaaatataatatttaagtgtataaaattaaaaatttatagtatttatgccgtaaatttctcttgtttttatgttgccacaacatataatattttacatatatgatttaaaattttttataaactgcacgcgaaccgtaggttgttttttagtattctataaatatagaacataaattgtaaattttaaaaaaactttaaaatacaaaaaaaatttagagcatctgacatgtttttaatttaattatttaaatattttaatttttttttattatatcagatgtgagtgtaatatgaataaaataagaaaaatgctaaaaaattattaagtgatgcttattaatattgttattagtataattaaatattttttattaaatacataaacacccacttttagcagtgctagttacttgccttgtagtaacaatgctcacaaaacaaagacagtgaaattattgtgttcattatttttttttttataaatatatacaaattaaagaaaaactgtaagagtgggtcctatgttgtattggttggggagcccaatgtgagaaagccccatttataaatcgaagtcggtttcttagggacaatttcttctctctctctctctctctagtcggtccgttttggtctttcgtttcggttctgtcactaactcatcagccgtaccctagaatattactcaaccgtcgctcaacgccactgatcggag

SEQ ID NO: 330190 - DNA, 1414 bp, Cannabis indica
aaaggttttctgtgcaagcttgggtcttgggccagttgggttctttagtagaatccatgaccacagcaactgggattaccttcttcctagattctttgccagcctgaggaggacctctgaacttgctctcaaaaactatgtccattcctgtagagacagagataaaagatcaatggaggaacaaaaaaatatataatccagatcagaccaccattcgcgaggaatgatacttaccctcaaactcttgtgaggatcgcccgtaacgatcaactgcatctccttggtttggattgattggaagctcctcagtcttagaatccttcgtttccaatttaaattgaggtttaaagtttttgggaacgtacggagaagaaaagtggttgatatattctagtgttatttggagcgataaatttatgaacgtgatggaacatcttagcaagagaatgacaatccaacttttggatgaaactcatcaaaaacgaagagcgtatgaaacatggcaagcctaagccaccattttatactcagaatccagtaatgagaaggccaaaggttgagaattccaacggttgggagtgaggcagaagatgaaaagacggttcatttatactaataatgaccctcgaaaccgtacaactgcttaaatcaaaggacgtatttttccaaaagggattatgacaaaaatgccctctgtaattattaaaaaatactttttattaaaaagaactttttaaggggcaattgtgatacctgaaatttggctaccatttcagtagaggacacgtgtcaagttaaggggaatatagatcgatgcgtgaaaccataatcacatttaatggaataactcattaaatgtagaagtgacagagtatatttgtaactagctgactatatagtcttatgcgagataaaagatatacaaactgttatctcatgcattaacgagaaaccatacaacattggatgcacaaggcgagacatcaacttcgttacacctgggaagacgaaagtgaggcataacgactgtgaagacacttagcgtataatttacaaactaagtataatagtggagcaaacccaaacagctaatagtgaggcgtcaatctcgctataggaaggcatgctcctgttagtttcatcaatcattctcagacatctttcagtgagacttatagtttagacaagtcaaaagctaacattcgaatgatgactgctgaaatactctttttttcattaagaactgcgagtgtcaaaatgaagcattatgccttcaaataaagaagcaacgaggcgtacatcgtcaacctcggaaagataggaaaaaaaactccagctcactatcaaggtcattggtactgagttcctgtcgagacatcccaaaatgctatgatttaaaatgtgtttaaataca

SEQ ID NO: 330191 - DNA, 787 bp, Cannabis indica
tctaagatcctagtaaaataattcccaacaactttatccttccagattcggcgagcaaacccttccaaatttgataaaggcggattggccccaaggacataacaaactatagatgaattccaaaatgagatttcctcttcaatgtcatccatggcaatcttaactttcccttttttcagtattatctctcttattgacaccagaattttcagcattgttaaaggaatcagttaagtttcttaagatagagccaaatctcaagatagggggaactgagtgattgccttcctcaaggtctttgctgcattgaatattagcttccaggaaaaaagcaaaataagcacgaacatcctcttgttgctgcagagctcgaagtgatgattgaggcgataacatcagggattgttcgtccagtgtagtattctcttcgataggtctctcctcatcatccgtaaactcagctgcttcaagtccaaggatagagtccatggatttgaatttcttagcttcgattgatgaattagggcctcgtttcttcgcaccaggtttcttagttacagattgttgcttcctttgcaccttggatctcattttcgccatggcaccagctcgagagctaagagagcaagaaacagaggaaagtcaagttctattgccaaaaaaaaaacagagcaaaaaaaaatttccaacttaaaataattttctatttaattaaatgttatgaaaatagtaatatttaagtatcatgatgaaaatcaacttagatatttaattttcaatttaatta

SEQ ID NO: 330192 - DNA, 1475 bp, Cannabis indica
gaagaaaagagattctaggtcttatttattaattgaaagaatttattaagtctaattaataaatatatttcttttcttttctctttcttcaaattttcatacccttgagtgatagagtgagtacccacgcacatcaagtggtatctcaatcatagtgtggaagactgtgaagaatccagaatcaagagaaggacattcgggctcaggtcttggtgatactctacgacagagaggatacaagggttagagatctgagtggaaggagccattaatattccgctgcatcaaatgtaaggttttctgaaactttatatgtgtttactttcattgttttagaaattcatattaggatgttaatgaaacatacatggtagtaaatctagatcctggtaaaatatattccgacagtatgctatgggttcgaagtggctctgatcggcttctgcaagtgccgataatcacagtgctccggtaggggttgagccgagaaggggtggggttgttgatattcctgaaattcggggtaatcaacaggtttcatttcctaatattatgggtcaaggattgatggatggctttatggattcggtagctgtcaacaagggatttgtgggaataaatgaaatggatactagtgggagtagtggaggagataatataggcagtaaaggacaaagtcacgtggcaactgatttggagttagatgaggaagcgatgctttttcttgatactaaacgaaaaaggctgggaaaggatgtggctagtgggccgattgggcctaaggagcaaaataatgtgagtttgggtccggaaagaggtgctcaatcaaaaaacaattcaatggcaggctcgttagatcgggttcgccaatcattatgagcattttgagctggaattttcatgggcttgggaacctagggacttttcaattccttaaagatatggtttatcaaaagaagcccacttttatttttctttgtgagactttaagtttgaaacctcggttggagttcctttcttcacaagttggttatgacggcatgttctctgtggatgagcaaggtaggggaggaggtttagctatgttgtggaaagaaaagaatgatgctgaagttagaggttcctttcttcaatggaggtttagcccacattgatttgattgttcatcataataatttatatgattggagactcactggtggttatggtcaaccacaccgtgctctaagaagaaacacttgtaatcttatgagactgtaaagagaagaatctgctcttccgtggtgtattattggagatttaaacaatgtgttgagtcaagtggataaaagaggtggaaatacttgttggaaatattttaccaagatctagatttactaccaagtatgtttcattaacatcctaatatgaattctaaaacaatgaaataaacacaaattgtaacaccctaactaacataggcgtattacgtgatt

SEQ ID NO: 330193 - DNA, 893 bp, Cannabis indica
ttacaaagagagtggctgtatctagcttgtgccccgtgtgtggaaaaagtgcagaaacaattttccacttactggtgcaatgtgatttggctgctgcttgctgggagaaggcaggggtgttcattactggtgcagccgagacatcatttctggactggtgtattcttgcttttaaaaattcaagcaaggagaagaaagacttaattgctactgtttgttgggcaatttggggagctagaaatgataaggtatggcaaaataaaatgtctactgcttcttttattgttgcatttgctgggagttaccttgaacaatggaaatcagctcaaagctccaacttggagtcatctcaaaccggtttagttgctggtgatggtgttgaaagctggtgtgcgcctcaaagaaatcaagtgaaggtaaatgtggatgcttctttatttggagttgatcaaagttatggtattggaatggttgcaagagatgaccacggtttcttcctggaaggagtcactaagaaattcagtggtgtggttcggccagagattgctgaggcaattagcttcagagaagctctaagttggatcaaaaatcaaagatggaatcaagttgttgtggagacggactgtttgattgttgtgcaagcgctgcgaacttcttgtgaaatgcgttctttatttggtttaattattaaagaatgtaaattgttgcttgcagaactaagaaatgtttcttttcattttgttaaacgttcagcgaacgtagtggctcatgcttttgctagagcttctagtttatattctggatgtactttcagtatggggaatatcccaactgatctgttatcgtgtttgatagcagagtttgaagtttaataaaacttatgaatatttatt

SEQ ID NO: 330194 - DNA, 1192 bp, Cannabis indica
tcatgccctttggtctgaaaaatacaggggcccgggccacctatcagaggcttgtgaacaaaattttcaaagatctcattggccgctatatggaggtgtatgtggacaacatgctagtcaagtccaaaacggcttggggcatgtggaggatctagatgaatgcttcaagatcctccaaaagtacaacataaaactcaacccctcaaatgttcttcagagtaggctcgggcaaattctttggcttcatagtcaatactaggggaatagaagcaaactcgaccaagattcaagcccttttagacatgaagtcgcccacaacaattaaagaagtacaaagcttaatgagacgtattgctgaactaagaaaatttgtgtccaaattctaggacaaatgcatacccttctttagtaataaatacgactctactgtcgattaggtcattacttgctaactaagggggtcgaacctctataaaaatattgtgtctcttttacttttctgttcttattgtgtacacgtggtagcatcagtaataagtacgactctgctgtcggttggccaaatctgaggtcaacagatttccattctctttaagtaaacatgctattagtgtgatgaaaacatgtctggcgacatttcgcctagcaccaggcgtcatgggaacagttgtgctacagttttaggaaaactcctctttcaacatgggaacagttgagtttgtctttgcttcattctcataaccttattcacacccatttaagggctgataacaatcatgaagtgttgggaattagaatcttgaaattgtggttcacacccatttatttgttattatttttgatttattacttttactagctcttcaaatagttttatgaaatgttttgagtatatatgagtccacacatgttgttgcactttttaataattttgatgccttttacggtttatgtgtcttttatggcatttgtgtcatttttttgtggcttgtccctttaagtttagggtagttttgtgatatggtcacttggcaagagaagtaatctattttgtgctcataatttctatttcaacaatttttctgttttaacagataagtatttcaagtcttttaagtccttaaatttaagatggattagtttaccatctttctttcgctttattcttttttcattatattgtgtgataata

SEQ ID NO: 330195 - DNA, 825 bp, Cannabis indica
aaaaacaatacctaacatgctcttaatcacttttttattttatcttttattttgtaagtttgcttaaattaatcatgcacattgagtgtcataagtgatttaaagttgttttttttttttaaatttttagagtaatttagttttatataaattgttttgttttacaacatcatattttaactttatatacctataatcagacaattaggttattgagtggatatccattttattgtgttagtactaattgtaagtgagaacccctaaatattaaaagatatataaaaaataacttttctttacaaaggaagacttgaacgcttggtttacacgtcaatggtgtaagagagccaccacttggcacctgcacctaaagaatttgtcataatgggccctcatttatgttagaagctaaacctttgggcccagtttgtatcatagatcaaatcaaaaccccacaattacacaagcactcgtatccaaataacaattgggctctcccgttttttatttttaatttttatttgggcccatttcatatgcaaccaatgaagatagttaataaatggtccccaaatccatctcaattacagctttcatattcttaatcaatctcatttcatttcattttcataaccccatatattccaaactctttttagtcgagaaaaattgaggatgctaatggacaatttattttatgacaaaaacaaacaccagcaaagcaataagaggactctaaatcgaaatataaaaaaattaagataataataattatagtgatgatgcgatcgcatggcaaaaagcaaaaaataaaaataaaat

SEQ ID NO: 330196 - DNA, 2968 bp, Cannabis indica
ggaagtattcccttctcgttacaatggatacaagcagaaagattgcatagtaaatacagaacacaccaattttgggatttggatagcttgccatatctctacaatctgatccccatgtaatagggatttccttgattactcacgatgtgaaagttgaattcgacaagtgttggtcgttctgcgtggattgttgattgctttgcctcgagcatgtatatgaggtatcctgttcggattatatcttgcaaaaagatactcaaagtcgattccatgtgtaaccatcatgtgatggcatgtcagactgcaaaaattggaataacattttccccccatgcctggacaagacttttgaagttgcgtgtagacttcatcccagttgtctttgcatttgaataggtgacacgtgtcaagtgcacctgttcgccacttgacgtgaggctgactgggcgtcctttcagttttcggctaataaatgctctaacaattaatatttcgaaattcaattttctctcaccacggttgacgcctacacttgattacttttgatttcccatattcgcttttaggggggaactgaggcgtctgaggttcttttgaaatgattaccccttttcgttgtctgcctataaataccagtgagcatttgtccacaaactcattttcaccaaccttccttgctaagtaagttcagagcgaaaagagagatttttggcttcaagtttgctgaagtgctttcatcaaaactgctcctttggcttgacgtaacttgaacccagacgcttgattctcaagtaagttctcgatttcctttatgtttactttggacatttgctttctgaatgcactttcgatttcgctgtagaagatatgtaggaaaccctaagttttgaaactcaacgattttcctttgtcacggttcatgcgatttcattgtccataatgcttgcttgttgaactgcacaatgcctatctttcatcttgattattttaagcttcatgaaaatcttttgccctaactcgcaaaaattccaaacttccagagttttgaaatattttcccgttttaacgttcgatatcccattttaacgttcgatatcccgacttaacattcatcttgtgtgttgtcttttgtagatgaacccaggtgagttttggggaagcaaacaccaaatcgataggatctgcttcaactcttgcacgaggatcatcctcgtcttcgttgtaatccaacttcttcgagtgacagtcattcttccttaagtcttttgttcagccataggatgatggctcgtactaaaaagacaatgcatagggtcgacgcataagaccctcaagtggccctgcatgccaccttacccagcgccgaacaagatccagccgtccaggaggaggaggatcaagaaggggacgctacggtccaggagatctaggagcaggacgatgttcgtcctagcaatccctctgaagcggaggaagaggaggcggttgcacctccaaactatgggggatacaatgaggtcggggagctagttgatgctaatagtgacgtcctggttgagggtgtggactacacaagtgaggaacttactgatgcggttcctcatagaaggcaaggtactttggatgccaggtgggtgagccctccgtccaaggttactgaggcacgtctacgggatctcgaccaagatggctacctgggcgaatcagactgttacattcctgccaataataatcgggccacaaaccctgaaaggggaatgtgcgcctggtcaggtgctcattcctagcaaggggcattgttgcctttgcacccgtactttaggaatgtggcagacttcatcctcctctgcccgacccaatttactcctaagggcattaactatttgttcgccctcttcgttctctatgcctcctagaaatgggatatgccctctccccatgaggtaagcttgttttttgatttgaagtccacccctaatcaaggctagttagggtacttctatttctctcaaccagacttcaagtggttgatgggcaccagggataaggccgttagcaaaattgggcattttttttacgagtacttcattgtggaaggcatgagaaccacccatactcagttccagtagatagaactcaaaggcttgctcgactgccgggggacaaccgaaatatcattcagctgacctccaaggaaaactttttaaagttcgggctctatccaaaggatttcattcctaagcaagtgaaggagaggaagaggaaatctggtgctggacgggatgagagagctcattaggaggatgaacccattcatctcaagcatgaagctacgttgaagggaggtgcaagggccaaatagtatgctcatgagcccttgaaccctgaagatgaggctaaggaagagcaggtgactctgctcaaaaggaagaagaaacttctggcccaacctaggcttgttgaacatgccattcaaattagggagcccattttgcttgatcggccatcttctcccgtactaggaaaagggaaagttgccatggtagatataagggacttgtcaggtgatgatggactcttgagtcttgctcggacaaccgctttgcaggatattccatcttgtttttaaactttttgactacaatgctttatgcttctgatgccttttttcctctaaccatgttgtttgtatttcgtgcagacatatctcagaagatgctcgatgctctgaagaagagagttggaggaagctcaagctcatctccttcggccaagaaatctatgggcgatgaggcgaccccttcaaaggaaagggcacctgtggggaaggttcttgacctttccgaggagcttactgttttggatccatctactccaaaagttgctaaggccaaagattctcgaggaggaagctcggacaggcctgagcaatcaaacgggggatccaagctggccaagagcggatctg

SEQ ID NO: 330197 - DNA, 1712 bp, Cannabis indica
ctgctggagagcgtggcgtgggggacagggcgggtccagatgggaccccacgcgtctgatgctggcggttggtcagagggaagaaggtgctcacgcgcctctgtatggctgtgacctacacgcgccctcctggccctttggattcgcgcacagacgacctagatgaggctttgggcttgcgtgcgagtgggcctctccagctccgaaaatatgatcttatttttttctttgtaaaaataatcctttttcttcaattcttcaattctcttcaaaactctcaataattttaattacctaaaaaaattaataaattaaatctaaattaaatattttcaacataaaaatatatcttattaatttcataaaaatattaatttattttatcctttaagcttattaaatgtatatttttcactattaattaggaagtcagggtggttagagagttcttggatgttttccccgaagaattaccagggttaccaccacaacgggaaatagattttaacattaagttagtgcttggggaagagcctatttcaaaagcgccatatcgaatggctccaactgagctcaaggagccaaaaatacaattacatgggatgctggatctagggtttactcgacccagcgtgtcgctctcgggagctccaattttatttgtaaagaagaaagatgggtcccttcggatgtgcattgactgaataagttaactattaaaaacaagtatcccttacctaaaatcgatgacttgtttgtttaacttcaaggtaagactttttttctctaaaattgacttacggtcgggttatcatcaattgcaaattcgagaagaagatgttcctaagacgacctttcaaaccaggtacggacgctatgagttcctggttatgtatgttgggttaacaaatgctcttgccgctttcatggaccttatgaataggtattcaaggatttcctcgataattttgtaattgtgtttatcgatgatatccttgtatattctcgatcagaagcgaaacatgagcaacatcttcgtatggttatggagcgactcagagaccataaactttatacaaaattcaaaaagtgtgaattctggttgtctcaagtgtctttccttggacacattgttaggaaagatggaattatggttgatccacgaaggttgaattggttaagaattggccaagaccgaaaacaatgactgaagtacggagtttcctcggattggctggttattaccaatgctttgtagaagtgttttctaaactctcaatgccattaaatgagctgactaaaaagaatcagagggttatatggacggataaatgtgaaaaaagtttccaagaattgaaacatcgactaattacagcgccagtgttagccctaccaattgatcaagaaaagttcatattgtattgtgacacatccagacaaggttcgggatgtgtattgatgcaagcagataaggttatagcttatgtttcacgacaactaaaagactacgaacaacgttatccgacccatgacctggaactgacatcggttgtgtttgctttaaagatttggcgacattatttgtatggggaacaatatgagatttatactgaccataagagtctcaaatacttcttcacctagaaagatttaaatatgagacagaggcggtggttggaactatttaaagattatgattgtgaaatcttgta

SEQ ID NO: 330198 - DNA, 1145 bp, Cannabis indica
tatatatgtatatacgtgtgaggtatgtaacatatataattagtgtaattaatatatattatagtgtatatgatatatatatatatattaaaaatatatatattatatgtatatgagatatgtaacatatgtatttatgaatttaatattgatattatatttatgttacatatatgggatagtgattagtgacatacatattatattaatatatattgatagtaatataatattgtttattactattattgtggagattattatcatctataatttgaataaagagaatttagaatttctttttcaatcgtaattttgagaaaagaaattataacttgtgagaagttaattttttttaatttaaaaatgataatctttctagtttttatataaaagcacagtaatgaccttgtttttgaacatatatgaactcgtgacttctcataatcgaagaagagttgcaatacatgatagtaaatttacttgaaacaagaacaaaacaactttacttagttccagtaataagagaataataatttcataacatttttcacatcaaaacaatttttttttttaaaaaaaaatacaattaaaagttcaaaaaacgaaagcacacaacggcctttattttctttaatcacatgggtggtttcattatcatcttcaaaattgttatctttgtgatgactgctacattagctcctaacaattgtagaaggactaccatgattatcactatggctgcaaaacggagtaaatctttgtattgctgtcaagaacaacacctactcataagagcatctctagtggagaagtagtggaaaattaaaatatagctcatttaacaaaaattgtactatttggcatataataaattttgtgccaaatttggcacagcatttgctatgatataaaatttacaatacaataaatgcactactttttttatttatatttatgtcatttgaattattttattagtataattaactatatcattaaattatgaagcatttatattattttttttgggatatttggcggctaaaccacctgaactttacggtttgtaacacttaactataaaagctgaatttttggcagctaaactacctaaaccttggttccgttttgctctgcacacc

SEQ ID NO: 330199 - DNA, 775 bp, Cannabis indica
tatgtcttatttatgaattttcactaaacaagggcttaattgtgaagaaaagaggttgtatggtttatttgttaattaagagactttattaaatcttattaataaataaatttaattgacaattttatttgataattgatattaattattaaataaatagttttaacatttaaaggatttaaattgaaaaatatggcatttgtgaaagaaaaagataaatagttgtataaaatggtaaaattgaaattagtggggcccacatcctatggccaaccacttaaggtgaatttagccatttatttatcacttttttttatagtcatttcagagtcactctctatcatcacaaaaggatgtttcaacaaaatggctgtctccatagctaacaaattggccgcaacttctctaatgagaaggtctgtcaccacccacaaaatagaccatgtctgatccctagccaaagccaccacacacatggagctgccgccaactttaacatcacagttaagtttgatctaatcttctggaggaggggaccaaataggagactcaatagccttcgacgaggcaaacaaacaagacacataatctgcgttacaaatagagatagagtcaatataatgtttaatgttactcaaagaattattgtatatcttatcgttgtgggccctcctgatcatatctaccacaatcaaagcatagaggaacaacttctcaatatcaacccccttagacttcaaactccaaagaaatttaacccaatcccaaacacgag

SEQ ID NO: 330200 - DNA, 746 bp, Cannabis indica
tcattcaatcaactcgcctaaaacattggaagtgtaaaaagtgggtaagggatccccattaagaacacgatcagcctaaccagagaagcccgtgctaaatcatgagctagactattagcatatcgttttacaaagaaaaaatcaatagaattcaaagactccaacaagaccttaaaatcacgttacacataaccatagggagaggctaaaattttagcattatttaagtcattaataagagtaaggcagtccgattccaccaccacttgatgccatccttttttcttgatccagcttaaagcttctttgagtcccgttgcttccaccattagtggactccaagagccttgttgaaaaatctgaagtgcttccaaaacaaggccggtactatctcttgccaccatattgaaaccaaaacaaccatcttcaaccacaatgtaaccatcaacattaactttgatgaaaggaaaattgggtttagtccactgctcgactccactctcttgttggactaagccatgaggagattttgaaaacttttttgagcagtactccacgatacaaagcttagagatgctgaagacaccacatcatcaaccgaaggctgcttagaaatccagaaaagattattaggactattccaaaaagaccaccacaacatggaaacacctagatgctcctccttcttccatacccgcaacccttcagtgaaccaagctgcaaaaacagtagcaaaactcggtatt

SEQ ID NO: 330201 - DNA, 744 bp, Cannabis indica
agagagagagtgtgtgtgtgtttaattgtctatttactttggtggtggtgtggtgtggtggtgacgggtggtcctgaccccgttaacagtgacgggtgaattagggaatctacaaacggggaatttgacggcgccgttatatataatagagatctaatagtaggggctggctgagaagacgagacagagcaaggccgttgtgacttagcgccgattattcagctaataagagagcgacacgtggacacgtggccctctctgaggttaattgttttcggagttaggggcccaccgtagaaaatgattgcgtaggaagaggtaagaaatagtgaaattgaaaatataattaaatataaataattcttttttttacagccaaaaaatagaaagaaaaagaaagggtccgtacgtaggtgagtgagtgatttaacaaacaaacccagcggaaggaacggtttctaacaatatcaaatattttactattttagtgctttgaattccgttttggtggaggtaccggtctgtcttgaaagtaattatttttgaaaaattttatttacacttcaaacatttcaaaaaatattctattttaataatttttttttatatataaaatttaaggaaattttaccgtgcacctccttagaatgaatatattaatgcactcttatctattttagcactcgaaataattttttagtcaaattttttctctatggtcatgtatgttatacttatttaaga

SEQ ID NO: 330202 - DNA, 574 bp, Cannabis indica
taaatttaaattcactccttgttggcttaagaataaaggagattaatagttataaatacagaattccccccgctggtgtctacccatgactgctaagttccaaggtggcgaggtatgttttagactttcagtttcacaatttctatcgttggtcgttgctctgttcttgtactgttaatgtttatgttatatgatgttataaaaaaatatgacatttttaaaaattaaatttcatctgagcccagaaatgaaaccttcgagctcagcctcataacacctgaactcgaccacgtcaaacccgccatactcgacccaaaacccgccatacccgaccacccgaaaattaggttcaattgtgcatttccaagacccaaaatctaaaaatccgaacccgaccacccaaaaacacaacccgtgtgcaaccctagtattttaaaaaacacaaaaaatatagcccacataggggtgttcataaaatagttagatccaatccaatccaatccaatctgcaaagtgcggatatccccacttgtacggattggattagattggaaaatttaaaatccgcacttgt

SEQ ID NO: 330203 - DNA, 986 bp, Cannabis indica
atgaatagactgaacatctccctggcaaaagataattaaatcatctacaaaacaaagagagattaactgcagaattctacacatcgaatgatagctgaacttgctgtcaacagccgcatggtgaagtcttctggtaagatactccataacaagaacgaacaagagaggagagattgggtccccttggcgaagccctttctcccctttgaactttccttgaatccggccattcatcagcaaaagataacttgtgcttcgtaaacaatccatgatccaaccaataaacttggaaggaaaatagagagttgctaaaatgtcttccaagaacccccaatcaatggtgtcataggctttactcaagtcaactttaatggcacaacgaggggtaatagttttccttccataacatttgataagatcttgaagaatcattatattgtgcattatggatcgacctttaatgaaagccccttgattttggtccattaatcatggcaacacttcagctaatcttgtacacaagaggttggatatacccttatatattgtggtacagcaggctattgggaaatagtctattgcacgagaaggacaatcgattttaggcataagggagatggtggtttcgtggagatcagcaggcgacctaccattctcaaaaaattgtatcacagcagcgcaaatatctcccccaatttcaggccaaagctctctataaaagcctgaaccatagccgtcaggacccggagatttggtaaccgggatgctaaagaaagctttctttatttcttttctagtaaaaggcttcagaagcccaacttgctgatcaagggaaagtttcctcccactgtccatacactccctgttaaacaaagaatgggtactactcgaactccccataaaccctttaaaatgctctaaaaaatgattcacctgttaggttttatgccctaaataaaactccatttcaatgtaatctattttat

SEQ ID NO: 330204 - DNA, 1404 bp, Cannabis indica
aaatggccttgctgagagaatgaatagaaccattcttgaaagtgtaagatgcatgataatctactctggtttgcttaagagtttttgggcagaggctgcagtcacagcattctatctaatcaattgaagcccttcatctacaataaatttcaaaactccaactaaaatgtggtgtggccatgttaccagctatgatcattgaaagatctttagatgtgtggcttatgctcaaataagacaaggaaaacttgatcctagtgttgggttttgtgccctaaataaaacctatttcaatataatcagatttactaattaatagaaatttatgttgcatggttcccatgatttatttcatgattatgtttaatgtataaattttgttgacttcacttttagccaacaacagtgagtctagattgtaagcgacaagtagtacaatgtatatgtaatataataaagtaaataaagacacaagaattttatagaggttcagccccgagcagttcggtaatagcctaatcctcttggtttctattgacttaagaacaaggaatatattgattcctttccttagagctcttacaatgatatctctgaatatgaattcttagataagtttttttcccctgcccagtgagtatgaatcactatttatagggctataaccttgagagggaagaatttcccttttgattacaatagatataattggaaagattacatattaaatacagaatacgctaatcacgagatttggacagcttgccatatctctgtgatttaatcccaaaattatagggatttcttcggtgactcacgatgttaaagctgaaattgctaagtgttgatgtgttgttcggattgctcactgcccggttaagaaggcctcgtccgagcgagtatatgtgctgctctgttcggtgtatctcttatgagcagatacttaaagttgattccccgtgtcaccatcgtatgatgccacgtcagagtgcaaaaatttggataacatttagccccaagtctgtataggactttcaaagttgtgtgtagacttcattcgagctgcccttatgtttgaatgggtgacacgtgttaggcgcgtctattcgcgatccgatgtgtggctgaccaggcatcccttcagttttggctgattaatgttctaactcaattaatgcctcaaaacccgactttctctcaccacatttgacgggtacacttgattgtatttgattcccaatatttgtttttggggaaccgatgcgtctaatgcatttgaaatgattaccctttttttcacttatctgcctataaatagggttgaacatcattcactgattcacttttacaaatttttccattaagcaaactcagagaaaaaaaggttttcacttcaagtctgtc

SEQ ID NO: 330205 - DNA, 2004 bp, Cannabis indica
tcttgtaagtcgctcgacacaataggcttcaacctcgttggacgtcttctctacaaccctactcagatattcgattaatataaacattgactagttaggtgcgggttgccagggaaatttccctctgtccaggtatccgaaatataggacacgggtcgcaagatcctatcgccacattaatgtgcaaaaaactagataacaatatcgtttctaatgtattcaacatcatcttccttaaggttacaatcaattttcacaactttttcatgaattggtttcccaacaatgaagtcatcataacataaatcagcattctcctcatccttttcattctctaagaacttcttctctaatgtcgataaatcaacggtccatttgtcattagccggatcaaaaatttaaaaattttgtactatttggctagccatgatgaatgggtcattcttgcttcctctcttacttaaatcaaccaatgtaaaaccaagctcatcagtttttactccaacattggtgtcaacccaagaacatttaaaaagttgaattcataatgcaaaataattgagctcccatatttcttcaatagccccataatatgtcatggtacctataaaacatggtttctatctattgcacttgcaaaatgcatggtttctgcgacgatacgtatgccactattttgaacctctcgagcatcatctcttgactttgtatgaaaacgtttaccccttagaatgtatgcttcatgctttgctactccaaaatttggtccaagggcaatatgactcaacacatggaatactccatgattcggttcattcaactttgctagaatggtattccttgaacacccaatgaaagtttggcgatgctagtctacaacccatttttgttattgttcatcgtgactaatcaaatgttaattaaaggaaaaactacctataacttatgtcatacatggctgaacctctacattattgttcatcacgactaattgagcttcatctagtttaaacttggacactgtcaccattgttcctttcccccttaatcctctatcaaccttatcgtggtcaattcttggtttgctaattccaatagcctcaactacgaccatgtactctgaataaaattccatagcctcttcaaatatgtagcactcaaccataaatgcttctggtcgatagtggttacactcataacttttaagtaccttcatatttctttcaaatggatacatccatctcgcccaaaccagcccacacaaccttgcttctctcactaatgaaccattaaatgtatcatgatgtcgaaaaaagatggcagaaaaagctttttgaggttgcacaatgttttgactacatgcatgttcatgtaatgcatctaatttatccatttctaatttattcctacataacttttaaagaaaatgcaaacatgtataaaaaactctcaaatatttttcagcaaaactgatctaatggcgattggaaccagataatgcattaacgcgtgacaattatgtgatttcatacccattagtttcaatttagcctcatttaccaagtttttgatattatacgagtaaccatcaggtactttcatatttgaaaattatttgcaaactatttgtttttcctttttggacaaagtgaaacaagcaggaggaaaatataatcgttaacgtttcttttcaggtgccagaaattgtcatatatccattttaacaagatctaaacgactacttaaaccatccttagttttgttgggaatatcaagtaaggtaccgataatactctcacacacatgtttttcaatatgcatgagatcctaacaatgtcgaattagtaaacttttccaatatggaagacgaaaaaagattgactttctttgaaaataaccatttgttttctttttttttttttttgtcgtctttccatacttaaaatctacaagttctacttcttggagaatttgttcccctgacagtggcaaaggagccatatc

SEQ ID NO: 330206 - DNA, 577 bp, Cannabis indica
tgtcatttatatatgatttgttttgtcatgaatgtcctctattagtagctttgtagtaatgatgaatttgactactttgcataagaatgagatttcttttccttatattttattatgaacaagttgatatgagtatattacaattcttacaaatatacacacttgcttattatgaacttgatatattcattggcatatataatggagttttctattttgtccttaatgaaaacttgaaacttgaaaagcaaccactgagttcctttgagatattctatggctgtattttcttgttgagaccagcagaattgaacttgtttctcagctgctttgtttaatgatctaacacacttaagtttcttctaaagattaactatatgcctctccaacatattagacatttgtttgtgatcaatatttttactttttacatgtaataatactctcttttggtatgaatataacccataacttataaggaagaaaagtttgaaactataaagccttaattcaatcctggttagttattttaaggcattttatagatttgaaaaattgaaaaataaaaatggttata

SEQ ID NO: 330207 - DNA, 858 bp, Cannabis indica
ttaaaaaagtaataaataaataaatagagtgttgctagaaaaaaagtaaaatgttattattattattattatttagttaaatactcttatgcataatgaattatttttatataattcaaagtcattgttattatatatttcccttgatgttatcactatctcacttataataacgatgatcattttttttaaattttcttttataaatttatttgtatagaagtatattttttggaatatttatttatgatatatatttaatttataatataaattaaatataaattataaaaataaaagaattaaggagcaaaaagaaagatgctttggatcaattttaaaaatgctatgtataagagttactgtcatctgtgtttccaataagggacacatagattccaggtcagcaccaaaagtccatttgtgggtcataaaaaagataatttgggccaagctgaagtcacacagaaccttccaggaatacaccttagctccgtgactagatgagtttctgccaacaataattcgtatccaaaagcagctccagtatcatgatgttggagggccaaacagcatgttcctagaagacaagtctgattttccttttttttttcaagcgcatagaataaggaagtaaatgatcctcagatctcgacagaagatcgtgttcgttaacacaaatttttgtttacctaaattaattagctttcacataataaatactttatagaaataataataaataatttagaaatcaataactccagatatttttacatggttttgcagttaaaaatttgcatactccaccagtcttttctattaatgatatttgttgagtacagaatacaatatcaa

SEQ ID NO: 330208 - DNA, 1247 bp, Cannabis indica
attttttttaaatgtaaaaaaaataaattacactatgttttgttttcttattttactgtatggagtatgaataaaatcaaacataataccaaaacaaaaacttaatacacaaacttctacataaatctaagactcgaatcatcaacccactatttaaaataattttacttaataaaaaaaattcaaatttttttagtatttttaattttttattataaaaaaatcaaaatataggcacattttgaaagaaaaatataaataaaaaatataagacataaaaaaatacaaattaaaaaaataaaaattaaatctaaatatcataaaaatcgacgaattaaaaactgtcatattttctaaataatgttttaaaattaaattttactatcgggcagatcaagcccatgcataattctatagggacaattgcatatatatatttttttacatcaatatatcaatattaattcttttaattatatagtggtgaattttcattatttatttaaaaaaattagaaaaaataaataaaaaaacaatagaagtttataaaccaaaatgaaatggccctagactataagaaaatttaaattcctattgggctaattgttgaagctctcgtaattgtaaatttcttatagagaacaaagatttagccagtttttgtatagcaaaaaagacaaattccaacattattttggtctatgaatttttgtatctatcaattttgttattattgtgcttcttttcatagattgttatccaaatgtttgtccacaataactttgattctccaatttaattttggaaaaaaaattgagcaatgattgatttatgcactaatatgaaaaatgataatactagtaaaaagatagacattatgataattagttagtcgctttcaataatttttattaaaataaaataagtaagacttaatatagtaaaatgtacctatagtaatattatacatcacaaaagtactagacattatggatatatttttttttttaattcatttctcatttcataatagtcattaaattaaattagtgtgggactcaatacttagttatactaatatcgatataacatgttagagaatattagacactattggtggtacgtattagcatcttttaacatttattttataaaaataggagcattgttataaggtacgtaatgtgacagtccagtagtttcgtgattcgtaaggagaaataccgagtaagctgtgcaatccacat

SEQ ID NO: 330209 - DNA, 1680 bp, Cannabis indica
ctacataacctaatagcaccactggtacctaatagtaatgctcatatatatagtatactggtatgatatacatttattaggagtttttgaaaagaataaaaagttacacttacttttaccatgcattgtactaaagttatttttgataatcgtgtatttttttttatatttatttaaaatatcttgcaaatttttttgagaaatttgaaataattaataatatagaattcaatgtttaaactatctatttcatgcgcatataaaataaataaaaaaaaaagtcatgtgtgtagcagagtctttgaactatattttcgacgtgttaaattttttcgaatttcttaaaattttgcagaataccttaaataactataacacatacaatcataaaaagattcaaactagataccgaaataaataaatgtgtatcggtacacccctttcaagagatacagtgtagaattttccaaaagttacaattataattactatatgaatgtataaatatgtttgagatatatatacatgtggtaaagtttctccaaataaaaaggtcttcgcaatcgttatttctggaaagatgttcactcactattatcgatgctgaaaggtgtcttgtagaatgatagtcgagtttggaagggagttcccgaatgagtatcatgtccactctgggtccaatcttcaagatagctaactcttccctgaaaaggagttccaactggctagttatccctcctagcttgatagtttcagatagtcgactttagtagactaattatatcccatccaaaagcgtcttcagctagggtccgtgatcctcgagcccggaagctcattcatattctcagaggccctggtgcttatgctaaacatggagacttcactaaatgaggagttggttaagttagttatttctaactaacttaacaatctcatttcttgcagccgccaactttaagatcttgatcctaagcctataaataccacattgactcaacattttagagacaacttgagagacgagatttcgtgcttagattagaggagattgagagtttgagagagacaagattgaaaggtaaagagaaagatgcagagaaaacaaagaaattgggttcaggttttataagaagaatctcctatagatgaagaagattcttaagtgaaagtgtgagatcttgaaacactttgtgagaactcatcagagaatctcatctcgactgtattgtacatattttcgctcaatcaataaagaaggatcacagtggtattctagaactggattagaaccatagatcacatcgatctattagacttgaaccaatatatatcttggtgttgatttctttattattttctgcatttagtattttctagttttttttaacactgttttattttcgattattgtttttgttgttagtcatgtcattgctaattgtttaattatttaaagtttcattaatttgattttgcaccattagtcttaattttcttacaatgtttaaaaaaattattaaattaatattagctgaatgaaataaattaaaatcatatatcccttgattatatatatatggatcatttcttaatgagtattacccatgaatggttactaaacaattttaactataaatattaattttaaaatattaaatcatcaaatttttatctaat

SEQ ID NO: 330210 - DNA, 989 bp, Cannabis indica
cattaaaaaccttgctaaaaaaattcaataaaaaaaaggggtacagtggcaattaactctctcttatttaggcattcgtagagatcttctaatcaacgaattccgatcttatatgtcatcttttgaaaacttgatgttagtaataactttgtgaataagcatacatcattgcaacttgattgaatatgttcaacactaatataactattttcttgaagatgatcatgaagtaagaagaacttagtgaaaatgtatttggttcgatctcctttattatagctttagttgagcaatgatgatactgatttattgagtgtaatccatatgtttccggaatatgttatgtcagtaatcttactcacatttgctacttgcttcataaagtgcaagtatgttagcatgatttaaagttgactcattacaaaccttgtcaggaaatcccagtgaaacaaaacttgagctaagggaaaaagagtgcaattaatatatatttcatattcataattatttgtaagttccctcgttaaaaatcttgtcaagaaaatccagtgagacaaaaccttaactaagagaaaaaaaagtccagcatgaatatgtctccccctgatgcatattgttttggtaataatatacctcataaggttattgttatcccttttaaaatatcacatatattatctatgaccacatatttacaataactcttctacaatatgcgtggagttctaaattatggatgacgaattcctagaacatcaatatttatcccacttattgaatcattcatacatgtgtacatacaatattgatcatactaaagtttaaagttttaattaatataaacataatacattagtaatataaattttcatttgtgataataatggtactctacgaccatatatttgtttcattcttgttgtacgatcttatttctatatcaaatgatcatatatctataatcactgatgcatatgaagtacttcaag

SEQ ID NO: 330211 - DNA, 841 bp, Cannabis indica
gaacaagggccttgtttggcaaacggataaaaacagtgttgaaagggccaattccaggcatttgccaaacacaactttagtttttaagtggaactttttatcccagggataaaaagtcccacaatatcttagccttttaatgttattgggcattacacatataaaaagaacattaggttttaggatttcatttacacacctcattccctcctagccgtctctctctcctatctctctcttaatggcggtgtaacctttctctttgctattttttttcttcttcattctcaagcagctcaacctccgaaatggtttgctattttttttcttcaaccatctccgaacctcgagccacgactaagccaaaaaatcgacgacaaatgacgaaggctctgctgttttttcttcatttgatatctcgatccagctactccaactgtagatctgagatcccaaccccaacaacccaaagttgacatcacttgaattcttttttacttctctatttctatatggctcacttgctttttttcatgcagtcggacgtcgttgaacagcaagtttcgacgtggtgttgatagtttttaggtttattttgtttatatttattttttaactattatgaaaattttctaggtttgtattgagcttcacacccatattcgagctatgtattgaattttattgattcatgggaatatttcacttcaaaatgttatgtattttttttaattaatctataaatcaatttttatgttgagtgtatactgattagtatatccatttcttatttaattttacggaacaaatataatttttttttgggtttattttttttatt

SEQ ID NO: 330212 - DNA, 947 bp, Cannabis indica
aattttgtttgtagtgacaagattatggtgctcaatagtgcacaatgctctattattaatttgtgaaatcccatattgcattattaatggatatcttttcactttttttttcttcttttgaacaagataatgtttctctttattcgcaataataatagttttcataatgatgatactttgctcagttgctccatgaagaaattgattcttttctatatatatggcccttctctctcatgtatcacgtgtcgttgtaataatatattacatgtatcataataatcatatattgagtaagttgaatgaaaaataagagtgatagcatactaaaaaattttataatattcaaaaatataatatatattttttttatgattaattttaatttttattaaaaaaataaatagcatcaatactgcaacataacattcatacaaatttttagaatattccctccaatagtatagcatcttaatattttgccaagcaaccgttttcaataaagtgttgaactaataaatttttaaaagtgtgctaaactatttttaatagtgtgactagtgttggtttcacaaaagggatgtaatataaaatattttgctaaattaattttatatataataaataattactttcctatttacatttttttggttagttattattttcatttgatgtatttatttttttcgacaattatagtactttacatacaattaagaaaatttattagaatttaaatgcatactaataaaactatactcaaattattactaataaattttaaaaataaattaatatatatatttatatatatatatactaacaaaaaactacgtgcgaggcacgtatattaaattttatcctaatttttttctatgttatttgaaagttatacaattaaaaattaaaaaatatatattattaattattaggtgagattatta

SEQ ID NO: 330213 - DNA, 1908 bp, Cannabis indica
acaatatatacttacacataatcatataaggatcatttctgaaagggcattacccatgaatggttactaaacaaatttaactataaatattaattttaaaaatattaaataatcaaattttaatctaataacaaataataaaagagaaatttgaatttctatgcttagtttaactacttaattaaaaaaaatctaaaaaaatatctcttttttatactatatcaaaaatatgttcacataaaaatatttgagtgaaactcaacttttacttatcttttttttttttctaaaaactttttttttaatatttttttctaaccgaaggaacaatctgagcccatatgatgtaaaagtgagagatttttcgaattagatagaaaattaagcataaaaactcaattttttctaattttacccattcatgggtaatacccattaagagtgcacccaatcatataaaggaataattataattattaataaatactcatatttttaattcattcatcttaaaataattaatatatagtattagttctatattttttaatagtttagttatagaaatttaatactaggtgttaaatttgaattttatttgttattagtattataggttttttaacatatcgtatcttgtcgtgtctgaaaatctatattttttttccagttttgtgttgtgttagaaagttagaactttctttataatattagaactttctttataatattatttagtagttttcacaaatagtatctatcttctcaaacacacacacacacacacacacacacattttctcccttctttattgagaaaatcaagatgttaagttttcttctcttagataaagtactctatgtccttgcatgttgataatgtaaccgagtgagatgcctcaattactggtaggctcctctgatgatcgtagccttgaattttatggttacgatacgttatggtggctttggttggcccattcttctttaggtaacaactttattttcttgacttcaatagtagttggcttttgctcattaaaagttatggacgtgttagggttttttttggctctagcagtattctgccatcaacattggcatccttaggttacttaaaatataagagagaaatagtatttgatgaaatcagcacaatcagagccaatgcactgagattttcatttatagacaaaaggaaaaaggtacaaaactttctagagaagggatacctcaccaagatatttggaatgcacataatataaggaaatattcttcctgacacacatagcttaaaggaaagagaaaaataattacctaactatgacaccctacctttaaacataattaggctaatacaaatagtaaatggttatagactagtaaaatgtggatactgagattttcaaaaactagtataataagagcttgagaaatagtaaaatacagtattaaaggagattgagttttttatgtggtttaagcgttaatgagccttaatctacgagtcagcctattggccttgaaaggcttgtataatatttttacagtgtttatgcaagaaactctaactctgtactcttggcttctcttaaagaaaaggaatacatagagtaattttagcagagctttgactatctcgatttccatcccccttcgtatgaaaatagaagagtatttataggctaaaaggggaggtatggatatacccatgacctgcctagggtttttgcaaaaatcccactaatggggtaaaatacatgcaaagagatgactattaggcctcttagaagatatttttcttgtgcgttgaagcaactggacaagggaccaccattcgtacagatgcatgtcgtcaaaaggtttaaccttgaaaagtaaatgcctggaataatcgtctggcaaaaa

SEQ ID NO: 330214 - DNA, 1203 bp, Cannabis indica
aattttctcctcacgatttttcagttaactactatatcatcaacgtagactattaatatagctattcaaattagcttagtgcttaacgaattagtatggtcagcttgacactacgagtaaccatctatttttagtagtgtagcaaaccttttaaaccgagatcgaggtgattgtttgaggccgtagaaagatttatagagtttacattgttctttgagaagctactttcaagacctggaacatctatatattataaccaataagatgactcaaattgaatttaattttgctacaggcacaaaagtctgcctatagttgattccataagattggtgaaagctctagctactaagcaagctatgaacctttttatactcccatcaaccttttttctctaaaaaatccatttacatccaacggtcttctttctagtaggtaaatcagtaatcacccatgccccattattttcatgagcttgaatctcctctatagagcaacaactttccattcagggaccaaaagagcttcatgaatagtcttgggaatttgagtatgatctagagtcgagataaaagctctaaagttttctgagacaaacttgaatgtgactatttattgagtgggcgttgagtgcatgaccagactcctttcattgtgaaattggcttgtctgaatcagactcaatggcagagtcaagtttaatctcttcttgaaaaatctcaggattgattgggactcgggttggaggctttggatgtgtacacttaggaaaaggactagttgatggttgaaatggaggttccggatgtatagactgagggcaagggctagttaacgattgtctagcggcattagactagacacttgaaggcttggaattaggtttgtgctggttgcaaacttaaatttttggatatttatgctgcaaatttccctaaagagaaagattacactagcatccaaaagaactaagatttactctaacaatatgctttatagtttaatgtaattataatgtagttgttggaactcaaggttccacaatttgatcatacatgccagggacaccactcacaataaccgagaataaagccttatggctctcacagaacacacacacattcaagtactaaacaagtgttttacacaagagagagagagagagagagagagagagagagagagagagagagagagagagag

SEQ ID NO: 330215 - DNA, 635 bp, Cannabis indica
aaatagaaaatcatttccttaattagaaaataacttccatatataaaatattctaatatgttgtcctttggttcaaagacttctctggtatcttctttgcaattggttgtgtttgtgattttttttctagcttttcatgttactagttgattgtgctgttagaattaaggaacttcaaattcagatgaaataagaaaacataaattcacatggtaattatgagtcttggttggttggttggttggtctggtatggtcctgttttgagttttgaacatattataaaacaacatgaacagaacaggtgaattatagttgccattgaacttggaatacacacaataaaacatcatgaaaccatagataacttgttacaatgagagattgggcattgaagcaatcctcgacagaaatattggtgtgagatcaagttttgtaaccagcaaatttattagtccttatatgtacttattcaactagctatgaagtaaatacaatcacaaaaggacattcaaaagtttttaatggatgccccttttgagttactaataatatcaacaataaaagaattatctaacttcaattaatagcagaaagtcactttagaatcttatattatacagctaagaaatgtcc

SEQ ID NO: 330216 - DNA, 888 bp, Cannabis indica
gtgcaatagactgtttgaaccttgtttctgggtttataaatttttttaaaatttttctatatgtcttaaataactacaacatatatgatcataaaaataaaataaactaagaagttcttccgaatacaaaaacagataaggttgcatcgatgcacccctttagatggttcattgaagaattttctaaaacttttttgctgcaaaagaaagaatcaatatcaataatgcgttacacatgatgaatctaatagtaaatttcatctttcctacgatacaagtgtacggaaactttatctgcgtttcaggcattggacacgtagacttcaagtcatcatccaagacccatcagtgggaccctcagcaaagataaaatgggccaagcccatctggatatgtccttctaggaacatatctttgttactcgcaaagccttccgccctaagcaagccgtacccagaagacatctccagtaccacgagattggagagacgagacagtgcgttctcagaagacccttccaatttccatttatattcttgcacaccaataaggaaactctagttgtcagatcacaacagagtatcgtatcaagattaaagaggaaacttactacaataaatattatgcaatttattcacattaattgcccacaatcagtgtatgcggtgtggaccagatcaatccaaatccgatctacctagtctgcagatcgtcttttccatgggctgtacttcatgagaaagcctaagagtactatttactctaaactctgtaatagagggaaagaggaaacctaatgtaactctcaaactactataaatatctcacgaatcatatgtgttaacgcgattttcgttcagtaaatttgagccttatgattatgattca

SEQ ID NO: 330217 - DNA, 612 bp, Cannabis indica
aaaaagataccaaatttgacatacagtgtaaagatcccttttttttttccattgctttattatataaatgtctccactatatttattatgtctatttataatatatgaaaaactttaaatgtctctaaagtttagacacttaaaattttgtctaagttttaatgtcttacaccaattgtgaaacactaaaagaaaagataaaaagtacattttgttgtagagtaatctagcacaaacaaatttgggaagagcattgctattaggcaccagtggtgcctagcaccttctcgacatgtcgcgttgcgattggctagcgatactctctaaaagctattatattaaactctattggatccgatacttagttggaccaattaataatgatattgacacataagagggtgttatataggcgccactggtgccctttagcatttctcatttgggaaatatgtatatatgtatatttaattttgttgaataaatgaccctcatagcgtgtgaatttacagctcataaccacatccacaaattattttaaaaagctaatagaataaaaagtacgagaagtgtaaagcccgcttagttaatttggaaattagcagttgttta

SEQ ID NO: 330218 - DNA, 896 bp, Cannabis indica
tgtgctctaacgtttatattgttaaatttaatgtttcatactaattatttactgtgaaataatgatttttaataatattgattggttgtgggggagttaatctgcacagaaagttaaaaaaatatatagatctttttttatatttttatgattgaattacttggagaacaatactttcaagcatcaactggcttcagattatgtgtgctcaccaatttttccaagtttactacatgagtttgtaacattgtttgtattttatgttgtattgtttgtgatgccgggattaatacctttcatcacactccaagtagggagtggtttgaaacagatgcaatgttgcgtgttagtttggaaaattttctcttcttcaccatctttgaagttatgatggttggtgtgaaaacatggctattttttttcggatcctggtcatttgatattcattttctttttatgcaaaatcctttagtaaattttgttaaacaagtcgttttttatagtttttttattttttttgtttgatttcagttactcattgagttttttgatattatcaacctattcttatactgattattagtcgtttctttctttggtttaattgctttctaactttgatttcgagttctttttgaactattttcaggttaattttatttgattttccttcgatctcttttgcttttctttcgcatcagtagttccaaaatatacccctaatattttgaacttctaactaattgagccgcttcacatataacaatgagtggtcatctcatcttcatctttaaatcaaatcccatctaacactttctcatatttgtttttctttacttttctgtttcaccaaaatctttgctctttttttctttggtcaatagattgtccaatat

SEQ ID NO: 330219 - DNA, 1345 bp, Cannabis indica
ttagaaacctaattacatatatatggcatatcaaataccatacaaaaacctaaacataaaaaaataccatataaattggccaaacttaaatgtgccatatttatcataagaacttttaaaatcccatactaagtgtaatttcctcttcttaatatattgtgggttgggccccacccacattaaaatgggaaacacgtgcagcttgatcataaatgatgatgatgaaaaagttgaaagatgatcttgaccgttgaaaagatgaatagaagagataatggatgaggatgtggttctatctttccgtacaaataggaagtgggctaggcagggtgggcctggtgggccggtcgcggggtagtggggtattgtttggcccacaacttccaccacctcgcctacttgtacttgattgtattgtctatacctctcaatgaggggaatcttcttccatctttcttcattcccaaaactatttcttttcctttatttattttaaatattcttatcctttatctctatattagggttttatgcaacgttttagtttgtaaattcagttcatgagggataaaattagggatgtacacaggtgcggaattggcagagagtgctttcctcatttccatctctgttaaaaattttaatctccattcctgttccatcctgtgtattcttcatcgggaatggaacgagaattttttaatggggcgaggacagagcgggaaatctctaatataaaaataaaatatattttaaaaatttaaatgtataaaaatattaaattatataaaaatttaaaaggtttttttttttttttttttttttttttaattttacatttcaaaattaattttttttataaatatttttacggaattctatatagaaatccctatagcaactaacggagcaacctaaatcgcaaccaaaatctgtatagcaacccatatagaaactaccgaaaaattaccggagcaacccaaactgtaaatttgaaaaaaaaattttaaatagtatatgaagtaattttttaaaattaaaatattatacattatttattattcaatatactacttattatacaaaacataacttaaaaaataataaaaataaaaatgacactaatataacaaaaaaatataaacacatattataaaatataaaatattaataaaacgataactaacatattaagcgggtctctatcgaggcaaggagtgtcattcccattccgtttaccgttagggataaaaaataatccccgtctctgccctattaggggcaggtctctatggagcctcatctccatgaaaaaaaatgtacacctctagataaaatacaaaat

SEQ ID NO: 330220 - DNA, 1023 bp, Cannabis indica
aaaaaaatataaatcataaattcaaggtaggttgaatccatatgggtggttgggcctccatttttgaaattattgttgaatcttcatcatctaataataatgtaaattttttatagctgttatctccgagattgtagatgccacaatcacaaggaactccctgaggaccgtatgagattaaatcagtgtcatgactgaaatagatgcaatttgatttacatccaagaaagtttgatgcacgcacatatattgaagagttatctcctagaaagagagcagcatctcctagacttttaactataaccctttttactcctccatcaacaaaatccaatttaaaaatatttacttttgtagtacgtcgtattgtcaaactatctttccattcacaacgtcttaacacttgtaaaatatctccctcaaatgacttcacaatataagacttgataccaaaccaattgtcagaattattccaagttacttttgtaccacagtatggctcacgactatcataagatgaaagagtgtcatgattatgattaagaaaataaaacttattgctattgaacaatatatcactaaatatttcttcatctggatcaatttttctccaaatattatctctcccgggacttataatggctattttccaacaatgtaaataaatgaccacaaccatataatcatttggatttattaatggatctgcagtgattgtcgctttgtaaatatgttgatcacaatattctctcatatcttccaatccttcaagatccccatcttcaacttctggaggaaacaaacacggaagattgatgattgcactatcatgatctgtagagtaaggcttgtatagtgtaaccgtgaaatcacgattcacagttactagccatccttgtgatgatcctccaaaacgcttatcataaggtatatgtaatttagatatttctttgaacttattagtcattggatcatacatatcccaagtatgttgttttctattaggaaccataagcatgggaa

SEQ ID NO: 330221 - DNA, 1143 bp, Cannabis indica
actctcatctgaatttgactatgcaaagtcacagttatttccagctctgatgtctcctatttataggatgtttttagccgcattcttcgaacagaaactactccatctatttctgttaatagtgcttttgctagtcatagcaccatggaaaaactctactccaagtagtcacaaaggaggcaattcacaaggacctaacaatcaagcactggttatggaggcattatgggtaactattgtcataaaccaagccacaccaagttcaagtgtaagaagctatagtttaaaaatcaacaaaaacactatgctaatattgcatacactagtgatacatctgacaaatcgattattatttctatggatgaattgccaagttctcaaggtaccaagaatcactcaagtcttcatctccttctatcactgcgattattgatttagataaatctaatgcatgtcttctttccacatcatcgaaatgggtctttacggttaaagtcaatctagatggaacaattgcttgcttaaaggctcgtcttgttgccaagggttatgctcaaaactatagagtggactattgtgatactttttctcttgtttctaaacttacatatattcaactgttcatttccatggcagctactcataatgggcctttgcatcagcttgatattacaaatacttttcttcatggagatcttgaggaaaaaagtgtatatggagcaacctcttgggtttgttgctcaggtggagttagggtgagtttttcgtcttcgcaagtctttatgtggtttgaaataaagtcctcgtgcttggtttgataaatttagtaaggttgacaaagttggtctgttgaaaagtaagtcagattattttgtgttctataagagatcaactgccggtatcatcttgttaattgtgtatgtggatgacgtcattattactgtaaatgatactagaggcatctcatcccttaaatctttcattcatacccagtttcacacgaaggatttagaggtgctctttcttaggagttgaagtcacttagagtaaacaaggtatttttctatcttaaaggaagtatgtacttgatttgttaaccgagacaggaaattaggagccaaaccttgtagtactccaatgaat

SEQ ID NO: 330222 - DNA, 638 bp, Cannabis indica
ttcatatttagggtgttgatcaacatacttgtgagtagatctaagatcttggtaaaataatttccaacagtttggactacgtatatcaacaacttcttccacccctatgtgttataaagattctatggtgtttaaaatataatttagagtttaatgtaaaagatctttgaactgcatatattaataactttttcctcccctatcagatcacaagatcttttattaaataaaatcttaataattttttaagaatttacaattattcataaatattaaatttaaattctattattgatgtggtattttctctatgtagagattataataccatagattttgtaacattaataaataaaaaatacataaaaatatgataaacatataaatataatttggctttggcatgcaagttatagaactaaagctcaattcataaaagcaacttataatgaaatctttttaaagggaaaattattatattaatactctcaaaaatatcacaatgaattgtctacaataatatgaaataggaaataaaattctatactaataattgaagctaaattgttcgataaataaaacaattaattcaaaaattaaaaaaaaaaagacgagcttcatcttcaacttggacaatc

SEQ ID NO: 330223 - DNA, 658 bp, Cannabis indica
taaattctaactatttaattatttaattacaattaataataaagacaagatatggagtttgaactaatttaataaaataatttggtaattagaaataatacttctaattacataatgatggattaatggtcaaaggtagatggtgtgaaattcctaaagctacattaaggaacaacaaagaaaaattctttatgagagagattagtttatttcttttattttaaaggttattattttaaaaatatctaatatttactcgattctcatttcattaaatgtttgattaattgtttgctaattgttagtacatgcatatttaattgtcatacataaaatctcacacaatttgctttgataatcatacatctcatactagaaacatgattatttaggattgtcctatatattttatgtgcattagatttagataaattaattacataaaatgttaggttgtattaaatagtttaataacctggtaatctacaccaagtgacttactttaaaagttagtcacataattaattaatatgtttcaaaatatgttattttttaaaaattataaagtaatatggtattaattaaaatatttttaggcctatttaatagtaatttaattaatgtcttacaacttggttaaagattaaaattaattttt

SEQ ID NO: 330224 - DNA, 830 bp, Cannabis indica
gtgaccctggagacccgattggaggccaaaaatgtcacaacgacattagttagaaatattgatgagattattgaggtaagttgattttaaaaataccaagatattttggggtactcgcagttagctaaataacctagaaatggaggtttcttagtggaaaagaaatgataggataactattaataaaaaaacgacaataggataataatattatttataatattattatttttattaaaacttatcataatgataagtttattatatatattataagtttataaacagtatagaaggaaccctcatcctccttcgacgaaaatctcttctctctatatctttcttctttgattgtcaactcgaaacctagcgatctaagctctcgtaatagtgggataacaaatctttgaagagggaaagctttaggtataatttaattttgttttaagttaaaaacgattggttttatatagcagctttgtaatttagagtgattatggagaatctagctttgtagaactgttctttggtagctatgagactagtttcgatgtttacttgttgaatttgaggtgattttgagttagaaattgagtttgaaactttttaaagcttagtccaaacaatactgtcatttttcatttagggctcaattttaattatgttacgtaaggatggtagtatttatgatatatatgtactctgtgaagtttagagtgatttagataggtttcggtgagcgcaaaaattagaatttttgtgttctaccgttttggaaattcatatgagatcaaaaattgtatttttgtcataacttttcacttaggtgt

SEQ ID NO: 330225 - DNA, 739 bp, Cannabis indica
gaaagtaaataggattaaaaaaaaataataattaaaaaattagggactagtaaacaggtcatagtactttaattcgaaacttacataaaaattaatgggtttgagtttttttagtaggtttgggttatattcaattcatctaacctgtttaacaaatgagtcctgttcagatgttcagattaacatgactaataggaaattaattcattaatcatctatttaaaattactttagtagtttaacaagttataaattgatcataaacatgttaaatgttattaataaattaatgagttgatatatttaaacaaaatgtatttataaagggttacaccagtcgtctcgtattaattatttataaacgagttgtttttagattttatttttcgtcatgattattaaacgggtcgttagaaacggatgtaaaaagtttatgtaaggggatcaaagtgcaaaaacaataatttaaggtggccaataaataaatttttaattaaatttttaaaaaattacaattttataactaaaaaaattgaaaataaaaatatttggggggaaaggccctcgtagtcgcttaatagctccgttcctgctgtgggtcgtgtttggatcgattatatacctctaatatagagtcttaacacgacacgaacatgacccgcgaacacaaattgttgttcttattcttggattttttctttggcaatttaatcgttgacttttgttttttttttttttt

SEQ ID NO: 330226 - DNA, 623 bp, Cannabis indica
tattttttttactgatttttaaaaaatactatatttttgttcaagggcccaaaaatactttttcctataactcattaaattttaaggtcagttagctctaacacttcacttgacttgaataaaaaattgacctcgatgtatgtttgatttggtaattttatagtgataagtgaacatttgaagaccatcctataatttgaaatgatggaattcaaagcaattattaagaatgtgtctatgattcaaactaaatcatgttttagtaagtctagaaattattaagtaaggtgctatatttaaaatatttcaaaatataagatctattttaatttgaggtgctaattaattatgaatttctattatcttaataattacatagagaaatagtatatattttggttagttaaaatttttaccttcgaattttgacatgtattaaattatgtcttctggacttttaaggtcgttaaaaatgcctctgaactattgagattgttggataaggattttaattttagtaaaaaaaagtctaacactgatgaaactttaggaggcatgatttaatacatgtgaaagttcgagagacatgatttggtagatatcaaaatttggagagcatgttt

SEQ ID NO: 330227 - DNA, 768 bp, Cannabis indica
ttttatgcctatggcaatttgtaggagtgttgcatctgcctttcttcttacgatgatggtgtagaactgagacaacttccctgcggtcatcacttccattgttcctgcgttgataagtggctttttatcaatgctacttgccctctctgcaagtacaacattttaaagagcagcatttgtgtagaagtttagtggattgctgaagtattatgaaaaatcatctcaatacctagggttcttggcatgggttcttggcattcactgtcgctatattgttagttgatagttgtatgcagagcttgtttgctcgacttcatgtgggcgtcttctgtgttggtgttgttttacctagtcgtcaataacgaccatgactcgttttcacttgtttatgatgtaaattggtgtgcagaggccacaggagcatattggtggatgacttgtagtgtaatgggagagtcattttcttccctttgtattcgtcttatttctatatcgatgggtttatgcgtctaaggctcgtataccattataaggcaagtaaaaatatgtgaagaggaaaaagagagagaaaaataatcatggtgatgcccaaaggaacatgccaaactttgtgcctttcttgtgtagttttcaactttttcataattagtggcgccctctaaattatacagtcacatgtttttgttgttgtttgtccttttttttatgggctattttcaaaagtgtggaaaaaattattaaggttatgataaatatggcataaaaagt

SEQ ID NO: 330228 - DNA, 1140 bp, Cannabis indica
agagagagagaacagaaaataagagagcacatgcatatatgtccggggcaaaaagaattcatgttttctagtaataataagtaatcaaaactcataataagaacatatatatatatgtgcacatataataaataacgagtgagatgaatataatataatatataatgtaatgtaatgtaatatatgatgaaaaatgtcatttgtgcgcatttgtacatgctagtgggcagtagtggcaaatatataataggtaggtgaatgatcatattgctcaccatatcatgaatatatttaatatatgtatattacctgatgttgttttgtagctacggcgaggtgcaaaacggtgttgccatcattatcgccccaattaacaatttcttcttctccaatcctttgaatccactcaaccaagtttgtaaaggcctgaaatttattaaacttgacagccaaatgaagtgaagtttctccaacacaagttaaatcctcaacacattctttacaagaagagatcaatacatcaatcacctcaattttcccactcatggcagcatagtgaatagccgttcttccatctctccccttcaaacgacacaaattactagttgttgttgtaccttttatgagcacttttactatctctacatgccccaaagccgaagctatgtcaagtggcctaaacccatctttgtttagctccttaacaaattcaggcttaagctttacaatttctttcacataactaagtttcatagcttttgtggctacgtgaagtgggttttcatggggggacacaagtgagtaatcggctagaatcaaagggttttctttaatcagttggtgtaattctccaacatcgccattcaatgaagcctcgaacaatctccttgtactacttaacattatttttctttgttttagactaattttttattacacacaaatatagattgtactcgtgtatattaagatcatatatatcatatgtataatagagtttggcggaagttttataatattgaactagttattatatagatgaagtttttatggtgggaggttggagaaattataatttacttttttttttaatggcaattttgaaaaattaaatttgtaaaattttttaaaaaaattaaa

SEQ ID NO: 330229 - DNA, 1158 bp, Cannabis indica
atttaaaattgggctttggtagattcttagcttttccataagtgagatacatcacagtgacagttataatcccatgtttcagttgttttttacattgaataactgccttcacagcagttacacaaaggaaactgcttgttcagttttaaacctcaactttaaataactttaaatgatttgctaaatagtttaaatttaaatttcatatatttacttcccttttcaaaattctataattaataattcactagacagtttaaatttaacttttaacacaatttatgtttatcatatgttgaaaccttaagttttatgcttactataatgctactttccttttattggttataaaattatattctacctattcttctcctttttcttctattttcaatatgttaatacaaacttggaatgtacgcggtttaaatagtaaggatagaaaaagatttttaggtttgcttctcaaggattttcatccaaatgttttatttcttcaagaaacacgtttaaaagtaggatctactcttgcgctttgtaagaaattttcttttactcatggctatgaggtgcctagtattggtttaagtggaggtcttatgttgctttgggattcttcagtggaagtttctataattgatgctaaacaaaattatattagttgtcggataatcttgtccgatggatctgcttcgtttcagttttgtgggttttacggcgaaccaaccacttcaaatagacatctttcgtggacattacttagacgattgagtgattctatatctgaatcttggctttgtatgggagattttaatgaaattttaagattaagtgacaaagtgggtggagttactcgtcgagaatctcagatgaaccaatttcgtcaagccatagcagagagctctttgaaccctttagactatgcagggcctcggtttacttggaagtatagtagtcactcagatactattgaggaacgattggattgggctttagttaatgaagattggaatgctaattttcctgaggcaaggttaactcacctagatttctttggttccgatcatagagtgcttagtcttgagtttggattatctccggttccttcttcaaattcatgtaaaaaacgtaaaagatttcgctatgaagctctatgga

SEQ ID NO: 330230 - DNA, 681 bp, Cannabis indica
ttatttattaaattaatttatgtttagcaagaatataatacagtgccatccctagagcgcgcgacatcggtaattaatatccttcaaacttgtccataatgtgtggtagtgtagaagcttatgaaattttttagattcttttttgtattgtacaccaagataatctactaaagctttttattattagtaacttcttaattactaataatagtttaatgatgcatctactgagtcaaaataatttaaatcttgtgatttttgtcacatgtaatgaatttataaatgtcctatgtatataattaatatggatcatgatagttgtaattaataaagcagcagtaatgtggatcatcatcttttcatgcttattttggtctttcatcaaaagtaataattacttctttctatatagcagatcataattatttatatattaccttaaaatattattagctagttttatgatcatgatcgagatcaatatgttaaattttattcagacatatatatacatttaacccgtgaaaattgatctcctgggctccaatatgcctgtaaaggctaatgataataatcataacaacagcaataatgagagagagaaagagagagtgaggaaaagaaagcaagtgatcatgtaaaatatggggtacaacactacaaagaagtataaaaatcaaa

SEQ ID NO: 330231 - DNA, 634 bp, Cannabis indica
ttaggttcaatctcaggagtgttattcatgttctttgatttgttagttaaacctattttctggttagggtgatacttacattttgggaacatgatagtgtgattgagtgggagcgctaaacatagatatggaatctataaatagtttgtagtcacaccaaaagtatggtttgtagtgatggctcacaacaatcatatcagttataaacccacgcaaaagcttcgatgactgacagcggcggagccaccacctcatggtggtttttagggtattcaagctattgttgttcaagctcacgacaagtggagaaagagtatggaattcatttttcttgaaggggtccggagtttctcagatctaagctgagacatctcggctaggtgagttattccataaggaagaagggtgagggaagctcgaggacattaggacttgggggttttggggctcgcggagttcagtcgtggctgccgtataccactacgctgaatgacggcggctctgtgtactccgagaaggagataggaacagagagagaagaggacaacgagaaagagagagaggtttaggggttctcgggctcatggacttttggtgatgagtggctcgtcgggatggctgagaagaaccacct

SEQ ID NO: 330232 - DNA, 980 bp, Cannabis indica
aaaaaaaatcactatatttttttctttatatattcttaaaaaataaattttgattttaaggtgcatcttcatcccaaatcacatttccatctccccattttccatttttcccaattttatttgtgggatagaaatgtgacaggtaatttaaattaattaaatgcaccttaaatcttttatctccacattaaaaaaaaaatgccattaaagctttgtaaaaaaatagcttcttttttccaattgcatatcatagaacaaattgatgattgaagctcttgctctcttacacctacaccataaaactattgatttcaaattgtattaatgttatttttttttgagccaaaaaataaaattttattaaatcaaatcagctaccaagatagcttccaaaccagcagggacaaaacccccgtgggaaacacaaccaggaataaaaccagaagaacgagctaaaaagttagccgcctggttcccggaccgtttaacaaaactaattgaaataggaaataaaatagaggattgcataagagcaacacaatccgaaatcaaaagccccaccagagacaataaccgcttcttttgttgcacggcttgcaccaacaacaacgagtccgagtccacaaccacactagcaggcacacccccctcaacccaccttcccttcacccaactgagcgcctccttcaacgccataacttcagccaaaacgactcattcttctgttgcacgacttgtattaatgttattgagtttgctcagcactataaaatacaattggagaaagaagctatttttttttacaaggctttaatgacttttttaaatgcaaagataaaataatttttttttcacttattaatgttattaagtttgttgaaaaatatgttgggattagcattatcttgtttgcaataatattaacatataaattgtcattaaatatttaattattttttataaataaataaatatttatt

SEQ ID NO: 330233 - DNA, 695 bp, Cannabis indica
tttttttttgtaattattgtttgcctttttttcatttatagagagccatgttcatcataattatgtgtgcatattgttgtttcacgactcatgtcatcataggtagactaggtgtccactcacctgtagataaaagacctagaatttgtctaggaaatgaatagaatttgagccctcaatattataatggttatcatgcacgactactcggcttatgatattattttctatgattgatattgaaaattaggggtaaagtaaacaatgtgatatgcacaaatagcttgtgtcttgtgattacttgtgatctctctattttttttaataagtgatgatgataataagatgctttatttttaatagctaaccatacataaatttttattaataaatttttggttttttgatattagttatttttctattaggccttataagctcactccttatatttctctttttaagaactcaatgtgatacttatgaaggagagaagctcgttgataaaaaataatgtaattagcttagttcaatcttattaacgattgaactaattcgttattaattaactagttttaagatgtaaattaaaatggatggtcaacaaggaagtatttgttttgtgttttacacaatttattaaattaatcatttgatgatagcataatcatttgagggagagagagagagagaga

SEQ ID NO: 330234 - DNA, 794 bp, Cannabis indica
aataattattaataaaaaaattagcacaccaaccgtcgcgaaactggattgaataagtgtcggtagaaaatagttgagtatgcttattcacaactatttgaaagtattgtggctcactatagccgacggtttagaacaatcggtaaaaaaattattgacagttataaaccgtcacacaaacaaaaatcagatctaagcccttatgaacccagatctgagccacaatcaaaatcatataaatcacaaatctcaaatattacacaatataaacacagatctacgatattatacaaatatagattacactataattattaaacattacacaatatatttaagcaatacacaaatcaaagatttgaagagaacggagagacgatgagagagtgacctagccactgagttttccttgttcggactactaccctcgaactacctgcaagaacaaagagacaatgagagagagacctcgcgacaacgaatgatagagaaagagacaccacacgatgaaggaatcaaacagagagagagaaagagaaaagaaagaggagacattatacctaggctgcacaaccatgattcaatgaggatgcatggggcttggactggtgcgagcggcgccaccgtggtgggcaaggactccgtctggtatggtcccgctcgactccataatgaatgagagagagagagagagagagagagagagagagagagagagaagtagggtttgaaaaatgagaggggtatttttttaggtttaatgtaaagtggacctatttttaaaattttgaaat

SEQ ID NO: 330235 - DNA, 1613 bp, Cannabis indica
cttacaaccgagaaattttcaccaaggtgtttccaaacatcttacaatagtttcgcaccgccaagtactattaacctctttctcgaattgttgtagtgacaatctcaaagtgagtgaaaagtgtttgttggatgttaaacttgggagttcattaatgtcacttgaataggttaggtatatgatataaatccaccgaaaaagtcgccggcagcaactccagtgactttttctacactggcagctactccgacgactttttcggtaccgaaagcaaactccagaaaaagtcattgaaattggcatggtcgccgaaaaaattaccaagaaactggtttcttgatgttcttgctattcttgatgaagaaaccagtttattggtaattcttccggtaatttttatggcgacaagccaattccaataatttttccagcgccgatagcaactctggcgactttttcgacattggtagttactccggcaacttttctgacaccgacaacaaactttggaaaagtcgtcggaattcgcattatcgacggaaaaattaccaacaaactagtttcttggtagttttttcggtgatttttctggcgacaatgccaattccgacgacttttccagtaacggcagcaactccggtgactttttcggtaccgacagctactccggtgacttttccaacaccattgataaccctggcgatcactttagtttcatttgttttatttttttaaaaaagaaatatgaagagaaatttaatatttttttattgtaaactacttggtaagcatattattattgatttttctttatgagctatattttcatgtaatgaactttgtgtgatttaactattaatggaaatttccattttctaaaaaaaaaaattctaactattcaatttttttttaaaaatagtataatttaatatatactaggtgtactccataatataaaattaacttttgtgtaaagtaatattttttttacaagtctacatttattactcatgtatgacttatatatatccattttgtttttgaaaaacttgtgcttcattaaaaaagagaaaatatacaaagcaacaagttctaactcattatctaatccaagacctagcttagcaatcttatgagcaatcacattacaatccctaggaatataagaaataactagacttggactgaaagataacaagttcttaacctgaattagaacatcatctagaacactattgttccaattacaataagcaagcctatccactatagatttacaatcggtcaaaagcacatctacatgaagattaatcaattgagcccattggatggcctggcaaatggcctttgcttcagcaacagcaggcgacactaaaccagcaaaagggatttcaaaacctgctaaaactctattacaagcatccataaccaccactccgatattgtatttacggttataagaatcagtggctgtatctgtgaaaattctgaagcgacctgaaggtgtttgttgcactgatgctgcatgagtagcaaatttgggacctgttgcctgagcttgctgcacatccagaaacttaaaaaagaaattgagactccagtcatacacttcc

SEQ ID NO: 330236 - DNA, 1383 bp, Cannabis indica
tttttttttctatgttttctaaaaataaaattaaatttaataagaggattagagtattttgaggttttgctaaaaatttaaagttaaatttgataactagaattggagacctaaaataaaagtataagttgaacaatgatgatatagatcttaaggcaacagaatgaaataaaatttaaaatatataaaataactgataaaaaaaaattattttttttttctcatgttacattaaatagaatttttttttttaattttaaaatagaatagtcattctactaaaatagtaaaaaaaatattatattagaataacattttaatactttaaaatgtaataaaataaagaattgaaatgaaaattgttttttttttcttattttattttattttattatctccaactaaacgtcaaactctagtattcaagctttatttacaataatattttgttataaaaatacatattcatgagatggaatagtgaataaaatatattctttattttcagattgttctaccctaactaacataattaatagcatcaacacctctttatcatgaatgcagcgatatatcttacttaagggggaggccaagtgtaaagaccgcatataattagtaccttgaattattaaataattagggtttatgaatgagattaaattaaaacctatgaaatgcatattttggaaatatatttagtatcatatatgttattatgctatttaatgtaaattatccaatttctgtgtttgtgttcggaagctgtggaaagcgacgttgggcctttagagagtcatatattgtatttctagaatattagtggggtgttatagttaaatgttagaagcgttagaattttcggggtttgttatttgaccaatttacccttgggagtttatagttaatttatttagcttgaagggcaaggaggtcttttggcaaatacttattttgtcttatttggggttattttaaggctgagcttaagattattatttgaaagaaaaaaaaagaaagaaaagaaaagaaaattggacatttcttaagttagaaggaaaccaagagaaagggttcatctcttcttttctctctctttctctttcgattctcttgggcagcagccgggagttgggattttgagtttgaatcaagggattttagtgattcttgggagctttaatccaaggtaactcttccttcttaattttcttaagtttaggttaggttttacatgtgaatttactggaaatggtttgaggttgtttaagcttatttgaattaaatctataggttgaattgaggtttgagcaaagttagagtttaagaactcaaacctagctctctaatggtgatttgagaatttgtgtggattgttgagtt

SEQ ID NO: 330237 - DNA, 1111 bp, Cannabis indica
gaaaagagaaaacctcagagtaaatatgatcagaatcgaggagaggaacccctgggcaggcaagccaagagcagcgccgatatcagcaacagcagggtggagctcgttcacagagagcttaccatctctatctttgtccaactcatggaacttatggtccacgaaatgactgaacacctcttcgttcccaaccaactccattatattcgaaccatctagaacctctcctcctccgcttttcttcatcgatcttggactctccatcattccttcttctgattattcaatctctctctgtctttttgcttttgctttcttgtgagtccttagacgcgagtctcgtgactcctcccacgagttcccagttgagttaaaaaggtttcgtttagctcaaaccttcttcttcttcttatgtggttctctcactctctgtttcgagttttttaaatacgagaggaaaagtgttcgtaagtgggaaaaggtgtgctttttctcttgtttatttatttatttgtaaaaattaaaaaaaaaaagagaatcatattagctacattgcggaaaggtattcttgctttcgttttcacttctcaattctcattacaaattaattagttgaacatttttaaaatacaaaggaaaaaaaaaaggaagaagaagattatccataatatttaatataatttttttgaaaggctaaaaagtctttttattgaggtcggttaaagttttctcctactttgtcttgtttgggtggaaaatcaagatactctttttagtaacataagaaaaggataaagggtggactagtgaaatatatatatatttttggggaatgtgacgggtgagtcccaacccggtccaggctgaaagctcgcttaaactttgcggattaggcccaactcgggataagctagtcggccttcctgcctacttttttttttttttttttttttttttgtagtaaatttagactctatatcttttttataagaataattacataagacactactttttgtaaaatatttacatttatatgttcaaagaatatttttttacatttttacagttttctaaaaaataacacgaaaacaacataaaatcaacaaga

SEQ ID NO: 330238 - DNA, 1652 bp, Cannabis indica
atgtgtgtacattaaatcaaaataaaaaataataaattaagaacatatacctcttgatgactatcagagtattctcgtatgttgtatccttaatttagatgatgaggatgatgcaattgaagttacaccaatgtcttccaaatcgatccaccacacacaaggaatagtgtggaatattaggataaagtgcattgtgctagttgaattctcaatacatgagcaagaacacttgagagagaaaatagtttccttttctcctttaggtatttcgaaaatagcagtgtaaagtgagttatgcatcaacaaacctgcctttccagatggttactgatttcttaaatcgggcttttatttgtagtagttaaatctcattaattaaatcatatttaattatttgaataaataaatatctataaccgaattcggttaatgatatttatgagggaacctctcgaccatttgagagaatatctcaacaattttgaaatatctttaaccactttttaaattttaatatttatctaattaaattaagtaattagcccaataagccaaattccatagggacaggcgcctaccatgtcttgtttaggacaaagatggtgtcttttaaactgacaacttttgtctcaacaaatgttttgaaaaattttgtcgtaataatttttgtcttttccctatttagttaatttgaaaaattatttatttattacaaaaataaataatttctgttttgccagttcaaaatagagttttgtgaatgatattatactactctttatctctcccttagcagtgcttcaaggtggtaatttggggaccataaacctatgattctaagctcaaataataagttttgtttaataattacatgattactccactataaatatagaattaaagtcttagtaattataaaattatatttactgggttttactgcagtgtctattgatataatcaattccagtgattagcctccatgtcttggttcgtaattagttttggtcaaattaccattttacccttttagtaacttctttatcctttagtaccattaattcactagcaaaagtataacttagattctatctgaatttgtgcacaactttctaatctagaattaacacttaaagagaactaagattcgatttgttaggaaagtcatgattctatatgtaacgttgttaggatatttttagcctattatttatgttatttttagagttaattttcttcttcattgtcactttttagaatagaattatgcttgtatttaatttcaagtttcgacacttggaatgtgttatttaaattattaattgtcataacagatacaatatggatgcggcgttcccatcacagaatatgaatgaggaacaaacttacgaatgggaaagcataacagcagagataaacatcacaaaaccagtgcatgagattgaaatatttgacgtgctaggcaagagtctcgacaaactggaaaaagggaaagcattctaccaaatgtacgtgaaacagataggttttggcacaagaaaagatgatgtacgacgtgatcatggggtcattataatgcgcaggtgggtttgttgttccgagggtttgaaaaaaatcaactcaccggacaacgaaagaaaaaaaaaaaaaaa

SEQ ID NO: 330239 - DNA, 1332 bp, Cannabis indica
gttttaaattatactttttttatatataagaatgaaacacatttgatttcttaaattttgaaatggatttttaactatatgtattagttgcttaaattactatatttctaaattaaaatattaaatggtataactctaaaagactacaaattatagagagaaactcagagagagagagagagagtaaggaaaagacgaagatcgcggcttcgaagtgttttttattctaacaataaacttgaggataagatattactgaaggagaagactattgtattgatcttcttgattaatgccaaagcttttctcattcccacatcaacgtcttcttcagtgaggggttcaagagcagtcgtctgagagtggtttggttcagcccaacgatgtccttcgttttagatttttgttttcatttattaatttactattattagtttaattccaattaatgctttttatggggttagaattacaaggagttcattccttatttaattttaatgttgtgatcgtgtttatgtgttgaaactaatttagtttttctattagtcttgtcttttgacatgtttttctagttttttccttttagttttttctggttcgagtcttgtcttttggcattggttgtgtagctcagaattgatcatcatcatggtgctatgatagaatcattcaagaagggaaagattggatgtgttcaacccgaaattgctgggataataggcattaaagaagcattgagttggattgcaactcattcgtgagatagagtcatgttggaaacagatagcttggtgtgtgtccaagcgatttagagcggtattttatgccttcacaatttgtgttttataaaacgatatgcaaataagttagctcattgcttggcaagagactcttgtttctctacaggttgtgtgcttcagttggaggactgttcctctgaagtgcgttctattgttttgaacgaatttattaattgatagatcttatgatttttattaaaaaaaaaataaaataaatggtatatattgttttccttttaaatatataaatatatgtgtggattggatgaaattagttacttttacatatcagtcaatatccaatctgcacaagagtagatttagttagattggatcgtgcagattcgattagattgaatattttatgaacacgcctatgtgcaacactgtaatgactgcttaagtaatttggattagtaaaggcaattagcactaatttctgacatttttataattatttatgaaattaattatttgtggaccccattattagaaatgagcaatagagttataatttctcaatttcgga

SEQ ID NO: 330240 - DNA, 681 bp, Cannabis indica
ttccaaaatttttttctgtgctttcgtttctttccaatgagaaatctgtatagctttatataacaatatatataaaaagcatgattatggattaagtgagatataccatagaagaaggaaagaaaatctgtctacggctgttatcgagtacagcaatgtgtattataagttttgtgcactcgcaagatgcttgttgattaaataagcttgtgccacgtgttagaataggattagattttctgatggtcaacgggaacaatttgaaaggaatactgtgaacagccccacaggatatatataactggcgctttggaggatatttttatgttatgattggaatgtggttaatgggtaagaaagaagatatgaaaaagttgaaaggatgatggtgggcccggtaactgtgattgtgtgagcaattacaattgggatagaaaaagatttcttattagttttggaattttcgttgggagaggaatggaatggatggggacaagatgcggttccaaatgctgaatgaaagatgatgtaatatcccgataagttaaatggtaaataattagggtttatattgatattatgaattaatcaggtaataagtgggattatgatcctactaatttatttcagcataaaatttaaattttgctataagtgagtaaataatcgtaatttgttaat

SEQ ID NO: 330241 - DNA, 597 bp, Cannabis indica
ataaattaaaaaattttatgccattttttttttcacttggcgtgtcacctctacgtggccaaaaccagcagacacgtgggagaaaccattacaaccagacatgtacattccatacaacttccaagttaagagcaaagacatagatacacaagtattgacaagatcatggtaggatgaccaatgtaaaaggccgtacagcttatgacctgtagaaggccggacagcttacaacctgcagaaggtcggatagcttacaacatgcagaaggctagacaacttacaacctgtagaaggccgggcagcttacagcctgcactctgacaacctaaatgcgttgtagttcgatgtatgggtctaaaagatctccaacagctcctacaaactcgagacaacttaaccacccacaattttagggattcaacaacataatgtaactgccttactttatagggatattttattatcttttttgttttttaaagatgaaaatgtaaaatcgtactcctatataaagtggccatgaccacagtgttaagaatattttaccatgatctaaatttactaacaagtatattgaattaacatcctaaatatgaa

SEQ ID NO: 330242 - DNA, 1074 bp, Cannabis indica
tttaggaggttttaccaccaaaatttaagaattggggttagttgcaaaaacctggccacttaaggaagttatgccgcaaataactcttaatataaataatggagtgtgaacaatttttgctaatattttttttatagtgatataaattttcataaattttaaattccaaataatttacagtaacagaaacaaagttcttgttatttcagtttgccgcgtgtttacaaaattttaaagggtatatttcattttggaccatgtgttttgcaaaagttacagattggacaatctgttttgttaaatggtaaaatagaccttatattttctaaaagtgtataaataggactctgagtttaatttttgacaactttttgttgttaatataataacttgaagacaattcctaacacgaacagatgtaggaaattttattagttttgtcataatacctccaggctccaagtcagattattattaagttttatttttacaaaaaattaattctaaggtcctatttgtaccaatttagaaaatacagggttcattttgttatttaacaaaacaaattatccaatctgtaacttttgcaaagcacgagttctaaaataatatttacccacttttaaacatattttcggtattttaaattatttgaaaattttcaaaaatttattagaattatgttgtaaacataataaatactgctataattttttttttttgaaaaacaatattctgatatatatttttaagcgcagagttaattaaaaagctataataaaaggttgacggtaacaatctttcataaaaaaatattactttatttaaattttgaaataaatctttatttatatatttaatatttggggaattaattaccgcatataactattttttaactaaactttttttcttaaatttactaaaattttacagttttaaaagtttaaagttgtcaacgctagttgcaataagagtttttattacgattttttgttgtcaatgttgctattgaaaatttcttacataaaaattcgtaaaaaatacacaaaaaaaaaatgttttaaaaatgta

SEQ ID NO: 330243 - DNA, 1564 bp, Cannabis indica
gagttggaatatcctcacttgacatctaaaaaaggtagtgtgtctccgtgtgatgtagaaaaaataagaaacaagaacactacacgcatggaagtggaagacagaatgaaacatccagaaaaaggttcatagactaaagctatcatggagccagaagaaagtacgcaaatggaagttgatgttgagttggaagataatgaagaccaaacagaagtttcagaaggatatggacagacaagtctggaaagttaccaattggtgtgtgatagaactagaagagagattcacctttcggaaaggttcacaagagcaaacttaacagcatttgcaccgacagaagtacaacaaattgaaattgaagagcctggaaactacgaaaaggaaaatttaggtggaaacaaatcaaaatagcttcagaccatggatgaggagatggattcactccgaaagaacaagacatgtgttattgtaccaaagccaagaagattgtggagtgcaaatgaattctcaaggtgaaagagagaatcaatgagaatgaaccagtgcggtttaaagctaggttagtggctaaaggctttactcaggtggaagaaattgactagacagatatcttctcacttgtgataaagtacaagaaaataatattgatgttgtatttggcagctcaaatggagtttgaagttgaaaaacttgatgttaaaattgccattctgaatggattcttggatgaagagatctacatgaagcaaccacctaggtttcagatggaagggaaaggagttgaattaatgttaaaggttaacaggtccttgtatgatttgaaacagtctccaagacaatggaataagatatttgatacttatatgcaaaaaattgggttcaaatgatctgcatatgatcattgcttatattttaagaatttggaacaatctacagctatgttcttattactctgtgttgatgagatgctcatcatgagaaaggacaaatttgtaatcaaaagtatcaatgccaagctcaatagagaatttgagatgaaggagcttggaccagtttaaaagatacttggtattgaagttttaaggagccagaaggaagggacaatcagcctaaagcagtccgggtacatcaaaaaagctattcaaaagtttaacataaaagatgtaaagagtgaatctgttttgttagggggcaattcattttatcgaaggaagagtgtccgaacattttgaaggagaaagacgaaatgaaggatgtaccctgcgcagtggtcttaggatgtttaatgtatgtgatggtgagcaccaaaccggacatagctcatgctctaagcatcctaagttggttcatgtctaatatgggcattgaatattggaaagcccttaaatggttactaaggtacttgaagggaacttggggttatggtctgacctatgaaaaagcaaaaggataactagagttgaaagggttcgtggacgctgactatgcttcgaatagagatacaagaaaattaaccacttcctgtatttttatgacaaactggaactgtatatgctagaaggcc

SEQ ID NO: 330244 - DNA, 566 bp, Cannabis indica
agcatccaaacaataattttttttaaaaaaaaatgagaaatactctaccatttttaaagcaaatgaagaaaataacaataggaacccacaaccataaacttaatttatgtattgtcctcaatgtatcaaaatacaaatataaattgaaagtgaaagatttgagagtttagaacggtcattcatcatagagcatgtcaagagcaacaaaaaggtagcaaaaattaaaataaaaagttaatctaaaacataaaaaaaaatacacattaccaagaattaacgggagaaatcaaggaccatggaaaataggatcctcaaagaggatttcatccacttcaatatttttcaattctaaaaatgatttcaatttttgtccattaactttgaatacaataacattattaggattttaatttcaatggcttcatgtaaaaaaatagtgcgaacaatgtatggacctacccaactatagcatagcttttctggaaagagatgcaaacaagaatgatagaaaaggacttgttgactgggagaaaaatcttttctcaaaatatttttgtcatggtaaa

SEQ ID NO: 330245 - DNA, 617 bp, Cannabis indica
aagaagaagaagaagaacataagttagtggtttcgaaatatgctaatattctgatttgattctgttaagctgtgatccaaattgagttctctacttaaatccagagaagcccgattgaaacttcatatggttgtttgatttttctcaagtgattccctctgttctacattggcattctaggtctttttttttttacagggatacgatttatttagctgttttccaatttctttccttctttttaatggtgtcagggttgtcataattagataggcattttgtatataggagttaggatgagactataaccttgtgaaaaatagctcagaagaagagcatttgtttgtggttatgtcattttgaaactaatataattgatttgattgttttatgctgtagtcatattttaagtctgtaaactaactaagggagtttttatacttttgtgatgctgaaacttatttcagattctaaccaattgacaagaattgagtcctttccataggtacctacaatttcaggcaatgcacatttttctattgttagatagtcccacatcgctaatgtgcggaaaataaaagaatgcataaaaggaatgggctactcctctcattgcc

SEQ ID NO: 330246 - DNA, 547 bp, Cannabis indica
taaaactaacatttacgtgcctcaacacgtaatatccacctagtttaattaaaatgtgtgaaacataatagtaatatattaatacactatctcttttgatgattgtcaccataagagcatttttcaatagtaggcactttttaattgtgtaaaaaatctttacattattcaaaagaaaaaatataatattttattttatttatcattcacgttatttttggcactcttacttctaaaagtattagtaagcatttttcaaatttgctaccatatctcacacatccatatggtatcaatgccaagttttggcatctatattagtttttggtttggtatccaaacatctctaatagttacatagttacgtccttctaagcattcttccacatcactaggcattctctctaaacatcaccattagagatgctctaatgtgtttcttaacatttctcttaattttataggggaactaataaaataagtgcatagtgttggagatttattttaccagaatcttagatctactcacaagtatgttgtttaaaca

SEQ ID NO: 330247 - DNA, 1314 bp, Cannabis indica
taaaagtattataactataataaataagaaaaaatttaaaaaaatattttaacatatatttttagatacaaaaaattaagaaataagttacattttaggatattctagttcctatttatcccattttcattaaaaaaaaattaaacacaacaacatttctcaatttataattatttacaccctatcctatttaatgcaatgacttgctgtgattaatttgttttaaactctctattagcacacccaagtcattgcattaaaagggaaaaccaatctaatacagagtttaaaacacaaagaaaataacaaactctacgagacataacaatagactgaaaataacaactaatgaaagaaactaaaacaatagactgaaaataagataacaaaaaagccaagatagctaaacatcctagcgatggtaccccagtaatcagtccaacttaacctgcatgtttgttccactcgacatagtcattcagcttctcctgatccaggtcattgctctgaataagtccaatgactcaaacctcactcgcccatttcgcaatgttatgagctataaagttgcattgtcgtaagacatgtccaatctcccaatttttaaatctcctgcaaagctggtgaaaatgccttctgagcactaaattgaacttgattccccttgctgtctccactgagaatgcattaacaaaattgatgttgtcacttgtcagtagtaagtactcaatgttagtgaaattgtaatttttgtcaagttttactagtacaaactctatgcttataaaattggacgaaaattacaattttattaacattaggtacatatgcttaaaaaaattattagatgacgtttggttggaagtaataaaatggaatgaaataattttattctattatattgtttggttacattttaaagtattccaatatcattcaaatgaaatagtttttccatcattttgttagaacgactattctattttaaaataaaaagaatgaccattctactgaaaaagagaaaattttttaataatttttttactaatttttttgtacgtttcaaattcaatttcattctatttctattctcattctcatttttattcttatattttaattcttttcaattaaataccacaataatacttatggtgcaatttttatttattttttattgaaacataattattccttaaataaataatatgtgtgcccatagtggtggctttcatataattaatattagtagggaaatttgagtttctatgcattttttatacccaaattaattatctaaactaatacttataa

SEQ ID NO: 330248 - DNA, 2051 bp, Cannabis indica
cagaatctgagaagccacggaggtgtaatgttgatgagaagtccctgtccaggattttccgtttattgtagcgaagcagatggtgcacggattggaagtgtgtagtgtgaggatttgccaaaaattgactaagggagtttacggtaaaagtgatgtcaggtctagacagagttaggtacaagagtttcccaactagctgtcggtaatgagaaggattttccaatgcttcaccatcttcattgtcaagtttgagtttgggatccataggtgtcttactaggcttgctattgatgtacccagaatcttcaagcaattggagagtatattttctttgggagagaaataggccttcttgagcttgtgccacttcgaaaccgagaaaatattttaattttccaagtgctttgagcttgaatttatggtgtaaggagatctgtagctcgtgaagtatattgatgtttggtccagttatgacgatgtcatccacgtaaactaagagagcaatgaaggtgtcttcggttcctctagtgaataaggtgtaatcggcttgagactgtttgaacccttcttgcattaaggcatctgacaacttcttataccattgtctggatgattgtttgaggccatatatggacttgtgtagcttgcaaaccagattgttttctgcattaagagaagaaggaagggttagaccttgtggtatggacatgtagacctcttcattgaggtccccattgagaaaggcgttgttaacgtctaattgtaaaatatgccagtttttgatagttgcaacagcaagaagcaatttaagggtgaccattttagcaacgggagaaaaagtatcaaagaagtctaatccttcttgttgcgtatagccttgcgcaacaagacgagcctttaaccgttctatactcccatcactattatacttaatcttgtaaacccatctacatcctatggcccttttgttagctggaagtggtactatggtccatgttttgttgtcggttagagcctttagttcgcattgcattgcctgcaaccaaccaacaatttgtatagcttcataatatgaccttggttctttgatagaggacactgcaagaatgaaagctttatatgtgtcagataaatttgaataagaaatatatttatctatagaatgaggagtagaagaggtgtcttggatgagtgaataacactcaaaatccctcaaatgggatggaggcttggtctgtctttgggatcttcgtggtgcatcctgggaaacgacttgtcttgctgcaatattttggttgtgttgctgcagaattctgcaggtgaagcagcagtggaagtggcatgtttttcagagttattctcatcctcttcatgtatgtcggatgtgggagttgagcagccatttgaacctgcagggtactcagcaataggagtattattaatcacagaatttggtaagacaatttgagtgaaaggatccatattgttgctgtcagtattaagtttcttaaaaggaaaaacgttttcatgaaagataacatttcttgagataaagcattgatttgtattcaaatcataaagtttgtatcccttgactccttggggatatcctatgaaaacacatgtgcgtgctcttggtgaaaacttggtcctatgagcagttaatgtggaagcaaatgcgaggcaaccaaaagagcgtagatgatgataatttggttgtttcttgaataggagttcataaggagttttgttcttcaaaagaggagtaggtgtcctatttattaaataggcagcagtaaggatacattcagaccagaatttaatgggcattttggcttggaaaaacaatgcacgggcaacgttcaataaatgctggtgtttcctctcagctatggcattttgttcgggcgtttcgacacatgaaaaatcatgcataattccatgttttgagaagagatctttgaatgctaattccggtgcattatcggatctgaaaaccttaaaaatagtattaaattgggtttgaacatatgacaaaaattgaggaacaa

SEQ ID NO: 330249 - DNA, 1025 bp, Cannabis indica
gtatatgctatattacatacactatatatatagtctaacagatattactctactaattaaatctaaaaaagatctgtccttccatttgttattgattttattcactaaaaccagacaatcaaatctgattgaatccaaaggaaattccacaagatcacaccattgaagagctgcaaagagagcttgagcttcgaccaaagttggagaaaaaaacaccaagcatagaagaatataaaccagaaactacctcgcccctgtgatcttgaacaacagcaccgaaacccatcttggaagttggaaccctctctactaagagctgcatcagtactaagaacatacatctcttgttttggtggaggaggtggctgctgagcataaactggtgaaacatggcctgcaatgttagaaacctcttgagctcttgaatattcttgcaagtaatcaagcacccaattttccacatctgcaatgggagaagcattagtattaaacaaagagtgatttctcccattctaaatggcccaaagaatgctgaaacataaacaaagatcttccttggtcaaattatcaaaccctgctaatagaaagctgttatacccgaaattcggttggaggacacgtgtcaagataaagggaatgtgaatcgatgccactgctttttatggaataactcattaattacgtatgtatcagagtatatttgtaacccgctgactgtaaggtcttaggcgaggaatcaatgtacaaactggcacttagtatattagcgagaaagcatatgtcgctaaatgtgtatagcgaggtaccaaagaaagcgacacgtatcaatcatgaaagtccttagcgtacaatgaacaaactaagtgtaaaagtcagatcggctcaagaacaagtaagcgaggtgatcgtctcgttatgggaagacttcatgcaatttcatcccgttagcgttagcgaggcttacaatcctggcgagccagaagatagcattcaaatgagcctcgaagaattctttgaggataaga

SEQ ID NO: 330250 - DNA, 1147 bp, Cannabis indica
atattttcattcctctcaaccaaacgccatttaagtgtataaaatatgaaatattaggtatttatggcgcaatttaccctaaatattattctgaattaaaaaaaatcatatattaattgaataaatttaatttcttgataaaataaaaagtgttacgctaaatttaaaagggtaaataacattttaaatcttgtgtttttgtaaaagttactaattggatgttaaatgacaaaataaactctatattttccaaaataataaaaattagatcttgagctcaatttttaacaattttattttttagtataactaactttaagacaatttctaatacgaacaaatacaaaaaaatataatcatttttgtcataacatctctagatcggattattattaagttttattttgacaaaaaaatcagttcaagatcctatctatacaattttggaaaatacatggtctattttgtcatttaacaaaacagaaagtccaattgataatttttgtaaaatataaggtccaaaatggtatttacccaatttaaaaataactaataaaataattggtgttgtattgtgtagcatttatatgaaattcaatttagtgagggaatgagaaaattttgagaattaagaaaattttgtgagaatattaaaaatttagattgtaagggttagtatgtggagaattttaaaattttggattgattgagaatacaataaatttggattttggtagttggtttgtgaaaaatattaggaattttgtgaatccattaattatttggtaagaaagaaattgtaatattgaattatataaaaaggatgtgtgacattatatgaaagaagaattggtgtgaaaaatgaataattattaatgagtattcataaaatatatatagggattatttcacaaatacatgagaataacaaaaaaattataaaaatacggtttcacggattttaaatatttttacgattttttttaattttatttaaatacatttttttatgttgtactcttgttaatttgttgttgattatttatatgttattttcatgttacttttatgtagtttctatagaaaatcatacaaatatattaaaaaaaaaaaatctttaaacatgaaaatataatttttttacaaa

SEQ ID NO: 330251 - DNA, 1140 bp, Cannabis indica
ttttaaaataagaatgaaaaaaattattgttgaagtatttttgtaatttttttaaaatttttgttgtaggcaaaatcctttagactccaacagaacaacaaaaaaatatatctcttactcttataccattcacttctataccaaagcctctatagccataatgttctatccatcctttaacatgcaacaaccaaaaaataatgttctagccgttgcgtctttgacacgctgatgaccctactaccttcgcattccgtctcatgaaacaaagacttcattaattagctatttcagaagttgaaaactcaatggtcgccatcgagttcaaacaccttctgaagatataaaacttcaaaatgagtctatattgatttccaagcatcaatttctatcttgtttagaaggttctcgacgtaaattcttttgcaatctcccacattctgtatattcagatcacaaacctagttatatttctaattataatgtttttaactttcactcttgtttggattctgtttgatattttttaatttctttactgatttaatttttatattgattaaaggataatatataagttatattatatgtatatatatatagtcataacaatgtgggacacattcaaaaatgagctatcttgtaattttaatattatttttgaatttatatgaaaataaattaccaaaaaattcaataatatattgttcaatttatctgttattttgagtaattactttttgttaatgaagtatggattttactaaaaaaagatatacatatgaatatatatatatatattttattttaactataaaggcaaacaaataaaaaattatttaatataaaggaacaaaactttaaaataattctagaaattaataaaaaataatataaaagaagaaaatttaaaatattgttgggtaaatattattttagactttgtattttgcaaaagttattaattggaccatttattttgttaaatgacaaaatagaccctatattttccaaaatggtaacaataggaccctatgctcgatttttaacaattttattttttaatataaccaactttaagacaatttataatacgaacatatataaaaaatgtaaactagttttatcataacatctcta

SEQ ID NO: 330252 - DNA, 2311 bp, Cannabis indica
ttgtgtgtgtgtgtgtgtatattaataagcccatttgtgaagaaaggtgaaagctcacaccagagaggaaagaaaatctcatcaacactacttttttttaataatggcaatgagagagttccaatatgaaccattaatgtccaacaacaataatgggcatgtggcagccatctttggggtcaccggggttgtggggagggaactggcaagaaggctcacagcatcaaaatctgaatggaaaaaggtttatgggattgcccggaatccttgccatatcaatcccacattaaaccaacccaactttcacttcatccaatgtgatctagagaaaccttttgaagcccaccaaaggctgtccttgctaagcgacgtgactcacattttttgggtcacttgggctagccaataccgatacgacagccgagaaagctgcgagcagaacaaagccatgatggtcaatgccctcaatgctcttcttcccaaggccaaatttttgaggcacttttctctacaaacagggttaaagcattatatatcttttcaaggacctttccatgatgaggatgaggagtatggagttagattttacagtgaggaaagccccaggatgaggtctgagaacggcaatttttactatgatcttgaggatttactcaaggagaggctaagaaacagagtggcttgggccattcataggcctggcttgataacaggtatttctactaggagtttttacaatgttatgggttgtttaggggtttatggaactatttgtaggcatttgaaattaccctttttgtttggtgggacaaaaaagtgttgggaagagttcgttcttgatgggtcggatgctaggcttgtaagtgagcaacatatttgggctgccaccaatgaagatgtatatgattccactaatgggcaagcttttaattgtataaatggtcctgcttttacatggaaagagatttggccaagtttggaggaacagtttggagctgaagtagtactgccaaaagatgacgtgttattgttctctgaggagttttattattccaaagccatggttgataaagggaaagtttgggaaaagattgttgagaaggaaggacttgttgaaacgaagatggaggatttggccaattgggaattcttggatactttgtttcgttgcccatttaaaatgttgggaacaagagataaggttgatcgttttggttttagtttgagatataaaactttggattcaatcttgtattggttaaagtccatgagagatgataagattatcccttgagaatgacgatagaaatctttttgactttttttaaatattaatgtaatggtgtgggagaatgtggagctccatccatccacccacaaatttgttttattgaaaaatgatagtaaaaactatatattaatggggtgagagtttgtcatatatatatatttacttgttcgtgaatcgtaatagtaatagatgttataatgatcaataaaataatatgcatatatattaattccttgacctctacttgagtgtctccttcttttactcatcttgtcttttgagtgttgtgtcaaccaaaactttgaattgagatacgtttcacccgttttaaccacactttcaccatgcatatatgtatagaatagatatatagggcatcctgtagtactgctactgcatagcgcatggcattaatataattgatgcttttttcattatttaattaggcccatactgtatgaacagtgttgatgaaattctgaaggcttgattagagacaatttcctgatgcaatatttgtagtaaagtaaaaaaaaaccaatttttgaggtgataggctgtaataaatttctctcttttgctcataattttttgagttatttgcggcaaaatcttcttaagtggccagatttttgcaactaactctcaattctaaaatttttgcggtaaaactccataaactcaagttctgttagcagttagccctttccgtccatttttggctgttaattgccatggtagaatgtccacgtgtacacagtgtacacgtggcacaatttattggtccacgtaaataaatattttaaaaaataaaataattaattattttaaaaattaaaaataaaaaaaaattatttttctttaaaaattaaaaaataatttaaaaaaaataaaaaaaccctaataaccctaacccattcccactcttcttctcgttctctctttgtcaagccgccccattcccactcttcttctccttctcaatcgccaccaccacttcgtcttcctcatctcgttcaa

SEQ ID NO: 330253 - DNA, 1164 bp, Cannabis indica
tcttgatttgtgtattttatatatggtttgtggtgctttggttgatatttgatattgcttattgtggtgtttgataagtatcccatttttgacatacaaagagggaaaatattgtggttgattgcaataattttttccaacaaattgaattatatgattcattaatttattgtctagattactttatctccatagaattcaaagctttattaagttaaataaattgtatgcttcatagatttattgcttagttaaaaaagttaattattgagtgtttcgtcttaattgcttataatatagaaatttgaataattgtctactttagcgttttttatgaaattaataatttgattggaaaattaaaataacatacgtcattcgtaattaagaatgatggttgagagtggaaattaatcttttgttatttcataaatatcatagcacccactttaattgctttcttaatttgagttgtttaattttgttctttaaaaaaataccctttttaattactatttaatattgaataataaagtaaatatagtctttataggatcgatccatacttatttttatattgaaataactaaaattcatacttatttttatattgaaataactaaaattcatacttatttttatattgaaataactaaaattattaaaataaaaataattaataaatttgatacgacatacgacacgcatcaactttcaaacatattaagaaagatctaatactccttatcttaattagatcaactattgggttgaaagttgaaacttatttagtattcttacccagattcaatattgtttaatgttatgtatgattgctatgaaagtttaacttattgttgatgatttattttggcattacggaatgtagttgtagatttgcttaaaaaatagggtaattctccaaatcgtatagaaacccctattgcaactagcgctgcaatcacgttagaaacacaaaccgtaaatttgaaaaaaaaagttaaaaaaaataatatatagggtaattctataaaaaaaaatataggaatatatatatatatatatatatatagttggataggttagtaattttatttgagagacttattgtctaattaaaaattattttatcaacattataatttacttttttagtatctattt

SEQ ID NO: 330254 - DNA, 1017 bp, Cannabis indica
attaaaaatcgttaaccattagcaaatgctaactcagttgtgttattgagtgacattaatacctaagagcaactccagtaaaagttgtctagagattactcattaataaagtagatctcagttcgacaaaaatttctctaacaaatagtccaacaattacaacagtgttgctttatttttatttattttatttgtgattggttacttttaattaaatataatatttcattagagatgttttgataacagcattattattgaacaccagtagtgttaaatactttttataagtggcattttacgattgattagcgatattttttaaaaattattttcttaaattatatgaaatttgatacttaattataccaacaatactataataccgaaaaagataataagtactagtgtgttatatgatattataatgagataaaatataaaaggatgacctaagttaatggataggaatagaagggtaaattgggaataaggcacgtgaaaaggttgaaacaattaaacaatatgtagagatcttgtgttctaaaaagaatgatatttgagaggaggaaaagaaaagcaatgagaaaggtctctactctattctatatctattatctatagttataatgtgagaaaaagttgacattttttaggtgttgattttgataatattgagttggaaaggtacctatatatattagggtttgtctaggctaagatcttggtctacgtggtgattatacttgtttgacaaacatatatatatatttatagaaataatattttatatatttgttcttctttttctagtgaaatttgttttaggaaaaaaggaaaagaagaaaaggtgagacttttttttgtgtgtattaggctagcttgctttatcaacttttctcttcctttttattttaatttcatatgttaagagaaaaaaaaatattatttacataccatacacttgtaactatagcattaatattaggctaattagtaattttttccccgaacttt

SEQ ID NO: 330255 - DNA, 524 bp, Cannabis indica
tgagaacatatatttctttttaggccctctaggtctctctctctttgtgctggacaacgatagaaatctagcgaccagagatgatgaccgacatgataggtttagaaagagggttagagtcagagcaatgtgtagtgatttaggatttttttttctttcttttctttacttaattggttttttggattttctaggatcgtgggatgggacgaggaagaaggtggagataaaaggatggtactagactactagtcagcgacaagcctccacaactactgagaatggtgggtgacgaatcgtaaaaattagggtgtatttttaatatataatgtttttcaatctttaatcaaaaaaacatcaaggttttaataatatttttatttaaataattttttatgatgttgaccaataaacttttgacacgtggaaattttaagaactacaaataaaattgttaaattgagtacctacaaactaacgagaatctcgagcttgacggactattattgtaacgccctaatgct

SEQ ID NO: 330256 - DNA, 1197 bp, Cannabis indica
tctctctcttcaaaccacaaaagaaaacccataaaaccccatcactgacgtgactctagcaacccatctccagccaacgtctgaccccacgcaccggaccaatcaaatcccaaggtgccagtgaattcaacccccaagcggcgacatccctttcaccgccgttagcctgggatcgcaagccaaagtttaaaggttcaaagtttgaatggattttttggccacttccggtgtctgtttgacaagttttcttcaccatcaaacttagctcatcgagaaaaataatctacataagccattttgcccaactcactactttttctagtgatgtttttgtagctccgcccctttcaagtgaattttcggtgatatcatgtactttttcacataacagttggtatgagtgtgatgtactcgttgaggtgatcattttgatatactacccttattttcggtgacgtttcaggtacaccaatttttaccgccaccgatagttgatgtgcactgcttaggtgaagtttcggagctctaaactttaaatatagtcatattatatgtcgttggacttgatttggaatgtagaatgcaatgatgacaattatttagccattttatggtatatgtgagagtgatatctaagattggactaaacaattggaggtcggaacttgagagcttaagacctccttttggacaaagtttaacaacttgggagaggtagggactcaacttgattattagacttgatttttatatgtgttgaataacattagacatatttcaatttttataatttgcaaattgtttgaaaaaataaaattttaatctgcacattttttttgactattctggggcactgagtgtcaaatatattttgtacaaatattaatgcaggttatgattttttggtttattcaaaatacagctgttacgctttttagaaaataaaaaggaatatgttgatcatgatttgtgcatattattgtttcacggcctagtctccatgtcatcataggtaaattagttgtgcactcacctgtagataaaagacctaaaatttgtacatggagtgaattgaatctgagccccagtattatggtggttatcaggtgtgactacccagttttggatgtcattttctatgattggtattgagagttaggggtctagtggacgctgtgatatgtatttgacgcttga

SEQ ID NO: 330257 - DNA, 641 bp, Cannabis indica
tatttaaaactagttttttttttcaggaataaaaagataattaattagttgatttaacggtgttataagttttagccgttaattttaacgaaaaaaaagctattaaattaacaatttgtgttaaataaccgtatttaatataagagtgatatatttatttaatgaaaaggagaacactgcaaaagttaagacaaagcaatatctactatcacatctttgacaaaaacctatgtgattaaaaaaaattaggttcctttatataacaactagggaatacatccgcgtttcacgtgattttaataatcttttaaaattttacattaaaaaaaattagttacgaataaaatttcaagtctaatactatttatattttttttattgagtagtataaaattatataaatatttatgtaaaatttcttttatttgtgattagcacaaatattaattatagtacaataaaaataaaagacacatttcagataaagttatttataataaaatagaactattaaaaatataaatttttttaaattgaaattcaaatattataaaaatttataaaattttcttgtaattaaaaaattaatcattttttaattattcatttattaacaaaattaattttttttacattatata

SEQ ID NO: 330258 - DNA, 751 bp, Cannabis indica
agaggttgtagattattaatgattaagttgttacatgattattagctaatataattatcaataggaagtgaattaaaaactaaaaattgatattgaactacaaaaaattagaagtctataaatacccaaattttaacataacaaaagttttgagacctaaacaagttattgaataaatatatatatatatatatatttggtggatgagagttttcttttttttggttaatttctataattaataaatgctattttagtaattcaattagtataaacctataaattatagattatagatatagacaacaagattagatatagtacccaaactaggcttgtgcgtgaccggtaaaatcgatagagcagacgcaatatgacgataactgtgactgtactgattcccactaataaaataatcttccacaggctgagtgagaatgagctgattttcagagtgtccatgtgcacccatgacatgcttgtgttggactccatatccaaatctgtcacaaaaaactataagaaaaagaaaaagaaaaaatctgtacacagttaagaaagaagaagatgacgacgatgatgaaagaagaagaagatgatgataatgatgaagaagaagaagataggatgaatttataatatgtgtacatatcatatactagttccgctacgtttcatacactatatataacaagtaccattaatcacaaaaatacttcaaattaataagtaaatattcatatttagataa

SEQ ID NO: 330259 - DNA, 870 bp, Cannabis indica
tcattccactaaaatagtagaaagaccattctattggaataacgtttcaatactttaatatacaaccaaataaaagaatgaaatgaaaattatttaatttctatttcattccatttcattacttccaactaaacagtaaacaccaccttatccactatcgaaatgacaccacatcattattttttttacttttgtcggaaattaataatgaaattaattacagatccaaagacagaatcaagattatcatcggatgtacttttctacatacctagagatgaaaacttctcagaaataaaacaaatgacatttggagcaaagacactattctcagttatgcatgcattggtaccatcactagaaggacttttagttgataaagaaggcttcccatatttcacagccattgatacactctttgatgaaggcatcaaaatcccaccaaatcatcacaacaaatctcttctcaaatccgccttaccaaggttggtcaaggctgcttctgatgtcgatgatgttcttcaattcgttcctcccgaaccaatggacagtaagtatatttataatgatacgtgcacacataaattacggtaatatttttatttaatttgttattattatttttaggggacaaattcttttggttaagggatgaggaatttggaaggcagactctagctggtcttaatccacatggcattcaattggttacggtaataattatattttattttcagaatatataattcatttagtattattagaaaataatgttattttctaaaaaaaaatataataataataaataatgttcttttttattttaaatgttcactgtgcactataaaaaataattacttttagtgataa

SEQ ID NO: 330260 - DNA, 1083 bp, Cannabis indica
agagagagagagagtaaaattatagtagtttacccttatatcgtctacttcgagtttttatttctcatgagatggtaattagagcaatagactaagtgtcagaagctccaaattctagagagaggaagtccaaagagataagctctgaccttgtgggtagttttctgaatgtgaaaaatgagctaagagagttctccttttataggtgaaggaggcccaaaaaatagttaaaaaatacaaataagatgtttttgactgttgatgatgatctaaaagtgaaaattatcttatgaaggggatggccatttattggtgccaagcaggtcgtgctgtgggtagctgagaacttattttcataactcccttgaaggtgaatttcgatgatgatagcttcagaattacatctggactataagatatgaattgatagagcattgaattagtttgaaatttaagttaaatcacatcaatcaaatcaaaattgagttagttatggcttttactaaaggctgctcaggtcccaatgcccaagttgacatctcatcacccgtatatgttgacatatgacatcaccctaaatgctgggtaagtgtaaaaatgtctaagagatgttctttattcataagtgatattttgacaccagttagtccatttatatgttctggcaaagctggtcaccgattttcagagatgttgttgttttctagaaatgaaagactcaaaattcttcatttttgggtgtgctggaaatgagaaatgcaaagttgtaaatttgattcctttgacttcatagctcattttaattgtaaaaactagatagacagtcaaaacgacatcagattcagataagtagaacacagtacaccaggccttttgtcaacatgggcactgggtcctttcccccgagctcctgagatttggtttttgatacttccaaggcctctgaacttgaagacgaggtcttataccatgtttttgaccattccagattcaatggttgcatcatatttgtaatttgagcaattgaaggtagcatctgttaggctatttttagtctacattttgggttactttttatagttg

SEQ ID NO: 330261 - DNA, 1879 bp, Cannabis indica
ttttctaaaaaaaaccataaaaaaaattcttataaaaacttagagaccatggtcataggcatagcctagtagttttacacttttcctcaaaaaagaagttccaaaaaaaaaaaaaaaacttagtgaccaattttccaagaatgagtaactgaattttcaataatttagtagaatggggttacaattataggcatggcaaacattatgaaatctggttacttgttttcaaaacttattaaccatattcttatagatttagtactctcagtatctcataaacacagtaacccattttacattttggttatttttgtggtaactctctaaattttgatatttttgaaaatattacaaaatgttaacattatttgaaacacaagacaatatttattttgttgaaaaacaaatagcgtaagatatatttaacaaggtacgttttttcttctccaaatttcagtattttggtaattaatctattcatttctataggtggaatgatatttctgtatgattgaaaacattcctatatttttctcaatgttaatgatccattccattatttcatttggaatgatggcctgggtttgatgttggtcacacgacgatggctattttcccacatttgcattctcttttttcatttttcaccaaaatccattaccaattttgcttatgttgctacccattttataaaacacacgaatgtgatgaaaatcgacttatttaatttaagtgaaagttaaatccactttgatgtgccatctttcaattgactaattatttgtaaaaaaaaacgccacgtcggtgttgttgtatatatatactctaattaggatagaagctgtaatactctaaaactaaaataaaagttgtattacatattgactattcaagcagtaaatacatataataataataataataataaaaaattgttctttaatgtttggtcaatgagtttagttcctgcgggaataaataaaatgtattattatttgttgatctcttgggaattttgaatagtcaagaaacggagcagtgggtgagatttatgtgaacaagtttgaaaattctaacaagctgacgaactgctgcctctttctttcttggaaagttggaagcgattaagtggattccccatgatggtttgttaaattggaatagagtaaatagttgtgatttgtttttggtgataattttataatgtgtttcgtgactaatgtagtttggatgatggttacacaatttaaaaacctaaatgtggtatttatagtttcttaccctcttacactttgtggttaaagttagttcttctaaatttttcttttttactagaagaaattatatctatacacatctaaatatttctagagttcacatagttagtatattctagattaaatgttatttagaaattactagatgttcttaaagaatttttctaaaaatgtgtagaaattttagactaaggtgctatagaaatatgtagcacattctaatactcctccttgatacatatatctataactccaatcatatcttgtagtagcgcgagttttcttcttggtaaagcctttgtgaaaatatttgttcattgtcttcggtcttgtagtgtttcagctctatttctttgttagcttctgcttccctgatgaaaagatatttgatgcttatatgcttcgttctgttgtgaaatacgagattctttgccattgctatagctgatttattgtcgcagaagatctttgaaacttcttcttgtaattttcccaggtctttaagtatttttttgtgccatatagattggtttgtagtcatagctgctgcaatatattctgcatacgcaaatgattgtgcaacagtttcttgcttctttgat

SEQ ID NO: 330262 - DNA, 835 bp, Cannabis indica
ataaaaaaaaaaaaaaaaatggtagtccgatggggtccgatggtggtccgatggtcacctaatgctacttttgtatggacaaaaacattaaaaaaaaatgtagcatatctggtccgatggtggtctgatgggtcgtccgatgggtggtccgatgggtggcccaatgggtggtccgatgggtggcccgatgggtggtttgatagtgtaaatagaggtgatgtaaatgggggtattttaagaatatcataaaaattatcatattctacaaatattagttattatttgtttagaattttttttttaaccaaatgtaagcataaaaaatcaaatttccctatataatttatcgatacaaatggaatcatagtttcaagtactagcttcctagtgttactggttacaaaacgtacacgtaatatataatttatggatacaaatggaatcaaagtttcaagtactagcttcatagtggtactagttacaaaacgtactctttaaaatttaaaactcaactccgctaaatttgtgtttgcataagaaaaatgatgataactaaaataattagaagatgaagtctgagtctgtaattaaagttggccaaatagttttaacttcagaattttacaaacttaaaaagaatgataatcatgtaagaaggagtacaaacaaaaacttccaacaatttaagcaattgaattgaaatgtaacaatcaaagttgtgcaatgcatattgaccaaattattaaacaagagagataatctttacaagataagatattgacacaatttgggaagaagagaagattgataggctgtttggctttacagtttaaaa

SEQ ID NO: 330263 - DNA, 1167 bp, Cannabis indica
ttttttctggtaaccattaaccaccaaactttatatagaaacttaaaacaatgggcctgtgatggatacaaatggttagcccaattcgtaatatcatgcccaactcaattaaattctttacgaatccaacatttagtattagagccacagcttccgcctgcaaggcgttatgcacatgctactgcaatgtgacaacctccaaaatgataccaccattttcttaatgaccacaaacaatagccccaactgccataacccccttaaacttcccctataggcaagttgggtatatcaaacaactaatcagatggtcgaggatgagaaactagctccttctccctccaagataaatattcaacaacaaaagcttggattcttctttggatgtccaaagtagtggcaataaatccttcctactaagccttgttcctaacaacccaaatatgaatcaaagagatctagcatatatagtaaaattagtcttattgaggagccactaaagcaaaagaagagatgagtcaaactgcatggtatcacttctaataccccaaggacttgcaaaccacaccaatcttgccaatgaaaaaccaaagaaaatatgcaaaaaagaatcatcatcatcattattacaaatggaacaattgacacaattaccaaatatttgctacaagcggccactaaatggtaagatgtttcttccaagtttgtaaaggaagaatctagtgcgctcatgaagaggggcttcccatacattgtcatgatccctatacgccaagtactagtaagagcatgatacactctctttatcgagaaggaatcttccagagaatctttccaaacaagttaattctcttcatcaaaaggaaatctattaatcaagtgaattgtccccaaaactattgcaatttcctcaggtttcaagtcccattcctgtcaagcaatgtattatgtagcaaaagtggggtatcctctactctcagattgaaagtcgcactatagtgatcctactcaagccagggaacggacttaggggtattgagggaagcccaccctcagatttataaatatattaaggggagttctatttacaccccacaaaatgataagtacacccagtgacgaagccagaatttagttgagtgagggcttgaataaatattaagtcaa

SEQ ID NO: 330264 - DNA, 1334 bp, Cannabis indica
ttggaagctatcatattttcttgtttttttattattcttttctttcatatgtccagttatatgcatgctaccccctatttttttataattttattattgccgactcgagttaagtatccatagtaagtgtgtagcattattattttttaaatatattttaagctaatctccattctcctcttctctttctgcaaattttaaatttgacttttcactattgattttcaaataaccccacacactaattaaaattagtttttaaactattttaaattatatgattatttattgaatctttctcaattaaattatagagcacctaacataaaactaagtatacgtgccttgcacgtaatcttcttctagtaacttatataagtatatatatatatatattaattattgtgaaatttaaaaaaatatcttttcttaaaattattaaaaaatttataacttaaagtgtttatttacaaaaataaatttagttttaaaattacaaattaaaaatacactttattattattgaaaacaactaaaaatcaactttaacaactatacaaataaactataaaacaatcataaaaaaataaaaaatattttttttttcagcattaaagatttttgtaatttttttttaaatttttaatctgtaaatttttgttaattattgaaaagaaaaattaagcaattaaattagttgcgtatataaaagtaaagtgctgtcgtatctttcttaattaattaattaagatccattaattagcgtcatacatatgtaactatctgttgtaatcttctcaatttctctttcactctctgtattattctgtatatatatatttctttgtattaccaaaagtcatcatataataataattataataagatagcgatcacaaaatatctacaaatttttttttgtttttacttaatttccttgcatagcattgttgacttataagaaatgtcacttttgccagtacatttttgtgctggcaaaagttagtattgcgctggtaaaatagaatttacctataatatgttagcaaaagggagttgacaaatcaatattagtattagaactttggccagcataaaatgaaaagtattggcaaaaaagacttttcccaacgcataaatgggctggtaaaagttagattttaaccactgcaaatgtacgctggtaaaactttgatctctttgccagcacttttacaagcgcagtagcaaactgtgctgataaaagtgacatttcttgtagtggtttgacaatatatattaattataatacatacgatatatacactacaaaaaaataggtctatgtcggcggg

SEQ ID NO: 330265 - DNA, 518 bp, Cannabis indica
taattatctagttagggttttggctaatccacttcataattctagggtattacagtagttgttgtctagagaagctatatcgtgtaaaagtgctaagcagacactcatagctcattatatcatggcaacaagtttcatagcttattttgaggcatccaataatgcaatatagctccaaaattttgtcacttggctgcaagttgtgtaaggaattaaaagacccctaaaggtatattgtgacgatctatcaacagttctatattcagataacaataacattttattaaagtctaaacacatagacattaagtttctagttgttaaagagagagcttagagtaagatcgtgtctactaagcatataagagaaaatttaatgctagcaaactcactaactaaacctttgacactcaagatctttcatgaacatgttgttcatatgggtgttgttttatttgatgatgtacaattttagtgggagtttgttttctatactagttactttgttgattgacact

SEQ ID NO: 330266 - DNA, 1305 bp, Cannabis indica
taaattccacctctcttaggtgtattggaagcttttgctttaggatcttggcaattttactgttgcgaatttataaaaagattctcaagagactcccaagcctctttccctttaaattgtaaaaatactcctatgtgcattgattgtaccatttgacagttagaaggagataatccaacataaaaatattttaccaatctcaatttttcaaaaccatagtgtcgatattttagcaataaaaaatctttcccaacattcataaaaattttcgtgatcaatctgataaaattcgtagatttctctcctaatatcatcaattttagacataagaaaaaatttggacaaaaatttattaactaattcattccaagtagaaatggatcaggatgggagtaaatttaatcaagctttagacttacctcttaatgagattagaaaaagtctaagcctaacagattcatacaaaaaaattaaaatctcaaagtagaacaaatttctaaaaaaaatatttcatatggatgtatagagattctctctatctaacccataaaaagatggtaaaaattgaattatggaaagtttcagctcaaaatatgtagtatttattttaggaaaaataatgcatgatgtaattttttcttcttacttgatttggtttaatcttaatttcaacacacgaaaattttcttttgatgaaataatttttagaattttgttcacagcaaatcatgcaccaagtatcacaaaagttaagattacaaaaaaaaaaaaattaggaggtgatgcctaccatataagtgcataaataaagatagaattataaatatagaaataaataattatatatataatagaagtataaatattaattaatataaagtgcaaaatttaaagacagaaaataaataattgtacatataacagaagtataaatattaatattaatatataaataaaattaggaatcggtgcttaccatattataagtgcagaaatttaaaattgaatatttaaatatttagcaaaaataaaaatattaattattaattataattaataatatatatactttattatatataactataataatataattacaatataataataatatactttatatatatatataataatataacaataaaatatatattaaagttacaataacgtaaaattactgtaaatttataataataataataataacgaataattttatatgtatataagatttacttcattattaagaaacataatataataggtatactataataactagtagaagaattataccaa

SEQ ID NO: 330267 - DNA, 1040 bp, Cannabis indica
aaatcttatttattataatattttatatataattagttcaaatagattttttattagattttgataatacttggtcagtcttgaatattggtgatgcaacagttttgaatgtagcatcgattataagtgagatacaataatagcaaatttaaatgatttataagtaaaatacgatgataatagtaattttgagtattgtagcgattacaaatgtgatacgctaataacaacgacttaatttttttttcaatttacatagctaaaatgtagtttttgccttaactatagtgtaaattttttattcacatgacatcaaattttttagtttgtagtcttcaacatatttttaataaaccgcatccaagcaccgtggtttattactattactatttttgtaagttagaaagatttatattttaaatattttacgaattttgaaatcatatttttatttatttttattgtatcaatcaattaaataaatagtttgttttttctttagaaaaacgtggttagaatcacattaggacattctcgagaagacttcaacaattattgttggaacctcttcaaaccagcataactcattgtctagcctaatggcatatttagctaatccatgggccgcaatgttatctttgtgggacacatgagaccaaactgccctcggaaatttaaacaacaaagctatgacatcccctaacagcagacccatctcatttgcaaaaaccatctagttattgatagccataactacggagagagaatcagatttaaccgcttctaagggaatcccacacgaatgagcccaatttagtccagtcagcagggcaaaagtttcagcttgaaaaacagtaatactccctttaaagaaccaaacaacagacaaataaaataacattattacaagcaggaaaacctactattcacaaattagaaaaaagtagtaacaatacaaaacactcaaataaaaacccctctaacaccggtctaaaattacagtaaaacaataaaagaaaaacaaaactaaacacccccta

SEQ ID NO: 330268 - DNA, 700 bp, Cannabis indica
cattccataatcattgagcaaaaacgatcagtaaaaccgaaagctcgaagaacttttaagacaaatctccaatcgagtctatcataagccttcgacatatcgcatttaatcccaatgaatgattgactccctcgtctgcgactcatgtcgtggacaatctcatgggcaatgatggaattctccgaaatccaccgccccttcacaaaagcagattgatacggcgaaataattttgtcaagaatcactctgactctgttagccagattagcaataattttatagcaaacgttacataaactaatagggcggaaatcgtcaaacttacaggcattccctttcttagggattaggacaatgaaggttcgattgacttccctcgtgaattttccagagacgaaaaattcctgaacaaagctcaccgtctgctgcccaaccacctcccagtgcgatttataaaacttagccggaaaaccgtcaggcccccgggatttaagctgaggcatctcccaaacaacccttttaacctcttcctcagaagggatcgcacacagtagggaattctcctcataagagaagataagtcacaatctcccaggtcctcagggggagtgaaaaggtcgatgaatttggctctaaaatactccactgtttgatttctatcctctatccaattagagccatcctctgagaccgcccatat

SEQ ID NO: 330269 - DNA, 1093 bp, Cannabis indica
taatttatcaattacaaagattttagtagaatatgtgggtatcgtggataccatttctggaataaaatatttttgggcccagtgaccgtggaaactggacagagtggtctgtgatgtcacgacaataagggatggattcttttgaaaatatttcaaactagtttagaattttagaaaatctttttgatggcttaattaaattaccaaaatgcccttaagttatttttaaagcttaagttttttgaggggtagattagtcttttgcaaattatatttatttgtcccttttaactttgtgggctgaccattttaaaaagagaaagaaaacaaagaaaagaaacttattattcgagataacttagaagctaaggaactacaagcttcattttctttttccccttcgtgcaagccaaaccagccagcaagaaagaccttcctcacaattttcatttgcttttggagaagattcttgtacctaagcccaacctagaagtaactaaggtaagttctatgccttgttttatgaattttagttggttttaggttagggttttgtgcttctgtggctgtaggaattaaactaggactgggttgtgtttaggctatatttttgagtatgttggagattgatttgaatggtttccatggctgtttgatgtgaattgtaatagatgaggctaaaattaagtttccttcacttgagcatatgattttgattcaatgattgaattactgtgttttgaagctagtgatatgttgtgtttgtgttattacactgttcttgaatgtttggttaggtttggaggaggtttggtttgaaattgaaggagagaacccaagaattcctggtctgccagaatcgatcgaccggatggttctggtgcactagaaccggtcgaccggttgctgtgcagggggaaattcctgggtttttcttccagttttgtttttgctcggggtgttgcgttggttttttttttaggttggttatgagttatttgacctattttggagttgttgggagttaggttatgtttggttttgaattagggttttatttcgaaattttggattaaggtattcattaagtttc

SEQ ID NO: 330270 - DNA, 625 bp, Cannabis indica
catatacatattttcaaccttccgaaatgtattgctttaataggatgaatctataatttacaaatacatatatttcaaccttcctaaaatgtattgcttcaataagatttctaaaattatattctcatctatgaattaatcttaattttaagattattaatagtgtccgagcttttcacaaaaaagtgatggtttaaggattttgacaaagattttcatccaaaatcatagaattaaaacaaaaccattacagaaaaaataataatctaaatcataaaaaaaacatataattgtatgaaacaactatagtgtccttatatgtttatacatatatgcaaaagagatattaaaattaaaaaccctaaattaaatttatatgaagcaactacagtgtccttatatatatttatatatatatatatatatatatttatatatatgcaaagagagattgagagaaaaattaataataatgatcttaactaagttaatagagtggctgagagaagaaaacaaaagctttgggaaaattaataataatgatcttaattaaggtgacgtttggtaacacttttttaatcagttttctgtttttaaaagtggaaaagtgaaaatatttttcaaa

SEQ ID NO: 330271 - DNA, 914 bp, Cannabis indica
aaaaagtttgaataccaaagtgggattcaagtagttacctgacagtaaccaagatcaaagttgtaaaatgagtatgtcaacagaatatcacgtaaaatattaacatttggattatcatctccatcatagaacggaagtgacctgtcagtcctcaccttaaataaaaaaaaaataaaaagtatacaatgttaaaacacaagacacgagtgcatttgtcaaattatgtaaaagctaaaaggggaaaagaaaaattttaccacatctttgtcaataagtcctttcctctctctgaatttagtaaatctttttgcttgttccggagatatactctgcaagagatacacatatcttaagaattttaataagcctaaagtagaatgctataaaaactttgccagtgtagtgtgtcaagtttgatatacaggcattttcataatacaggaaacaattggtaaaattagttcaagaagtaatctatacatgctaaaaggatttgtattcaagccttgtgaaccggtcaccaactttgtttttctatacaaaatctaaatatcaaactttttaaaaattgatttacaataatacaaaagtgcaaacctgccactggttctttatagtctcatactctgattttttaagaacgctgaagtattccctttctgcatatgttgaatcgtacgcatggtatcccaacaagaatgcccagacctatagttgtgattgagttgtgaatttaacaaaatttcaatcaatgttataatttcctcaaagttacaaacataataggacagacctctttccgtaaaatgtgctcaactcccccataaaatatcctctttcttaaagcttttgaatctgtgacacgtccttcagagtccaaaaaggagacccactgcaaaagttggatagtactt

SEQ ID NO: 330272 - DNA, 667 bp, Cannabis indica
agggtcctatttttactattttagaaaatacagggtccattttgtcatttaacaaaacacagggttcaatctgtaacttttgcaaaacatagggtccaaaatggtatttaccctttaaataactaataagtcaaaaatgatataacatctactatttcaaataattaataaataagatatttttaatatcatttttcttaacttataattaaataataataaaatatgttaattttaatttgaacaattatggttaggatatttacaaaaatatctagactaatttttaattttattagtttttaattagcataaaagataataaatatataatattttaattaaaaggacaaaattactaattaattaaaatacatctactattttgatgtcttatcttataaaataaatgataaataagattaataaactaattaatttcaaagtgaaagtataatacaaatgcacctaaaaaaataataaaattcaacttttaagtaaaattaaaagggaaatttgatattatatgcttaaaataaatatatccactaaaaatatgctagcatattttgcgtgatgcaaaatatactcacactatttttctatccaattttacccttaagcaaataaaaaccaaacatccatgtctctctctctttctccggcg

SEQ ID NO: 330273 - DNA, 1956 bp, Cannabis indica
tttgatattagttgtttttctactaggctttataacctcaccccttattctcccattccaggaactcaatttgatgctagtggattagtatggtaccgttggggaagaaagttgttattagtttagtcttattctatttatcaaagtttctattgaaaactgattttgtatttaagcttgaatggatggtttagatgacttaataaattagctatgtactatttaaaaatgagaaatgatggatgctcgatattattttgatattttattaacttattaaatttatctatgcgttgacaacataattgtcagaatattattgttcgtttatattgttgagtggtcttaattttgttattaatattttctttacaaatataagagctattcaattatttttaaataagtattttgtaatataaattaaaggatcataatattaattatcttcatgcaagcgtcaaagtatgacttttgaccacccaagttatggattttatatatctatcacggcctacgactcggattgtgatagaaaaatggtattagtgcaccaggtataattacctcggaatgtgtcaccaaatagtttaaatttattttaaatcataatagtaataagtatcttgatatttatatataaggcatatttatcttagtagcatccaatcatcactaactaattaaattttggttctcaaacctaagaaaatgcctctaaaaggaaggaagacaaagagaattgtttgagaagacctcactcaagctaatatccaacctgcacaagcagaattccctataaaagctcttctcgaagccttaagagtggttcccgctcaatagatggaccttgccgctcgatagagttatcattttttagatctttcataagttcgagggtggacaagatcccattgtagctgaaaggttgttgaggcatatatagaaaaacttcaacacaataggaacacgtcaagaatactaagttactttttttgtgtccaagttataaggtggtgctgtagattggtgggagaccttgtctagggtaatgtaaactgatgttatgacttggtgacattctgagatagttttcaaggagtagtattttagttcatctcacaggaggactctgattagagtatttgattccttaagacaatgggatatgattttgaatgagttttacatgaagtttgtagagttatcctcttatacatatgctagtattgttgaccaacccttggtgattgaacagttcatgggtcatttaaggcctgggatacatggtccaatagcccctttgacctttaataacctaaatgggtgtgtgacacatctttcaaaattgaggctcatgtagaacgaaacgagaggaagaatacaagcagaggaaaagtaaatgatcgaaagataactaagaagaatcaaagtcaatggtcccagaaaaaacaaatcaatgggggtaccactagtattggttcttttggaaatacccatagtggaccatatgggtgtttcagttgtggtcaactaggtcataagaagaaagattgcccaaaatgacaaaaaatattttaagcatctcatggaggacccataaggagctatgtagagtcttctctttttcatggatagcctaggactaaccaatctcagtcttcctcttaaaatttcacacctcaattaggccaacagtttcagtatcaacatcaattcaagccacaaggttcatgtgtcaacatagagtactcacaaggtttccaaactcctaattctagtgagagttaaagagggtacaatcaaggtagagggtctggtgcaggtacaagccctcctagtcaaggaaaggggaaaaaaagtcatccgcctaagcctatgctcttgaggttgatgatatacagagcagtgtagactagggagttgttgatgatatggttcttatctcacaatctt

SEQ ID NO: 330274 - DNA, 739 bp, Cannabis indica
tgcacaaaatgaatataattaaaacacacctttaaaccacttcatagaaagcacttaaaattagcctatcaaataattgtctcactaatatgcaaaatagctaaactttattgcatattataaaagtttaatttcataattttttcatctattgggagtgtttgtgaaataacgtcttacctagtagcactttataattgtctcactaatatgaaaaatagctaaactttattgcactttataataataatttatcttgtttactttatcgagaacgtaatccgaatgtttaaattgattaaattgtcattttgagttaaactatagtatatgataattattttgtaagatatattttaaagaacaaaattatcattatatatttaattaaaaaataaataaaattcattatttttaatgacacttcttataaaattgatagaaaaagtatttcttttttttttatcccttatttaatcgagttcttctattttttaattttgatgatgtaagtacacaaatataaaagaattattattttattattgattccctttattagtaattattggctctagtgtagttatccaaaataatagtaataaaaatattggctctagtctttgtaatagcactattaatagagagagatacattgggggtgagaatttcattccatttcattgctgaaagtaaacttaattaatacagtagaacctctatttaagaatactctatt

SEQ ID NO: 330275 - DNA, 1411 bp, Cannabis indica
gggatgttgaccgccaaaatttttaagggtttttgctggcgctaaaccttgatgcaacttgtccaatggccaaacagttcccacttttgctggcgcatataagtgcgccggcaaaagtccccacctacttttgcgcgcacgttttttcactgcgagggaaaattgacagcctttttttcccgacttttgccggcgcaatttagcgccgacaaaagtaaacaaaattaaataaattattttgccggcgcaggtaattgcgttggtaaaagtggaaaccgtacaactaataattcccaccttttggcggttttgtgccaacgtttgccggcgcaattggtgtatttcgtcggcaatattggctattggcgacaaaaatagtcgccggtaaaaagtttgggattcttgctcatagagaaggcgcaataaaacttcaaaacaaataatgttagctgctttgatatatcaggaggttatgggccagtttggcacagcttttagaaaagctaaaagatgcttctcaaaaaaactatgacaaaaaggtgtttggtaagtagttaaaaaacaacttattaaagaatttatggaaaagatacaattaaaagctaaagctggtacaacctctagtggccaaaaattacaccaagcccaaatgcctcttacggtccaaatcgaaattacaacccttcaaaccaagtgagtgaatataacccactcatccaaaacacattgggctttggctaaaatacaaggcccaaacgagctcagcaactataagaccaatctgatacaagggataggaaggagtctataactaaagtagaagaatcgatcctttctcctggaaaaggggaagaccacttcacatattcgttcttcagaataggggaattcaaccatcaggggctctataaaaggagaacccaggagtcctaaaggatcatctcatcttcactcactcaagcactcactcaatacattactattattattaccagtccttctccatcgctctacagtggaaatatatgttttctatcttctttatttacattcagatattctttatttaaattgtttactgacttgatcgtcggagtcccttcggctggcaccatcctggtgtcccaaggtctcaacggtccttttttcgtttgttctacaggttgtcggtcctcgcgatccttccattccgatcattgtagattatgccctctacaatttggcgcccacagtggggtactaaattaccacatatcatctattttgattaatatatcaaaggtctacaatttttgaaaaaagctattttgattaaaaataaattattttttactaaaaatttattatatattaaaaaacaaaatattttttttagtaaggaaaaatatttaaaataaataatatttaattt

SEQ ID NO: 330276 - DNA, 1827 bp, Cannabis indica
aaaatatatttaagttaaaattgatataatattttttaaattaatatatttggatttaataaaaacgtaaaaaaaaaatatgatatcttgtttaaaatatatatatatatatattaattaatagaataaatcagttaatagaattgataaataaaattagttggtggtgaaaaagtttaaacatacggttgaattaataatttgaaaatttaaaatttattatttaaacatacggtagaattgattatgtaatgaccgttttagtaaattggatgagtaaaggcaattagtactaatttatgatatttttataattatttatgaatttaattatttatgggccccattgtcagaaatgggcattagagttataatttcctaattatggagattttattaaactctagcggtatttcatgaattatatatgaaatatgctatttttttgtaattttggctcggcgataacggaaaatgcgatggatggctagtttgatcacataggtaagtttagaaccttattttttagtgggaaatattttagagaaaataaactatcgaggttaagcggtgttatggaatttgaccattttacccctagtcttgaaaaatacttaagttataacctaaagggtattttagtcttttgccaaggtaagtgatttggtggctgcctaaaaacttgacaccttgcagctagattaatatagtaaatcctctttttcatttagagaaattaaaagaaaatcaagaaaagaccaaaaaatcaagaaaccctttcttcccttccctctctcttcgaaccagcctagaacaaaggggggattgttgcttatttctggtgttttcagcaaggaattcaaggaaaatcaagccaaggtaagccctagcatctctacctgttcttgaagtttttacttggtttgaatatatgattttaagagttaatggttgttagggttaggttgagttgtagttcaaattttagggttcatttgagttggtttcatcttctagcagctggttttggtgtatggatttagtttcgctcaagtttgagctttgaactcaaagctttgatctctaatggcatgttttggttcagtggttatttctagaatttattgtttggaatatgttgtaaatgcattatataggcgatatagaaagtatgggtgcacttggatgagttttgagcaagttggggcttattttgggaaacatggtgcaaactggctagccttgccaggcttgtaaaactggctagccggttttggcaggatcccccaacaagccattttctcaactctcgtccattccagtgccgtagttgggtgttttcctatttcttgagctagtgtgatctctagagagtgtagcagaaccttgagtggtgggttcgggttttctggattagggtttcgatcttgtgacttacccagttttattatgtgattagggcatccatttcgcacaagactttccgttcaggtcggccagcacacttgaatctagaaagaaggtaagaactgtatataatgtgtgatatgaatatctgaatgtatgtatatgtttagtgtatatgcatgctcatatgttgtgattcatacactaccaacacttgtacggtcacggtacagagtgcattggtaaagtgtatgatgtctgaaagtacatcgtggtgttaccagcacttgtacgggaaggtacaaggtgtttgtggtacaacacttaacagtactcaaggtatggttcataccttacctacactagtacgatagtatactgagtgcatgtggtacatggtacatggtcgtatcctagtta

SEQ ID NO: 330277 - DNA, 544 bp, Cannabis indica
aacaaatcattaataagttcaatgtcccaacacctcaaaccatggatcattaaactattaacattaacatttgaaagagccgggtgtgaagaaacaacatagggttcgatagggtcagggagccaagcatcaccaaggacacttatgttgttgtcgtcccctacacaccacctagttcccttggagactaattgttgtgcctcccatatactcttccaaacaaaactaggattattacctaaagaagcattgagaaaagatccttgtgggtaatacctggccttgaagactttggaaaccaatgagtccgttctagtaaggagacgccaaccttgttttcccaaaagagccaagttaaagtctcttaagtttctgaaacccattcctcccacatccttatgcttactgagtttatcccatgccatccaatgaattccactgttgctcttgtttgaggatttccaccaaaactttgccatcagttgctcaatctctctagtaatctccaagggtacaaaaaaacactcatagcatagctaggaag

SEQ ID NO: 330278 - DNA, 732 bp, Cannabis indica
agactcaaatttggttaacgaaaatctgcgttaacacttataattttagatggatcgaacttaaattaattaaaattttatgctataaatttggcatagttgaaattatgttttacatttattttaatattctaaatgtaaaatttttgcttaatataattattttagttgattcctattaataaaatgatatcatttataataagagtgaattgcggtaaaaccccgaaaacttttacttcacaagtaattaacccccgaaacttatttggcggtaaaattcctaaaacgcgtattcagttagtactttaccatttccatccatcttttggtgttagctgccatgctggatcgtctacatgtacacactgtacacgtgtcacaattttattggcacaagtattaaataattaaaaagaaaataaaatataagaaataatagtttaaaataaaaaaatcatttaaaatattttttttatctttccttttcatttattattctttgtttgcttcttcttcttcctcaaacctacaaccacaaccactatatccacaaaaactaccaccacccaccacaaccaaaaccaccactaccatcaccacatgtcaagatttcagatcgaaatcaaaacacaaacaaattcataatcaatctgacatattccacacatttcaaataaaaaatacaaaaaacaacaacaaaaattaatcataatcaatctcaatctcaaa

SEQ ID NO: 330279 - DNA, 793 bp, Cannabis indica
attttttctgcacattaacctgcaatgttttttttttcttttatcaattactaaccttttaattttaataggaatctatggatgacctttaattttaatatgaatctttcatgtatatagaagcatcggtgatgtggtggtttttctggattgtgatatttggttttactgtaattatttttaatttataaattataaatttaatgttcagattgaattaaaataattttaaaataaatttctttgtggacaaatcagagattgacaaatattattttaacagtcaaatcaaacagatactaacagaaggaccataataatgcaatggttatattttaggaggaatttttatcaggtcatatattttaggggtcacaatatagtagtgtcataagttgagggggtaaaaatgataattattctaatgtataagatcataattatagtatttttaaaatgtgttatactattaaagtgtttagaagtaaatgtgtcaaaaataacgctgaagaaagataaaataaaatattatatcttggatgatgtggatatatatagcacttttaaaaaatactactattacagatgctctaaagattattacgaaatactaataactatttttctactttttatttgggaaataaaaattgtggtgtgactgtatttgagtaatcactaacgagacccctagagtttggaaaggtagtactgcttcagtgcttcatattctttctatttgtttataatagtcaggcccagccctgggtgtaggcgggctaggcctgtgcct

SEQ ID NO: 330280 - DNA, 2011 bp, Cannabis indica
aaaggaccaagactaaggccttcatgaggaaatcctcgaaccaccttattattgatgctggtaaatctcccgaggtagggaatgaggtctctactgtaggagttgtcgaggagcaacctaccaggttggcgcaccaggtcaagttttctggttgtcgtccagagatggttctccttgagccctcctgcccctaccccttgaagttgggactaaggggtcataactgagctcgcaacatgccaccaacagttggcgcagcctcttaacactcgggtctcgcgattgggatcctactattcgtagaaataccaaggatctgaccaaaagaagtcatgagcttcttcatcaagtcaatcttcgtacttctttgttctttctcttccctactttgcctttcttactaacttcagtttgtcctttttcctcatgcttcttttctcgcttacactacacatcaccggtcgtctcaaagggtcaagatgctagagactgagcttcgccaaattaaggaacatagagacattgtagccaagaagtggagcgatgctgaagctgaggtttctcacactaaggatgaagtagaaaagcaacatcgagatgaccaacaaaaaattaaagaactcctgaattttgttaaatttctccaagctgatcttgttaaaaaacaagttgatcatgatcaaaagcataagaattggaggctggaaccaaagagagggtcaacaatatcggtaggaggaccatctatcagatttggtcagccaaccccgagttggactttagttttttgggtgataaggtcgaaaccatgcttgcttattgcgagaagacttagaaggaagaattttgtgaggaagaagaggttgacacagaacaagaaaatcccgccaagtcccctataataatgtagacttggtcttgtaattatgtttatttattttttttgtttaggaaaatggcctaatggtttgccccttatggcacttttgtgaagacaagtttgtgaagttagttggccaacttagcttttatttatcttaaatacctcgtacatttacattcgaacttaatatatttgtgtttgcttacattttcattcacaatgtaaacaattatattttgaacaaatgaagagtactcttggtctttccattgctcgtatttttcctatttatgtagttagtaatctactatgtgcgcgagcagtttattatctcccaggcttttgatttgctagcagttatcaattctacctctcgataacaattataatctgtcttaagcaaacttgaatatactatttaatgatttatcaccttgaatgatttgtcactttgtatattcttgattgcttatatgaataattagatcatctattcatacaatagatttaagtacttttatcaagacaccttgatgtctcattaataatttagtatattgtgtgtgccgctaatattcagcctcgcacgcgagttatgggatattatttataacttttgattttcctttctcgacagaaaggttttaaacacaaaaagtaatgatggtttgatccctttctcgtcagaaaggtttgatctaaaactttaaaaaaattcaaaaaatttgaaagttgtgggtttgcacaatatcgtgtatttgcagataaatttcagttaatcatacacctatgccccttaagtaattttaaagagtaacactttgtaattactttaaaaaagaaatgattaactttattcttaactaaagtttaaaatattacatcagcaatggaagttactgttgggctttgtgccctaaataaaactctattttaatgtaatatttcctattcaattatcaataaagaaacaaatttattttcattacttatttagtatgttatttggttcatgtggtcatttatatgtttattttatttataaattcatccaaatccttatcacattgatattctcgtttattgtgtcgtcagcacagtggaaagtaatcaagattatgtgattaa

SEQ ID NO: 330281 - DNA, 1091 bp, Cannabis indica
ggcccgactgacattcctacttgcgagaccttcgacaatccaagctgtctcagcttgggtgaaaaagtggcaagtggattgtgttttcttatggagacaaaaatcggggaagaccaaatgagaaacatttgtaagactctacaattttattacggtagttatataccttccataggtattggcggaggtttttgtttgttatggaataaaggtcttgatatcacggtgctcaagaagctcgacactgggttttcttgctgggtgaaagaccatgccattcagaaattgtggaatctgtttgccatctacgacactccttatgccgatttcaagagcgatttctgggaggatttggctgatcaagtaaatggttgcaatggcccttaggctcttatgggagacctgaatgctattctgctaaggaggacaagtcgggggcgtgctttcacctatcgtgatggatctgttctgaggaattttatgttttccactggtggtgttaatctgggattcagtgggtgcaagtatacatggcagaataaaagaggcttcggacggctgttgaaagaaagaattgatcgggttattgtggatacaatttggatgtccttgtgtcctaagggaggtgtctgaaatttttcgatcattagttcagatcatggagccattctattagattcttgtgcttttaagcccagagggtctcggcctttcaagttcttcgaagcttggttgtctgatccatcgagtttgcactattaaagaggcgtggggaaacatggaccagtccgagaaggactctattctaatgagcaagttggcaaagactcaaaatgctcttcgttggtggagtaggaatatttttggggattgtgatgtccgaatcaaacaattggaatttgagctccaaactcttcaatccaaagaggctcatgatgtggatgtggatgccgagagaagggtccatgattctattcttgatctgtggtatctcaaggagtccatgttggaattattttaccaggattttagatctactcacaagtatgttgttttacatctcattttctcaaaaacgccaatttttaaat

SEQ ID NO: 330282 - DNA, 1112 bp, Cannabis indica
taacaataaaattataaattttttgtccaaaattcaatatttttataaaaatcacttaaaaaagttaggtacaatactaaagtatttaaatgatatttttttgacacttaaaaaaaataataataaattagaattatagttctttttacgatagagggtccaaatattttttttgttatctaattgtttaagaatatttaaacgaaattaacatatattatttttactatttcttttgggaccaaatcttgacaaatttatgatgagttatagtatttttactttgactgtgtaatttggggtttaaactaattaatacatgtaattagttagagtcaacttagtgttagatttcttcattaatacttaaataaactcaatttatagtttattattttacagtttccaatgttataaatgaatgaaatctagtgctgatattcaggcatttaaattggtcacctcattaataatataattatttagttattaatttagcttacaatatgtatggggattaataattaattaacttaaaatcattgactgtgttcacaaaaatcatggcagatttaggctcttatatccaaacaagatcttggagagaaatatatattatataaatatgagtcaaggagcattaacacttagattaatgcattagtcccatttattcattatgattagtaattaactaaacattttgattagttattttatagcaaattgattcataatatattcaaaagggagtactatatattcttcatgtttccactattcttactctgcattccactattgttaattatgtgatttttatttttatttatttttggctaaaataacatcttcttggaaatttaatttagtgcccttttttttgaattcacacaatgtgctcatattgatgaatattgttattatagatttaattttgttaaataagaatttgaaggtcaaaattgatttaggttgctgaccatatccaaacctggctgctttcacattaccaactccactcaacaaaacaaaaaatttgttctatttgcactaaaaatgcaccaaaacattagatagtgacatgctttttttttttattatagagttta

SEQ ID NO: 330283 - DNA, 581 bp, Cannabis indica
acttcagaaatatatggaaaaaaaaatctaagataacaagagtggtaatcagttaacttaccatattttttttaatttctcccaaatcacttttttttaaaaatatatatatatttatatttgcacaaattatataaaaaccaattaaatgcataacttttacttttccttacctttttttctccatgaaaaattcgaattcctaacatagcttaagtctatattattattattgaaaccttagttgagttagttacattttattgtaatttaatttcatttagtcataatactagctgtgagtttatgactaaaattaatattagtgtcaaattactattaagcgcggtaaatttttgtattagagcatgtgcaaagaaacagtatattttcatatatgccgtgaatattggtccaaggaagctgcatttcacgtagcattttgaagttttgtctacagtgcacggtatatatgtcgtgcactgtacacactgcatatatattatatataatttaattaatatttatatatatttataaaattaagaattatttttgaaaaattttacaatacatatttt

SEQ ID NO: 330284 - DNA, 573 bp, Cannabis indica
catgctcatcctgggccgcggcccgtgttgcattcttcacacacggattcaggcttctgaaggtacgagccgcggcatgcctatgcctaccctggggcgtggcccgtgtgtagttttcacacgttcttaaggctttcttcgacacgtgccacgacatgctatctttttacctatgcatgacccctattttgtacacttatcttttatgtgatcttttatcattttttctcatcttttttctttgatattttctaatcttcttctattttaaatttacgaaaataaaaaagataaaaggagtaaaatttctccaaacaagagtaaaactaaattaaaaatagactaaaattcatcaaaaaataatactaaaaataaccgaacactaaattttacaattgtgctcaaatgtactaaaaccaaaataaactttattttaatagagatatgtaaaaaagttaacaaaacattaaaaaatatttatacttatattataaggatttttacacttggtgccccatttggtcattttttttacatttatgtttatgtacggttattaatttttttttaaaa

SEQ ID NO: 330285 - DNA, 1070 bp, Cannabis indica
aaatctaaatcctggtaaaatataatccaacaagcttgaggtctcgtgagctttgagtttcaaaaagcttttgagatattttctaaggattaagaaaatcaaaataagaggaagtgacatacttatatatgttgtggaaaattatttttcccccaaaaaaacttaattgagagttaatgccacaaaaatagccatgcatgggaaagagaaggtcaagagtttaaacatgggaaagtgaacatccgtcacacgatttcccacattgattgacataaagtagataaatgtcgtaaaatcacatcagctgaagagaccaatatcttgccctgcatatctgcacggcaaagggcgtcacaataccaggcagggtgtaaagtccctacttgaatagaacttcaaacaaggacttgagggccaaatattatcccaatgtttcccacctatgtggcacctccacgtggctaaaagcaaaagacacatgagagaggtcagtaataactatccaggttagtgccatgcagcccccctaacccttgagatttcagggttgcaagataaataagaagagtatggagacttacaggatccacatcttcaaggttctaaagcaagttcatccttatatcagaatcttcagcaaagatagagatacacaagcataggcaagaccctggccggacctctagctagctggccaaggaagacagtcgtgtaccgggcaacctctaaatatggctagccggccaaacacacatactacgctctaaaagttgtgtttttcccataagccttccagaaaattccaaatcgtccacaacacacctacaacttcaagacgacttgaactacctacaaaagtaggaaagctccgtcagagtgtaactgccttattttctaggaatattttctatctattatgtatattgaataatgacttgtaaaatcctaacttgatgggctttgtgacttaaataaaacccatctcaatataatcaaatttactaattaataaaagatcagaaatcgcattttatgttgcatggttcacgtgatttatttcatgattatgt

SEQ ID NO: 330286 - DNA, 872 bp, Cannabis indica
aaataaaaatattcttataatttataccacgagatttggtagaaaagccctagattgttttatgcgagtattaggcagtgttttggaatagacacttatcggtttaccgttgttgcgacatagggccgagatcatcaggtatttttctccacttggatttgtcagcattgaatctggattaaaggtaagaaaagtacatctataccacatagcatgccagatacgattaagatcatttgtgagttagttgattatgaaagaagcgagacgaccattattgttataaaaataaggtgacggtcattaccgttataaaagtaaggtgaccatcattactgttatgaaaataaagtgacgatcattatcattataaaaacaaggtgacggtcattactgttatgaaagcaaagtgacagtcattaccattatgagaacaaggtgacagtcattaccgttataaaagcaaggtaatggtcattaccattatgaaagtgagaaagcggtcatgaccactatgaaagaaaagtcatgatgataaactagagtcgttgttaggtttcctacttgtcggttatctccatagataacgacaatgacatgaatactgggggtggtattcgggttgatccacatgggacaacgagaaaaagtaatgactataaactggaaccattattaggttctctatttgctaggtatctccataggtaacgacagtgacatgaatatcgggagtggtatttgggttgatccacatgggacaactgggaaaagtcgtggctctaaactaggggtgtacatcggtcggtttggtcgtgttatagtgtatttttactaacccaatataaatatcgagttgtaaatatttaatt

SEQ ID NO: 330287 - DNA, 700 bp, Cannabis indica
tctgaccaacttggacccaagttcctcccacgaccctagcgctaaattcgccctctgacccgaacccaaacccgaatccgacctcagacctagacccaaattaaataaaatcaaaaaataaaaaataaaaaatgaattttacataatacacttttattttcaaaaaataaattattttttgtttttaaaattaaaaaataaaaatggttatagaacgtatttttatttttcgaaaataaaattttacttttattttgaatattgaaataaactaagacaaatagtagggtcacatacaaatggctagtttacaatgtaactagccataaaagaacattttatttgagtacaaattaaaaatggatcttaaaatcacttatacataagctaaaagatatgattagcataatagaattgaagattttggttataattaagagtaaaaaaataacatttacacaaactgattttaggtaaaaaaaaaataataaaaattagagtagggatatttacatcagttggtattgcaattgtaaggtcagggccatcgaccaattgtagggtcaaggccatcgaccctacaattttgtcgctagtcacccagtagtcaaagacgggcgaagatagagccagcaacaaacagatctggagccatctggtaagagagggagagataaagaatgttgggttttgtgcccta

SEQ ID NO: 330288 - DNA, 602 bp, Cannabis indica
gtcaaagttcaggggcaaaaatcctaattagctttatatatataagcaattataaaatgaggctaatttttaaatgattaattttatagtagaatttttttttagttttaataatggtgttgatacactattttgctattattatagtagtaggactttgtttatttatggcgagaaattttagctttttttcttttgggatgttgtgagaatctcaattggctcatatgtgttagtagcatgactattcttgttcatgcttatatatgggggtatctcatattcttattggccacatggtttatggtacgattatttgttacgattgttatcgctatggttggtcgtttgattattttcttttattctagcttgaataatgggattgttgttacccaatttttattagaagatttttggctgatagtcattgataggtgtgatttgtcacatgctcattagggttttcattccttttattgtaaggacatggtttgcctagcgatatatcattatttaatggactattgtttgatttgcatattaataaaaatttctatttttctaaaaaaaaaattgtaactgttataaatattattaat

SEQ ID NO: 330289 - DNA, 1361 bp, Cannabis indica
taatcaatcttttgattacgaccagacccggacccaaattccctccccacggccttggcgttgaaatcaacttttgacttgaacccgaatccgaccctggacctagacccgacttaaataaaatacaaaaaaaaaaaataaaaacgaactttatagaacacacttttgttttctatttttaaaattgaaaaacaaaagtggttacagaacgtatttttgtttttcaaaaataaattttttaaaaacaaaaattttactttcattttgtgattaaaaaattaaaaaacataagtgttgccaaacgacaccttggtgtatatatttatatatataaacagtcacacatccaatagaatttttaaactttatttttaacactacaaaatatttaaaatattctgaaaatttataaataattataaataaaaattgtacaaaacacctcttttggggggtctactgtagattttttcatttcactttatgatttctaaatctcaaaaaatcatgtgattatgatttctatgtaataatttctttccttttaggaatggttaaagagtcctttcaagctggggtcattcattcttgcttaaattattttgatctttttatagggtgcccctgtcaaatactcaaattgatttattccttttcctatttaatatgagaaatgctaaagggtaccagtggtgcctagcaccttcctatgtgtcaatatcgctattggtacaactaagtatcgggtcccatataatttaatataatagtttttaaagagtatcgctagccaatcgcaacgcgacatgtcgcaaaagtgttaggcactactggtacctaatagcaatgctcattttaatattcatgctagtggcacacacaacaaaaccatcaccatcatgatcgatgcattgaatttcgatagagatatgcatgaaagtaatacaagttaaataattccaacactattgattattgatgaataaaaaaaaaaaaaaaaactagagatgcaaagaatgtaaccttattagttttggaaaattctataattttacaatctaaaagataaaatttaaataatctattacatgtgtgtctttttttattttttattcgcgtgaaatagacattttgaacactattttctgtattaaaaatgatttcgaatttcttaaaattttacaggaaatcttaaataactacaatatacactatcatataaaaaaataaattaaatttttgaagctcccattagcttttcaggtttaatcaaacagtcatagtaattgtttagacctttctctttctctaactttttatatctttgtgtaaaaatatgatatgtagttgtggcaagcttt

SEQ ID NO: 330290 - DNA, 700 bp, Cannabis indica
tttcaaacccaggaaaccccaaaaatccagtttaaaatcatgctcaaaacacatccaaatgtaccccaaacatgcttaaactcaaaatcattccccttaataaagaaccaacataacagagagtttatatacacatttataactcaaactcacaacacacatgcatcaaaattcaaatttaccaataatccataaaaagctcaacacatgagcttaacaccaactacacacataaaagcttgaatttcacaaacattttttcagcttggtaacaacctaacacaaaactcaaactatatattcaacacatgatatagtccctaaaatcaaatccaaaacatccccaagagcaataaccatagctaccaacacaatcataacttcaacaacaaaaacaactcaatcatcacaagcatgcaacttaagaacacattcatgacttcacatacacaatttcaacttcaatttacagtagcaaaattataagaaaagaggtagatactacctcaagctcttcacacaaataactctacaatctttctcaagttccaagcacacaccaacaattcaattgaaagcaaatattcaagtgaacaatcttcccctgaactattgagattgttggatttaaggatttttttctaattttattaaaaaagtctaacatggatgaaagttcagggagcataatttagtacat

SEQ ID NO: 330291 - DNA, 1429 bp, Cannabis indica
caaaggaaccaaggatactatagttgatgtcagggttttcgtatccaaaccgcgtatagcagacgctcatcttgctttcaactcttccttgttccttgccttaatggtgcagaggcgatgttgcaacttatcaatcctagctctaagcctctttgttcggacgtacgagtgcaaaagatacctctggcgaatggagagggactcctcaagctgctcggtaagactggccactgaggactgctcattggatagcaaaacttggaggcggtccacctccttttgaagaggttcacactagcggcgggactcctctaagtcactcagagcctgttggaggcgcgaaaggtccccctcgtctagagggttagggctgggagtatattattgtaagatggatgcctataaacaatggtcacagttaaaaaaaaaagaaggaaagcaagaacaagtgatgaagatagagataatgacaacatgtactaacccatatgttgcacttgagagcagcttcttggcgtccctccgccgaggagttgcgcagccaagtaagtcagaaggggtaaactcacccaagtgctggttataccactagaacattggttcatctgggattatgaccacactaactcgtcggagccatacggtagatgtgaaggacctttagacgggccaaactggttctggaaaagctgttgaatattaaaagcatcaaatgacactaaggaggtacaagctctgcgacacctccctccccctcatatcatgggggtgaaagttgaaaaggtgccaaatcaaaatgtgccaagacttcgacaaagagtgggtggaggggcaaagtggtgccagcctccatgatgtgcccgctgaaagcaactcccctaccatgggggcagaagcaaactcgtcctgcttggcactacgaagaacaagaccactcgtggcccacaccttgaaggtatccattatcttacggatgttgtctgtaggtaaagtactacggatatctgaatacacgaagtcaaattctgtaggtaacagtgggatatgtcgctttggtaagtatgaggaaacacacttacggggcgcgctggatgtcgttgcctgcttagaatgaggcatacttgcaaacatatagaaacaatgataagcacgtgccacttgctttctattccctacaaacctcttgcacgctagggtattgatcctaggtacccctggaagtggggggcgacggaaaaaactcactgttccgcatatgggaggttcagcaaccctagagcatggcggggtatcaggcatgggaggaagagagccctccaggaaatccaaatgaaagttggtgttgggaaaatattttaccaggatctagatttactaccatgtatgtttcattaacatcctaatatgaattctaaaacaatgaaataaa

SEQ ID NO: 330292 - DNA, 1711 bp, Cannabis indica
atttttcagacgctattaaacccatcttcgaaatcaatagttctccttctttcaaaatatcattctcatgattacccatctccttcaccaaaccactgatcttctcagcaacagcactaaacgaatctccatccctaccaaccaattgctctctcatgtcctcgtaattcatcttgaatcctacgcagttcccaaagtacttttccggcaccggagggattaaacggttcctataatcagcagagaatccgaacataactttctttttactttcatctccttctgtagcttttagaatgcaatcgaagacgtaagcaaacgtaacaacaaaagttgataaatggagctttggttttgagctgctatccgaattggacgataccctttgccggagtttatctatatcggagcggcttagctcaaaagtggctcgatataagtcggtgagttcatccaagattgaaaattgacggaattcaaacagttttggattatttctacaatcagataacgtcgatccaggacttgatcgcaagaattttatcatgtcaaatccaggtgggtctttaatgacattccggtcataaaagggtgtgagctccggcaataacggaggattttgtttagttaagtaagcccacgccttcataaacatggttgtggatttcccatctagaacagagtgatgggttgtgatgccaatagaaaatcctcgattgggaaatacagtgattcgaagagctattaccgaagcccctgtttcagaaacatgtaaaggagaaaccagaggacgaaccaaggaggcatggaaagcgcggtttgaggcgacgaggtcaaaatcagcatcggactcggccacggagaccgaaacgacgtcgcctggagtgtattgaagcagaggtttgggtgaatcttgaggccaagttattttgccggctaaaggtagaaaatattggagtgtgagagagagggtgtgtttgagctttgggagaacagagttgaagaaagtgtgtttagtttcaggaagagcatagaaaaatacacgctcgactggagcgaatttgaaccatattatatcgaaaaaggttaaagggagagtgaagtggacgtttgattctggtgaggtctttaaaggtgcgacatgggaaacctctagtgttttagccgagcttggtaacgccatggctgatgaagggtacactaatctctctagattttgaggctgttttgtgatcgtacagaggcgaagactttttcttttagacgatgaagaagcgaaggctttatcatcatgattttgtgagagatagaactgtgaatgttggacaaaagatcacttaaaatatatataaatatatatttattcgatatgaagtgaaactatatagagaggcggagccaggttcaaataacagggggccaggccagctattaaattttagattaaaactaaagtttcaaaatgcacatgcacgtgaaacacgtgtaaatatgtaatcaaacttacataataaaacttacactatatataatgaaaaatgctaaaaaaaaatattattagtgactagtatcgttctcagtgtcatatattaagtatcaagtaccatataacttaaaaaatgttagaatttgaggaataagatgaatgaggttccatccctaaaccaattggctataggaggagtagcccattcttcttatatattctatt

SEQ ID NO: 330293 - DNA, 878 bp, Cannabis indica
tttatctcggttctgattaccgaatctaacctaattatgccttggacgcataattctttatctcaacacatatagtatgatattgcattcaaaaccatttaaatactagggtaataaccatagaccacataatcgctaagttttatggtaaaccctaatctcgatttctcgcatggcatacacaaaatacatacattggcgccaccgcgctaaactctatgtgctagcttactgtcttacttagtaatctaagtatgtggagattccaaacccctgggtgttcctgagcaagtgctggtaatcctagtcacacattcccaagatttacaaatagggttaatcttaaatttactttcacatgtacacatagtttaaattatatttatagattaacatatagagctcaaaacgagcttttcaatggtatcaaaaacgttcaaaacggagtcccgagtcaaaagttatggaaaaaataagcatacaaaaattctcgatgaaaatagggcttcgccgcggcggtcccaacctggtttcccacgctgcggcaagccaagccatggccgaggcgaggggcccaagaacccccaaaatgcaatttttcaacatactcaaaattttaccaaattaacaataaaattcagccaaaaccaaacctaatcataaattcaaaaatcaaaacaaccctatccattattaacaacaattctaagccaaaacaaagctcaaaatcataaccacaacatacctaaagcatgccatacaaccatggccggccatttacctatgcaaatagtgatagggcccaaaatttaaaaaggcccaatataatttttcagaaatttttttaacccaaccttctatcaatgtgtcatgccaaa

SEQ ID NO: 330294 - DNA, 900 bp, Cannabis indica
taaacaactgctaatttccaaattaactaagcaggctttacattgaactttgaacttaatcctttcaaacatttttaggaaattttttagatctaatataaatgtagttgaattatttattcaatgagaaacatcctcttgttcatgaaattggttgattaacttagatattgttgttgattccttcagtgaaaggcaatatgatgacagcctcttgtcttgatacaattaatgtaattggaatactataatagacctccaaaactataacatatattaggcaaaatagaatgcctaagtagtaattagtgttttgtatctttgttatatttcaactagatcactcggaggtcggagatgatgatattggcattgtggatgaagataacttcccgttagaacttattttttctcaactaggtttcgtttctggaattggcttattgttgtgtagtagctctgttctgtgtagtagttttttcaaaatgtttcgtgaattatgtatgtctaatttgtgtatttgtttatttattcatgcttttaaatgtgtagtgtggatttgagaaaattagtggaacaaaacagggcaaattttatcccaccaacatcaagaatgactaattacattcttcttaaattcgacgagctttctcaaacaaatgtaagccttgccattgcttactaattaatactactctttttaattatgcttaattttgtataattctatcattatagaagcaacatcatgaggagtaggttgggtggcctggtcacaggtcaggccacgattttgttctgtttgagtttgatttaagagtactgtagaaagcaggattattagatgtcgtattgtttcaattgggtgcacataaaaaaatatatgcacacatatatata

SEQ ID NO: 330295 - DNA, 479 bp, Cannabis indica
cacaagtgcggattttagatttttcaatccaatccaatttgcgcaagtgcggatatctgcattttgcgaattggattggattgaatcgtgtagattggatgatcgaatacttagtgaacacccttaatttataaatcatagttttataattttgaatttatgattttttttcttgccattttctatgacaaccattctcttcttaggggaggctaagcacaccatctagcttctataatcacactcatctacaaagtattcatttgtctcaaaattatgttggtggctcaccaaaattttctaccaaagaaaacagtagaaggtatttacttgtaattatttacttctaaggtttgttctagaattttaactgaatcacaagttgagacatgtgaactaatggatcttgggattggattatgtccattcactacaaaaaaaaaataaaaaattacttttaatcacaacaaaatttttga

SEQ ID NO: 330296 - DNA, 713 bp, Cannabis indica
gtaaaatatttccaacataaaatggggatctaaccctgatgatcatgtcttcttctctggtgcgtttccgagcgtgaggtcttttgagcctcacgttgcgaaggataaggctttgcttcacagcctctccctttgcttgcagttggggtatatgtttgttgctaccttctcagattgcatgcgattagccctagcggtaaatagtcgagataatcatttcaatgagtttagtattatacttaatgatattgctcatgtttggaattcttttatagtatatccttgactcattgtaaaaggtctaagaacattgtgactcattctttagttaaacgagcttttggcttaaatgagtcaagtgtttagtgattggatctcccaatagatttatttttttaatttttatggctcttttgtacattgaaacctttgtgcctttgtgcctattaatagaattgttaagttttctttcaataaataattgcaggatttagtaattgtacagtgacttccacacatgtcttaatatttaacaatcaagataataatttcatataatataacattatataattaactgtctagaatttaaggatgtgcataaatcgattcaatctaattataatcgaccgccaaacattgaatatccacttgtgatcagatcggattggatgttatttttgaatatccaatttgatcagataggatgttag

SEQ ID NO: 330297 - DNA, 1152 bp, Cannabis indica
tacgtatataactaaaaattacctttttttttatatatatatatttatttattatatataaaaatttatatattacaatgtataatttagttctcaaactcaggattttcaacacacacgcaccctttaatgactacatgagctagcctggttacccacttttatattttcggacttacaaaaatatcactctccaattctcttcctcacaactctctctcaccatcttcaaatacaaaaaacattataagtctaactttttgacacatattgaaatttctaacctttttatttttatactgtggggaagaatttttttcaaaaatattgtgtaagttttatactgtgtactgtgttaagtttttactactgttctacggttgttttttagttgttccactgttatttttagttgttatgttttatattttactgttgttttataaaaatatagtatttttaaaaagatttccatgtaatgataaattttaatatttttgtaaatttcgcttataattttcagagccgacccaattgcgtcatttttttttcttaaaccatgcaaaaagaaaaattgtttttgttgtagtgtggttggtctacttgtgttctccattaatacaagacaaattaagaatagtatagttatggtaactactttatctcgaataaatatcgagcttcacttgtgttccacttccaccacaatcaaatcgatcggtttttcaatcttgatccagctttttcaatagggtttttgagtatcaaattatctaagtatcgcattcaaactctttggattatatataagtagaatatttataagtaaattaatcgtttttttatttatataatgaaaagggttgtaagtgtagatataatataaaagcatatgtagagtgttataaatgttatatatatattttgtagtatataagctcatcaaattaaactagcttataatgtgatttaaatttcatacatgttaaaaattgtgctaataaaatttagcattaatcaaattttaccttaaaataaatatcacattttttaaaaatttattgatactcaattaatgtaatttataattttttaatatttttatttatatatttgatattttttttattatacttttaataaaaatttaat

SEQ ID NO: 330298 - DNA, 1692 bp, Cannabis indica
  modified_base (1682)..(1682): a, c, t, g, unknown or other
agagagagagagaggaaatgtgtttttaggttatatctttaaaattaatcccttttctcctattttaatcaataacaaaaataaacctacagcaactaataatcccataaaatgacaaaatcccttaaggtaaaagaccaatatgcccttaacataaaacaaaagcaaccatactcctcaagggcaaaatggtcaaacccaacttccgacaatttccaaaacctaacaatgacaccccgctattaataaaattctacaacatacaaaatgtgactctctaatggcccaacgtcactttctaccgctaccgaacacaattacagaaaatgagagattcacatatagcataattattatatattaaactttaaataaatctccacaatatgtatatttcaaataatagttaaatcttatgaataaactctaattatttaataactcaacatattaaacttaagcggtctttacaaaaagagaccttcctcaccattttcttttgcttttggagcagattcttcaacctaagatcaacctagacgtaattgaggtaagtttacaccttatagattgtgaattctatgaatttttagttagttaaaggttagggttttgtgtttctgtggttgtagggattagactgagtttgagttgtgtttaggctaggtttttgagtatgttggagattgttttgagaggtttctatggctgcttagtttgaaatgtgtttgacgaggctaaaagttaaatttctttcacttgagcatgtgattttgacttaaagattgaattactgtattttgaagcttaggacatgttatgtttatgatattacactgttctggaatgtttggttaggttggaggaggtatgggtcgaaattgaggaagaaaacccaaggttttctggtctgccagaatcggtcgaccggttggttctggtgcaccagaatcaatcgaccggttgccctgcagggagaattcccaggttttcttcaagtttagtttttcgtcggggagttgcgtagtatctgttttaggttgtttatgggttgtctaacctattttagggttattgggggctaggttcttattcagtttcaaattagggttttatttcggaatttcaatttaaggtattcattaagttttggttatcgtgacataggatgaggatcgcctagcttatttttccactcaggtcgccccgcatgcttgagttctgaactaaggtaagaaaagtggtaagcaccgtatgtggttaaatcttagcagttgaatgattatagcctcgattattatcgagattttggataaatgtttgttgaaccccggttatgacgagggttggaaacagttatcaccgttgagtaattactcttgaaactacggataggtttcttacttattgtttgcttcatcgggcaacgatggtgactatattcagctcgtggttaacgagtggtaaaggggtattttaaaaaagtacaaggattgtgtgtttagtgatattgtgtaaaatgtgtaagcatgttgatagtgagattgaattgctgaatattatcgattattgtttatttcactttttcttgtctgagtctctatgactcatgggtgcttttatggtgcaggtaaagggaaagggcaaaggttgagcgagccatgagtttgagggtcatgacngcaatgtaca

SEQ ID NO: 330299 - DNA, 907 bp, Cannabis indica
tttgaggctttggggaatgggaacaggctaggaataggaatgagaatgggaatgggcatgggaattgggaattggaatgggctggggaatgagaatgggctggggaatgggaatgggaatagaaatgagaatggtaatgggccggaaaatgggaatgagaatgtgaatgtgaatgtgaatgggaatacgaatgggaatgggaatgggaatgggaataggaatgggaatgagaatgacaatgcgaatgagaatgggaatcggtcaaggaatggaaatcagaatgcaaatgggaatgggaatggggatgggaatgggccagggaatgggaatgtggatggggatgggaatgggaatggcgatagggatggggatgggaatgggaacgggaataggaatgggaatgggaatgggaatgggccagagaatggtaatgggaataggccagagaatggtaatgggaatgggtcagggaatgagaatggaaataggaatgacaatgggctggggaatgagaatgagaataacaatgtgaatgaaaatgggaatgggaatgggaatggggaaaaaatgggaatgggaatgggctgggatttgggttttgaggttttgggtttggagttcgggatttagggtttagggttggggtttaggggttataggttagggttaaagggtaggggtaggagtaggggtttggggtcagggttcagaattattaataattaataaaattacatacagaaagaaagtgaaaaaaaattaacatttacactttcataaattgttatcagtgttttttaactaatgacacgtgtcatcactaaaagcaacctatgaattatcaagctatgggcccacaattggcctaaattaaaatttatggaggaaattttgttgggttttatgc

SEQ ID NO: 330300 - DNA, 479 bp, Cannabis indica
tcattgaaactattgctggaagggttgatgctgctcggtagaatgatcatatgcgtccaactgaagccgttcttgcccttccgcagtctctgctcaagcttgctcaaaagaggtacttaaacttgacattcctattcctatattttcattcctcccaaccaaacgcctcctatgtgtctacgaatagataatgttgacttcacatttaaagaggaagaaagtgtgaataaacaagtattggggctgaaactgtgattttgtttaggttggctgtgcaaaacctacatgatgaaatgatcttcaaaataaaaatcaagagtggatggatgagcagatagaaacttatcaggtgagccaaatcaagatcattttttttgtttttctaagggctaagactatacttttctgattactttatacctagttggagttggactgagtttgatacacatggtttgcttcatcattctaaaatgctg

SEQ ID NO: 330301 - DNA, 2111 bp, Cannabis indica
attaaaaattaaattttgttctaatttggtttttttcttttcaattttagtactaattctgctggtttcaaattcttatctttttctaggttcaactagtttatgaaacgtcaaggtgcaactgctagattccttgttgatcctgataaaaaagagaagacttccagatagaacaaaagaaggaaaagaattagaaaaggctgcaatagagattgagcacgacgtagtcatggctgacaacgccaataatggcaacaatggtaacaatggaggagtcgtagaagaccaggctaatggtcgtaatcaaaatgaccgtagcctgagggaccatttgctaccaaatttgataggggccagatcttgtataaggccacctatcgttgatgctaacacctttgaaatcaagccgatcatactgtagatggtccaatctttagtccagtttggggggcttccaacagaagacccaaacatgcatctcgctaacttcgaagtgctctattagatatttaaggtgaatggatttagtgacgacgccatcaggttgaggctgttcccattctcattaaaggagcaaatcaagagttggttgatatccttgccacccaattctatcaacaattgggaggaattggtgttgaaattcctttccaagttctttccttctgcgaagattgccaagttgagagctgaaattaacaacttcacccaacatgacaacgaatctctttatgaagcctgggagagatttaaggacttattgaggaagtaccctaaccatgggattgaaaagtggctgcaagtgcacaacttctacaataaattggttagcaacagccaaacactcatagatgtcgtagctggtggggctttatgaggaagagtgtgaatgatgcctttgaacaacttgaatagatggccatgactaaccaacaatggtcaacagaaagaagccaatctgaaaaagttgcgggtatgcatgaaaccgatgccagaacaaagtttacagcctaggtggaggccttaactaagttggtgactgctcaagcaaagcaagctcaagttacttatgagctatgtgggggaccgcacacttatgatacttgtctggtggatgtgaacgatttgtcaatggtttaagctaagccattgggaattatcagaacaacaactgtggttacaaccaagggggtcattggcagaatttttaagggcagtttctaaattagcagcaacaagggttctaccaacagagaaatcaatctcaacagagtcaacaacagaatcatcaataacaaggctctaactgagggtctaatcttcagacagatatgttacttcagttcatgatagaaattaaatcttccattaaggtcttagaaacttagatggggcagttaactactcaaatggacaaccaaaatcaaggtaattttcttagtactacagagattaatctgaaagagaaacgttaaatttccttgagaagtggaaaagaatatgagggaccaagggcatagaaacaagtggttgaagaggaccaagatcaacaagaaccagcaccaacacaagagaacaagaagactactgacgatcttcagcaaaaagtaacttcacctcctatcagcattaatcatcatatcgaaattccctatcctcaaaggcttcgcaagaataacatggacaagcaattcaacaaattccttagaatattcaagaaattgcacatcaacatttcattcatagaggccttggaacaaatgccaacttacttagagttcatgaaagacattctatccaagaaaaggaagttggaagaatatgagatggtagcacttaccaaggagtgcagtgcaatcgtacagaagaaactaccacccaagcttaaagatctgggtagtttcaatattccatgctcaatagggggtttaatgtaaacaaaagctctatgtgatctaggagcgagtattaacttaatgcccatgtctatgtttaaaaggttaagattaggagaagccaagcccacaacagtgactctacaaatggcagaccgttctttaactcatcctcggggtataattgaagatattttggtgaaggttggtaagttt

SEQ ID NO: 330302 - DNA, 854 bp, Cannabis indica
ggtcgataagagtcttcgaaagatgaccaatctccgcaacaatctgacaaacaaaaatatatttgtataaggaatacatgatgtcaggaccaaaaagacaagaagcctgaaaatacctctaacagtaggaacttacctcatggccgcgctcacgtcctggatctggtagaccgggttggtagacgcacaggctgcgtatctcttcatggggagttaaactaggcctgcagcaaaatggctcattaattccgaggtaaacggggctagagtaggtccaatgaagcagttgaaccagtctgtcaaaggatccagatttaaatcacagacattcctggcgtactcactgcgagtaaaactgtccaaggcctccctcataatctttttcaaggcctccacatcggtattcccctttgtgtactttgttgtggcatagttatgcttggcgatccggagttgggttatctcctcgtcagcaggaataggggtgaagatgatgcccggagggatagtatactcgtccacctcggacgagatccctgaattagagctaggagccggagtgtctaccctcttgggcttcttagcaacctcagcctccaccatctttccttttcgcttccggtctaatagagggagaatctcgccttcttcttctgcttcctcctcatcctcgtcgattaaaacaacttggtctaagggaagactggaggaagaactcccgggagtcaccaccaggtcttgtgcttgaggcagagcggggtcaggactgtaggtgagggcaagagcgtccaagagctcatccattgtgttgactttgcttttagccaactacaatgagtctttttgataagcga

SEQ ID NO: 330303 - DNA, 784 bp, Cannabis indica
acttgatgacaaagaaggtgactaactcgaaaacccatctcactatcgtaaaattattggtcgacttttatacttaaccctctcacggctagacatcacctatgctgtcaatatgctcactaattcatgtcttccccacggactccacatttaacaactctacaccaccttctgcgatatctaaaaggatcagcaggcaaagacattctttattcctcctcttcatccttcacctacgtggtttctccgactccaactaggcatcttgtcccatcactcatcgctctaccattagcttttgcatattccttggtgactgcctcatttcttggaagacaaagaagcaaccaactatatccaaaagctctgctgaagcagaatatcgtgctttggtagctacatccagtgaagtcacatggatacaatacctccttcaagaccttcatataccacaaccaacactagcattcatttattgtgacaacaaatacaacattcacattgccaacaatcttacttttcatgaacgaaccaaacacattgaattcgattgacacttcatcagagaaaagattaccaattctactatttgcctcatcccgattagcaacagtcttcaattagctgatacctttaccaagccactcccttccaccactctcacttctcacctttccaagatggtcatacacgatttatatggtccatcttgaggaggagtaactgttggaaattattttaccaggatctatttacaatcatgtatgttggattaacaacctaa

SEQ ID NO: 330304 - DNA, 591 bp, Cannabis indica
gtgccataaatatttctaaaaatggtcttcaacattctcgaacaaaacacattgatataaggcatcactttattagggaacttgttgaaaataaaactttgcagttagaatatgttgatactgagaaacagttggctgatattttcaccaaggccctagactcaagtcgctttgactccctcaaaaaatccctgggagtttgcattgtctaatctcttttgttctatattacaaacagtgaaaatataatataacattgcatcaacataaaaacaacattagccctttataccaatcacatcatgaaaatcaaactttagtttttctttctttctatataatatataaactataatttaaagttagcatttatatagggtaaatactatttttgagcttgtgttttgtaagaattgcctaatagactttctgttttgttaagtatgacaatttaaaccatgcatttattatttaaaatggtacaaaataatgctttgaactcaatttctgttaaattaaaacttattaataacctgatcttataattagacgggttatatttttttagatttttttattctaaaaatgaac

SEQ ID NO: 330305 - DNA, 1102 bp, Cannabis indica
tttggtaaaaaaaaattccatatataattcgttctttttctgatctctctcaacaaactaattgtatatacagtttaaggttcaatttattttatatatatatttttaatttctagagttatagtcgtgattatatatagagttgaaatatgttaaatatcagttcaaatattaataggatttgttttattattattttatgatatataaataatattttattattttattaaataaaaataaaaaagtcacccatgaatttctcataaaccaagaatttcagttatataggcacactttatatagaatagatatataaatatataacaaaactattaaatttaatgaaatatataccatataaactttcaacgcataaaaaaattgtacatatattgtattatgtaacttttttttttagaaataataagtattattacatttgagatccaatgtataatgtatgtagaatgtaatttttttttattattattaaatttatgtaagattaaaaagaatcaggttcacaggcagatttagactcgacccaaaactcggtcacttgaaaaattgaacccgaaacccgcccaaaaggtgtatcaggttgaacccgacccgcccaaattgaacatgtttcttaaaaattttgggttggtcgagtcgggtccgagcatgttggttgggtctaggtcaaactcaataaaaatgttcagccctaataagaaggagagaagaaaggggaggagacatggataaagaccctctcctttcaaatacaaaaatttcagtcctcaaaaagtgggggagtccaataaaaagacaatttttttaataaaatatctcttctaccctttaagaataatatataaatgtaataaaaatgataaaattataattttaacattaattttactccttatcctaataaacttacatctaataccaaacaacacaaaagaaaacaactgttctctccattcctccaactccctatcaattcttttttttttttttaatttaacgtttatatattacataacctaggactcgaacccaggacctccaacacacacgcaccctcctatggccacttgagctagcc

SEQ ID NO: 330306 - DNA, 1374 bp, Cannabis indica
gctctgataagatcttctttggttgttcttttaattggaacatatccagttggacatttttcaccatttaactcactatttatcgatacttgttccacattctttggaggcttgtcttctctaaccatcgagttgggacgagaagaaggtttcatctacataaatattcatgatccttagctagattataagatattataatacaaaatttggaaatatttaaaatgataagttattgtagaaataattatttaagaaacatacttgaaaatcatatttgtgatcctttagcaaaggatggtcaaatgctggttgttcgtaaaaaccaacacagtcataaatatctccatgttgtgtctgtataagtcacaatttacatataagtctaatatatacatgcaggagatgaagttgataataatactaataatagatgaataaaaatactttaatagctttgattgatgacttgtttagtcgcataagttgattctcaatttcgagaagttcatctctcgataattctacttgttgttcatcagatttgcaataacataaaagtgtacacaacacaatagaaaccatgaaaaatcccctcatatccatatcgatgtgtgaaaagaaattcttatctgcaatacaaatatacattcaaattagctaaagaataaaactaaatctaccaacaaaaaaataaatgatatgaatatatactatggacaataattttggtattttaattcaattctagaagaatcatacaaatatttatatatatcatataccagcaatagattaatatgatatgagagtttcaatagttgaatttgagaatcagatttatatacagctaataaattatgtaggtgaaataaaatttataaatattttaattttttttcttaaaaatatttaatacaaatatgcacgttacaaaatttgaaaatacataaaatggtatatgttgtaagagagtttcaatatttgaaatgtttgactgtgattttgattttttcactcaagaatgaaattaatgaaattaatttatatagaaattacaaataaatattaattacactattctgtaagaaatagtcttagctgtaatagtggtgactgtgattttgatattttcaatagaaaataaaactaatgtatatagaaactacaaataaatattaattatactattatgtaagaaatattctgagctgtacaaatttaaaattttagttagatactaccgttaaatattaactggattactactgtatcgatttcgagattttaccgttacatatacacaggtgtatacagtgatcagttgatatttaacggtaatatttaactggcgtgtcaaatttacaaagaaaa

SEQ ID NO: 330307 - DNA, 540 bp, Cannabis indica
tctcgaactccagccattctcacctgaaagaacagttcgtccaattaatactgaaaccaaaacataacatcatcaactaattaagcatggtcaccataataaagctaaaagaatagttgcagccatttttttagattcaatttcaattaaaagttcaccacctgatcaccaatccataataaagtccaaatccataaatctaacttctaatacaaaaatgtccaaccattcaaattttaaaaaaaaaatactcaacagttcaaatgtacatgataaaaataaaacaacataacacaaagtgagaccaaattataatcaattacctgacttgtaatcattaatcaggcagaactcattcatatatatcaagagaactaaacatatatatataagccatatttttgagggagtcagccacaaattttactaacacataaccaaagcaacttaaaaataataaaaaccatggcagcatacacatataatttaggactgttcattggatcacatccaatgtttttggacccatccagatccaat

SEQ ID NO: 330308 - DNA, 775 bp, Cannabis indica
acctcgcggtcattacagcaaatattcttaggaatagtagtaatatcaatacaactatataaattatgagtaaaagcccagttagccacattatggaccatacagttacaagatattcagagagtataaaatatttatttttatgtttttttggttttggcagagtttacaaaaatatgactttttttataatatattattttataggaaataaaaaaaataaaagttaaaaatatgagagagaaactaggattactagttacccttcaataataataggaataactaattactttactgtttatatattttttactgtataattttcactgaaaaaaatatatggatgtagattatagaattggctcatcataatgtttgcgtgcgataaatggaacaagcagtatggatatagattacggaattggcacaaacataatgttcattaaaaaaaaaaaaaaaaaatcatttgaaaaagtagaacaagacaaactaacattctagttttataattatgtttaaatttaaataaatgcctccaatatgattgttccatgtaagatttcaacacaaacacctaatgaagctgcatatatgcttgcttaataggtaacaagttcaatccaaggccaccattaaaactatagcttctactttcatgactacaaaagttccttacaaaaccataagaaaaataatctaataagagcattatactaaaagaataatttctttaaaataaattaataataataaaataaactattaataccaa

SEQ ID NO: 330309 - DNA, 1321 bp, Cannabis indica
attctcttggacccgtggctgcctgaccatgttgatccgagagtctcctcctctcatccggcattagtaaatcaaactgtaaatgtgttaatgtctactgaagatgttgcctgggatgtcgacttggttcgtgattggttaatgacagggacgctaatttaattcttagtattcccttatctttaagtcaaagagctgatgaatggttttggtgttgggaaaaaaccaggcatttttagttaaatcaacatataagcagttacaattgtcaaaggatggggtgtctcaacaaagtaattctgcaatttggaagggtatttggaagttgcatgttcctcctaaagttaaagatctggtatggcgtgcagcttcggattgtcttcctagtaaaacatgcttgcggtctaagcatgtccaagttgatcatggctgtccaaggtgtgtgattcatgctgaaactccttaccactgtttggttgattgtccttttgctaatagctgttgggagcttgctggtttgaagaaaattgtcccagccgtgacttcttttgctgcttggttgaagccgtgtttctgcagtgagataaagaccagagagctgatgttgcagtgctttgttgggttatttggaagaccagaaatgatctggtttggtcggacacttcatcaacaacagcttctgttgtcttttggccaagaacactctctccaactggtgcaaagctcaggacagaatgcttgttcctacagcagcgtttctaacagcaaatgatgggcattcggtttggtccaagcctgctgcaaacacgattaaaataaacattgatgctgcaatttttgacagcaatggcacttacaacttcgtttgtgtggctagagatgctaatggtcattttgttgaggctataaccagatgtcgggcaaggactgtagctcctgaattggcggaggcaatgggagttagggaggccttaagctggataaaacaacgagattggcaaggagcggttgttgaaacggattgtctatctgtggttcaagcaattaggagtgatcctcctttattgtcatattttggaagtattgtttctgattgtaaaatgtttttagaacaattgcgtggtgattccggtaattttgttagatggtctgcaaaaagagttgctcattcgttagctcgagcatcctatttttgtcgctgatcgtactctttttgagtcaatgaggtatctacagattttgcttttttgtaatcatgaatgattgcagttaaataaagtttgatgattttattcaaaaaaaatgtaataagattttaatt

SEQ ID NO: 330310 - DNA, 1615 bp, Cannabis indica
cctatccattgaccagctgaagggcgaaataaaactgcaccaattccagctccaatagaagcaaaaactagtgatgaaccgcatttgattgtagtagaagaaagcttctttccaagaagtttaacttgttctgctggctcgacttcatcaccctcttcttttaaattcagcaagcgagtgataaatcggtaaaactcaatgccaacttgaacagtccatgatgccgcaactcctagaagatgtcctctgaaagtcgttttgccaactctgaaaaagaaaacataagcaggcattcctctgctggccttgcgtgtggctgattttggaacatcttttaagagtttccatgccattcgctgggaaacatgatggacagccattctttccaaaattcgtctagttgtgacaatagtagtctcacgacagatttgtattactgatttttttaagggagcaacatagtctacaggctgttcttcctgagattcctgcaggaactcatcatcatccgcatccaaattcgtacgaggctccaaaagtggtaaatagaacattaataaagaccgtaaggaggtcatcgctagtgtcctaagctcaaaagccgaaaatagaggctttaaatgaattctgtactccttggtactgtatctaagagcatcattctgaaacaagttttcagaagcagttttgaaactagttgcgtaattattagaaaactctgcaccagcatcacattgaacaattggtatcctgaaataaccaaacaaagttttgtaggcataaggtgttcccgcagccacagaggcggcggcagcagaggcagcagccgtggccggaataaatccagaagagtgagccgtatataaacttgtgtttttcctcaacagatccaaggctatagctattcccgccattctcaactaactgaggaaggtgaactggtccgtccgagagaggaaaagagcttccgtcgccgtctccgtcgccgtctgtgagtgagggcaaggggaatacagatcgtaatatcgtaaatagaagtaaatgttattcttaccttattttgaatttgacgggagagatttgagtgtttgaatcacattgcgatgattttgatggaaattgttgataacaatcgccggctggatctctgtccttgaaaagtggagaagaagaagaatcaggaagagcatataaatggaataaatgcaacaaaaatggtaattgtgaatgtaatgtcacaataccctataaataaatgaataaattaaggttttaaatgtatgatttcaaaaaaaaaaaatgtattaataaaataaccccggaataaatgcatcaaaaatggtaattgtatcaccaataaaattggttattatattgaaaaaaaaaatggtaattgtgaatgttagaccatttagatgtaaaaattgagttatattttatataaaaagtcatttttattataaaatattagtattatgtaatattataatttagagaaagaaaatagagaagagatgagaattttctgagtgttttattccaataggtgatctcgtatttatacacatacaagagtcaaatattaagaaactaagagaaagggaaactaagaaaa

SEQ ID NO: 330311 - DNA, 2915 bp, Cannabis indica
agagaagctctgaccttgtgggtactattttgaaagtgaaaaatgagctaagggagctctccttttataggtgaaggaggcccacaaaaatagaagaaaaatacaaattagattttttcaactgtagatgatgatctaatggtgaaaactagcttctaatggtgatagtcatttttcagagctcgcagcacctgctacggccggtaacctggagcttatttggtaactcttttgggggttaaatttggtatcgatagctttagaattgcgattgaagtgtgagatgtgacctaatagagaatttcattagcttcaaaagtcaagttgaatcgtatcaatcagatcaatattgagttagttatggcaattttactaaaggaagttcatgaccaaatgcctaggttgacatccagcgcccaggttgacatatgacgtcaacctagacattgggtaagtgtaaaaacgtgcaaaggatgtactttatgatgactaagtgattttttttatatcacttagtctatttatgtgttttggcaaagctggtcactagttctcagagatgttattctgcggaaatgggagactcaaaactcttcatttctgagtgagtttcccaagttgaaaatgaaaaatgcaaagttataaatttgacttcatggatcttagttaccgtgaaaaactagatggacggtttaatagaataatgatcaaataagcagaacctaacgaactaagtcatttgtcaacctaggcattgggtactcattctcgagctcttgggatcttgttttgatacttccaaggttcttaaacttgaggatgaggtctcctagcttatttttaaccatttcagattcattcgttgaattatatttggtatttgagcaatcaaaagtagcgcaccaggttgattatcaacctggacgctgggcctagcaagaggtcaacctgggcactgggccctatttccaggggctcgggtttgtagtttttaccctaagttttcttgaatcttaattatttatgatgacagaaaaaatgtcaggaatacttttttgtgaacttgattggaaatagcccaggttgacaatatgtcaacctgggcgctgggcccagatctaggtgtcaacctaggcgctaggtcccaattatggccctttggaagttctgtttagtccacgaaaatagttgaatcttaatcttttctaaaagtagtgagttggattcaagttattgaagtccgaactttcatccttgagctcccaaagtcaacctgggcgccgggctagggtcccttcctaggtcgattgctatgactcaggtctactcaacttcgtgacatcatccttcttgtaacttgtcaaacattgatgtccacatcactagggaaagtttctaggttaacaaatagtgcttactgctttcgcctgcaagtcctcccaatctcatcggtcatactctcaagcttatttccctacagtgcccttgctatatcaacacatctttcactgtgctttgccataaattgaaattattcctcccatcaaaaagctcgatctcaaaattttatgaaagacaccatctttgacattttcagtgtagatctaaaccttggttctgataccaattagggaaaaataataaacttcatgcgtaaataataaagaaacgaagcaaaataatttagtcagtttggtatgactaccaaacccacaaagagaaatatatttcacttcaaaattacatttactctctatctcaatctctccaccccaaatcccaatatgccatttgcttcttcctcactctcattgcacaacaaactcgcagatactcttttcataagtcactatttttctccacacacacctctttcacacacaaaatacatatttataaagttacaaaacttgggcaccaagacaacttgggaccaagacattctaaagctttcttaagaagactcttcaaaacttggccaccaagagtttttttttttcagacaattaataattacctaaaaagaacttacaactttacaaatataaatatatatataatttgagtcaaactccaatattttcaaacactctaaaattgtagtttatagtctttttgagttaacaagtttgttgaattaagttattacaaaataactttacaattacaagtaatttttttttatgaaacaattataagtaattgaagtatcctatttgggccagtttggcacagctgtgctgtgggaaaaagcaactgtagctgtgctgtgagaaaaagtagttgaagcaaaactgtgaaaaaaagttgagctgagtatttggtaaattgtaaattttaaagtgctgtgagtttgttaagatctattataatgacaatgataatgttataatctagtatattgtaatcacaaatatgttaaaatttattttatataatattttattttttatatatttttaattttttttcaaatataaatttatatgcatttgataaaaataatttatggtatttttatattatgttttatcaaatcttgcaaaaattagaaactccagtctataagaaaaattttaagttgatgtcgtttattaatataaaataaaaaataaattattatttttttaaaaaaaaataagagaattaataattatttattttattataaattatttattttaaatattttaatttttttactatataataaataagtaaatatgattttagtacaaaaaaaatttattatagtcttttaaacaaaacagttttttctaaaagttgagttggaacatctttagtttttagctgtaacttctctaaaatttctctgttttttgattgtgtaactactaacatgttttcaaaaataaaaataaatggctaattagtaatttttctccccgaacttt

SEQ ID NO: 330312 - DNA, 1356 bp, Cannabis indica
aaaaaatatggaaaaatatatttaggttattttcgcccatagatggtgatctaacggtggaattaactatagaagtcggtcgtcaatttttagagcttgagtcgcgtctgtgggacccgcttcgggtaagctgtagcttaaattcataactctcttggggtaaaatttggagtcgataacttcagaattgagattgaaatgtgagacatgactagcattaaaatagctttgaaatgcaagttaaattgtgtcaaagatcaatattgagcgagttataaccattctactgaaggttattttgggcccaacgcccaggttgacatccagttccaaggttgtcatgtgatgttaacctagatgttgggtgagtgggaaaatgcgatgggatgtgttttttgatccctaagtgatatttcgacatcacttagtccatttatgtgttttgatgaagctagttaccagttcttggagatgttgctgtttcgcggaattgggagacatgaaactactagtttccaagtaatcacctttatcggaaaattaaaattatgaagttgtaaatttgacttttctgacttaatggctctcagttatgatgaaaaactaaacaaatggttgagacagaatcaaaatcaaataagcagaatccaatgcattaggccatttatcaacatgggcgttgggtgcttatttcagagcttccatgatgtcgtttgatatttccaaggttctagaatttgcgggcgaggtctcctaccccatttttgaccattctggagagaattcttagagtagaattggcatttgagtgatcaaaactagcgcaccagcttgattatcaacctgggcgtggggcccagcaccaggtcaacctgggcgttgagctcagttttgatgcccatgggattgttgttttctcctcgagtttacttacatctttattatttttgatgatggaaaaaatgtcaggacactttttttagaaaattgattggaaacactattgtcaacttgggcgctatgcctagtgcctagtgtcaatctggatgctgggtctagtttcaggccacctgaaagttccatttggtccttagaaatagttgaatattaatctttaattaaaacggagaatatgcatggaagactttttctgaaaaactcatcgaaattggcccagttttgacaaaatgtcaacctgggcgctatgctagcaccaagtgtaaacctgggcattggtcccttgttttggcacccatgttggggtgttttctttcctgaaagcacttgttttccctgtttttgatggagacaaagaagatgcacgagttggatttttcgatctgatgcttggaagtg

SEQ ID NO: 330313 - DNA, 707 bp, Cannabis indica
attggacagggcgttacaccttgtgtagtagacaaacatgattaggcttctcaagatcaacaaacccttgagattgatacatatacacagtctcttaaagagtgctattgagaaaggcgccattactaacatctagttgtttttcaggccagttagcagagacaactaatgtaaggacaactttgactgtggttcgtttaacaataggattgaaagtgtcctcatagtctattccttgtgtttgaagataacctttggtacaaaccttaacttgaatctgtctaatttacaatcgagatttaattttattttgtgcaccgacttgtcgtcaatgacattcatatatggatcataaggaacaagagtccaggtaccttgtttagttaaagcattaaactcaactttcatagtagcaaactagtgagggtttttgagtgcagacttgattggccttggttaagtagtttgcagagatcctgggaggaagtgcttaattgccaagtaaggcttggttttggtgatgccattctgagacctagtctcatagagtgagctcttgaaggtttttgagcaaagctgtttagtaatgacaacatagtttaaacatgagaattagcagataactagtaaacctcaaatcgaccccaaacttcataaaaacttccagatcacataataacatcataatagagagaattcatgtaaca

SEQ ID NO: 330314 - DNA, 691 bp, Cannabis indica
aaaaacgtgacgagaattcaatatccttataaatctatcaaatgaataaatatataattttccaaaaaaattaatcggtaaaaatatagaaaggcaataataataaaaccctaaagaagattcattaataaaatatatagatatgtataacttcaaccaaaagaagattcaaagattcgatttttctaagattagaattaaaaaataattggtaagcaattatgcacagggaagcaagaatatgaatatctagaatgtaactgccacagagaaaggattagggttcttttgggaccttttgatatggggtagagattattgtgagattcagctactccaatatcttaaaccacaaccaaaaccagttacttcatttctcaacatcaattgacaaaaataatcacctaaaatcgcatataaattcggaaacaacacgaaagaaaagatgaaatcagagatggaaccataccagatatcgagatagggatgagatctggaggagagagagaaagagatgcgctctgagactccccgactctctaccatccaagcagtgaatcagaggttcttcaagagtccaagctgaatctctcctttgctttgaatgggttcttcaatggcggaggaggtggaacagccgtcgcccatggtgattaatagtatttatttagcccacttagtcatttttttt

SEQ ID NO: 330315 - DNA, 897 bp, Cannabis indica
tccaaccataacactaaaatttatatacaccaaaaaatatattttattattatattaataaaatataatatatttaacattaaataatgtatatatatgcacaaattagctataaatatcaataaaagaatgaaaaaaaaaagatgcagttgctacagtactacagtgctactgtatatatgcagtgcattatagctaaaactgcatatataatgttggaatggtgttatgttggagaggtatttctactgcaacctcaaatttgaggttacattgaagttgttctaacactttattctataacattttacgttatgccacaaccaactaatattgagtaaatttgagttacaatatttttagatcaatatcgagaaaataaagtcttttaaaatgtattttgtcttaaattaattagaaaatatttgagttgcaatatttctagatcaatattgattatttgggactaatttttaggatgaacaattagccatgcaaaactctttttcggaggaggactaatttttttgaaaacccttctcggaaggacacaaagccttctaagatatacatttgtgagcaaatcaataattttttaggaatgatgataacttccggagatttttttatttaaaagaactaaaccacattgtataatacttaaatttaaaatattaattgtatgatattgattgtctatatatatatgagtgagaacatacttcaatattcctaattttttgcaaatggccgaaaaacatactgtttaaactctaatttagcaccattttaaaaaaaaaaagttctctaattataaataattatttaattttgggatgttggtagctaaaccacctgaattttacacattgtaacacttaaccataaaaaccaaaa

SEQ ID NO: 330316 - DNA, 652 bp, Cannabis indica
aatttacggtttgagtttctaaagtggttgcagcgctagttgcaataggggtttctatacgactttttattgcaatttaggttgcagcgctagttggaataggagtttctatgtagaattctgtaaaaatgcaaaaaaaactgttatgaagtgtaaaaatcaaaaatcaaaaaaccaacttcaggatggttaaacttcttagtaggaggattttcatcagggaggttagtctgagcttttaaacatgcaagggcctcttgcatttgatgtgaaacttcctcttgctttgctaaccttatttgggtgtttacaagttctagttggactcgtattactttgggatcttgcttgtaatactattcttcttattcttgattgtagatttgttgtggtcatctccatgaccatcccgctcatccttatcgatgggatcatcaacaaatttcttgtcgtggtgctggtcttttgggtgcaaacgatttcctacctctaacgtttcactgtccctcatgacacccagctaagcgtttatcgagggagctggttctcactatcgtttgcgacatctgttgggttttatgccctaaataaaactcatttcaatataatcagatttacttaataatatagatcagaaataacatttaatgtt

SEQ ID NO: 330317 - DNA, 727 bp, Cannabis indica
gaatcgatttcctattgcgttgaggtgttgaactagaaccattacaaactcaggagaagagcccacgtggacgctgggtgttcacttgggcacccaagtggtgttttatgatgtttggggacatctttgatttctaattcccattttggtgtcataacgactcacacttagactatttaagaaaacacttagaaatgatcatgtcaaggtccacttgttcttctaggcatcggggcctatgcccagattaccttatgaggaggtgatgctatttgcttggggtttctgggactagggttttttttttgtgccactggttaaaaaagttgttcacatcatcaaaccaaatttctttaggtacaaatactaaaaaaacatatcatattcaattgttagttttaagggcgtctaattacctattaacaaaactaaactaataacacataccaccaaaatgaaatattttatagcttctttattcaaatttactaaacatatctttaatcgatattcacaatatgcattccacattcaagacttatttgaattgcagcgataatgcctaagttagtatacttaaagacctaagaatcacaaatacaaaaatataagtatactaattaacataatcactactatatatgttatataggatgactattcaatgactacatttttattgtaaccatatggttacatttttctttgacctgtaatagcaggttac

SEQ ID NO: 330318 - DNA, 517 bp, Cannabis indica
gacgacgatatttcacagtctacattgggcttctcaattacaactaccaataactgaggtggaaacaaattctatggcgattaatcagcccacatctaagttatctacttttatagatataattgtagaagttgttagtcttctatcatttttttctagaattgttgtctctcatgttcggagagatgctaatttggccgctcatgacttagcaaaacatgttttagggttggataataacttaatatagtttaaagatgccttctcctttatattatggaataattacataaagtactatttttcgtaaaatatttacatttttacgttcaaagaatgttttttttacatttttacggtttttcaaaaaataatacgaaaacaatataaaatcaacaagaaaacaacataaaagtaacatcaaaataacatcaaaataacaacaaaaaataacatacatataacaaaaaattaataacaaatgaacaaaattttaacataaaagaccgtattttat

SEQ ID NO: 330319 - DNA, 1391 bp, Cannabis indica
ataattgattaattcttattattctcttattttacaaagaataaaataaatattattttctctaaaataatatatttatctctttaatattatttaataataatattatatttaactaattattataattttattcaataaaactatatttttaaatactattaattatacaatttataatttccataattaattaaataaaaatttccttgtacagtgttgtatataggtgactcgaggaccatgaacctatattttaaagttctaataaaccaaagattaccatcaattttatcaacagatttatctggttcattaattctattattacttcactataaatatgaaattgcactctttcataatataaaattatatttacaatatttttacttttagtccattgatataatcaatataagtagcttgccctccaattattaatcattattagagttggtcaaaatactgttttaccattctaatatttatctcttaattccttatgtaccattaatttaatgtgaacaattaatctttaacttattatagatttggacctaactgttagcactgctaaaattaacactataagcgaactaatatttgatttgttaggaaagcttggattctattattgtataacatgttcctagccactcatgttattaagctctcaaaaaagaattcgtaagaatcatcttctctgagaaactttaatgagtgaatcaaagaacttaatgaacacaaatagaagttcatgtatacttataattcaagctgatctactaatgatcatcattgtgatatgataaacgcttttcatggtaaatggcaagtttgaagaaagatatttattacatatcagtccagtcatgcataatctaattatacatagtgtctttactacatattcatctacatatgtgatctgaatcaaaatcacacacactaaagtatagtgcatagtaaaccatacttaagagttccatattaaagattctcaatactttaatatactacctacttgttttattcatatcgtataaacttaattctcttgttttatgattgtatttcatatactcttttaatatattatccattaattacttgctcttagggcataaattctaacacaatcaacatagagagcaacatatcgaaagagtggttactcaacctattcaaaactttgcaatgtataagcttttccagagcattccaggctgactttttacagccaggatacagctcaaactcctccttaaatagatcatcatacccgctgttgtcattgattgggggtcaattgaaagaattattagtgctagtagagtcgtcaaacctaggatctcctcttaacatgtctgccaacacatctgccattt

SEQ ID NO: 330320 - DNA, 746 bp, Cannabis indica
aaacagagagagggaggagagagggaaacgaaaagaagacgagttttggggggggggggacttgagttttgggggcgtagatattgatttcgtggtccaaagtattaatttttattttatcacatttttcttttcactattcattacctacctactcagtcagtactcactattcactattcgaaccagaccaagacaaacaaaaaaaaccctagaacttcttcttctccataggctgcggctgctgcttcttctttggcggggtcgcatcccaacggccggctcagtccggtgagcatcgcccctaacatccaaagttagaaagccctctcctctgcccttgtccactatctacttgtgtccacctacctgtgtgccgtgcccccaactggtgtccgactgtccacccgtgactgccaagttccgaggtggcagctggcgaggttattggtcgttgttgttcttgaatcttgacttcttgtactaattttttttttaagtttatgaaatatttattttatatatgaatttttattttatatatactatttaattaattttatataataaattattttatataatttttattgggataataagttgttaatgtttgtacatacactacaataaagaattttagctttttatatattatactagtatatactatatattacagtatactattactaatattatatattattttattatatatattatataatatgggtgactattca

SEQ ID NO: 330321 - DNA, 1467 bp, Cannabis indica
cctcgtgcacacttctgtctctcgaataactcccaccgagtcatgctcgcaagaattcatgagtgcatccatgcatcgaggctctctagccaatatactcgcactatccataggttctcactatgataaggcaaatcccaacaccgacactcaccttgtcacttgtgaccaaggtagcaagtgtggcaagatgccaacaccaagttaacgtgccaatgcttttatcatgccatattcgatactgtctgaacaatctccctcattggccaaggactcccatacgtccatggaccaatccttaaggggccatgcctccacgcatgttggcacgccgtcgagacaagccaccaaactagttgcatacattagacctctgtcccattccagcatgatgcatctgtcccatgcacgtatgaaaactagcccacgaatgactacctgtgtcatctcgtgttgagactcgtggccaaggcgcaccacagtgtctctagaaggtttgggccacatcccgtgcaagcggcatactgataagccaagggaaacgtacctattaacctcttgaagcttcttaaacgcactaccgggttagcccgataatgtccacgattactccaactcatggagacatataagtcccctcgtggtcctcatatgcccgtcctaccagtcccgctgactagtagtagctcacttagcaccaaggtgccagagggtggtggagagctgacaccagggtacccccttaaagagcattctgagcttttagccttctactatgaacatacatgattttggctctgtagacatacggccaaaccgcataccaaatcacatagttttgccaattcgattgcactattgtatatgtagacccaaataaatggtgaataccaagtcacgtcccgtttcggacaatattgaagatatttacgaaaatgtcactgcatacaaactaagcatcaccatgccaccagtatgcaccacaacatgcgccaccgcttgaccgccacttggccaacttgtgggcatcacttagcttgtaacgtgccatcttagcacgcacgttacattaggcaccacatacaccacaataaaatgttgtagttgaaagaaagaatatagtatttcttgaaatggtcaattatatgatttgtactcaaagttaaattccaacttgtgggggaggcactcttaatcatgtgtcatattcttaatagaatacccatgaagaagaatgagatttctccatatgagttacgaagaggaatgaaaccaaacattgattacttcaaagtgtgggagtgtcttgcttaatgtaagaaagaccaaaccaaatagaaccaagttgggttcaaagggccacaaaataattcatttgtagtttacgccaaataaatagtaagggcatatatgtctatttggatgtggaatccgaatgttgtcaatgaatcagtagaagtggaagtg

SEQ ID NO: 330322 - DNA, 1730 bp, Cannabis indica
gctacccttatcaaatctgtgggccttgccatgcagtctacactatgcaaaccaccaagctttccaaaaaacttgcttccagaattgatggtatgatcagggatttttggtggggttgtgaacagggtaaccgtggtttatgcttaaaggcttgggaccatttatgccttcccaaatcaagaggtggtcttggatttcgaaagtccatggaattgaatcaggctttactggccaaatagggatgggcccttcttacagatgaacaaacgctatgctgcagggtgttaagagcgaagtatttgaagaacaagccgtttttggaagcaaccgataaaagttctgattcttggttctggaaaaacgtggtcaaatctaaagtgattctcgagaaaagggcttgcaaacttgtctcgaatggggaggatacaaatgtctggacggatccttgggttgttcatggggaagatttctatccaaaacccaattcttcttgtcccgagagaggagttaaggtggcatatctgattaatcttaatggcgactgggacattgacatgctcaaatccctgtttgacgctgctactattgccaacatccttaaagggggaaggcctagtggccaggggagtgacagatggatttagacgaaggatgtgagcgagaatttcaccacaaagtctgcttatttattgcaggctcccgagagagcccctgcctctgtggttgcaccgaccttgtggaacaaactttggaactccaaaatcttagaaagacataaggttctttggtggagtatcctctcgaatgctctaccagtccgtggtatccttgctaggagaatccccattgaaaatgatttgtgcccgtttgtggggtggctgcggaatcgatggaacacctgttcctctattgtaactttgcgtaccatcctccccttggggggtgttcccgatcccagactctaggggccgtgtgtgggattgggttaaatttctttggaatttgaagtcgaacggggtggaccctgacaagctgttcctctatgcttcaatcgtcgttgacacaatttagaagacccgtaatgacaaggtacataattctcacccgagtaacattgctatggccatggactctatttctcattattatacagattatgtttcctgtcttttccctccaacggttcttggacccctccgcttgaagattggatcaaaatcaactgtgatgtcagggttggtggagattccatgtgtatggcgaccctgactagaaatcactctagttcagttgtatgggcggttgttaacatgctcagcttcagtgaccccctgattggggaagcagcgacgtgtagacttgccttggactcggctagaataaaaaatcacaactatgtcttggtagagagtgattctgaaatggttatcaaagcgcttaaaggacttcactctatttggaatattgataattatgtctatttatgtaatcaattatctaaaaactttgtttcatgtaatttttcgtttattccgcattgttgtaattttgctgcccataatgtggctaattgggcgttcgcccagaacatctcaggttttgtggaaccctccgcaatacctgatactatcatttgtaatgaccgtgaggtctaattttaatatctatctaacgctttatttacaaaaaaaaaaaaaaaaagtaaaccaattcatattaccattcttatt

SEQ ID NO: 330323 - DNA, 1042 bp, Cannabis indica
aaaatatttaaaattccataaaatcgtatttttgtaatttttttattattattgtgtatttatgaaataattcttataaaatataaacatttataatacagatgagatattattttatttttaatttaatgtcccatactaaatagtataatctcactttaaattcaacaatatatacatatattttatctttattatttttatatataaaatgtgactatttaactatttttttaacaaagtattttaacaatataatatattctgttaaatttaataaaattattatttattttaaattattttgaatatattaatattatttattttaagttaattcgacttataccaattttagattgatttaaatatatattatttgtaatattattattttttattgttatttttaatattaggagtatggtcaattttaatattttttaaactttatatttatttttctcatatttttcaaactttaaatattgtttttttaaaaaaaaaaattaataaatattttctttataatttataaaatttaaaaataaacatagcaaaaataaaaattaaaaatataagtaagtacgtacaataatgcacgtaataataatcactataaaaatcttaagtttagttaaaataaaatttgtggcctattggagtcaaatgatgatcttgccaaagaaagttctgagatcgattgaggccatttgtagagcatttttttagaaaggtcaagcaatgtttcaaggaggagggtcagtagcttggaataatgtgtgtcaatcgaagacatcaggtggtttgggaatcaagaacatagaacattggaataaagctgtcatctgtaagtatatatgggcaatctcaaataagcaagagagcttatggctaaggtgggttcatagtgtgtacattaagaattaagagtggtgggactactcttcttcaatacactctagctggtactggaagaagatggtagccttcaaagatcaaatcaaattgctaatggtagcttatctctgacaacgaatgt

SEQ ID NO: 330324 - DNA, 951 bp, Cannabis indica
tcatttttcataatatttcatttacgtggtatttttttccatattaaaacaacagtaaaataacactacaaaacattgatttagtaattttttctctttgtcagattttatggtttttcctggtgtttttataattctggtgttgatttgttcgtccccaaccacgaaggagaggtgctgtttgtgttttgttactgtttacagtataaaagtaaatatattgggcatgggcagtataaaagaaataaaaatgggcttggacagtaaaaaggtaaagtttgccgtgtcccagtatttttgaaaatgtttggtaaaaaaacagtattttggtaagtttcccaactctaatgctatatataaccctaatataaaatgtaaatttccaaaacactaattactacttcagccgctcacctggacttccctcattcaaatttttccaaacttcttctccttccttctcacagccgaagcgaaactaaggtagggttatctgtttcaaagtttctttctttctcttcaaccttacaatggtttctagggttagggttcgctcaagatgtcaacttctcttcttcttcttgctaccgtagctagctagggataaattgtgttttttttaactttctgtcttcttcttaccgtcactcacagacgaacccaagaaaaacaactcaagctttctcacggcaccgaacccagaaatttcttggccaaaaacaacacactcgaacctgtcttcttctcaccgtcactcacagacgaacccaagaaaaacaactcatgctttctcacggcaccgaatccagaaatttcttggccaaaaacaatacacccgaaccaagaacagtaacacagtaacacacacacggctgcttagtttagtttgtggtatgtatgattctggacttttttgccttttttttggcatcacaattctcttttactgaa

SEQ ID NO: 330325 - DNA, 986 bp, Cannabis indica
aaaatattaaatgtagtatttttaaaaaagtaaattaggtattttttcaaaaaataattatatttttaataaataataacaaaaatataaaatacaaattttttaataaataaatttagaacttttttgttaaatgatttttttttaacctcaatgggggaccttttacatggaccctcatacctcacccttgactcggccttggaagtagccgtaaccatacatttgaatatttatagcttctctctaagaagttaaataataatttggcttaagttggaaaataccacttttattaatcaattaattaaatttacctttaattttatatttaattgaaacatacatctttttatatatattgtacctaaaatatcctgacataagagagtcacatgcagagtatcttgaagtgacaaggacaaaattggtacaatgtttaaaaaaagaggtaaaaataatagactttaaaaaagaggataaaaataaaagaggacaatataaaaagagtatagaatataatttcctctaataatttcttatagcttggttcaaggtgtttaataaaagagatctcatttccacacttaagttaaaatattatatatttatatatctataaaagtcaatatcacatataattttatataaaatattatataacatacaatttcatataatacaatacagtgtaatacaatgtaccaaacgaatcttatatgtttaatacataaattttatattgacatagtttacttcatgaaaaatcttataaaacttgactttgtgtcatttgatatttttagaagaaattatttatcgtggattttgctgaaatttatttagatggcatgggtcttcgtcttggcgatatcttcaaagatcaaaatactcaaacataataaaataataccaaagttataattttccttcgccatcatctccataagagcaactccaatgcaagcattttaaaaaatagctaa

SEQ ID NO: 330326 - DNA, 685 bp, Cannabis indica
tgtcgaggtgtatactcggacgacgttacagttgtcacgaagaagaagaagaaggaaaaggtaataataagatgatcttttgtgagacactgatgaaaaaagttataacgcaacttacagcgttcagagttggagatttcttcccttgttttaaatgggtggaggaagttcgtgggtttatgagaagcttgaaatttactttgggtgaattggataccttttacaatcaagtatttgaagagcggaaagctatgaaagcaagtgagaatggcgttaaagactttgtggatatacttctacaactccaaaaggataatatgtttaatatggatctcactgatgatcgtttgaaagctatcgtgcaggtcctccctcctccccttaattatctcatctcatctctctctcaaaattatattacattttattttcaattattactacatatttattttaagcaaagttaaaagaaagatcgacatcgtgaaaatttagaaactattaattcaaatctaataaaatatggtgttctaaaaaagattgacaatccctttaaaataataataataataataatagattgaaaaatgaattttgaaaatgaaaatgaaaaatcttgctttctttattgtctatatggtagtgttttatgtataacaaagaatatgacatactaaactaaaaa

SEQ ID NO: 330327 - DNA, 1653 bp, Cannabis indica
agtcagtctcataatgcaaacaaacactcaaaaaactaacctagtaaattaaaaaccaaataacacttgcaatatacatatattctaaattattacatataaaatttacaaacatacactcctacacctaatctaagtatacataccaaataagagaacataatatacattaatttatacaatatatacacattctatttacaaaaatatgcacaatatacactaatttatacaacacatataaacataaatccttatagacaacacaccttattgtatactatatacacacgaaatgcgaaacaattacatagtacaaaccaaaacacaaaaacttaagctagcaaaccgcaaatcaaataataactattataaatatattttacaataatacattaaagcaactacatataattatacatcaatatatacaataaacgttaacttatacaatctgtatgtaaacaaaaatattatatacaatacagtttaccgtatattatgtatacatatttaatggacaaatcaaatacataactaaccccaaagctaacgaacataaaccaaaaacacaaaaacaaaagcaatctatatataatcatacttaaaattcgataaaacactaataaatactaacaaatcaaaaaataaaacagcaaataaattaaaataatcacaaaaacaacactatcttagaccaaacgcttacaagaattcaaagacataccaaaccctaaacaatcgaaccatcactacaccgatccaaacaaaaatgaaccaaaaaattataaaaaaataacactaccttaacctaaacgcttacaagaattcaaacacatagcaaatcctaaaaaatcgaaccatcaatacaccgatccaaacaaaaataaacaaaaaaatttataagaaaacaaacttataaataccttaatgttatctagaactagaatctcttcatcactactaacatactcagcttcatcttcctccaccacttgcttcatccttttcgaagctcgatctacatttctcccttcttaattaaatccatttacattcttcttccccttccttgaaacatctgattccctactactactatccttagatattgtttccttcatttttctctccggatttatcgccttagaagatatatagagagagaatgtgacgaatgtgttttcaccattactaagaaataacagaaaaaaaaaataaaaataaatgcaatgcgtaccgtgttttataagaggcagctttacaaaatatgtttacaaaggaggtttacaaaggaggtttgcaaaaggagggttacaaaaagaggtattaaaaaattatggaaaatttaaaaaacagtgatcatgtgctctgcacctcctgacgcacgtcccatccaattgccactgacgtcatccctctcttcaacgtgttcaaaaagcaacagaaatggattaaatttaaaaaactaagttattattggattaaatacacaaatacgtgtctacatgtaaatttccttaaaaaatacatatatttatatatatatatattcctcttgaattaatgggtaaccacacacacattatttatttttaattgtttctaagctctccctctccactgttcatcttcttctttgttttttttttt

SEQ ID NO: 330328 - DNA, 730 bp, Cannabis indica
ttcgtgggttgttggagctgtcccgtaactaaaatcgagttgtgacccgtctagaaagatggttgtggacccaccattcaatcaggcttcctttgattctctttacctgtgttggacggtctaccttttgataattttatatatatgttaggttattcttatgtgcattgtacatataattagttatatttttagtttttatgtttgttatgtatattttaaaattttataaattaaaagaaattacttattaaatttttttaatttttttgtaaaaacaatatttaaagttgtaaaaaatttgaggaaaataaatataaaatttaagaatattaaaattaaaaatatttttaatattaaaaataataatattacaaataatatattaatatatatatttaaatcaatttaaaattagtataagttcaattaacttaaaatagataatattaatatatacaattaaattaatctaaaataaataatattaatatttataaaactagttgtactaataccgttaaatttaacagaatattcttatagttttaaaatattctattaatttaacaaaagctgttagatgatcccattttatatataaagatatgtgtttattatcattaatgattaatgatgatttgatcatatttggaattaaggctgtttgcggtgcgagtggagtgttttttgaccatttttttcaaatcaacccgcacatgcggttttt

SEQ ID NO: 330329 - DNA, 707 bp, Cannabis indica
agctttagaatatccaagagtaataagtctcaaaatttgtcatgaagttcaaagtttcaattcatcaaataattgattaaactactacagtgtcatctctatatatctctacataatcatcacattgagaaatatttaaaaaaagcctcctttctattatagataatttctttatggaaggaaaaatccacaaaagagcatcttttaagtctgcttcactctctggtttagattttgtgaaaaccctaagatgctcccaatcaaccaaaagagaacgacatatcctcttcaaattctcagggacgatgagagcctacatgtatagaatcaagtaagtgtatacaatatcaaatgtaagtaataacaataataatatgaacttgaaacaaaagtaaataaaacatgtaataattaacataccttaactgagtcaaaaaccaaccttatcctattccaagaatgattgagatgcaaaagaaaatacaacatatccataaaccaatctctatcataatttccaggccgattaagaattataaatgttccactcaacaaattagatgactcaattgatatactgaatttgatattacccctataagaaaatgattctaattttggagccgactcaacaataacagtcatttccccatcacaaggattattcacattgaaacttttcaagttctgactcaagattttaatgt

SEQ ID NO: 330330 - DNA, 506 bp, Cannabis indica
tgatatttaaaagataaagattacattgaaatggagtttgatttaggccataaaacccaacaatgaccccttgtcattactacacaaattaagaatatgaccgttgtaagatgcatagtggacatggagtctcctccaacattcttttcagatcaacatatgaagagataggggctccaactaaccaatgtggcatcctgcacacaagtaatgtatggcttctttgggcaaggcattgcacccatttagcattggaaataaaatcagtaatgataaaattctaagggaaaacttggacttcttcgcatggtcacatggagacatggtcagaatagacccttctatgatgacccatgccttaaacattggtccaaacttcttacctgtgtaacaaaaaaggaggttattagaaaaacaatgcgcccaagccctcaaagatgaagtcaaaaggctacaggcctatgacttcatcaccgaggcattctatccactttgggtatccaacc

SEQ ID NO: 330331 - DNA, 1990 bp, Cannabis indica
atgggtgttcattggatcacatccaatggatttggacccatccaatccaatccaattatttattggatattggatttttccatccgatccaatccaattgaattgagtcatccgatccgatccgatccaatggatgtattggattggatcggttccatccattggatgctttaactggttttttattagattggattggatccatccaatggatcccatggatgaatccaatccattttaaccactatttaggctaatttcattaaaacaaaaaatatatatgaaaaaacataatttaaaacctaataatctaacatagataataaaataatatataaaatattaaataaaataattaaatatataaaattataaatattaaatatgattggatggacattggatgatattggattggattggatcggttatccattggatcggatgtctcatccaacatccgatccgatccaattggatttttaaaatttgcatccgatccgatccaattatgattggatatccgattctattggatcggtcggttagaattggattggatgactttctgcacacccctagtttagattacaccatttaaagaagtgtttgggtaaacttttatctcctaagacatttaacaaaaaaaattagtattttttttaattaattttgttatgtaatagttatttaagattatttgtaaattgttaaataattttaaatagtttaaaatatcgaaaacaagatttatatattttgtagtatttgcgactgtttttcttatacacatagtaactaactgtttaaactttaatttcgacattgtaaactattcagaattttttgaaaaatttacaaatgatcctaaatagctacaacatacatgataacatatttgattcagcatacagaagagttttttagtcaattttttttaatgatagtgtatgtgttgaaacttattttaccataatctagatttactaacatgtatgtttgataatgatctataatctaacattctaaatatgaattttctaaaataatgaaataaattaacacataaagttatagaaaaccttacattagtggtagcggaatataatggctcattccgttcagatctctaacccttgtctctttctctcgcagagtattactaagatctgaactcgattctccttagatgatagaattcttcacaatcttccacactatatctgagtattaacttgaaatgtgtgggcaaacacttactcaatatatataggacacaaaattatgaagaaggaagaagaaggtttcgaaattcaagagaggctttcactttattcttttcagttgtctgacaaagtcgtctgataagtgttatgaaaataatagtcacctctttccttatatagaatttcatctagggttaggatttaaattatatggaattaaaaaaaaaagataaataatagcttaattaaacccttatggtcaaaccactatgtgggctctacagatttcaattttgtcattttatttaagaacttattttttctttcacaaatgtcattttttttttttaattctaatcctataaatgtcaaatatatctatttaataattataattaattatcaaataaaatatcttattattcaaatgtgcattcagattcagaagtccgaatcttaaaaaaatgcaccctaagagcttgtttggttgtgttttcagttttcagttcttaaaattgtgtttttaaatgtgagaatagaaaacggtttttggtcattttacaaatttaatggtatttggcacaagttttttaaaactattttaaattttttcttactaaaaataatcaatattttaaaaccataccataatatgaacccatttggctccgagtctaggatccgagtatgtgagaaaaaatataaaatataatatcttagacaaaaaaaaaaattgtttttgaaaattgaaaacaacattttga

SEQ ID NO: 330332 - DNA, 535 bp, Cannabis indica
taggatgttaatgaaacatacatggtagtaaatctagacctggtaaaatatttcgaaaaagaaattcttacatagctacaagctcaagctaacctcccgaggaaaaccctcctgctaagaaacttaaccatcctggagttgggccctctaccccagcaaatgataaagggaaggatgtaatgggtgcccctccgtgaggacccatgaacaatgctccacagaacaatagaaaagcagctgaccaatcctagcagaaagaaagggatgctcaatccccagggctaggctaaccaatcaatccgcgaggcagagtcgtacagaatgacaggtcaagtactcaagtacatgggccaaccattcggggatggaaaaactgccctaacaattctatcaagagcctccatgtggaagatctagacgcgaaatgtaatgaccgctttagtaaattggattagtaaagacaattagcactaatttctgttatttttataattatttatgaatttaattatctatgggccccattgttagaaat

SEQ ID NO: 330333 - DNA, 1936 bp, Cannabis indica
tttaggggcttttttcattttttacacttctaaaacattttttttttttacggaattctacatagaaacccatattgcaactagcgctgcaacctaaattgcaacaaaaaatcgtatagacatccatattacaaccagcgttgtaaccactttagaaactcaaattgtaatttttttttaaaaaaaaataaaagaaaatatatggtataattccgcttactttataaactcataccttaacaaataaaaaataaaataaaaattcaataaaaatataaaattattttgaaaaaagctaaaaattaaactattttttttttatttttttgataaaaacaaaatatatttaaattttttcttgtaaaatttagtttataatatatttttataaattaaacttttaattaataatatttttttaatatctaaataaatttttcaataataaataaataaatttttatatcgcgtatttaattttaaaattttaatttattcttgtaatcatttaaaataatttttcttaagatctaaattattttttaagttttaataaaaaaaaaatgaatctttaaggtttttattttgagagtgtacgatttaatagttgtcaaagtttaggggctaaaattgctaattgacaaagacacatcatcatttaaatagaataatgggacggaacctaacagaaagactaaatttttataaatgtaatagttgagcagattcttaacaagctatatattttacgggtcaaaataaatattgtcgaaaatttaataaaaaaaattgctaattatactttttgaaaaaaaaatatgacagaatccatatcttcttacgggtggggggaaaaggcaaactctctagtgtaatcagctaagaaattctatgcacaatttggagcagttaatagatttgtttcaatcaaaaagacacaaaatccagttagttttgttgaattctttttgtaatctagaaagttttgttgaattcttccttcagtctttataattataaaatagtattatactttgttttattctttaaaaaggactgtgttctagaaagttataaacttataaattatgggttagggtcaataaagaatcacgtggtggactaagatgaaatgaaccaacttccacaaacaaagaaaaactagtttatgagtgatgactgagtcatgacattactgaaagcacactctgaaatttggaacattaatactactaactagctagctaccaagactcgaaactatagttgattcttcctttcacaatatttcattttattttgtgacaaacaaacaaacaaagattattagaacatacccataaagaagattttctaggactaaaataaattgatcctaaacatatataacttgataaaaggctgatcacgaaacacctgcactatatggtctatgagttcgatttgtccaactttgaaatgaaaacaaaagtaaacagacttgtatataataaggtgagcagagcatcagatgtattaggtgatgaatacaacagatacaaacttgccaaaccgaatgtattcctaagttcctagaatgtatgtccatagaataccatctacaaatgaaagactctagcattataagctccaatgtttgctactattattactaattattatatgaatggaaaaaactcaaaatattacaattatattacaatttaagatacaaagaccaataaagagaaggaaatttgactacacaagcttaaatgtgtagcatggtgttattataggctaccatcttaaacaatattagagaaaagatgctacatccattttttagaacaaaatttacccctcaaataataaaactaaatccttcccattccctctctcattcttgtgtccccctctccctctctacaaagtcacacacacacacacacacaca

SEQ ID NO: 330334 - DNA, 572 bp, Cannabis indica
tcactaaaatagtaaaattgaatgaaattagacaaaagttcttcaatccaataatctcaatagttcaaagggtatttttaatgaccttaaaagttcagggggcatgatttagtatatgtcaaaattcaggggcaaaaatcttaattagtcaatgtttattagactggctcacaatatttgtgtcacattattgcctattttagtgagaaagttatactgaatacctactttttatttcctattttaacttttacttttctcttattactctataatttataccgagttctaaaagttatattttcattatgtatgttagggattctaacattgataagttatatgagtttatatttagtattttgattataaaaaaaaaagtatttatcaattaaaattattttacaattatatttaagtaatgtgtattgaaaaaagggaaacttacaaaaatactggaatttgggataacttttacaaaaatactgtcacacggaaatcttttcaaaaatactgtgttttataaaacaccagtaaacacaaagcagaacaactcaaaacaacagagaaca

SEQ ID NO: 330335 - DNA, 938 bp, Cannabis indica
ttgtaaacccatttgcaaccaataacatgttgcccttcaggcaaagaaaccacaatccaagtgtcatttctttcaagagcatctatctcattgtccattgcattatcccattcgggtatgccatgtgcttgactaaaaaattcaggctcaaaataactccaaatggccataacagttgctcgaaaggcaggagacaacctgtgataagataacactgcagataaagggtaaggtgtatttgatttgccttgaaaagaggaagcaacagcattagcagcaagataacaatggtattcattcaaatatgatggcttatgtgtttgtcttcctgttctagtaacaacagaagggttgtgaacctggtttgaatcaggttcagtagtagaaggaaccttttcagtatgcagaacataattagggacctgctcagtgttcagatcaaaattaagaacctgttcaggaagaataacaggctcaggaggggtttgtgtaggtgtaatattgggttcacaaccaggctcaggacaagtagaaaagaactaagtgtgagttggcatagcagaaaaaaactgatcataggcagcaggtaaatgttcagacttgacaaatggaaaaatatgttcatagaactgaacatctcttgagtaaaaaatctggtttgtgtttaaatcaaggagtttgtaagctttcatgcctggtggatagccaagaaaaacacaagaaatggctttaggatggaatttcgatcttgattgactcaaagtagatgcatatgtaaggcaacaaaatgcctttatatgagcatatgctgctggtttagagtgaatgatggcaaagggtgatttgtttttcaaattaggagtaggtgtcctattaatcaaataggcagctgtggttatacaatctccccaatagcataaaggaacatgagattgaaa

SEQ ID NO: 330336 - DNA, 830 bp, Cannabis indica
tattttaatttttttttcgaaatgagggccctgagcggtggggggcctaaggcggccgccgccttcgtctcacctcaaggccagccctggggatgagcaactataattatcccatcaagggttccaaattgtaaccaacaccaaaaaatcaaatttccaaactatcaataagagcttactactttacatacaactctctcttctaagccaaactaatttcatatactaaatcaacaactactcatcaacttccctacttcactacattaccacaacaaaccattaaccacatatccacctattttaaacaaaaccaatacaaatttattctcaaatcatcacttagtatgccacccagattgaattactcatcagatacaatctatttgaataataaggtaaaggtgtcacacagagcaaacgataccatctgactagcgtcgattttacggccacttcgcgtatgccacccagagtaaatgcgaaagaaagccttaagtactttcctcctttattagtcaattaaatccctattttcatgggatttccacacataaatgatgtaatttgggaaagtaattagttttcctttttattatttatttcttttataaaacctaatgaatgtaattatttcatataaatagtggagtcattttactattcagggatctaaaatcatattctttagaagagcacttatgctgctaaaatctttgtaagttttcgagagagatcaataacgtcttgcttcttttctcatgagtaatacaagtaaaagggagtaggctattaccaccatcacggggccgaacctctttaacgaattt

SEQ ID NO: 330337 - DNA, 544 bp, Cannabis indica
tgtcccatttttatgaacacattcttttttagtagataattttatggatttcgtaaatttgtcatttggcacaattgactgtaatcaaaatataacattctgcatagtagttatggttaaattgaacggcgttgtaattccaaatttgatataatatatattgtcacatgtgatcaatatataatagtttgacgctttcataataatacatttttttataaatttttttttttcatatatatagaggaagttttaaatgagaaatttgaattaatattcatgcattttggtaaaattgatacactaaatctaaatatataaaaattattagttaggaaaaattttattgacacccaatttttttttttattaaaaaaataccttattttaataatttatttaaaatttatatcttttttgtgaaggaaaattggtaactttattaataagaagtattcaaccattacaatagaaagaaaatcaggaggaacatcatcctcactaaaaatacgatctggaatcaaacaagagctacgagcaagac

SEQ ID NO: 330338 - DNA, 788 bp, Cannabis indica
cttcctgcaatggtatatgcatttcatgtattgcttttgcatcaggaataaaaacattaaatcttagtgcatgtcacattacatttcaaatatgtgttattatccaatgatgtgctcattttgtctactttcttttgcagctttgtgtttctctctattccttggtatattttggagagtcctgcattagaagtttctcagattcaatttaatttctggatttttttctcaaatgcacttgctgcactggcattgaatatttcaactttcctagtcattggtagaactggagcagtaactatccgagttgctggagtcatgaaagattggatattgattgccctgtcaacagttatatttcctgagtccatgataacaggtctcaacataactggttatgcaataggtatgtcttttgcataactttttattattctcatccatatctcgaaccattgtatgacacaattggatatgttttgcagctttatgtggtgttgttgtgtacaactacttaaagatgagggactctcgatccgctcaacttccttcaggaattatcccagataaagcagtgcaggtgaatcctctaaacttgttatttctctttattatctgataagtatatctcttattcacataatggatttggcttataaaattttacactaacttcaaacttaataagagaaaatgcaatgggtagttgtttcaaaaagccaagtcattgctttattagcagcttcttagttgacttgcctcattaattacatcactgcagtatgtgg

SEQ ID NO: 330339 - DNA, 656 bp, Cannabis indica
ataaattatattatgtattttttaaatagtacgaaataatattatgagcttaatttttaactatttatatataaccaacttgaaatagtttttagtgctaataaatgaaaaagatataattaatttttttttaacacttttagaattaaattttattttcacaaaaaataaactcaaatattattttaaaaaatataaaatcttatttattcttttaacttatattttataaaatagatcaccccattaataatttttacaatatatattattaatttattaattaaatatgatattgcgtgtcaaatatgttcatcttcttgtccatatttcatattgatcttcatctacattatccttatagtaaatttcaaatgttattatattctctcataaaattaatgcctttcatcctaatttattagccactctcttcatgccattacatatacataaataaataaataaaattatatttaattttctcaaaatctagattcttcttttcaaaaaccacatatatattcaaaaaaagaaaaatcatttctctttcttaattttcctccacttgtaaaaattaaaaaaacctttctacctctttcttctgcattttggtaagaatcttctccatcatcatcttcttcttcatttttttt

SEQ ID NO: 330340 - DNA, 596 bp, Cannabis indica
ccttgattctgattaatcagcccaagaagcacttgagagagcctagaacataacaactttgagatgcatttgtacacagttaagcaatgggctataggtctaaaatccacagccttagtaggggtttcagtcttaggtatgagagtgatcatagtagcatgaaattcccgaggcatgaaacctgtcttgaagaagttctctactgctttaatgaattccgctccaagttcaggccacatagtcttgaaaaaacttgctccatacccatctggcctaggggattttgaatcaggaatactaaagaaagccttctttatttccttgcttgtgaaaggttttatcaaactcaattggtgctccaggttgagtctatttcccagctccatacaatcagacctcaggctctgagttgtgatagaactagcccccatgtacccttagaagtgctgaataaagtgtttaaccacttcattaaagtcatctatgatctctccttgctcatctatataagtaactatgttattttccatctttcttttttttttcgaaaaagcatggaaataagcattgttctcatctcctttacacaaccaagt

SEQ ID NO: 330341 - DNA, 492 bp, Cannabis indica
atcacgggataaaatcatatccctatatatatattagtattttgtgtaacctatggtggagttacttgttagtatctatgaatatatagtctccacacaattatcactaatattaagtagtatgttcgtaaaaggtgttacatacatcttaatttgaaattcttaatgttataagagttatagcgtgtacaacctttcatttgagtccataacatctataggggttatgagtttgaatttcaaatggtgatatcctgaggtctaaggtgcttatattgagatgaaactagttttctatcaaaaaaatactttgctagaaaacacaaagacttgataatttcgaaaactatatttacatgagagttcccttaattagcgcttagagataatgagagatacgtttttgaataaaattaagtgtaatactttgttcaaattttagtgatccctaataatctatactcaagattgtgagtgagtatatatatatat

SEQ ID NO: 330342 - DNA, 674 bp, Cannabis indica
attataatataaaacaatccataatagaaagacttgaaatacttatttgttaaaatttaaaggtcatttatgtagaagccatatcctaaacaatttagagcaagccataaaaaataatacaaaagccgtaaaagatacaaaagtcataaaaggcacaaaaataatcgtaaaaggcataaaaaatattaagttattataaagatttttaaaagagaaaccattaacaaagtaaaaaaatatatatactttaatatatgatagtaaaataagataaaaaatcaatatgctttataaaaatttgtatgaccttatttataattacagagaaacaaaaataaaaatagcataaatatatagaaaaagaaaaacagtaaatacatatattcaaagataacaaaagaacataaggatgaaaaaatctcccaaatgtctccatccatccaacccaaacggataatctgatggcaaggacactatatcacaaactcaaaagtttttttttttctttattcaataaaaggagggtaaatactattttgaaccctgtgttttgtaaaagttacagattggaccttctgttttgttaaatgacaaaataaatgctgtattttctaaaatggtaaaaataggaccctaagcttaatttttgacaactttttttttaatacaaccaa

SEQ ID NO: 330343 - DNA, 1185 bp, Cannabis indica
ggatcggaaaaaggagagagaaaaaagacacaaagaacattctctgtaaggaaatactctcattaataacagagactcgtggactacggctcattaatgcccaaaccacgtaaaaattaattgcatcacttatcccaaagctcttatcattatctcatttgattggttgctaaaaacctcagtcaacacatataatatgtgagattcgggtttgtgttgcacgatatatttattaaaagtgttatcatattgtattgtgttacctaataagaaattgtataattatgtttggagtctttgacacgaataataatcatatcgtgttcgtattcacaatacacatgtagttaggaacacgatataaataatacgagttgtaaaaataaaaaattggataaatatgattttgaatctcgtgttttgtaaaaataattaattagatcctctgttttgtaaaataataaattagactctgtattttctaaaatagtactaaatagtagggttatttataaaatatccaatccaatctaatctgcacgatctaattcaatccaatttgcacaagtgcgaaccacacttgtgtgaattgtattagattggaaaatctaaaactagtacttgtgtagattgaatattgattgacatgtaaatcgatccaatacaatccacatatatttatatatattttaaaatatatttgtataattaatattttaatatagaaaataataatttaaaaatctaatacatatgatataaatatatctcaaaacttaataggtcaaatctatattttattcttattgataataaatatttaatttaaaacaaaattaaacatttcatggagttttttttcttcttccttttgatttattattttttatttattttaatttatttttgtaagtacatagaacaacaataatttttttaattttgttgttagtcatgtaaaaaaaaaatagtctttagtaaatattaaataatttaatattaaaaattcaaaataatcgatctaatccacacttttgcagattggatttgagttattatgcggattaaatttgatttaaaatatgaaatccgcacttaatgcggagcgaatgcactatgagcaaaattatgcggactggattagacaaacacccgtactaaatagtacctcgaactaattttttt

SEQ ID NO: 330344 - DNA, 1235 bp, Cannabis indica
aggtgacagtcttctccaacaatgtatatattgactctatcggcctatgtgccgagttgcgaggagttgtttttaggttgtatctaccatgtattttgatttaatattttgacttgttgtttttaggttgttgcaacttgctaaatggaccgataaagcgaagctatctgcaactcagaagagtatacatcatgctgcacttgctgccacggcttaccacatttggagggcccgaaatgatgctctttggaatcaaaaagtgtggtatattcggaatactgaaaattaagggagatttgcaatatagaatttatcatgtaatgccaaaaaaggctaaagctatagatagagaatggtttatagaaagatgtataaaatagaaaggcaagaggaataggtgagaagcaattgtttgagttgtaattggtgattgagcaatacaatgatccttatacttaaaaaaaacgttaaagaaagcatactttataccaaaaattatgcacttgacttccgataaagtcactttcgatatcctaacaaccaaatttaagagaactaaaatcatatattatcataattctaccaaaatttgggcagcataacgactataattgaacgtttctaaaaaattcaactacagtacatgtatttacaaaacctacttcactacgaatgaatatttaagataatccaactcatctagcatgcatataattccacccatcgatcgatctggtgcagtacaatatattgtagaacctacttcactagggatgaatatttaagatattcaaactctattaagcattcataattaatttataataaaagttagtaaatgtatacctcgagctacctagaaaccgatcgacaccaaataagtcaaagccttacaaattgacctcacaacctacatcataaagaaatactacaaatttactaatttatttagctacttactagttatataatttatgagtaactatagttactaactagttactaatgagtaactagttagtaataaaaatacatgaatatgaatgaaaaattgtaacatgttacgtagttgtaactgttggaattaattttacctggatcttagatctactcacaagtatgttgatttaacaacctaaatatgaacttctaaaacgataataaataaaacacatataaagttaagaaaccttagagtgggtgcagcggaataatgtgtctccttccactcagat

SEQ ID NO: 330345 - DNA, 1417 bp, Cannabis indica
tcttttaagctagggtaaaatcctatttttacctttcaaaaaataccctccacatggtcccttaattcccacttacagctctaaaccacttgtcttttgccacctcaaccatttttcgccacatcaattaatgagttgccacgtcatcttttttctacattaatttcaacattcagtccctgctacttttgctatagtaaaatccctgcgaaacttcaacaaaacttgcattttctctattaggctcttttcttcaccaaaacctaaataaaacttaatgaactccactaacaactctaaattacccaaaagaacataaaaaaaatacaaaataacatatattttcacaaaatggaaggaaaagaactaaatataagtaaaatacatacaaaaattaagctaaaaaaatgacaaataactctttattaagagttatcagcaccaatggtgccctttagcaattctcaaaaagaaagtaaaatctcaaactaaaaagtaatatcattagtcctttcaaaaaaaaaaaagtaatgtcattggttgttggcaacacaaaataatattttattagtgaaacataaatttaatttaatgttacttttaatattatttgaaaaaaataatcaattggtcacatcatttctacttctctttatttcttatgctatacaaaataagtagtcttttaattaatattacatttattttaaaaaaacatttggcaaggtccaaaagatagattttatttaaaaaaaaaagacaaaataatttccaaatgcacaatttggcgcgtcctccttccaccactagcaagtagagcccccatgcatcaccatttgtactcacatcgtataaaagtaaaaaaaataaaagttaaaaaagaaaaaacatatcaacataaaaaagtaaaatagaattttttaattaatttgtgtaaatatccttataaaaaatgcctatataattttttagggataataatataaattattacatggaaaatacaaattgacactttatttacaaaaatatcttcataaggtgtggacaatatttataccttttatgtacttttaattacaaaatacctcttatactatcacttacacaatcagatgaaagttgttggatggttggccgaaggttgcatcaaacgaaggtttcaatcagacgaagattgttggatagttgaccaaaggttgcatcagacaaaggttgttgggtggttgaccgaaggttgcatcagacgaaagtttcaatcccaagaagcatggatcgtgggttgatgttggaactgtaatgcaacagttatatctgttgcgagccaactaacgtgcaacttaataaaaaaaatataaaatgtgaatttgtatatttaagaatctatttgtgagtatttttttgtcattgatcgata

SEQ ID NO: 330346 - DNA, 1208 bp, Cannabis indica
aaggagggatttgagagaaaaaaaaaattctaaaaaaaaaacgaaaatggggtctgctcgtcgaagggggatatatgaacacttttaccggcgcattgaattgcgccggtaaaagtggtcatataaccctaaacccaaacgcaccgtttcgcttaacacttttaccggcgcattaatgcgccagtaaaagtaatcccacctaccaccactttccacgcggattattcccccccaaattttcacgagggcggtcaagattcccaccaaaatttggaaaacttttaccagcgcaattttgcgccggtaaaagccttacagaagtggacatgtgttcgcgccatttggcggttcattgttatttggcggttcattgttcatcttttacctgcgcatttcattgcgccggtaaaagttatagctgaatacaatcccaaattcagcatttcatttatgctgacaacttttgccagcgtaattggtcaactgcgccggtaaaactaggctttcttgtagtgtgtcttgttaagaagtttaaatccctagtcattgccaaatgaggaaagaaggaattgaagataatgcaaaaaggggaaaacgatctgattgcacaataatcatatgttcaacaatgagcacactataggaaaaataatagaaagtaactatcttcaagatggtaaatacaaccctatatatagaaactaaaaaaaatactgataaggatgtaaacgaacctcctaatgatcaagacgtctggaagttatttgtggacggttcttcaaatgattatggttcgggggtaggcataatgctagtttcaccagaaaattttaggtttcttattatgcccaaaggtttcaaatgttttttgcctcaaacaacgaggctggatattattagaataatttcccatataagttgacctgttactttagcaaattaaaacagttagttcaatcagatcagagcctaactgacctaatcggttgcaatctaagtattcaagatttggttagttatttctaactaacatactcagctacgtacatctactataaatagaatgaaattaaaaccaaaagacttatagctcaaaaatgactcctcaaaccagagaatgaagatcttagagatccaaatccggtaaagagatactcttcgtgttcaaagaaaaaagaatagaagaagagttagagagagagagagag

SEQ ID NO: 330347 - DNA, 1162 bp, Cannabis indica
ccattaattttggcaaatttcactggaaaagaagacacggaacgatctaaacgaaaattgacgaaaaaaaaaattagaaaaaatgggacgaaactgaatttaaacattgtttttaggttttattcgatcaaaacaactcctcctaatatcgaaattcagattcatataatgtaaatctctaacaaacagatctggagctcccccgtgaatccaaaccatgtataatagtaaaaaaaaaaaaaaaactacatgaataatagatctaaagtatatacagtttgcattttcgttgatttctgatttccaatatggaatatattaatttataaacacaataagaaaagaaaattcgaattaatctatagccagttacgtataagtatgtttcatttttttggttgctttgtagttgcattatcgtttcattatggtatttataaatattgtaagaatttcatttgacggtaaaaatgaaagattagttcaaaaaatactacttcaacatggttagttttatgaaaatagttgcatgttcgttttataatagttgcaaaaatattttgatacaaacaaaatattgtaaaaatacagggttcacaattggcaacaaatgacttgaaataacaaatagatctggacctctcaatcaatccaaatcaggtataatgtaaaatacaagaaaaaaagcataaataatatagctaaggtatattcagttgcattgtggttgttttctgatttccaatattgaatatattgatttataaacaaaaaagaaaaagaaaaattctaatgaatctacaaccatgttacgtggaattatgttccaagttttttcaaggtcatttgtagttgcattatcgtttcattatggtgttaattattattgcatgaatttcatttgacagcaaaaaaagagaaacacttcgacaaaatagttagtttgtataaaattattgaactcgttgctaattagttgaatgttagctttttaatagttgcataacaatagtgaaacaaacaaacaaaaaaatgaaaaatacagcgttcagaattaacaatacaagacttgaactataaaaaaccaaattgaagtaagtttcttttctattcataaagattatttgaattttttattttataaatttgtatcaaaaatgtt

SEQ ID NO: 330348 - DNA, 613 bp, Cannabis indica
tggtttatttggcataacaggaacagggctatcagaggacaatcactggatcagacccatgtagtagtgaacctagcgcagagcttcctggcggagtacaaatcatcagtatcagctcaaaaatcccttgaacttgtgaatcggcctcccccaatctcatcttggagacctcctgataccggtcgtgtaaagttgaatgtggacgccgcagtcactaaagattctttagaagcaggtttcggtggagtcattcgaaacagcgatggtttggtggctgcagtggtcgcgttcccttacgcgggaggaggggatgtgaccactatggaagtcaaatccctccttctctcattgcattggtgtattgaagaatgttttcattttacttgtgtggaaacatattgtaaagctatcttggatgctcttcatcatcccaaagaagatctttcttgcttttgtgatataattaatcaaattcggccagctttgtctatcctccccggcgcctatgtctcgcacatcaaccggacagcaaatatgttcgcgcataagttggattcttgggccaaggggttagatgaagtagcaatttggattggtgatgacccatgtcatc

SEQ ID NO: 330349 - DNA, 648 bp, Cannabis indica
tattgtaattaaaaatacatttagtcacaataaattataatttttgtgactaatacctataaccacgaatcttttagtcataacatatgaaaaataatttataattaatcacaatttattcacttttagtcataaattttattgtgattaaaaaaaaaaattgtagtaataatttaatgtaatattttttttaatgagtatcactaattaatacttaaaacacaaacatgatatttaataacaatgttggttaaagtaaagaagcctttcctcgaatctgaccatccattcaccatatcattcatctacgagtcatcatctgttatgcttgcatcagcacaaataaccaagctgcatatatgtcaaatatgtcaaaaagacaattaaaactttaggttccttcttttttcaacaaaaaaaaaaggaaaacccttagattcctttgccacgcaagagttaacttaattagataggataatttgtattcattctattgtttacacatgttgaaggtctcgatcatagtttagttaaataatctcatgcagtagaataattcttttatcattgtttttaattttgtaaatatattttgtttttttaaaaaaaaaaatagaagaattattacaaaatcactacaattttttt

SEQ ID NO: 330350 - DNA, 1008 bp, Cannabis indica
tttaatatattaaaagtagagtttaaataatttatttatacttttataaaataaaaaaatcttacatacaaaattatttaaattttgtttttaacatattaaattttcttttaaacctcttaaaattttaaaaacatttttaaataattataagtacaaatactaaaaataaattaaaaaattatggaaagagatcaaggagaacaggtaaacctgtgttaggagtgcattgcagaaattgaggattagacaaaagagatgggacacgtagcccatccaatataattggggactttgggaagaagtaacagtgcaattggcaaacaacacctcattaagtacaaaagagtagccttgccaatagctgctgcttctgctctactcagtcaaagcccaatcgggccccaccagccccattaccctctgctcatgagtcatgacacctcatatatatccatactaataaaataatacaattttgaaaagttcctcatgaatttctatctatattagtattcaaaaaaatattaggataaatattttgtatactaatgtatagtgttgttatttaatatatttttaatatttataaaatttaaaaaaaattaaacactgaaaatagagtttaaattatgttttacacccgtgattattttattttatacacatgttaattagaccgtttgaacaatactttctatattataaattattttaaatttttaaaattttataaaatatcttatataactatactatatatgaatataaaaaaaaatagattaatttttttaatactaaaatataggcaaaaaaaatacatctcgtgtaatacttttaagaaaatacattgtagaatttttcctcttaaactttgacaagtactaaatcgtacccctgaacttttttagcggttaaaaattcccctaactattgagattgttaaattttaggactttttgtctaatttcattcaattttactgttcattgattgtttatgtactaa

SEQ ID NO: 330351 - DNA, 592 bp, Cannabis indica
tgatcgcatacgttgtagctatttaagactatttgtaaatttaaattttttttgaatagttcacagtgccaaaaataaagtttaaccaattacttactacaagtataagaaaaaacagtcgcgtgtgcaacaaaatatgtaaatcttatttttgatattataaactactcaaaattttctaaaaatttacaagtggtttaaataactataacatattatgaaaagaaaaaattagattaaaaaactctcataaatactgaaatagataagaggcctaccgaaacatcccatcagagatatcattagaaaaactatttaaaagacgtaatctattgactttaatctatttaaaagacttgttgccaatctattaaccaacaaaaagagtgctatcatttaaaaaactagaaaataaaacttgagaaacataaaaaagccagcaatatatattaacatacaattcaaaatataaaataaattataggggtaaagtctacagtacacccttttaaataggtgtttttggaaaatttttctatttgtttcggtattttaggaaaaaaaaattagtttcatttttttttttttttaa

SEQ ID NO: 330352 - DNA, 652 bp, Cannabis indica
aactcattatttatctcgccaatttagcgagttggtgttggtcactttttagcatgaacagtaccatgtgttatcataatgagcaataataggctcaaagttgttagtattgctcattgtaagagactatgtaatagtgttgctcatgccttggccaaacttgctttaaagacaagtagtagtatgatttggtggttatggagtcctaactgtattgaggatcagttgatagcagatgttatccttgaataaatcctcaccccaccattttaaagtatttattgctcttggtgtttaatagttgagacattttctcaaatgtcattattaattagtaaaggtatatatgtttataaagcaacaaaataaaattatttttgtttgataatgttgtgcatgatattagaaaaggttaaatcgtgagaacatatcgatttttctcatttaagaaaaagaaaaaacaagactggggaaattatatataaatatcctagagtaaattactaaaataatgattactcatgaaatttataatttaattcatcaatgaaaaattgagtttttgcaaatgctaataattaatacagaaatatactgtatataaaactgtatacgtctgcagcaacaaaaaagtaattctgatactgcagaa

SEQ ID NO: 330353 - DNA, 660 bp, Cannabis indica
ctaccttttgtttctaatcacaacattgctaaagattattttgatcttatacatatagacatttggggaccttttaatatattgaatgttggggggcataagtactttatcaccatttttgatgaccattctaggtatacttgggttcatttcattaaaaacaaggctgaggcacaaactgttgaggaattgcaatttgttgaattgtttaataatcttggcattattcaccaccattcttgcatacataggccccaacaaaattctgtcgttgagagaaagtaccaacattttgataagatctaagacaacaaacggttaacagcaccaacaatatactatagcagaagagaaattcagtaatatttaagcaacagtagcaagattggaagaaaatactcaaaagctttattgagatatcaatggagactaagtctcttacaaggagaaggagctctctccaatcagagagatcactcactaattcttgcataaacccccacaatagcttcactaattactataaggtcaaacagtacccaaattaacctctaaccaactctacccgctcaatcacaaatgacccaatcacccttgagccatgtgtctaattggcctctttctagtatatgtaaatcgtatagtgttgggttttatgcc

SEQ ID NO: 330354 - DNA, 1509 bp, Cannabis indica
cacctcaactacactcctctaccatttatttttattaatttttaatccatatacatctaatttcttaaggatttttcaggcgtgattcagatatgtagcagcaaaacctttcgaataatcttcgggatattaggaatttgaattgaaaaattctctagctctttgagagaaagaggtttgagaggatttaagaataagagaaaaaaatgaaaatcctcatttcatataaagagtgtttatatagttgtcatagtcatccgttgtgatcatgacacctggcgattgaataccaaaagtcatttgattcgatggccatccaaattcatgcctacacagatcctgaagggttcaatgacgtgaaatcttatgaagataagttataattacagtcgtcgtttcaaaaactctcgatattgggagaacaaaagtcataattgcagtcgtcattttgaaaaacccttgataagacattcaaacgccacaatgatgtgacaacacaacttgcttgtcactcgaaatatttttaccatttaacaaacaactgtcatccctaaactaggggcacatgttatggcgcaagttttttgcctaaaaatacaagtgcagtctcataaattgctgacacgtggactcgattcccgatggaaaaggatggcatgtcaatagatagctcctgtggagctaacctcgcatgatatgaacttgcgagaaggtgtgactgagacatggtttagtcacacactatgcacaacatagtgtcaagatataagaaggaccaagagaagctagtacgtatcgcgcatatatcgattatatgcgatgagcaagtacatctcgcatgcgacatgtaaagaccacttcttcacacatgttttgtctgaaagactaatgtgttcgacgactcgttaagaactcgcaagttctacgttgtcaacgcaggaatgtcataatatgcaaaattaaggatgaacacagatattcacctaataggcccaaaggcccatggtgtgagtaaaaccccacagagcttgcgtgtttagaatatggatagtcaaatatgcgactcgaaaagtcacacacgttcaagcaattaagacaaagaacaaacaaaacttatatttattctgttaacatttatcctaattactgtgtataattaatgtaataaataatcctgtctgattcattaatatgtaaaatcaaaggatacttactttttatcgtcatctaaatcaaataaactaagctgaaagaattaccaaaagtggactaagctgaccaaattctgactgaaccattatacttctttgtcttatttactttttactatctttattttgtctattttgtagtctaatctttaagtattcaccactctaggtaaatactcacatatttacaaatgtgtacttttactttgctcgaatactccctactttcctctgacaacacttaatattctatattatttgtggttcatctatgatatacaatgtgaataataataat

SEQ ID NO: 330355 - DNA, 1143 bp, Cannabis indica
ttaaatattttaattaatttttaattattaatattaggtggactaatgaaattttgccacatgtaacttctatacaacgtagcagtccactttggcacttatcatccaaaaactagcaaaacgatttgtggtggttggggagtttagccctaacttttccagtctagagtgttgatcgttccaaacttcaaagttcagtgagtttggctgcaaattaccctttcatttatatatttactatgatttttaaatactttcaaaaaaaaattaatatttttgttaacttttttataccttcctattaaaataaagtttactttagcattgaagcataattgtaaaatttagacaaaatataacattaacttattttttgagccaaatttagccaaaatttacactatccattaaagaagatctaagagcggattttatatttcagatccaatttaatttacacactaaccaaaatccaatccaatctacaatagtatacgaatcagatcaataatttttatatactttcaaaaaaattaatgtttttgttaacttttttacacctccctattaaaataaagtttagtttagcatcgaagcataattgtaaatttggacaaaatataacattaactcattttttgagcgaaatttagcacaaaatttacgatatccattaaagatggtctaagagcagattttatattttcgattcaatttaattgacacactaaccaaaatccaatccaatctacaatagtatacgaatagaatcacttattttagattagttactttttaatattaaattatttaataattattaaaatatatatatatttttcacataattaacaaaaaataaaacaaattattattgttttgtgtctctaataacaaattaaataaataaaataaaatacaaattcttaagaagaaaaaaatagtattaaaaaaaaatatttggttttgttttgattatatttgcttatttaaatatacaaataattggatcgattacttttacatgtaaatcaacatctaatccacacaagtgtggattttaaattttttaatgaacttttttcagttttaaccaaaaaaagtaacaatattacagaactacttctagctggccaaataaat

SEQ ID NO: 330356 - DNA, 462 bp, Cannabis indica
aaattagtttggtgtagtggtaagatggtcaatgattttaattgaggccattagtttgacatttctatatacttcgtaattttgaactgaaatttattaagaaaaaaaagggcaacaagactctggtagtcgaactcagacaagcaagaatcattcaacatacagatagcattgagattaaagagttttatgtttataatggtataaatatatatttaactattacattaaatttataaataaaatatatttctttagcctcgtactgtgaggatcctaaatacagacatttattcatagaaccaaccttgtatacattaaaatttagaacatcttgaagaaaaaaaaaaaagatatttactatgatatagaattgaaataggaatagtaaatgtccaaatataaaactacacaaaaaatcggaagttaaatccatgaaaaagcatgaaaaattgtaagaaa

SEQ ID NO: 330357 - DNA, 596 bp, Cannabis indica
ttacaacaatgataaccatgaactgtctgagattgcagaacaagccagaatacgtgctcaaattgctggtaaaaatcacaaaaacatacacatatatattatatatattttttttggctattaccaaattgttcaaatgttactttggtatatcaaaatgtgtaatgtgtatatgtatttatatcaatatggattctaatttttttaggctgatggagaatcgtacgttgaaggatcgtgttgaatcagtagtaaagcgcaaagggcttgagcttgacgatattcagctaaattacactttgtaaaaagtcatccttcattggaaaaagtttttttttttctattgttaggatcttcatttagtttattatttagagatttgtcatctacttttagttatgcttgatgagcacatatagataggaaattttagatgtgcttagagagatattggaaaagaactaagagagctctaatttgtacactaagatatgcttaggttaatatttttaatttaattttatttatgtatatttttagttgtataattagtttttatttttgtgtgaatgttattcaataaataatattatttt

SEQ ID NO: 330358 - DNA, 530 bp, Cannabis indica
aaagaaaaaacaaaaaaataaataaaaacaaaaacatgaaaaaaaaaaaaaacaaaaagctaaagaatataataggaatatattattatctttttgcaagctaataggaatatattaggtcgtgcttcgtgattctccatttggtggtttgttggatggtggaaaaagattgtcttttaatcttctaccaaaggttagattttttgctttgcagtggcaactatttacttctcggttggaacaacatttagctttaatttttattgattcacacttagtgttataatagtgataatcacaaacaattatgaactcataagagaatacagttctatagctttatttctgtgcagagaaaatttagaagaggaggaagaagaaattaaaaaagattaactatgattgtagaagaggcatgatatttaaaggcagtgtctataagagtgtcggagacagcattgtctccaactaacttaattgtcaaaaatgaagctttaaaaaatttactagttgtaactgaatactagcta

SEQ ID NO: 330359 - DNA, 578 bp, Cannabis indica
ccaccacccaccaccattaccacccaccattaccgcaacaaccaccaccaccctacttttcaaatccaaatctcacagaaaaaataattaaaacaaaactcaaactaaatttaacaaagttaaatctaacaaacaaacaaacacttttatacacaaaaaatttagatctgagaactccactaccactgcaaagaccaaccccaacaatccacctacaagatcttcacacgaacccataaacacacgaactcgtccatccctgtcgaaccagaatattgtccccgtcaaacccacaaactcatccccatcctcgtcgtaccacgaactgaaaaactccatccctatccttgttaaccacgaacccataaaccccatcctcgtcaaccacgaagttgtccccatccttgttaaaccacgaaaccacagaccccatcctcatccctgtcaaccacgaacccataaacccgtccccatcccagtagagccacaaactccattctcatccccgtcaaccacgaacatagtcctccttaaacttgcaaaaaaaaaaaaaaatacagggagagagagagagagag

SEQ ID NO: 330360 - DNA, 798 bp, Cannabis indica
aagccctcttcaactgtgtagtcctttacttatacagtctcagaatcatcccatttgaccttccccaggtggtgtaggattgcagaacttacccaatatttccccttacagatcacgggagtattgactgtcacaaacaccctccttacggggtctgacgtcctcgtcaaccacacttctagctaggtcaaggctctgataccatttgtgctataaaaaagtttatagcttattggatagaggtcgatggttaaaatcccaccaagagcatttttattgtgacagtcagtagtctcgtgatctataagggaaaataccaggtaaagctgtgtaatcccaccctgcctggggaaggtcaagtgggatcattatgagactgtgtaagtattggactacacagttgaagaggacttaaatggattgattggtactacctataacaacaaggtgcatcttgttttgtagtagtccatcacaaaagaactccatagttaagcgtgcttgacttggggtaatttcaggatgggtgacctcctagaaagttttcccaagaagcatgcgagtgaggacaaagtacgctggaaacactcgtgttagtttgtagggtcagtcttcagtccaggaagcagccagagtgatgaactcgtatataatagctataatttcgtgggtgcaagggcccaatggaagcttgaagtggggacgtcataaatggtataagagccttgacctagctaaaaatgtgatcgacgaggatgtcggatcccgtaaggggggtgattgtgacagtcagtagtc

SEQ ID NO: 330361 - DNA, 1105 bp, Cannabis indica
atgatccctgaactttcatccatgttattttttactaaaattagaaaaaagtccttaaatccaacaatctcaatagttcaggggcatttttaacgaccttaaaatttcagggggcaaaattcctaattagccttatatgcttcattcccacccttttaatgagcaccaccatcaccattacaacacctaaaaaccatcaccacaacaactaccattacaacaccgccacccaccactacgacggtcccaccaccacccaccaccacaatgtatttcaaataatctcaatcttagaattaaacaaaatacaaactgaaactggaattgaaaaataatatgagatcctactcccatcaacttgataacaaaaaaaaacaaagaaacaaatagaaaaagaagaaaaaaattactaaacctaaatctaaacctctttcctctcttatgcttccatcaacttgtacacgcttctacctgagtaggcccaaccgtttcttggcattggcgagcaaacgaaagccacgaacgacttctctatcctcgaaaccccatcttcgagaactcccaaagctttattcctctctcattcttccctttctcaatgcaattctccatcaagaattgaatggggcaccactacttccccaaggtccagaaatctcaatcccatctctttcctgtgatttgccatcccccagagtcctccaccttcacctgtacgaggagttttgaagagggagagaggacgaaagaaagaattagatttagattcagggtttattattttagatttagtttgtcggattttctttttaatttgttgaaattctatttttatgattattgaattaattattcaaattaaataattaattactaaagtgttattgagatatataatttttttgaaattaaactcttattaacaacaaccaagaatttaatacatatcaataagaaaagaagaataatctttaatctaagctaattcaccatccaccctaagtgcatgcacaactaattcatgaaaaacgaacatgaactagggatgccttaagaaaattggaaaacaaactagcaaaaactctataaaaacctagctcatttc

SEQ ID NO: 330362 - DNA, 1254 bp, Cannabis indica
cacaagtgcggattttagatttttcaatccaatccaattcgcacaagtgcggatatccgcattttgcggattggattggatcggatactttgtgaacacccctatattcatgccacacacatgggactctaaactattagtagtatcacttcaagtgctcattattccatgcacgtggtactcgttctccattgaggcaggcaagctcatacactctcagcctaatggctgcttcaacttgatatgggcatttccagttaggactaaggactccaattgttggatcacgtgttgctaggaacactcttcttaatacaaggtcgtgcatcatgaactctctattacagacacgcgagtcatagtacatctttactcgttgttggtgagcggtattgcataacaaagactcctctcttctttcatcaagcatgtctaatgcttcttctaagagtaagtggttacaatattgctcgtagtagtgaacttggtgtgaggtgacttgagtttcaatagagaccatcacctcactcccataagtcagtgagaagggagtgtgtcccgaaagagtttggtgtgaggtcctataaaaccaaagcacctgagggaattcctctggccatatttaaaaaattacataaacaaaaaatatatataaatacatgtatacacttgaaaaaaaattggctcctcctaataagttcacttaattctgtcattgtctagcccgatatattatatactccatttatttatttttacttttttttaaaagtgttaaaagagaaagagaaaaaaaaatagtgataaaaaaactccaatattacagaaaataggttatatgcatcaaaaaataatatgatattttcattttcattttttcttagaaaaaaaatatttctaaaattggtatctttattcatgtattttttttttactattttataactaaatcttcaaaatatttatcacaccaataagtattggtacattggtacttatgaagggatgtgagaattttttaagtaaaattaggaaaatttagatggtatattaacttttactatttttttataaaaatactgtcagacggtattttttacttttttactgtgtttttttataagtttcatactgcagtatactgtgttcagttttcactggtgttctactagatttttttttagttgtactactgttattttgagttgttttgttttgtgttttactagtgatttataaaaacacagtattttt

SEQ ID NO: 330363 - DNA, 634 bp, Cannabis indica
agtatgcgataatggtacatgatcatgagggtgacaagaatgagtgtgtcgggcagtcccttcactttttgagacaacccaaagtctgttgtgactaagggcgatatcctacgcattcgacatcaatatgatattcattcttctattcaaatgcgacttccaactatcgatgagtgtcccgatagggatactggcgattgggtttatatgtatgaattttcttttaggattggcttttgattccctttccctccatttgtacaagaagtgttggactattatggggtacctcctagtcaactcatgccaaatgcttggaggttattgttgggcatagaagtcatagttagagttaagaggaagagggttgaccttgtggatttcaagtcaagttattatcttaaacaactcgatacagataaaggttgatatctattcactcttagggcatacaaaacagcttgggtaatggaattggttgctagcaacaagaggggttggaagaagaaatactgttttgtcaaaggtgacctatttggagcgagtgattatgtgattcctacttcatggagaaccttaagtgagtgaggagtggtgatctctttgtcatcttttatttgatacttgatttgtc

SEQ ID NO: 330364 - DNA, 1252 bp, Cannabis indica
agggtactttaacttgcatttacttctcttattctatgcttttcacatattttatgtctgcttctgactgcattgttttatctgtgcagaaatgtcttagaagatgatccaggccttaaataagagagtgggagatagctcgggccagtctcctccggccaagaagtctaaatgtggtgagactccatctaaggagaaggcaccagttgatgaggtcattgacctttccgaggagtgacccgtggtcgaccttccagtttagagggtcttgaaatccaagcgttccagaggagggagctcggacgggtctgaaaaagctaggaccccttcaacaaccatggcgttgtgcacgaaggccaagaggggcaaatacatgttccaatattatctgaaccggtcacttctcgatgtgagtgatcagctgttcggagcggacagtgagctatccttggaactggtcctaggaggagtcttgaggaagctacttgggaaaatatctttcttttttatttcgttatcttttatgtagctcgaactttaacttgcttgtcgtgcaggtcaacatgaagatgtcttatgcctattcccgagccaaattagctgctaccaagaaccttgccaccaccaacacactacaaagggaggtggatgtggccagaaaggaaactgaggacatgaggaaccagctcggggaagtgaggaatgagcttggagaggtgaacaagaagcttcttgctgctaataccaaggttgaggagctgaccaaagagctgcaagatatgccttcgaccgagcagctggaggctgacaatgtttccttatccatggaagtcaataatctcaaggatgagagggagagtctccgtactcctctttccaatctagaagaggatgtcaagaacaaacagaccagggaggaggagctcgagaaggagatcagagataagcggcccaaggaggaggagctcgaaagggaggtggacgtcctagagacagctgctcttgaggttttttatgatttctggaaggctaatcctgaaggaaactttgtttaccttggcgattccaagagcgtgtatcttaatttttgcgcgactcaggtggccaaggaaaaccccgaggcagctacctctacagcccctaccgaccagagcactgaagttcctgccgctcagactgttgatcctcgagcgcctttagaccaaaacgatccgtaccaagagcctgggactcctggtgtcttaattttttt

SEQ ID NO: 330365 - DNA, 616 bp, Cannabis indica
ctgttaacattgttgtgtacatcatagactccacacaatttaatttctattattattatttaaacaagaaaaattataaatttattttatttcaataatttaatactttccacgtccgatatacgtagcttggagtggtttttcgtatatgtcacaatatcacttttactttcacacataaaaagtatttttataatcttttattttgaatttaatgattttagtttgtaatttgcttatgatatagcttgttgcattaaatatttcaataataagtatacgtgtactcatttaaataatgtccatataacagtatttttttgtatgcccacattcaagtttttattttcatttttttataaaataaaatatctaaaattatcattatcttctataatgaaaacaaacccaaattaccatatgttttttttttattattattatttttcatctatctcacctatttgtgattttaatgttacaagagattttttttaattgtctttctctaagtgttaacctaattaaataatacatttaaatatttttagtttttactattatatttttttttactattttttatttcaaacaaaaaaattaatgagccaaacaa

SEQ ID NO: 330366 - DNA, 861 bp, Cannabis indica
catcgatgtgccgtgacgacgaaaaaattatcggctctgcatgcaatggacatcgatgtgccgtgacgacgaagaaattatcggatctgcatgcaatcaaggcgaacaggcggccattctttataagaacgatccgaccctaatccacttgagagcaaaatctcattcttaaactaatcatttttgctaaaggtgtcatacaatacaatatatgtatcacatatcttataatttagcaatcatcaacctatatatttatcaatctatgtatataaaggagaaatataaagctgacacttaaaaatttctctaattatcattatttattctctctttaattttctattttcttaattttttattaactttataataaataatttcaaaatctatatttacaaatgagtattttattagcattattaagtatttatttttttattaacattatttaaagtctatgttttctattttggcttttttcttttttctttttttttttttgaaatttaacttttcatgtttttagtttttaaattttttaattattatacactttaaatctacataaaaaaattattatatattataaatatttttcacatatatacatttaattattatttcttcttttatactattaaaaaaactagagtgtctaatcacattgtaacgccctaataactaggcacgctactcaaaatacttatgaaaccctaattccctaaacgggattactaatcaaaatagcgcagaatttaaacttttatattaaacagaatgaaaataaaacttgtaataaatttaaacttttatacagatcggatcccaaaaactatttacaaactttattacaagtct

SEQ ID NO: 330367 - DNA, 664 bp, Cannabis indica
ggcataaaacccaacactaagcagtgcaattgaattttttaagatgaaatacaaaatcaagtgtgtagaccaacctaagttgaataacgctccatgatctcgggtcctatgtcacaacaataaaaacttggtaaataacctaaccaaattctaaaataggccctaaactcaaaactggacaaaccctaatcaatacttgcttaaaaatagtctaaacttcaataaaacacctaaaactaagttctggaaaaacacccaaatggataaccagtttagaaaactagggttcccttgctggtcaacctgttgaccggttccacagtgccctgtagaacgggttaaccagtttctactacagaaatgagtaacccctgctttttacatcaaaacaaaaccaaaactcctccaagcctattgaaactaaccataaaaatttataaatataaaaacaacatactcaagcattcaaaacatagaattacactaaaaatgaaattccaccatagctgagtgagatttgatttcttgaactcaactcaattgtatcaaaacctgttatcccaatttttgcactctgacgtggcatcacatgatggtgacacgtggaatcgacttcgagtatctgctcggagaatacagttcgaacaggatgcctcatatgcat

SEQ ID NO: 330368 - DNA, 1647 bp, Cannabis indica
tttcacacattattattgtagatgtccaaaactatattaataacagagcttccatgtatacctcgtgccattactactaatacagctgcaaaatctaaagttaccatcaaatcctcgctaagtgtaataggccaaataaagaattagctcacaaagtctgaccaagatgttcttaaacattactcccaattgggtcgtctcttggacctcgacactattagggttttttcctggcacgttagtaaactagatagttttgagaagggtagattgccaaaagagatatgagttattgtttttgattaatggaaaacctgtaagattttctctccaagagtttgcaataaaatctggattgtacactgatggtggttggacacctgaagaaatggagcttgtttcttctaagaacaagttaaaggaaaagtacttcaagaacacgatgtctattaaaataacagatgttgccattgctctagatagcatatctagagaagcaaagactggagacagagtgaagttgtgctttatctatgtgcttagtgcatttctaataatgccaagtccttcttcagtaatagatcttgaatggctacaactagtggacaatctaccaatatttgataattattgttggggaaagctggcatatgagaaaatcatagagtaaatcacaaaaaaaaaagatatgaagaataatccaactgagaaggatattaagcggaacctctttagttgtccttggatatttctggtaagaaatttgattataattataatttatttaatttatttatttttgaatattttttattgtattttgagatataattttgatatgaatttttcttttatagatatggatttgtgaagcaataccaaatttgggtgaaatggtaagacaaagaatcccaggaaatcatattcctcgatggtcgaccattgaggttaagaaaacgtgttgcaagcttgaaatcacctttcacatcgtggcagaggaaatatcggtactctaagttagaacctcctactttcgatcctttcaggcagcctattgaaaaggatgtgcaagcattctttaggtggtacaatggcgatacaaacggagaagaaccattcgttgtggctagacatcacatgatagaagttttttgagatactattggcaaagcaatgatatattgatagtgaagtaagttttatcattcaaataaatcataataattatatcatattatcatcataactaacaatgagaaaataatttttttggcagcatgtagatgaaattatctatttatttagaatggataagtttcataatatctttccaaaagatatatgcatattgacagatgaatttgaacagcatgagcgtgctttgtacaaagaatctcgaaaggaaaacaataatatatgtaagaccaatgaagagctaatgatgcttgttaaaggtaccagaccaattagggagagaatttggtcggatgtcaattacttctatgtgcctttgaatgatgatacgccctggatgttagtggtagttgacagacatagccggacaatatcgatttatgactcgattccagatcactagatctctatagaggcaatgaaaaaatctgtggagccacttgcagcatattt

SEQ ID NO: 330369 - DNA, 1982 bp, Cannabis indica
attatggttaaataaaaatgtaaccattgagtagtcacccattattagtaacaacaatatataaataaaaaaaaacttaataaattgatatatatgtataaaggccgatttcagtattttcggttagtttaaccgttagcggtttttttggttttcagttccgtcaatttcggttctgacggtgttcggaaggtcggtttgaacagtttttttaattttctagattttatgctcagccctaatttaaatgggttgtttgtgcattttcctgagcttgcgatattggcggtaaagggtaatatggatgctgggaagataaaatctcaacaaatcgtcgagtttgtgattactgtggtaaattcagagattgttgttgttgtgaaaaatttaaagattgttgttgttgtgaaaaattcggtgattgttgctaaaactgaccaggacaatatatggattttgtgtactaaaaaatttacccggagaaggttgctgcattgaacccccaaacatcatcggctgctgagatatgaactcccaaattgaccaaacatcagcttttgtgactgtgatcttccaaagaaattagagtaataaaattgaggagactgggaggagcgtccaaacatgttcgaaataagaggagattgggaggaacttcctagcatgttaggagagaactgttgagtttgctgaaacgattgttgttgtggccttggacaagatgcactaccttgaggttgtgttggtaaatattgttggaggaaactctcaaatcgcgggtcatacaaattagaagtgtcgtgtcctggtggaacgtgttcacgcaatatcttaaacatctcagccataataccaacatcttggaaaagagtaaaccatgcttgagattgagtttgactttgacttgaagagccaaatgttggtttttccccttttttcctaagttgtaaccaactcctcgaatatagtcactcctctctccaaaatccttgcccataaccttatgctggatgtcagacgacagctttgaggatccaaaatcactgcctaattggctttgaagtctgcttctagccatctcttcctccatttcatgggtcaattcgtcctaaccaaaaaaaaattaaaattcaacaatgtgataattttaatgaaaggataaaacattatggtaactcacccatttttctttagcagcatcattgacccaagctttgtccttttttctagtatggctatctttccatgtttggaagacatatttatctggctccttttgtattgctattagtgttagattttttaaaagttataattttattaaaagaattaataattcacttacaaattcatgacgctgagctgccattgattttgtgccttgagttgaggtgtacttcatttgtaaactgtttttcttattttgattggaacactctataaattttgggctcaaaatcatatcaataatctctttctaatgctctcttgttacatactcaggcttagcattgatagccacctccataatagtagggttaccttcgtaatatttttgaaactaagtatgaggcaacgacgatggctagaactggtcaaagattatgagtgcgagattctctaccatcctagtaaagcaaatgaggtagcagatgctttaagtcgaaaaggactagggcaagtctatgaactaaagaagattttaacataattggctgaggatatgactagagcaggaattaaatttgtgattgggaaacttgccaatattaccttgtagtctgatttgttggaaagaattagggtggctcaacaaagtgatcctgagttacaggggcataaggagaagttagaggtcaggtcagcaaaagacttttcattttcatctgatgggttattacgatacaaaaacagaatttgtgtaccaactgataaagatattagacaggagattcttgatgaatctcatactacaccgtact

SEQ ID NO: 330370 - DNA, 1121 bp, Cannabis indica
cgggtagcatacaaattccaatctgctcattatcacgaaagtaaaaacgagaaatgatagcgtgagatgtagagatattaccaggagatgaatccttcattggctgcttgcctttggcagccgcagaagccttggctactgaagatgcacgagaaggcactggagtagatttggtcaagcgaggctctggttcgagttcagtttccaaactgtccgaggaggctccgatgtctttaggaatctctttttcagaatggagagacacagatttatcagaagaatcaacagagggatcctccatgggttcttcttcttcagagcttgaagaaaccgaagggagattcatcttaagcttcttggttggagtagctggtttgtcatggcttcgtttcgagcaaagttccttctcgatagatgcttactgggcacgagtgcgagtggaaggacctattggagttgatgcagcaactcccttctctgttgcagtaggaggtgatatagtagcaggtggaagagatccttttgaagatgaagacgatgaggtccaccatttgtagggtcgcacagattttcaaaccagttgtttaggaattctcttcggcttgggcttcacgggctgagattcacgttgaggaagcgatgaatctcctagattcgacgcagttgcagcaacaggcagcacagttggaggagcagaaggtgcattcgagggggcttgttcggattccacgattgttcttggatgccctaggttcttagtcttagttatggatttctgaaagaggaataaaaaacaacaaaaacacaaggcgataggaattgggttggtggtgagaataaatgacaaggaaaattggtttaaataaacatggaagggtgaagcaaaaaggaaaccaattttgaaatttgaagaaccgccagcccatgaacaaaaagggaaaccgcccacactttttccacacttattttttttaaacaaaacaaaaaaataaaaggaaactagaattaccaaaatattttccgaaaatagcccatttaagaaaatctttcaagatcaatgacaaattataatgaataagatatcaatcttttaaaggaaaacattgttgggttttatgccc

SEQ ID NO: 330371 - DNA, 1793 bp, Cannabis indica
accttggatggatcttcatagggatgaacacccaccgttggattggtaggggcatgttttccatgtgatctttatcgatgtcaaattgtactggttatactagcggggctttggatgcgtgtcactccagggccatccttatataaatttctcttattcgtagccgttggattgcttagtgcagtacacaattacacacattctttgcatggtagcatggtgtgggagatatactctgacattgtacatgaaaaaagcctagtcagtggcccgtagcctggtatgcgcgggctgaacttccacaagtcaaaggcgtactctggactagcgcatcttagatgaagatccatattcctcgcggttgcaaaggctcaagtcttacagaatgtagagaatcgttagctcatggacacctctctcgtggctcgcactcaggaaggtttaccttacggagacccatcccacaaggttaatgtcgttatcttcctggaccgcaaagtacgtgacttaggcggcttaatgacactttaccttctataacttgtgtgcacatgtcactcttgcaaaaggcggataacaaacacaaatataaaaatctaataaaccaaaatatatacaaacaaaaaaaattattaaagaaaaataaaaaaaaataaagcaataaaattgttatccttcatcttagtccccgatcgtgatgaacctgcaaaaaaactcaaagggaaaagaagagaaggagagggagagagagagcaatacctgcgagagaacaaagagagatcttgagccgctatcgtgagtgagatctcaggtttggagtggtcattaaggtggacgtcagggtatggggtgtctttgaggtatgggtaccgggtaggcccttggggtgtccatcatgatctgggttttccttcaagggaccattggcatctagaagtcatcagggtggacgtcatggtggccattgagatctcgattggccatgggggtagtgtcgttgagagagacagggagagttttgtggttagggatttttgtgagtgaatgtaacacgctactagtttaggcgtgttatcgttattttatattaactagtttaggcatgttattgtgatttttggggtagtgtcgttgctaatcaacgaatttattgaaaattgtgagtaattaaaactttgtttaaatacttataagtacaaaaaataaataagatatataatatttacaatagattcaaagtacttaatacaaaagttgttgcctagcgactatataaaatatgaccagctgtcccatagatcgtgcgctccaagcctaacaaccccgacatgtataatcttgatctgctcgctctcacagctactcaaccttagccttgcccttacctacaaatgcaaacaaaatctgtgagttgatagactcagtaagaaaagcataatcataatcataaatataacctgaatataattaggtgcccatacacccaactataaccctatccccgtgtccaacatggtactgagtcctaaatgttcatacgacagtactatctaccataatatcaacctatactcggtactctagtcatactctagtcgtactgatgttatagcatcgatttcatacttgaaccaaacaaacatttattggtatccagtacaactctatgtatactgatatcgacatcaatgtactctaacaaccttcgtaaacatgcacgctaaatatgtaaatacatattcataacattatacaattcttacatcgtttccaaattcagatgtcccagtcaa

SEQ ID NO: 330372 - DNA, 531 bp, Cannabis indica
aaaaaccttatctcgatctcatgctaataatactaacgtaaacaataattcataacagcatctcataaacacataagcaacaaacccataataaagttgtatgtttcaacatacaccctatgcatagatgtttactcttctttcctcaattgttaagaacaccttttgggctaatccaagcacctcaatgtagttcctttttaagaacaatatccttcaaaaataccctgatcggagtaccatcatggaatcatctttttcgatatgtctgacaaacgtacctaaatttccttctttgcttgtcgtttgaacgcccttcctttactaattagaaacaactccccatagtcgacccaacactaacaaaaaatcctataccaacccaatagtaaatacgaccccaagtcatacaaatcgtagttgtctctatttgttgggggtgtacctgttgaaatttattttaccaggatcaaacgaataaattaaacacataataaagttaagaaaaccttacattagatgcagcggaat

SEQ ID NO: 330373 - DNA, 877 bp, Cannabis indica
tgtagatccatgaaaatgatactaattataatttgtcatagaatttcatacaacattttattatctcagactcataaaggaggtgttaatgtacctgcgttctattggcttcttttgcttgctttagtcgttcgatgttttcttcattgacaaaataagtagagtctacagtctcaactccctgaaaaagtaaccgaaaaatgaatcaactgaagtgagtggtggattcttttcaaattagtatatgacacattttcattccaaccatgacaaagttggttgcaactattacaagtaatgaactccattggtgaatggtaaccctagttgagaagtccaagaaagaggtaagcacttacttgttctcttgcaaaggcttctgctccatcaaatgcaaggtatacatgaggagatttttccatgaccaaacgtgccaatgatatagcattaacgacagttttgaggccagaaacagctccacaattcttcgtacttccatccataatactagcttccatttcaacattgccattgcaagttaaaacagagcctttacctgcattaaaatgtggattgttctccagctcacggacctacatatatacaacatatccatatacttggtaagttcgtcgtggcaaaattataaaatcggaacaatttcactttttgtatgaagaatttgggacaagggtgagactttgggcgacgacccagctattgcctttatgttttaaaaaatgtatatttaatttaagtgaaaattagatagaatatgggatttgataataaaattacaaaaatatgacatttataaatttgtcactcttttatgatatttttgcacatttaatattttctatggtacttgatatgc

SEQ ID NO: 330374 - DNA, 789 bp, Cannabis indica
aaaaatcacgtaatacgcctgtgttagttacggtgctacagtatgcctatttgtgctctccatgagaaatacttaggcatcccatcgtatgctggtaaagataaaaaggagctttttagtggtatcaaagatcgtatatggaaactcatgaatcaattgcatgctaagctcttttctatcggtggcagggaagtactattaaaagttgttgtccagtcaattccaacttatgacatgagttgtttcagtctaccgaataaattttgcaaccaattagagtctataatggctaacttttggtgtggttccaatacaaataattcaaaaatactttggaagaaatggaaattcatgtgctcaaaagctgatggtggaatgggctttcgatcattcatccactttaatcaggatcttttagcaaaacaagcatggagaatattggatatccctgattctcttctggcaagagtatttaaagcccgttattttaagaatggtgattttctctcggcacaaaaaggcactctaccttctctcacctggcagagtatatgtgatggtaaaaagttgttgttgaaaggcctaagatggaaaattggtacatggaaaaatgtacggtgtgcaacggatccatggttacctggaaatacttcttttactccttattattatggtggtgatcccctcttcacaattgaacactatatctctttgaataggcaatgggatacttgttggaaatattttaccaggatctagatttactaccaagtatgtttcattaacatc

SEQ ID NO: 330375 - DNA, 631 bp, Cannabis indica
gagagagagagagagagttatgaactccggtcaaaatctgaagaaatagaataaacaaccaagggttgattcaatttcaaggtttccttccgccgttgctagtcttgttggaaagagggactacataagagaggtttatttgagttggggaagcgccaagaaagttaaaccagagtttaagggatacgtcttcaagccgccgtttatttgcccagtctagggaaaaaaatatgggttgcaactttactcttacaatataaaatagtgcagagcttattagtaatttgcaaagaggtgaaatactctaaatatgtaattgtgtagttattgttgggtataaaaggagtaaatagaacttttactcaaatagagttactcgaagagtgcattttaagacatttgtcttgtctcgaagaggactaatatttaacacttaccctatatttggtaagtgtacaaagactacataaaatttacaaaggaaaatttgatattatatgcttaaaattaatttatccactattttgcatcatgcaaaatatacttccaccaattttacctctaaacaaataaaaagtaaacatccatctctctctctctctctaggatactcacaccacacacatgcaca

SEQ ID NO: 330376 - DNA, 723 bp, Cannabis indica
ttcactaagcaagggcttatttgaagaaaaaagagaatttatggtttatttattaattaagagactttgtaagatctaaataaataagttaaatgacaattttatttgataattaattataattattaaatagatagaattgacatttacaaaattaaaattaaaatatggcatttgtgaaaagaaagaagagtttaaataaaatagcaaaattgaaacccaataggctcactatagggttcgaccaaggggtttaataaagacattatttttatcttttttaattctattttaattctaaacttaaccctaaaagctaccctataaataaaaaaagtatagctcttatttttaaaagatgatcagactcctactcctttgtcagacaaaatagaattgtaccctttgaacattatatgttgtaccaatacactcagtaacactaccgtactagtattggtggcatatcatgaatcacaatatcagcatgcatataatacacatacacatatttatatacatacatatatatattctatgctaatcttacctcaattccaattcaagtgtgtcgatcgatctaaataaaaatgtgtgcgttgaatggaggcccttgagttcacaccacttgaatcccactaaaattcaccaaaatcatagagaaaagaagaagaaatcttctagtttggtatggttctccttggccgactatggagagagaga

SEQ ID NO: 330377 - DNA, 818 bp, Cannabis indica
aaaaaattacaaaaatatagtctatacggtagttttctaaattttttacgtttttttaaattttatttacataaaatatagtcttttgtatttttttatgttgtatttttgttatttgtgtatattatttttttatgttattttgatgtagttttgttgttgtttttttgttacttttatataattttttgttattttcttatatttttataaaatactggaaaaaattattttttttttgtcatgattacttttttgataaaaaaaattacatcaacaaaagagggatctctttcatctaaaaaagcttatcatttatttatgtaaaaaacttttttttatttaaaagggtaaaaaaaaactttaaacttaaaaatatgaaaattttagagaaaaaaataaattaatgttgtataattatgcttattgttttcattttattaccataaaagtttcataacaattgataaaatgtcatttataacttatatatggttaataaaataagtacaataaacatagtatttctttaaaagaaaaaaaaataaccaagaaaataaagcaagtactaaactataagttaacaataaaactaataagttaggacctcgtttttaattgaaaaagttgaagctaacccacaagtactttacctttgatttaaaccttttaccacacatatccaacaatacccttttcgagtaatttaatttattgtgatatctagtctagtctaaacaaatcatcacctctccaattttcatcatgtctttactttttttggtggggaatgtctattgggaattttgattttatat

SEQ ID NO: 330378 - DNA, 726 bp, Cannabis indica
tatctcatcgcttgtcattaccgcagtttacttgtagttatcactattgtattttctaaatttatatcttaatcttagatttatctcaaaatatttttttaatatttttaagacaatagagaaaatttattaatttattctgttattattaattaatatgttttaaaaaggtgaaataattttaaatatttaattaaaaaaagaaaaaaatataaaaaaaagtaatattttagttatgagaaatgctagaagacaatccttctaaatgtcactattaatgtaattaaacagtaagtctcctataatattttcattaatttctctccaaaaaaaaaaaaaaaccccatattcatctataacagaccaaaacactactcactacacatatcttattttatatatgataagaggcttcttcaccacctcctgcttattatacaatagtaaccttctattttaatttttatgaggacattatagtacatttatttcatcaatattatttttcttttatttatcaaaatagcttttatgtatttcatttttttaaaatttatcttgtccaacttcaccctcattttcacagtgatcatctacacttttactatgtgttgccatttctctcaacacctataatttattgacgagcaattaaattaggacattatttccaaaaaaaaaaaaattaaactaggacatttagaaattttacttatctatttaaac

SEQ ID NO: 330379 - DNA, 891 bp, Cannabis indica
ttataaaatcacacacgtggcgtccctataggatagggcgttacacttttctagtctaattttttacatagttgtgtacattttagttatttaagacatcctgtaaaattttgataaattcaaaaaaatttaacactctgaaaataaggtttaaattgtctgttgcacgtgtgattcttttatcttatacgcgtgtgaaattaattgtttgaacattgcattctatattataaattattctgaatttctcaacattttggaggatatcttaagcaactataaagtataataggactgagcatgaaatttagaaaaccgaaaaagtcgttcaaactaacctgccgaacaccactggaaccgaaactggctgaactggaaattgaaaaaaccactaacggttaaaactgtcattgaacggtcagttttttttttaggtaataaaccgactgaaaaaactaaaatcgatcgaaaaaactgaaactgaccattatacatatatactaattttaagtttttttttttactttgtgtggtgtagttactcataatatatactaatataatattatttattagtattaaagttgaaagaatacgacaattagtttttgaacaattaaatttatatggttgtagttgtagaatgtagaacaatgtgcttacagaataaattagatcgtattttaaagaaaagagaaagaaattcgatttgggtgatttaaactgaccaaaccaaagttcaaaatagtcagttttaagacatgttctcgattggttggtcagtttttggattgcaacaatccagactaaaaattgaattctggatttttatatagaaaaaaactgaccaaaccgaccaatgctcagccctaacgtatacgactatgaaaa

SEQ ID NO: 330380 - DNA, 743 bp, Cannabis indica
taccctcaaaaaataaaatgtttgttatgcttaacatatttaatttgatctgaatctgtcttaattctgccctccttcatcaggtttctatactttcatattgggcttccacttacatatgggacttcatcagcttcttatttcctttctcttttgcaattggtctttttagtatatttggtatgtcttatctttaaataatattttatagagaaaagttgttgattttgaactactaaatcattgttaaaaaattagatcactttgcaattcaaaatgcataaaacaaatatcaatttaattttcttttttattttaatgtattttgataagcatacaaactatttattgagaaatctgttacttaaaagtgttatgtattgttttttttttaattctcatgaatgctcttttttcttgtgtctacatctgcagtgttttagataaatatatagatgcatgtattttttaagcaatgcattattgtccagaatagaataagcctgttcaatttcacttttacttacattaaaattgattgtctgtaggtctggatcagtttatcggaagggattgtttcttgccaacagtcatcatgtttttgggatatggtttagctgttgcatcgtcaacatattgcctttctttcttcttttcagaccatactatggctcaggtgagaaatgtttttatccttatcgatgtccggacaatcataatttctgcttacgctttcaagctta

SEQ ID NO: 330381 - DNA, 919 bp, Cannabis indica
cttaattagaaaataatttccataaataaaaatattctaataatctatcgtggtattcttttcttcctgtagttaattaggtcaaggcaaaaacacaagtgatattttcttttctcaagaatactttctatattataattaaaagtatgaatattactataaagagtaatttaccgcataaatacttaagtttaactctcggttgtaaataaatacttaggtttaattttttgcagtaataatatttaagttatttttgtaaaactctgtaggtatctgatcgttaaattttaagtcattatccacgtttattttcttattggtaataattttgaaacttttataagtacctaggttttaactattgagtatattatacgtgtcaatatctaattggtgaaagttatcaaagttttttattttttttacagagttctaaaaatataacttatgtgttattaccgccaaaaatggaacttaggtatttatgccgcaaattactcttaccataaatctaacaaaaattttcttgtttctcgttctgttcgaagggtgtttcgttcgtttagatgcgtggagggacccacgtgtagggttagacccttttattgttgtcacatttaatttaacttaaatgaaactaatcaaatccaaaatcacacttgtgattggatcaaatatattttaaaaatattttaattaaagtaattttatttttttgttacaactcattaaatatttttatatatatatatattattggacaattattctatatacaattttttaactattttcttcaaaattacagtttaggcttctccggtagtttctatgtgggttgttgtacggattttggttgggaattaggttgctctattagttgctataggagtttctatgtagtattctgtaaaaa

SEQ ID NO: 330382 - DNA, 811 bp, Cannabis indica
tgcgagtgcatgagattttcttgtaagaatttttactaaaagagagaaagtccaaaaaaaaactataatttaaatttaaagaggcgggaatccaactccttttcttactcaattctaccattttataattaagtgggcgaaaagtgagaaaataatccaaattggccaaaatgtaactagatattatttgacattgagtttcaaactttcttatgtcctaattgattgatcacacaaattaatgatgacatatcgatgacataagcagagttaagcccatgctcgcaaccaattgggtatagattgagattcaatattgtagttggactagatatttattttaatgagtcttttttaccgaaccttctatcttaagtaaaaaaaagtgagtcgaaatatttaaactcaacactaaaaataattaataattttttataataagactctcaaatggtgttaaacattactaatatcctttaaaaataaataacatatgctagtttgataaacaatacaacaactaattcaaattaccatatcttctctattctctaatttaactatgagggtttttttttgtgtggcaatttagttgttaatttttttttaatttattatgaaaataaaatattattttcttgtaattgcgtttttatgactggaatttttgtttaagatatatttcattaaagtgaaaagaaatctctttaagaaaaagttttaatgagtgagttgtgaaaaaaaaataaattttcttttttactagttgctcttttcggttttgctatgatgataaagagattgtataatc

SEQ ID NO: 330383 - DNA, 1086 bp, Cannabis indica
aatagctaattaattattaagatattttcaaataaagttttagaggtaaccaaattatatctcaaattgtataattttaaaataatttttttacataaaagtaattaattagttttttatcagcatcataagtaaccaaaaggttacttttaaaaactccataaaataataaaaaaaatagaatttgggattaattttgtttcaggtatattattttagaattaaggtattttttaatgacgtgacaaggtattattgtaattattgagatttattaaggaatttttgtaaataatttatattttaagtatattatcgaaaaaattccttttatttaagccaatataaagtgcagcttacaaaagttcaagaacacttcacattctattcttctttttatgttcagatttaattctatagaatcctatatgattggcataataaagcctgtaatgttcccgcaatttcaagaacacttctttatacttgcatttccaaagacaaataattaattcttatttaaatactgagtaaaaaactgattagttactgaatagaatagttagtcagtatttgaataagaattgttcactgaataacaatttccaaatttcacataataatcaattcttattcaaatactgagtaactaatttattcagtgaacaattacattattacttagttactcagttatttatttatgatgtaattgttcactgaataacagtttccaaatttcacataatcatgtcgcttgtaagctacaagaaagctcatctggactaaataaactcataaacacatatttacatataaagacacatttacaacaaagcagtcaattgaaaacctcacccaatccaaatatcatttatccaaataaatcagagacagtaaaccctaacaaacttatcaagaataagaaacgaagcaggccattaaaatcgaagttcagagaacataagagagaagaaaaacctctagggagatgatccgacggcgctaaataaacccgttcggtcctattaaaggagcggttaagactgtaatggtagaccttttatttgggcttacattaaattt

SEQ ID NO: 330384 - DNA, 864 bp, Cannabis indica
aggagcgggaatggaatttacccctcctaaatgaacattttcaaccaattgatgtggatcgaattgtctccatccctctcagtttttttccctccaatgaccgctacatctggcatcacacaactacaggacaatatattgttaactcgggctttcacttggctgaaaacatagcagaaggaagagactcaagtggttcaaacactcatagaaattggtggaaaatattctggagtctaaatctcccatcaaaaataaaaatctttgcttggagagtgatgcaaaatgcacttcctgtggctacatcactttgcagaagaaaagtaatcaattctgccacttgttctttatgtaacaatgcatgggaatcaatcggccatgctatgtttaattgcacaactgctaggaaggtttggagagaaactaagttcaccattgaccatacaaatgcacaaaatatgtacaatggtgattacttaattcatctttcaacccttcactcaaaggaagatttcgaattgattgtttgtacaatgtggggctatttggcatgatagaaacaaagtcactcatgggggagctccaagaaccagcaacaacattgctacttttgctacgactcatttggaaaaatttagcagattaagatcaaaaaaccagcaagtttctaccagtagctccaaatgctcagccgattcgagataaccccagggttataccatggacgcctccacctaattctggtctgaagttaaatgtagatgcggcagccaatcaagagttaaagatcttggggattggtgcgatcattagggaccatcaagacaatgtggtggctgctctatcaaagcatgtacaaggttg

SEQ ID NO: 330385 - DNA, 867 bp, Cannabis indica
atcctaggagacagacgctgttgaaattctctagcaccaacgggagaaggcgaatatgttttaaggaaactgtgtgctacacaggcatcagatattctccaattagaattgcgtttaattttctttatctctataaattatatagtgtttatttaaacatattaatagaagtatattatttgtattttatcatcaagtttatatcaaaatattatattagtcccggtaaattatgccacataagcaacttgtagttcagttcagctagtactataaataatcagattaaactttgtattaaagggaaaaatgtaatagccatgttaacattttcagaatcctttttaattatgaattcttaaaagaaaaacctttatgcaaatattcaggctgatcaccctggtggacatttaaaatacaatacatatatttattgatataaaataattagtccttataaatatcacaataaatatacaaataaaaagaaaatacaaggttagattttgaaataatcgacatatccaaattggttggaagatatagattttgagtatcattataattaataatatattgtttttcttttgttgatgaaaaataataaaatggatcacgattataggtttttaggtgttccaattgtgtatgtccaaattaatgattccaattttcataaaaaagtaatcccactttatcactattaatttcttttccacatgttgtgatttgtatacatggtcatcgctcaaaatattttttttttctcttgaaagaatatcttaataaaaataattattatggtgcaaaataattagattaatttaataaagtatagccttgtcctttctgttttttttttttttt

SEQ ID NO: 330386 - DNA, 1418 bp, Cannabis indica
atagctaggcacgtgtatctattttttctatgcaacaactatttgtgagtgcttttatgtaatttagctttgacatgtcaactatagtgcaaaaaaaaataaataaataaataactattacatttggctatataaaaggagggatatgattttgttccgtgatgtacttttacagaatatattctgtggtacattagatggtctcagactctcaaggtacattaaatgattgtcagtttctactttttaatcctaattatccctagatcaatttcagccgtaagatcaaataactctctcatctgacggctgccgtacatcacggattacaatccgtgatagtacaataacgggacaaaataaaaagatattcaaaaactaaaacttttaaaatagtattttagtgagatatatacagttcatcaatattgaatttcatttttttattggcccattcatttgagagaatattagctataattttcttctttatttagtggatagaatttaaattctatatatctatttatttatatttatattaaggaataaattcgcaattcgtgtgattttataactattttgaaattgtattaaaaaaaattaacttattatatgctaataaaatttttactttaatactttctcatttatttataaatattaatacaaattttataatgtatgtatatacaaatttctcttttatttgtaattaacaaaaatgttaggagttattaaatgtaaaatacaaattgatactttatttacaaaaatacttttataaggtatggacaatatttatactttttatgtgtttttaattactaaaatacctcttacactatcactgacacttacacaattagacgaaggttgttgggtggttgaccgaatgttgcaccagacaaaagtttcaattagacaaaagttgttgggtggttgaccgaaggttgcatcagacgaaagttgttgggtgattgctgggtggttggctgaatgttacatcaaacaaaagtttcaatcccaagaagcatggatcgtgcgaatatttacgcaattgtaatgcaactgatatgaaacattaaaaatcagaacagtgtttccacatacgtaacgctatctacatgtctcttcgtgatttaatatgaataatttaccattagaaattaaaacaacgaaaatacaacaggataaatattttactatagtactgatgtagtttttttagattatacttgagttggattgtttgggaactccagttcaactttttgagatctgcatttcatggacctgaaaattgaagtctggatattaattttatgcgaattaaactggatttctagttgaattttagttccgtagtaatttttttacacttttttttcatgaattcgaaacagcccctgttttga

SEQ ID NO: 330387 - DNA, 1225 bp, Cannabis indica
aagttaaaaaaaatccacacaatgtctccacgggtcccccaacacaaactcacaaatcttcctactgtgtatcaaagaaagacagccccaaaatgcatgatgagtagtttcctcttccactccacataaaggacataaaccatcagttaaaattacaattttatatctaaatatgcttccttatttaataattatacaattactttcaagttgctttttaaccgaaggagaattccattaaaaggaaaaaagccaaaaacaaaagttcaatacaaaatcgtcaaggatcagaggcaaggcgataaactaggtcaccaaacccgagaagagtcaagggataaagtcaaacgtgcaagagaatgagccatagcatttttgagctcttttacaatgagtaagagaaaataaaagagaaagaagaccaaacatgtaaaatatcatgaacaataataccaactcagtctgatatttatccttgtaattaatagaatggacaagacgaagacagtctgagaaaacagtaatggagttgtatcccaaacagcgacacaacaacaacccatttaagagagttgatgcctctatcacatgaggatgaaaggaggctaccactggatcacttgaagaacacaaaacaaaaccacctagtcacggtctatcacactgccccgagacccatacaactgtggtccacattgatacccacatccataaatagattaaaatcacctaacctcaaagtctcagtcgagccactagagagcccacccacagtctccgtcagcttcacatgagcaatcaaaaccaaattagattgagcatcttgataatgcaaaagaaaactcaaagcccattgactaaccaacacatcagagagcagcttattgtatgaacaaaagtgttgcgacgataccaaatcctccaacataacacaagatattcttccatatcctgctttgaaagaacatccatacaacccacaagcaatcatagaaacatgaagcctctttccaagtatccaaccttttaacaacctagccttttcaaatatttttaagtgaagaacaaaaccaaagagcatggcttgtggtttcattattttagaaacataaagggcacacatcagaagtcttcataccatgccttgcgagattagcataacaaggcacaaaattattgctagctttccaaataaacttcctaaccttgggcaggatggtgagag

SEQ ID NO: 330388 - DNA, 1217 bp, Cannabis indica
ggcataaaacccaacaggttccaggtgtgtgtagtgttgcacacccccttattcttttttttttgttgcatactcgtaaatgttttctgctaacttgctctttcacctttttcttcctagttctcaaaggaatccctattttgagcagcgaatctttaagtgcattgcaaaaaaaattcgatcttcttgaggatgcgagggcagccaagaatctcttaactccgcgatgccttaaagaggctggccttacaaacatttttcttcctgcggggctcttgtttcgattacggagctcctttctcaaggggatcatgcctattcccccattctccttcttgggtcctctactgactcgaggtgtgaagatgacaacattgaagagatcatgagcctcgtatcaatcgcagctgtttgacgcgagggggttatccccaagagtggcccttgcttgaagcctcctacttcgtgaaagaaaggtgtacccccttcttttactcctgacgaccccgctctagaagcaagccaatctctcctttctaagctcaagaaggacttggctaccaagcatatccttgacggctatatgtgtcatcgtaaagagactgcagctcgcctaggggagtcgaccacaccctccttcaatattccaaccaagaaatatgctcgtcgcatgtcccgtcatgcttccttagggggccatgatgagggagagggagatgttgcagagccagaacttgcttaccctgtcgatccgttaggagatgttaaaatgcatgagctcggcaggtatcctcctgttgggaatattttaccaggatctagatttactaacaagtatgttaattaacatcctaaatatgaattctctaaaataatgaaaataaacacataagggtttaagaaaaccttacattgattgcagcggaatataatgactccttgcgttcaagatctctagcccttgattcctttctgtcgcagagcattatacagatctaaacctggatctctttctctcctttaggtttggttaccaccgtcttactccctataattgagtacttgacttgctatgtgtgggcattgcactctttcactcaaggtttcgaatggtaaagaaaaatgaaggaggtttgaaatcactaaggaaggaactttgtcatctaggttggttgaatagtcaagttgacaagagtatgagatgagagaatcatgtt

SEQ ID NO: 330389 - DNA, 514 bp, Cannabis indica
tgacaacactataatctttaaccaactcatatgttctggacttaaaaagaattcatacattatatacatataatcatgaaataaatcatgtgaaccatgcaacataaaatgttatttctgatctttattaataaggaaataaagaaagtcttttttttagtatcccagactctaaatctcctggaccagatggttatggggttggtttgtttaagaaaatgtgacctgatttgggtgctgattttacaaaagcagtggagaatttcttcaccacaggtagtatgcctcaatagcttcatgctacaatgctaactctcattcctaagactgaaaaccccacaaaggcagtgaaatacatgcctattgcttgttgtacaacagtgtataagtgtatttccaagctgttatgcatgaggctttctcaagtgcttccaatgcttatcaaccagaatcaagaagcgtttgttcaagggagatctattgctcataatgttatgattcttcaagacatttt

SEQ ID NO: 330390 - DNA, 1234 bp, Cannabis indica
atattatttatatttgtgtgaacgtaaatatatttatgatgtatgaaagttgtctcaaatttggaatagatttcaagaaattagttggtttgagttatataaagttaaaatgtgtccaacccataattatatgacctatcacttttcaggccaatgagccatgacctactcttgacataactctttactacaaaaaatacgttgggttgaccaggttgaatggtttgacccatattttgttcacccctagtatgacaaactgtttcaaattgtttgcccaccttgacttaattaaatggtaagatggtcccagttcaaatcatgtgtctgatttgtcaaagaggtgagaaaattatttttcatgcagttattttttgttcattcgctgctcaatgctattgttggcagaggctttttggctggggttaggccgattgttgctgttgattttcgcagctggttcgattaaatttgacaaaggtgcagtaaagacaagtatgaagaggttgttatgttgtgttgagggttatggaaggctcgaaacgagttagtttgcaaccaaaagtatgatgcggtggatggtgttcttatctcatctatgagttatcttgtgcaatgaaaattaacccaaaatagaggtacaaatgctttatttttagtttttgaaactggtgatggagctaaattttgggttaaaccgcaggagaatacaatcaaggtaactgttgatgtcatcattttttgtgattgagttgcgtttggtaatggttatggcataatcacttgagactcttaagaaaaattagtactggttaagtcgagcaattttgttggtatatgcgctccaaatttggctgaagcaatttgtataaaagaagtgttaagttgtattgaaactcaaccatggcgaaaagtggagttggagtcagatttgttggtagcagtccaagttattcgaaattcattacctatgctttcttttttaggggttattataaaagattattgtaaacttcttgcatctttaaataatgttttcttgtctttttattaaacgatctgctaacatggttgttcacaatcttgctaaaagtatcttattctttttctagatcgagtgttcaataggggtgatatttctgttgaggtacagtcttctcttttggttgtatttggtaaattaataaaagatatatttgcttttttttttttgttaaaaaaaaaagtaattggg

SEQ ID NO: 330391 - DNA, 987 bp, Cannabis indica
aaaaagaagcttaagaaattgaaaattatttagaagatgatggagatgaaaaaggaaaaaaagtaatggtaaccataattgaaaaagcgtggatcaatctttcaaacaaatgaagaagaaaaacaactaaaaaaaaagcttgaaaagaagaatttttttttttgaaaatgatggagatgagaatatcaataatttttaaaaaaaaaaaataactcaaaagaagaagccatataacgacaaaacaactgttaaaaagcattaaaaatatgcatataataagaaataaaaaatactaaatgcataacagcaataaataaattaaaatgaacaaaagacatagatcagagaacaaaaaacctagaacatctacagcaaaaaaaggaaaaaaaacctaaaacaacataaaatcaacataaatactttcgacactttgggtatctcaaaatttttatcatcaagttcgaagtcagaatctaaatctcttcaatgatcggtttcaaacgttttaattttctcttttctagagaatgaacaaataattttcttttcgaagctatagaaaatgtagggttatggaatttttctttgaattatttcttaaagaagaaactgaaacaaaaatagaagatacaaagaaaaaaaaaaaagcaaaaacaaacactagaaagaaagatgtgtgaatttttaaacacaaaaatatataaaaaaaaaaaaaataaagaaaaaaagaagaagaagatgaagaaggaaaaataaaaatttagaatgaaaaaaaaatactaatataaccacacatatataacccaaaatgtacaagagagggaaacaacaactttaatcactatttttagagtaatttgcggtataaatactaagtttaactcccaatggtaaaaaaatacttaagtttaattttttggtggtaataatacttaagttataattttgtagttaaataaattgccacgtgacaattcctaattggtc

SEQ ID NO: 330392 - DNA, 1027 bp, Cannabis indica
gcaaggttgtaacattcccgtgcaacttgttgatttcctctcaggcacccgaccccattcttcgttgggaacttaaggcatgaatgaaatattgacgtgataacctttaggtcatataaggctggtcggcctaacatgacattaaaggctgatggaacatccaatatcaaaaattgtgccattacaattatgctcttcggagcttgcccaacagtgaggggtaggcaaatttgccctagaggtgcaacactctggtcggagaaaccatatacggactgaagacagggggttaaatctttgagctggagccccattttttcatgtggtgttttgaacaagatatttgcagaggctccattatctatcatggttcgagccaccattttgttggctatctgtacttccacgaccaacgaatcattgtgcgggaaatttactttaacaacatcctcttcaatgaacgttatggtgggttcccttactcgcggtagttttggcttcctttcttcgacgaccaggaccacttccttttgctcgtgctgtaatgttcaggcatacctttcccgagcttggcctgaatctccagctatgtgcgggcctccaaaaatgacttgtaaattcccttctactggtggtggcagtaaatcttgattattgtctgtctgggcagccctctgattttgatcggccttggcatatttttgatttaatttgaattagttatgattttttgaaaattgaaaaaaatcttatgggtggtgacacaccacatctgcgcgcggatcaggtgacacacgggtgtcacccgtgttcagacacgggctgtctgaaggatgcacacccatgttgtctgaatcccccctactcgcgcggacaggctacatgcagcctctgttgtggcaatcctcggctgatcaccaaatccaattttttttttcattttttcatgctttttcatggaattaacttcgaattttttgtgtaattttgtatttagatttttgtttttcatattttaaatctaatt

SEQ ID NO: 330393 - DNA, 947 bp, Cannabis indica
aactacaaggcaaaagatatacagaggaatttttttgatgagtatggcatcaagatgagttatgagaaggcttggaggtgcagagagaagactgttatgtacacgaggggtactctagaagaatcttatacaaagttatatggttacttctacatgctggaacagaagaatttaggtactattactgacatttttagaaaggatgactggttcaagtacaaattctagtcactcgatgcttgtaggaggggatttaagttttgtcgtcctatgattagtattgatggaacactcttgaagacgaagtatcgacgcacaatgttagttactgttgcatacgatgtaaataaccaattgttttgggtagcctttgtaattgttgacagtgagaatcacaactctgtgatatatttcttgcgaaagtaagggaggccattggggaggttgaaaatcctatgttcatatcggataggcatcaaagcattgaacatgctattaaggttgttttcccagaagcatgccactgtgcatgctccaaccatattactatgaatttcgtttacaagttcaagactgatgtatgctacaaacaaatatggcttgtagcttacgcatggcccaagatggaatgtgatagatattttgaggtgctcaaatagatggaccctgccattgctacatacgtcaagcaaataggctttgaaaagtgggctcatccttattgtccaagcgatcggtgcaacatattgacaagcaacactgccgaaagcttcaacaaggtgacagaaaattcaaaaaatatcctaactattttagttgaattcatcagcttcacacttcaaaattgtttttgtctcgaaaaggcaagttagtgcactacccctttggctactacttttgaaaatgatttaatagcacaacacaaagatggtatgttcaggagtgtc

SEQ ID NO: 330394 - DNA, 605 bp, Cannabis indica
taattgatctaaagataatgctaggaaggtgaaatattcgtcatgaattgtgtgcttaactgtgtgaaacgattgctcaagcttaatttttagatttttcacgataattgaatcatcataatagttaacattttaaaaagataaatgcatgtgtaattgttaatttctcatctcaaccactctagaacttgtttgataattagttgaggtataattgataaattacacatagttttgagatatgatataggtaatttttttaaccgtttgagcttttcaagcctaccctaatttgtaatccccttgttacccaattttagccaaaatgtaaaatcttgttttctttttgatcctatacaataacctttgagccaaaactattcttatctatcttttttcacaccatagtagatgaatgatttatacatatgtaaaagtcgggaattttatttgaaaaaaaaaatatatggttatgtatgagttaagaaaaaaattaataaaaaattccccctcgaatgaatgtttataagttgcaagtatttcatatatgttgaaaaaataaaaaataataaaaaaaaagtcactaagaaatataatacttgcag

SEQ ID NO: 330395 - DNA, 899 bp, Cannabis indica
agctactaatcaaaaataaaaaatgtacaatctaaaacaccaagcttaccatttttggaatccacaaaccatttgttctatgtatgacatcacataaaattctaccatttgttgtagagccttcccaaccaggtaacacatatatgaattgcatgtcttggagcatacacctaagacatttgtagctatttcacctttttgggtatgctattttggtttatcatccataggtactctcactctaatatgagtttcatctagtgctcctaagtaattctaccattataaacaaagtttattattattattattattattattattataattataattattatttcaaacaaataaacaatttctatctaaacattttaattcaagaaattcaagagatatatattataccttgaaccatttttactactcatctattgaattttcaagaattggtttaagtcttttcaataactctcgatgtagctgaatgatcactacaacattcaataccattagcggcgaactcctccgccgctaatggtgtcccttctggccgctaaagggcattagcggcggtcttcggccgctattggtccgccgctaatgcttggccactattaatagtattagcggcgggaccccgccgaaactgacaaagggcattagcggcggggtcccgccgctaatgctccgccgctaatacccatcagaataaaaaaaaattaataaatatttataaaaatttatttatatattaatcctatatataaataaataattatttatataaatatttaataaataaaatctaattcatataattataacaatttaataaaatttattgataatttaaaaatgtctccaaggtaattaactttaacatattaatcctaata

SEQ ID NO: 330396 - DNA, 1152 bp, Cannabis indica
gtttattttagtgaattttatttaattttacttaattttgcataaatattagatctagtatttatagattagttttagtaaaattttataatattttactaattttatttagtttctcttaattaattcaattcaattatgtgtcattttgtagaaatttaaatgaaaatgatagatttgtggtatgtgtcaaaatatgaaacaactatcattgaaatggacatggactcaacgaagcccaaaattgaatgttctttgagaatgaaatctcatcatacaatgagataaaataaaacaagaatgggtatgcggttatgggcttgggatttgaaattttagagaggagatggataagaaatatatatacattgatgtctcatcaaaaagaggcgtgcatgattgaagaaagaagagcaggcatcagtgtactactccagggactccaacaacaataaaagagaaaaatgaagaagagaaagaaaaagaaaaaagagagagagttttatttgtggttttaatttagcatttttattttaagattggcaaagattaagaggaagaagaagaggattttggaaaagaaagcttggagtattgtgacaactccaatataggtttttcttttcatctttctcttattttaaactttgtaatttttgcaaaatttattatgagttaatttcctttttgctagaattattttgttggctaaaaattgtgatttggtattttgttgttatgtttagtattttgattttgttcattcaagagtgtttattgtgcaaattgcttacttttgcttgatcatcattagtaagtactagctaatcttgattttagaaaaaatagggttagtggaatggcttgaatgatgcatataaaaatatgttgtttatcttgtatgacttgaagaatttgtgcttaaattggtattcttgaaattaattgggcataggaatatgttaattaattagagaatcaaaccataaatactttggaaaaaggattatgacattttaaattcctagttgacatcatcaatttacaataatactcatttgtaccattttatcaactttgcatttttaggccaatttaatagttctagcttgtttttttctcatagtttgtgtttgttaatttttatatatt

SEQ ID NO: 330397 - DNA, 935 bp, Cannabis indica
atttatttatctatatttgtaaagttgcaatttcttttttgggtaattattaattatggaaaaaagaaaaatcttagtggccaagttttgaaaagtcttcttaagaaagccttgaaatgtcttggtccccaagttgtcttgatgcccaaaatttcgtaactttataaatatgtattttgtgtgatagagagatgtgtatgtagaagaaaaaaaaatagtgagttgtgaaaagaaaatggtgtgtgagtttgttttgttgtgtggtgagagtgaggaagaagcaaatgatgtattgggatttgggtggagagatttagatagacagcatatgtaattttgaagtgataagtgaaatatatctctctttgtgtgttttgtagttttaccaaaatgagtaaattgcttcgctttatttctttattatttcgttgcgcttgaagattatcgtttttcccaacaactctctagtcatttttcccaaaaagtttatgggcatctttttcgtgttcagaaataacgaagatatacgagtgatgtcagggagcaaacaagatcctttgggagccaaacagggcttcaacgccctgtgcttaggttggcgtgtaacgtggtttgcatgttttcactactcaaacataaattctaatccgcgcattcttcttattttggtaaaaaacgggaatgaaacctttcaccgcaatctcgattaacttagaagtattaaaatgagtcgcgcaaagtcatccgggaagcgcccaatgcccaggttgacgtgtggcctagtgcggtggattctactgatcagaatctaattctgtcttgaccatccactactacaaaaacaccctttagagacgatttttaaagcatttcagcgtcagttttggcaaaatttgctactgacgctgatctaggtgacgttgtagggtctaaaa

SEQ ID NO: 330398 - DNA, 667 bp, Cannabis indica
aatctagcatcaatgattaaatttttttttcagtggtagatcaattgactccgagcagagcagaagtatcaaatgagttgcacgccccatcgcaaatccctctaacccaacatgttattgttatccaggatgtattgttaacggtgttaaattcttagtcgaggatcgggatgaaaatcgtaacacccaaaacagtggtatttttgtgcctggagaggatggtaacaatttttatggcgtactcaaacaagtgtacgagttcacttacttgaatgattatagtgttattatttttaggtgcaagtggtgggacacaaacggtaacaggacagaaagtgatagttttttcactagtgtttgcgttgcccgtgaatggtaccaaaatgaaccattcatacttgcatcccaagcaaaattaatatattacattcctgacttgaagaatggagttgattggaaccttgtcaattttacacccctcgcaatgtctgagactttcggatgaggatggtgatgagaccactactatacaagaaaaaaactcttcaggaattccttttagtcgttcaacttccacagttggatgatgttcaatatgttcgtgatgatgttgacccaattcaagtgaccaacatgggtcgtcatgagcagtctaaccgtgaagatt

SEQ ID NO: 330399 - DNA, 855 bp, Cannabis indica
attcaagacaccagaggaaatcttgtcacgtaaaccaccagatctctcaaatttaagagtttttggatgtgcagcctatgcacatcagagtgtgggaaaattggagcctagagctctaaagtgtgtattcctaggttaccctgaaggcactaaaggatacagattataggtaagagaaaagcagggttttaaaactataaatagtagggatgtcattttcaaggaagatttatttccttgcattacaaattacaatactttatctagttctactgtagacactaaccctgcaggcacatcagtggacatgcaaacaaggaattcacaaccagacattgctcaggtggaaccagaacaagtggaaaagactcaaggagaggcaaatttggaaggaaatgacgaagttcaggatgatactattcaggtggaacctatccaggaagaaggacaagaagctcaggcattacaagattaccagttaactagagacagaaccaaaagggttcgtagacctacacaaagatttagttttactgcttgggaagaagtgctagcctatgctttcttttgtgctatgggagtagagatgacagagcctaaaacttatgaagaagccatggcagataaagatgccaagaaatggtctaaggccatggatacagagatggactctctgaaaaagaataggacctagatactagttaagaaacctaaggggaagagcatagttttatgcaaatggcttttcaagcccaaggagggactaacagagacagatcctaagaagtttaaggcaagactagtggctaaaggattgacatagaaagaagggatagattttaatgagattttctc

SEQ ID NO: 330400 - DNA, 582 bp, Cannabis indica
ttgcacagcttacccggtatttccccttacggatcacgggactactgactgtcacagtttcctctctccacgaactccttcgttagccgtaccaccaggagcaatacaagccaccaatacatgctcacgggcacgacataaattatattttatttctttgatttgattgttctagtttataattttgtcactttatatttattttttctttttcagtcatgttttatataattttattttaattttctatagttttaaatttaaatctgactgtatcgatagtattattttattgattttacatttttatgatttcagatatgagtgtgttatccgtgtttgctcgagtttagtctttagaatttacaataatttttgtttttttgttcttaaatatcttgtatatatatattcatatgtgttatgctcgaatatatataattatataggaaatatttatagtggagaccttggttttgtccctatggtagggatacttttctagcccttgattattgatctaatggtaataaagttaaggaaacatgatagtaataatggaacctagcttatagtattttt

SEQ ID NO: 330401 - DNA, 1662 bp, Cannabis indica
ttaaaataaatattatttaatttgaattaaatatttatttttttaaaagctaaattaaatattatttaaattaatttcatgattagccaatatacttaaattaatttcatggaaaaaattaaatttttttaattatattacataaatattttaaaattagtctaagtgttagcaagttaataaatctaattacaagatcacctaaaaaaaataagctagggaagaaaaattcttatacatttgaacatcaatcacccaaggcttcgtgaatcaccgtcagcaatcgttctatccactgtcgctttaatgttctttttcccaaactgtaaaaagaagtaaatatttatattagtatttatatattatcgtttgttaatataatgaatacgataactacattaaaacttactattttttgattgtttatgtaatggttagggtttccacgcgcaacgatgtcagtcatgtattttaaaatataaaaatcacattcttagttcctaggttatcttggacaattttctagtgaaattcctagccacgccctaagaaacgcatttgattcttctataatctcgtatgctctgttttaaaaattattttaacacttcaattcattaacatatacatatataacttagttaattaaaaagtttgttacataaagagtaattaaactactacctttccaacattgcattaatttataggggaactttgtggccacgtacaaggtctaactggataatttttcctgtcgcaacgatctctagcatccaatacgcactaaaaattatattgggatgtatgtaagatagtgtaaaaataatttcaagttataatatagagaatatttttaaattatctcctaagtagtgtttacccaatatttaagaaataaagaacatttggtgctggttattcatcgatgataaccaatgggccaatccttgtgatgcattctcaaaaaacttgaaaattcatctcaaattatttaagctctcccagatgtgtctgttgggctttgtaccctaaataaaactctattttaatgtaatctcttctattcaattatcaataaagaaatagatttatttttattacttgtttaatgtattatttggttcatgtgatcatttatatgtttatttgatttataaattcatccaaatccttatcacattgatattcttctttattgtgtcatcgacacagtggaaagtaaacaagattgtgtgatcaaatgtattcctatgatttatcagtacaaagggtttaaatgatagggtaatctacaatatagcttatttcaccttggataatatatgtgtcctttcaagggcatgagttaaactaagcttgggttggatgcatggagtatgcattggaagggaccgatattaaacttgaactagatttgataaacttactgtaatatctattcaatttaatatcacctagttgagcctagatcaagtgatctcaatcctgagatggttaggttctagttcagttgcattatttgtgttcttaaatctgttcgttaaagtcgaccaaatggttcttctcgtgacatataggttaaggacatggtagttcaattgagtgggagcgctatatcatagatataaaaatctatatcttctatctggatatagaagt

SEQ ID NO: 330402 - DNA, 635 bp, Cannabis indica
atttttaattgctgcctcagagttatttctcacatgtgaagcttgatgtattgcacatgtttgttatcatgctttattttttttttcttttaataataataataataataatgtacattatatttttattttttattttctccatataacaaaataaaaaattgataatatattataaattttaagataaatagttgcataatacttaaaattttaaatttgtaagttgtataaatctaatgtttattttcagcgtcataagtatttaatgtttgtaaaactgtaattttttttcttttttattagtacagactccgttttgaatttattaaaagaacatttagaagtaattagtactacatatttctgtctagacctaatgatctagaatttgagatttatatacgccctgtttaagataataacagagtctatagaaattaaagaaaaattacaaacatagggtatttatgccactaaaaataaacattgagtttatacacttacaaacttaaaactttgggtacttatgccgctatttaccctaaattttaattaggttaattatgattttttcctctcgaactttgacatgtaccaaatcatgccccctgaacttttttggccgttaaaaa

SEQ ID NO: 330403 - DNA, 1156 bp, Cannabis indica
gagagtgaaatgatggattgattgatagaaaataaaaaaagagagggaagagagtaggatttgattgatgatggatggaatgatgactaagtggtatttgtgtaataaaactaacattgtaagtaaataagttgatataggcatgtgtgagtattttggtaataaattgtgcaaaagtgatttttcatgtaaaaatttcaaaatttaaatcttgtacttgaattctattttcattaagagaaatgctaaagtacttaaaggtgtcaaagataataaaatgtggtaaattattattagtgtaatttattattagctaggttcaacacattttaatgaaataaagaaattgaaaaaccgttgatacttacattgcactatattggtgtagtgttagatacttattaagtgtgactctaataagagttgctataagtaacgttgtaactcaacattgcccatgttgagaggattctaatagtaaaactcttgaaagatactaaaaaatctcttcaatatcaaaaaattctattacatttttaacaactttactctaaaaatatttcaaatggttagcactccataaatttgctaccatatctcatatattatttattataactttattaagaaaaaaaaaaagagaaaaaattagtataatgcacaattttaaaatcaatattattttttagtttgatatttaaacaccttcaatagttagctatttttaagtattaattagagatgctctaatagcaatacttgactttctcccttttaagtcataaaattcatcacataatttttagtaatcataaatttaggtggcaattctaaataattataatatttaatatcataaaatagaagtcgattttaaaagaatgtaaagcaaaatagatctatgcctagagcacccatctatataaaactcgaaaaagaaaaatattttatttataaatttaatataataattgaatattaatttatactattagaaacactaaattatcgtagcacaatgacacgttgttgagaattagggttccatctcaaaaccaattatagtgcggatcagataggatcacttatctgcgaaagatatggctctggcaccatgttgagaatcatgaggttccatctcaaaaccaattagtga

SEQ ID NO: 330404 - DNA, 516 bp, Cannabis indica
tttacgtggttttgtagttaaaatctacatactccacgagtctatcttattaaggatgataatctgaatacagagtacaatcaatataataaatagctttttctcttagatttctcgtcccttttaccatcgattctacccctatttataggtgtatgggggtgacagttatttttcttgggatctattcattcataactgttcatgaaatgagaacattccccacgtttcatttttatgaatatgggataatattaaataactacccaactgctcttttgtatttatccttaaacgattatgctgactgtgcaggttgttccttgctaagtatgagttgtcattctttaccgtctttgtaggcaaaatgccaagtatggatatacttttcctcgaaatacttgtttaatacgatggtgttagcgagatggttacttcatcgtatagagggcgagatgggtggatgtagttattctctccatgtacacatatgtggatcaatgagctacaagctct

SEQ ID NO: 330405 - DNA, 748 bp, Cannabis indica
attatatccacgtatttcaaataaatctccgtaattaacaaattacgcttatatatatccacttctcgagtcttcagggtccccgaatctgaaaatttattctacatatagctcatattacattcacacatgctatataaatctccgtaattaacaaattacgcttatttactcacttatagcaaaatttaaattttatgctgaaatacattagtaggatcataatcctacttattacctgattaactcataatataaatataaaccctattatttaccattaggcttatcgggatattacaatccgactaagagcttgtaagccagaggaattatttgaaagggggctatccctatccgcgcaataaattttgcaaagtaactcctcaaggggagttatgccccactcatgatgtgggaccagctccaagcactaaattcctctatgctcacggaagccggctcttctacggtagataacctatgccacatcaaccctggaatgttgtgtactctggctttggtgggataaatctccagaatgccatatgatctgaagctgtagagtttttgatctgtctcccagatggaagcattgaatacatgcgtaggatgtggatgttgggttttgtgccctaaataaaactcatttaaatataatcagatttacttattaataaagatcagaaataatattttacgttgcatagttcacatgatttatttcatgattatatatataatgtat

SEQ ID NO: 330406 - DNA, 513 bp, Cannabis indica
ttaacggtcaggtacctacagaagttctaaaaatataacttaagcattgtaagggtaaaatttacaattagatcttagcccaacttaatgatcccataaaccgtggatgaaaaatattaggttatctatacaagtcactcctttcgtcgtgagctgtacaagaggacccaatagcccaaattctagaataggccttagcaaaattgcaatatatgtggtttgtacaaccgattcccaattatgggttgtacaacccacaacaattctttaaacatatttagacctacaatacgatccaaagatggtaagcctaaatacatcaattcttttttaaatatataatgactgtggtagcccatgaagtaagttggacaacccattaagaccaagatttagcctcataatagtcatgcagacgagagcagtggactacactactccaagatggttactgtaatgtccccgcttcaagcctccattaggtccttacacccacggaatgaatggctctta

SEQ ID NO: 330407 - DNA, 666 bp, Cannabis indica
taaaattagacaaaagtatttaaatctaacaatcttaataattcagggggaatttttaacggtcaaaaaaattcaagggacatgatttggtacatgttaaaggtcggaggaaaaaaaaatcctaattacctattattatttgtttctttcttgaaatcttgattaatgttttgatcagagaacttgttctgtttcaaagaaaaatagtatagaataagttggtctaaacgcagtttgtaatctttcattttatcttatcaatatatatggtggaaattttaatgattgccttaaatatgtaattttaatgtttatatttagttttagtcctgagataattattaaatcgttataattaatttaaaaaattaattaaaaataaataataaattatgtgtaacttgaccataactcacttttatatttttatttttataaataaatataaaattttataaatattaattacgaaaaaattcttattaactattttaattataaattattattttaagtatataattaattacaattaattttgaatttacaaatgaattttctatctcttataacctgttttaatatgtcataataaaaaatataaccataataatataaccattgaataattaatatatatatatgtatatatatattattttaatt

SEQ ID NO: 330408 - DNA, 579 bp, Cannabis indica
acccactttcatcagcttgcttatctaataattttccaagcatggctgtaatctcttccttaaactgtcgcatttcatgtctgatacattcgattttggcatcgacatgttcctccgtctccagcatctcctctgtgcgttcttggtctttcttggcagctttcttagtgggtgccatgactctcacgtcaactgctctaatgccaatttgatgcactcacagtcacctccttataagctcaaatcaaagttagccaagccatagagttgaagaaaagtctggtattattgatgaatgaaagacaattacaaaatctctttcctagcttttcaagacagccaggtatctctctagagtattatttaccctgtacaattttctcaatgccccaaataaaagaataagactctacttatacccaacccactaaaactgacaccaaactaaacacttcctttgaccagggttgccacatcaatagttatatgtacacttagtttcttttgtttttattgttgggttttgtgcccgaaataaaacctactacaatctgattagttatcaatacaagaaatttg

SEQ ID NO: 330409 - DNA, 553 bp, Cannabis indica
aatagttaattataattaattaaaatctaaaaaaggaaagtctacctattagtaacctgctattacaggttaaagaaaaatgtaaccatatagttacaataaaaatgtaaccattaaacagtcacccatatatatttatattagcgagttctaggtgggtatgtattttctcgcacttccactcgaatcctgactctagtataaacatttaagcccatatatacttgccccagtctccaaaatttaaccccacccatttcccattaaaggcgggtaccatgggtacctgaacccgcagtacaattgtcattcctatttgatttggagtactataactaactaattaattataaaccaagataataattttttttcttaaaaaaaaccataagaatcggacatattagttagtatgtagcacatagtgtcataggagaagataggagtttatttgaggaggtggctccctcgtacacttggcatttcacgctgtaattaggttaaatcgtttttgatcttttctttcgttctgtcattttttttttaaaaaaaa

SEQ ID NO: 330410 - DNA, 559 bp, Cannabis indica
agccttggtcaagctttttgtgtgttatccttcttcttttccaaatttcttgtaatcttgatgaaatacttttatttgtattttgagtattttgattgtaatcctcctattctctcttataatgagaattttttcctaacatagattaaatattatctaatatccatatataattaactaatatggatatattattaaccatccttatcaccaatagtatatattaaccatctctatatatatacatattgtgataattaatcttctttttattatatgtattaatggaaaaattaagaaagctagcaatagaaaatattattagatttcatgtaaatcattccaattattttattatgcaataattctgtcaattaattaaaaactgatcgagacacttacctacatactaataacaataaatttattaatattaggtaagtgaaaaaattgtgactaattataaatcagcatttgtgttactaaaaaaagtctgtagctaaaggtattagtcacgaaaattacaattagctgtgactaaatgtatttttagtcacaa

SEQ ID NO: 330411 - DNA, 534 bp, Cannabis indica
ttgtgaaggctacttagtagtgaagtaagggcgagattgtcatttgccatttaagattatattaaataatccttagtggatttgtatgaattaaatgtctattgggtctctttgtttggcttggtcattgaaggttatagaaaacttcttactgatttacaaaatgtggtcatttcctttgataccaattttattatttgaataaaataatttttccattcaaaaaaatgcaaaacaaaaatacttttcatttttctatcttttatatttataccaaaaataaagaaaaaatacgtggtaaatataggcaatgaaatgagaacacgtaaattaagggtcaatttggcacaattatattgtcaatttggtaaattataaattttaaaatactgtgattgattaagattctattattgctatattattttataatataataagtgtagattaaaatgtagtaatatatattattatgtgaataatatgtattaggtgtttggtaaataaattgtgtaacatataatttatttaacc

SEQ ID NO: 330412 - DNA, 2441 bp, Cannabis indica
cataagatttgagcagccagagttgactatccaatcattattgtagtcgatctttcctggaacagaagctgtcaaagctaattctccttcctccactgcgaatgatgcttctgcgtcccattcttcaccgcttgtcttttctgcattttatgtgactgcattgccttctgcaattttcttcttgaactgccaacttttagccatgtggctatactttccacagttgtagcatttgtcatcaaatttattgttattctttgatgaccaacttatttgtctttattctgagcactctttgtttgggagctcccatgatgtctatctttgtcatcatgttttctaaaatttctactaacatttggtcgaggtcgtcctttcttatctctactaaagagtgcttctttgtcactctttaatgagactttagacgtttgcttagctaacacttcttggtcaccttgcaagttttctaactcaataagagaaggttggcttggccaaccttgtattgtagtaataaaagttctaaattctagccttaatccatgaataataattcttctaattctagcatctgacatgccaacaccagagtctaatacagagattttgcgacaaagagattttactttggtgaagtattggttgatcgtcatgtcgcgctgcctagctaattgagagaagctcattctccagaagctgcaatctcgtatcattcttcttggtgaacaatgatgcgaaagtatcccatgcttccttcagtgtctttactggcatgatgtgctccagcatctcatcttcaactatggtgcgaatcgcgaacatggcttttcctgctttaatcttccatttcttcaaagtggatgtgtcctccggttgtgtgacttcattgcctccaacaatctcacataagtcttggccttggagatatgcttccatgtgcatcgaacacgtgttgcaattttggttgttaagtttctcaattccgccgaccacttgaaggtcacccatcgtgcaaactctgtagtactaaaccacacacgatcactctaagaaactcaacaaatgactctttcagaacgaactcgattcgactctgataccacttgttggacacgaaaacacgtgaaaacataattactctattattgaaaaagtaattacatcaagacttgaacactttatcttgatcataatacacaccaagcactcactttaattatttactagacacttacacttaaaagtttacttgcacactatttgatgggacactctttagagttttgttggggattagttgaacacactaggacacactttacttgaacactcaagttatcattcaactcaccatgcaccaccaaggaccaactcccctatttatactactcaaaggatagtgcattattatgctagaatgttctagcaatttgtcaatttattatagcctaaaatattcttgaaacttcttatgactattagctctctatgattctagaaaattctataatactaccaaaatgatagaaaattctaaatacttgtagagtaggtattgatcttttaacattcaataccatggaccccaaatttttagtgaagaattactaagagaatttaaaaataatagatagaaaatattaagtttctttttgattcagtttgtcagacaagagagagtctagagtcctcatctaaaccaaaatccttaggtggcatttggttggaggtaatgaaatggaatggaatggagaggaaacaattttcattccattgcatttaaaactattagaatatcattccaatggaatgacctttccatcattttagtggaatgactattccattgtgaaatggaaggaaagaccattcaaatgaaagatttgaaaaaatttaataatttttttttcaattttttatgcattttaaattttattgcattccattcctatttcaattccaattcccattcctatattttcattcattccaaccaaacgccaccttaatgttctatttatagggattcattagatttagggttagagctaaatgggttgaaatgaaagatctaatggcttagaatagaccactcattgtcgaacgcctataaggcccatgagttagatttttgctactattttgcttccttattaatgaaacaaacttgtttttcttcaataatgttatttttcttctctagttatttaaatactaattctagctatttaataattataaataattatcaaataaaattacaaattaaatatatttattaattagaccttccaaggtctcttaatttataaataaaccttgaattcttttttcttctcaattgtgcctttccttggtaaaattcataaacaagacataggccccgtttgggggagctttttaaaaagctaaaatcacttttggaaaaagttatgagt

SEQ ID NO: 330413 - DNA, 921 bp, Cannabis indica
tgggaacattggaaaaattggttcaaggtggacttcaatagacccccaaatctcactttccaagagattttgatcactgctctatgtgtggcggaaactgtgtggtctgaacgaaactctattgtgcattctcaatcgagatgcccgcctcagaaggtgttacttaatgttaacaataaaattagagatcatctgaaggtggcttgcaacgaggtggcggaattctgtgaatggcgccccccacccgactcgtggctttgctgcaattgtgatatttctgttgacgaggaaggtgtggttctagcaacggtggttcgagatgacaaaggcaacattgtcaccatcaaaactgagagaagcctctccactgacccgctgattggggaagggcttgcagtctgcatggcggccgatttaatgcataagatgagggtcaagaatgtgatctttcagagtgataacatggaggctacagatctttccatggaatcagggaaggatatccacttcaaactcacgaatattcgaaagcgcttccatcagttgtgctcacagcttactgggtggggcattggtcatgtgaatcgaaggtgtaattatatggcacacaacgttgctgcttgggcgagggagacaaggaaaataggcttaacaaagcctacggatatggaccctactgtgcttaccgattacatcgaatggaggaagcacgctggctaaactgctgctgctcatctttctaattcggatttacttctgttgttttatttttgtatactttatgttggatgcttcttgctggtttttgttgttttcttgtagttttactttcggcagtttgtactggttaaaccttgactattttgtttaatcaatttgctttgagggtgttcacaccctctctttacaaaaaaaaaaaaa

SEQ ID NO: 330414 - DNA, 714 bp, Cannabis indica
aaaatggtatttaccccaaaaaattgtctatctttaggtgatccgcaatatttttttgtatgaatcaggttatatatattgtattcctactacaagaaatatcacttttgccagcatatttctgtgctggcaaaagttagtattgcgctggtaattatagaatttacttgtgatgtgttggcaaaagggttaacaaattaacgttggtattagaacttttaccagtataaaataaaaagcgctagcaaaaatgattttttccagcacgtaaatacgctagtaaaagttactgtgctgataaaagtgacatttcttgtactccataaaaattgtttacaacctacacagctcctcataacaaggcttgccattgactaattaacttgccaagcaaaatcccatttacaatgactcaaagcaccttatatccacttgtgaaatgtttccttttctaatatatacaattttattcttcacattaaattaaattgattgaacacatttattaatagtttgtatttttttatttcataaggtttctattgatccaaatctgataaaccagtcccatataatagtagctgaaaacactttttttgaaaacttggagcatgtttggtattgttttttgtttttgttttcaaaaaattatttttaaaaatgagaacaaaaaatagtttttgaaatttttaaaacacaagtcacgtttggtta

SEQ ID NO: 330415 - DNA, 634 bp, Cannabis indica
tcatatttttacaaacttgtaccataccattttcctttctttagtcgttggataaaagctaaagaaaaagagagatccaggaaaacctttctccttcaaccaaacatgatacaataatctattagatcatgatatcatttgttggtcatttaataataatatcagttaaatttaaagactacgttggcattgtttgattaatgaaaaattcttatgcttttttaaccagttgactacctttaattataattacagaaaacacatatatatggactcaacaaccttcttatttataagagaaaataattagtggtgggtcttgaggatttattttccacaataaaattaatcaagtggataatactataaattcaattgagataattaacactttttaacaaaaaaataaaaaataaaaataaaaagtcataaataacattgctcattgttctagtgatgcataactgaaagaaggagagaaaaagaatcaataccatttggcccattaatggcttgtttagttatgagatattttcataaatacctaaaaattatagggcttttttcataaatgtacaacaaaaataaaataattacaaaaaatgtgtaacgcccttacttacgtaaaataaga

SEQ ID NO: 330416 - DNA, 1680 bp, Cannabis indica
ttgaatccatgtaggagtcgaatatatatcttccttttggagatcagtataaggctcccaaggcttcatgattgttttagtttcttataaaaaaaaaaagtaatggcctccatttgagatagcatctccaatgttaattgcccgaaaacacacaataaacatccttggtttgagaacccctaccttatccatgcctttctccttctaaaacctacgagaaagaccttcaaaaggtcccaaaggggggttaggcccaagaacatagcacatcatagctattttccaatataatacttcctcttctatatccaccatatctatttttactccaaaatctcttttaggaatttttgccttatttttccaaatttcccactcaaattttgaatcagattaggagagggatgtaaaataggaggaacactacccttaactaatttcacttgtgattcacaacgtttcgtagcatttagaaagctcacaaaatctattctggcctcatgttttctttgcaactacaccagtaactacttcggagagagtacttctgctatttcttcacaggcccagcaagcctaggcccacctagcccaagggctcaaaataaattattcccttttaaaaatacacattttattttctaaataagggctcaaaaatattttttttcctatgactcactaaatttcagggtaggcccttttacttcaatagtttgtgctgctttgtctcccatttcattcccttccccattgtgaaaatcgtcataaaaaaattgatagagcttcgatacctaaaatctctgccatagatttggttttaatgaccaaatcagaagacatcaacccctgtttcttgtttaccataacgtcctatttttctttcaacttcaatcgctcagacgtgttagaaccagatccctaagatgcactcttgtgctacaggcctcgacctaccatggctctagtacgggactgaagttgaagccctagcaaagctcaccctccctatagtctcatatatgttgaatgatacaatagtatcacaaatatattttttaacataataaaaatatttatattattaaatttatgtttgtcaatttagtgtgctaatttgtattgactagccttctaccgaaaaaaaatatagctccaatagaacatccttattcaaagaatttaaagaattttttttgggcttttttttttgtaaatgtacaacaaaaacaatataattattagaaattgatacacatttctacaatactaaattaagtctagaattttctacacatttgtagaaaaacatactctaaacttttagataattgtagaataatttagaattttctagacatgtaaaaatccaatagaacataggcatttctagaaaactttagtctagaagtttctagttatgcatgcttaagaaatatgtagaaatgtatggataaaatccttgaactagaaagatctagaagaaataattctagccataaagtgtaaggggtgagcaactataaataccccatcaaacttccaaattgtaaccaagcttgagtagccaaagcaagtcttttactactagcctactaccttgtctcctctcttactacacacataaaaattaaaacactacataactcttccttgtcccaccaatcatccaacttatcaa

SEQ ID NO: 330417 - DNA, 929 bp, Cannabis indica
agagagagagagatagagagagttaggaggagggtttggagaaaatgctagaaccctttgatttaaaaaagaaagttctagattgtacgaaatttagacaaatatcacttttgaaaaataacacttttattaacttcatgggagaaattctagcaagtaaaaataggatgggaaatttgagtttccttttatatttagctaaaaaaaataattttgttatatagtattatattataaatcaatttttagtattgtattgaaacttaatacaaaatttaatattttcattaaaaatataaaaaatgaataattttatcattaattttattaagtaaaaaatttataatttaataataaaagaaatatcaaagttaatgtatttatcataatgtaaatttgtattatattataatctaaatttagattaacttttattatgttactaaatttaataaacttttgtagatactattgaaataaatattttacaaaatcaactatatttttaaactaataaatacactaatttacattcaccaatagaacatcatacgacaaaaacaatctcatataatgttaatatgacttaattatacggtaatcctgaattatataaattttaacaagttgaccacaatttttttttttttgcaaattagtttccaaatatataaattttagcgaattagtctctaaattttttattttgataaattaattcccaaacttctaatttattggcaatattaaattcccacatttttttaattgaattgtaacttcattcatataaacaataagtacatgttgattgttacaaataaaaaaggcaagaacattgccaatccataccaactctctaccaagccctagagtaatatttgcaaggctaattaggatttttacctctgaactttaacattaccaaa

SEQ ID NO: 330418 - DNA, 698 bp, Cannabis indica
cgtaaaaaattatttgtgtcttttttactttttctcttttaattatttgttcttcaattcttattatttataacgagttttcaaaaatctcagtaatcacacaagatatagatcgatctactattgatcatctttatgatatgaattagatctttatggtaagcgataagtttgataaagacaactttactcatatctaccattctcatatataatctcgttatatacaacatatccacttagatgtcatcattgaactacactagcaaccattgattaaagatccctaaattttaatatgctctgactattttattcatagctaactgatcttgattcattgtacaatacaagtcacagtgtcatgtatgaataagaaattttctaaaatttatatatcttactcaatattaaatattaaatatttgaatattcatgcatatatagaatattcaactcttattaatcattagaaatatctttacacaatttttaaagcataaatcttaacaatctcccacttgtcctaaaagtaaattgggcatctccttctttcacttttaaacacgagccccttaaatagaattagggttgctacctttgaaatagtcaaaactgcccaaaaatttcgttttttgtccctagtcgtgactacataaagcctattcgtgaccataggcaaaatacgaaaaataaac

SEQ ID NO: 330419 - DNA, 666 bp, Cannabis indica
attgaactgtttgtcctggccttgttcagctggtgcagagggctgctgtcccatgaaattttcgtcatatcgattgtagcatatggccgctgaatgaccatatttgccgcacacctgacatgttggtttagggcctcctccaaaacgacctcctctgcctcggcctctataacttcctcttcctctttgtcctgagttagaggtgtttcctctgccaccatgttgctgagtgttagagtaccgagagttattgttgtgtgagggtttttgagcgaaattagcagagggtccaccgaaagagccatttgtcttagtagagtttgagagacccgtgagtctttcaagtctgctatcaaagccaatgagtgtgttttgtagttcttgccacgagatctgagatttggattcaatctgcacaactatggacaaaaattctacatccaagccaccaagcacattagaaaccaacagtttttcagggtaaggttcccctgcaagagcaagagaatcagcccacattctcttctgtttcaagtaatctgccatagatgcagacccttttctcacagtttgaagtttggttcgaagctcatccatgtgagctctcgaatgggctccataaagctcttcaagagcagcccataaactagaggcagattggcatcc

SEQ ID NO: 330420 - DNA, 650 bp, Cannabis indica
aataacgggacaaaatcacatcctatatatttaatataaataaaaatactcgaataaactattgaatactcatttagagtagcaagtgttcgagctaattagctactaacaaacaggatagaaaacagaaaaaaacaagaataaacttggtctgtttagtctactgttgcaaatatttcagccttgtttatttgattttgaccactcttttatatagaaagcgagtgtcttttaaggtttacataattgatcattttcataacagatttacaataaatgacaacattaaatcagaataaacgttataaaataaatgaagaacagtttaatctattcttgtgtgtggcaacatgcgagttgtagagcgcgagtcgcctattcgtattctagcacaagctcccaggctttaggtgcattttgtattcgctaagtggcccatgggttcatattacttggctgtctgcgttcatctttgattgcataaatatagacatttcacgtgttgacaacatgcatgaaacgttcgaatccctgaccagtcgtcaaacacgatcagtcatttggaccaatctgtggcttatgaaattctgcctagtaactagtttacacttgggtttccaggctaaaaatttaattaataatagaatgag

SEQ ID NO: 330421 - DNA, 986 bp, Cannabis indica
tctgtattacaatatataaatttatcgtagaaaatgatcctagttatataactagaatagactaaggtcatttatatattaggatgccttagttggtacaagtatacatgtcaactcaaaacttaagactttagacaattagtaattaactgtctatcaataataactaacaaccacttcacatatttccaccttggttgttatgtgttgacttcatggtagtgattgtgctaggtctaaaattccaagttgatctcaaaatttattgaattttgctatagtcactaactttgtaagtatatcagattggttgtcctcatattctaccttctcgagtttcacttttccttctgcaagtatgtctctaatgaagtgtagccgaacatcaatatgctttgttctctcatgatacatctgattcttgcttagatgaatcacactttgactatcacatgtaactgtgatgcttctcttgtcaatgttcatttccctgcttaagcctttaagctagattgtctcgtttattgctatagtacaaaaaatgtattctgctttagtggtggacagggccactatagattgtaagttggctttccagcttatagcacactgctttagagcaaatatgtaaccagtttgagatcttcgagtatccacatcccttgcataatctgagtcgataaagccctatatttcttgcttgagtgactctaatttgtacatgagtctcatgtttgatgttcctttgaggtatctcataacccattttactgtattccaatgctcttgccctagacttcccataaatttgctatttacacttaggttgttgcataaatcaagcctagtgaataccataatgtacatgaggcttcccactagagaaatgtagggaatagactccatttgttttaattctcatttgtaggtgattgatgaatccatatttatcttataaatatgattaatttatttattaatattct

SEQ ID NO: 330422 - DNA, 1128 bp, Cannabis indica
aataataataataataataggcagcgaaaatgttttgaaagcattgataatgataatgatgtatttctctttcttttcctttctattgggattgttacttaaacgtgaaatgtgacttttttttttcttcattaaataattattaattattaggggttcaaaatatggaataacacacggccacattttgagtcttgtggcatgagatttttttagatggaatgcctacttattttattcaccaccagttttgcccacgtggagggttttgtttctttttcttttagataatattttagtggtgacatatatatttatatatataaatatatataaagaaaatttggagatagttcagctagggatcttgtagcaaagcccattggtttgaattatggcaaagtgtatctaagaacatgcataactatcttttctatttcttttattatttttttctttttgaaaaggataactatttactgttaaaagatggactgctctccatttcaagtttcaacaataataataaaaaaaaggctactctctttttgaaaatacggaggccttcattccattacactcgtaataataataatatgaagaatagaagacaatttaattaagggaaatttgatattatatgcttaaaattaatttattcactaaaaatatgctagcatattttgcatcatgcaaaatatactcacactatttttctaatccaattttacccttaaacaaataaaaatcaaacatccatgtctctctctctttctccggcgttaaccccgacctagaacccctaccgtcgaacacacagacccagaacttcagtcgcaaggcctcgccgtcatcttctctcacggcctctctcgttttctgcatttttttcttctggtttaccagttttttgcgatattttgcgatatttagcgatatttagcgatgtatttccaatgatagaacaaatctgaggtcagggatgaagtttagtgatgatttgcgatatttagcgatatttagcgatgatttcgcgatgtgtttcgcgatatagtgaattggagacatttagagatgttttcacgatttcgcgatgtttcgcgacgtttcgcgacatctagcgacgtt

SEQ ID NO: 330423 - DNA, 1245 bp, Cannabis indica
aaattaataccacatataattttacataaaaatattgtataaaatacaattcaatataatacaatacaatataatacgacttaatacggcgttccaaacgagccctatatgaactattgtttcttctttgcatgaatgctaatcacctatgttgtgccattatagttctattgtgtttttttcaattctaaagatatttaatagcaaacatggtaagaatctgattggcataatcattattattgttatttacttatctctaaggtggattgacataatctttaaagcttttttttttcccctcttcaggtagttgtgcttgctcttttacactccactcaaatctcaatattatcctgaacgatataagcgcacgggcaaacttcattataaattcctaatgacgattaataccggctagcaaaataatggtaggaataggatcttactttggtaacactttgaacttgtttgtattagtgtcaatgacggcgggataatatcctctatgtcctggcggtgcttcaatggcagctctgaacaagttctctcattagttggtgtttgtgatgaggatgatcaccatggcaatgataatgagtcttgttttgttatcgaacaaattatgttgaaagtaaaagaagttgatcattttctcattgtaaaggtttcattcacatgttgattagttggatttggataattcatcatctaacattgatagagtttatgttattcaggggatctgtccttaccattttgccacctaacttttaggatttgaatttgggtatgatctccaatgtaatgtttacaagtatgctaaaatctttagtgatgaattttatgagaacccaatagcctaatgtttacacactctacaaattaaccaattcctcgagaatgatcaaataaatgcaatgaaaaataaataaaatataattatgtattatgagtagtacacaaaaattgatgtatattacaatattctaacttattttaagctttagtcttctcatatgactattgatatctcttaaaacttttgccgaaaccaacaaaagtctcaagtgaaaaatccatggtttgtcaattggtctgcaacttgatttccttaacgtatgacattcattcactaaaatggaattctatttctttgtttggctgcatttaaaactattggaataccattctgatggaaagacctttctatcattttggtagaatgactatttcattttaaaa

SEQ ID NO: 330424 - DNA, 443 bp, Cannabis indica
taaatagctataaataatttcttaattaatcataaccaattgctaatttccaaattaactaagcgggctttacagaagaacgggaaaaaagttaataagtttgtgaaattattattatagtattattttttgcctttataatatctttgtcgttttactcatgcttcttgttctaaattcgtatgaaatgagatagctgctatcatattttagtacagtgtatatatatatatcactttttgattgttgagcactaagtatagtatgttgttttatactattaaatattaaatgattaaaggatactatagatatataggggacttatgaagtttctcactgtaaagaccgcttagtttaatttggaaattagcagttaatcacgtttaattatgaaattatttatagctattaaataattatttatgctgttattattgaat

SEQ ID NO: 330425 - DNA, 665 bp, Cannabis indica
tacgggacttagaaaatgtataacaaattacaatttagaggttattcttatttataactggcccaaatcgggacttgatttttttataacaaattagaggttattcttgaatagagtattcttaaatagaggttctactgtattaatttttcaatttataataattattttttactatagctttgaatatatagtgatggcgaatgactaatgacaatgaatactaatatagaactacaaatgatatgccgtgattataacttttttgaatttaatagttattataaatgagatgtgcagtaatgacgactttgaatatagtaataactatatacaatggtgataatgactttgaatataatgataactacaaatgaaatatggtgataacgactttaaatttttttcgtattctaatttacatagctaaaatatagatatttccttaattatattataatttcattaatcacaccacataaattttgtactttacagtattcaacttatctatatatctatatataaatataaaggaaagcacaatggagtctaggtggcatcttacattttttttattgtatttttaaaattttgtgacattttcatattttgttaagaaataaactaccacacatatccacttaaagtcccacatggtttag

SEQ ID NO: 330426 - DNA, 1397 bp, Cannabis indica
agccgacccttccctctctctctatacattttacaatcttgattgaaaatgtggtgtttgctgggaattcaagcttaagcttggaggtgtgaaacttgatcttcttgcttgaggcttgaggtagcattcttattgttcttttacttaagatggttgctgagtttgtattgattttaagtatgaaaagatattgaatactcatgaaatgcatgtggttgataattgagttgttctagttgttgagagcatgatttgtgttggagcattttgggttttgttttagattgagattagagagaattttagggattcttgtagtgtttatattctttttattctctgaaattaattgtcttatacatgagttcttgacttgatcttgtgaatatttaaaggtgaaattagttgctttataactcaatgttggagcttatgctttatggtgtttaagctaaactttgagagttatattatttgattttaatgcataaaattgtattctaaactctctgtttaattagtggaaaatctatttgatgaatttgggttttggttgtgaattgggttgaattggatgagtttaggggctgaaattcgaagttcttgctgctggttttctaggttttgaacccaggtgccgcggcaatgcttttgcatgccgcggcctgcccctattctggtgacctgggaattgaatccaggtgccacgacatagcttttgagtgtcgaggccttgcctcgtatttctgggcagaattgaatgcaaacttagaacatgcataactttatgatccgaactccgtttttggagttctatatatggttgaaaagctcgttctgagctctatgagattatttgtattttaaatgccatgtatatactttataaatgtggactcaagggttaaccctatttgtgtaaatctcaaaattgttactaggattatcgacacttggtcaggagcactcggggatttggaatctcttctattgcgggacatcaggtaagacagtacttagcacgtagagttatgcatggtggcacttaaactggaaatgatatatgtaagtaattagtaactgggattagggttattaccctaacatgagcggtttaatagcctagggttatgaccctactgatatatgttgtgtaaatgatatgccatgttaaaatacattaggatattgagattcagggttatgcgttcaaggcataaccaggtcggactcgataactagaaccaagatgaatcgttctaaggccttattgtatttagacgtgtgagtgcaacacgtaggtctatgttacatagacataaatacgcatgtgagcgtaacatgcaggtttgtgtcatacaggcatatgagaatgacattaatgtttatatagtgtg

SEQ ID NO: 330427 - DNA, 765 bp, Cannabis indica
cttgtactacaaatgatggatgtgaattatgaagagctcatgaaatcaattaaagtcgtttttattctgccaattcgaccactttgaaagttaatagtaggagtaggcagtatctaatctaatttattattttttttttttgaaagaactacttgttcattaattaagaaagtggacgggaatcactaggagaataccctccccttgatacaaaacagccaaatcgctagcaactctagcatttttggctacaccatccgcaaaaacatttagagtacggttaataaactgaaaattacaaactacaaactttttagaaacattaataatagagaaaaaaaaaaaacattcgataccctccaatcaggactcacttctgcagaacttaaagcttgaacagccactttcgagtcagataaaatgagcacctcttcccaacctgactcaactgcccaattcagagcatgaagaatggctcttaattctccttccaagggtgaactcgcctgaagcttttgagactttacacaccagcagccagacgacatattgacactaatggcagctaatcttgcttctcccttcacccaggatgcatccgtgaaaagaacctggcacacttgtttgattgcaggaaccagaatcacatcattcctcatgttgtcgactgtgtggtcatacccgtcaaggtccttcctaaaaggaatgttctggagttcaaagaacttttttccagctatagtcaaagccaaggagggacttaca

SEQ ID NO: 330428 - DNA, 1469 bp, Cannabis indica
agaacatatatttttcgtaatgtaggttttccaatatttttattttgagaagtgttactgtcaagtgaaaacatattctgtattttttttttttttttttttttttttttttttttttttaataaattattcgtaattttgtaaaaatttataaaaataataatataactaactataaaacaaatatttcaacacttgaatggagacttatttaaccaatgaaggaattgatgtcatactttggtaaacttaatttttgcgtattcaattcaaacaatcaattttatatgtatttggcttttttattttcttattaatccaataatcgacaccaaattaaagttttgtgaactataaacttaggtttgattgagtaatttttgttaactaattaatcatgaaacaatagacagtctcctccttggtgcatactccatataataattagtaatattgaaaaaaaaaaaatacactacttggtagccacgaaaattaattttattggtttttttacaagatttctttcattttttaaaataaaataaaaaaaaatattggttagacggagtagcttcattgcttctattactaaaataacaaaatattaacaatcaataaaaaattaagttgtgtgatttagaggataaatatacacaactaccacaaaagagacctggctaattttcaatttgacctgattttagtttattattatttctataataaagtgagattgatgagatcaattatcaatgaggccaactggcttctctataagtacttgttaagttattcaaaaactagtttaataagaaattaattattaaataatcaatacatcaactagagggttaagacttgtggggttttatttattaattaattatgaaaaattatagcttgattcactatttgcttaaagaaaattagtaagaagactttaagactatttgatttccacgtttataatatttagtgaattttttattgacaatcaatcatatgattaaaaaaaggtaattgtgacacctttttgtggctaatcattatttaaataattttttatttttaaataataaaaaaataaaagatattttcaaaaaacatatttactaatactaatactattttcatctctcttcctttttagaattaaaattttaaaatttttgaaaataaaaatagttatttttaaaatttatttaaataatttgcggtgtaaaaatttaaatttaattctcggttgcagataaatacctaagtttaattttgggataattatataagacactattttttgtaaaaaaaattatatttttacgtttaaagatttttttttatatttttacgggtttccataaaaacaacacgaaaacaacaaaaaaactacataaaagtaacatgaaaataacatctaaataatattaaaacaacaacaaaaaaataacatacaaataacaaaaaattaa

SEQ ID NO: 330429 - DNA, 1165 bp, Cannabis indica
taactaattaaaatacatatacactttgttctcgatttttttttttaggaggggcgactgccccccctcgcaacaatgtgggtccgcccctgctatggatgaatatttaaaatattcaaacacaactaacatgcatattattctatgcatctgacagcagtaaaatatattgcacaacctactttactaaagatgaatatttaagatatttaaactcttctaagcattcataattaattaataataaaagttagtaaatgtatacctctagctagctagtaacgaatcaacactaaatacgtttgatcgtaacaaattgacatcctaacctacaacataaagaaattctataaaattaaaaatataattatttaactacttagtggttatatagtatatgagtaactacttaatttgttactaactaattaagttaatagtttacaacaaactagtttctgttagtaaaattagtaactatttactaagaaaacacgacaacaagaattaaaattagtaactacttagtaaattagtaactagatactatatagtaaaaaaaaaacaatgagtttaaaatataatttcatctaaactaatttttaaatttttattctaatactctcctatctcatttttaatcacaatatttaataaaattattagttaaaaatattcaatgtatgcatatacaatgcataaaatatacacaatacaattgcaatatttttatacatataatacatatacaatgtaatttcaagatacatatacatacaaaaaatattcaatacaaaataaaatacatacatatatactaggggtgttcatcaaaccgctcaatagctcaaaccgcccgcatcgcaagaaaaatgcgatttaaaattctttgcagtgtggtcggagtttgaatttcctaaaccacgcggtgcggtgtagtttgcggttttaaattattaatatattgttcaaaccgcaccgcaccgcatattataaaataccaatttttatatttattaagtccaatatgtgaaggcccagcccaaacccactaattattgtattatcaagacttgaaacgtttttttttacatttattttcaagtcttattgtatttttgacaagtgatgctcaagctttgttgtatttgtgatggtattatta

SEQ ID NO: 330430 - DNA, 1453 bp, Cannabis indica
tttttggggtttgaaattggaaaaatttgaaaaaaaataaaaaaaatcccaaaaaaatcgggttagggtgctgctgcccaggaggtgcacacaaaggctgtgtgcagcctcatccgcgcgcagaggctgcattgcagccttagtgtgtgagcgagaagggcattgcgtgtctgaagcctggggctgatgaggctttggaaaggaattgtcccccacacacgcgtgtgcagatgcaacttgtctgaaggactggtgtgcgtgcgattgagcaccatgtgcacccggtttcaaactttcataactttttcaatttatatcggaatcaagttttgtaaaaaccaaaattgtttattttttcacaagaaatccaaaaaaaatattttcagaacgaaaataaaattacttttatggaaaaatttcgtaaattcatacattcatcaaataatcacataatttacattgtaatatccgctaactcagaaagggtatttttataaatttttttccgctgagagtatttttattattttacatatttatgggtttaaatatgtatgagatttttgtgatgatataatatttgatttttattggcatgtgcataatgcctaataaatatatatatatcgatattattaaatgaatatgtgatttggttttgatttttagtacatattattattagtgggaataataataataatgatatacgttaacttataatagtataataatatttgtgattattatatttagtataataatattggtaaatattattatagtgttaaggttatatttaacacacttattattattattattattattattattattattattattattattattattatcgttgttatcgttgttatgttaatgtacttatgcacatatacgatatgatgtataaccgtataacaactgagatttttgtggaatgagactagttccaattcggttcaaagcgttctttttgcttgggtttaaacacgataaaattaggtttcggagttgagatttcgtacgccaaaacagagaacgagagagagaaagagagtacgctgtatacggtgtatacgatataccgaaaaattttcgttcttcaagtggattgcaacctgggttaaagtgggggtttgagatcacttatgtatgacctaagtaagcttttaaatgtggcataagggttagaggtccctgtttcgagtttcgccattgttgaagcttcgaaggtgcgacttgaaacagacacgaagttgaacgtgtttaagcttgttcttgggtcaagggaggttatacatgagtgcatgggaccccaagaattgtttttgatgtaagaaaataaagctttaacatccaaaacgaatgaccaatattttgactccattaaagatggtacactgccaacgaaggagacgactccgatctgccaacttggacctct

SEQ ID NO: 330431 - DNA, 897 bp, Cannabis indica
aataaaatataatatgaggatatttttttattaatgaatataaaaaaagaagtattttcaacttatccctatttattatgggctaaaatttagcccatactattttctatgccaaatttggcccattttagcttgggccaaatttgacacacattttacatcaccatcagaataaaattatagcaaaatattctaaaaatagtaatacaactctccattggagatacccttaatcgttcaaattttaattagtaaaacctttcaaactactaaactattaacaaatttaaaatgttatctaattaactaccgaacattaacttttgaactatcttattaatgtcatatttggctaaatttttactcttccaaaataaaattaatttatgttaaaagagtttttacaccgaaaataattttacagtttgagaatctcaaaaacagttctcaaaagcatacctaacctagatccaaatacatattaacctcctatcttaaactacatctcactggatctctgtagttcagctcgataaattttgatgatattttatttatttatttttttttgaaaatgtatacaactcactaaacctcaatacttcatttggataacctcactatatctcaaaaggaaacaaaatttgtatataatttatcaactaagtctttctccataaatttctaaattagaagtagttttatttatctgattatcaaaagtatataattgtttatagagttagggagtggacttagctatgcataatcctagttggattaggtcgagtcttcaaaggcttcaattaactaaaaaatctcacacgcttctgcgtcaactagatattaactattgattactaacaatatgactaacacagcaaagaactatccaat

SEQ ID NO: 330432 - DNA, 835 bp, Cannabis indica
aaacaacttttcctcaagtaatgcactaaatgaaaatcacattatctatggatagcttcttttataaaagttatcattaagcatatcaatcctggtaacaatatacagtaagaggagaggtatatcgatctcaactaacattaaattagacttttattaatccaacctatgaatttctagaagaaagaatgtaatttgaatcaacaatgattatgatttttgccaattgcagtaacaatccaatctgattccattatctcccgactcccattctgcattttccctttctattaagcattcaccatcatcgaaattttctcacttaggcagtcttctttttttttcagtaatttttatctgtaaaattacattttgtttaattttactttatagtatcaatgaccaaatgagtaaaagatttaccctgagttgtgaggaaaggcgatgaggtagctccggtgaaccagtgagcaagagagagaggaaaggcgaggaggtgagccaaacacgcttcaatgggtttcagttcagcttcaagcttcagagggagagttgattaggtttttggggaagatgagtagactacgggcctgggcttggtgtctaaagcccattaatagtacaacccaattctgaacccatttaaaagggttggtattaggaataattacaaggcaactttttttttggtaaaatatttacatttttacgttcaaataatatttttttacatttttatagttttctaaaaaataacacaaaaataacataaaatcaacaaaaaaattacataaaaataacatgaaaataacaacaaaaaataacatacagatca

SEQ ID NO: 330433 - DNA, 650 bp, Cannabis indica
gaaaaatattagtatttgttgtccattataagtatcctaacttacattatacatacatgaattgtggcgtgtatggtatcccttgttccttgtcccttggtatttttgttatacaaataatgagaaagagaaacattgtgtttggatatggactatggactatagaatatggagtaagataatgagaattaggaagaaaattcaaaataagcaaggtgagtgggagcccatctctcttgaagtagggtggtgcgggccttagtaattatagtattctttcctaaggttggggaggttgtgtccttattggtggtcaaattttctgccatgaaaattagagtttttttgttattgtgcattgctatttggcaccatcatggcgatgtggcgtttaattattaattagtagtttttttatattatttaagttccaatactaaaaagtatcaatagtagtatcttaatagcatctctaatgatagcatcctttaaagatgttaaaaatttatatattttatataatttttgtcaatcttacttctaaaaccatttctaatgggagatgtaaatattgtgttatatttagtacaaaaagtaattttgtggttaatttacaccaaattttagctttgtgctctaatgcataatta

SEQ ID NO: 330434 - DNA, 969 bp, Cannabis indica
agggcataaaacccaacatgggggccctcacatctatgatgaatgctcggtagatgtgaatagtttgccgatggatgaagtaaaagccattgggaattattcccaaaataatagctttgtgtacaatcaaggaggggatcgatgaaatagtggttctaatcggcaacaacaggggttctatcagcagaaaaatcagtcccaacagaatcaacagcaaccacatcaacaaggttctagtggagggtctagtattcaaacagatttgttgctacagtttatgatagagtctagatcgaccattaaagccttagagaatcatatggggcaattggcaactcagatagctacccgtcctcaggggaaccttcctagcacaacagaggcgaacccaaaagaaaactgtaaggcaattaccctgagaagcgagaagaagtatgaagggcctgatgggagacaaccagtggaagaagaggttcaggacaactggcaccaacatcagcagaaaagaagacaactgagagtctcgctccaaaagaagcttctccaccagtcagcatagaccaccatgtgaagatcccatatccgcagaggctccgagagacaaacctagacaagcagcttttgaaatttttggaggtatttaaaaacttgcacatcaacattccctttgcagaaagccttggaacaaatgcctagctatgtgaaaattcatgaaagaaatcttgtccaaaaagagaaaaattgaagattatgaaacagtggcattgactgagggttgtagtgcgatactgcagaagaaactccctcccaaagtcagagatcctggaagtttcaccattccttgtaccatcgggagaatagagggaataaatgtgttgtgtgatttgggagtgagcatcaatttgatgcctttgtctatttttagaagattgcagttgggagaggcaaagattgttggaaatattttac

SEQ ID NO: 330435 - DNA, 603 bp, Cannabis indica
tagtcctttggtgagacaattagccacctaatctaaggataggatgtagcgaactgtaatgaatgtctatggaagcttgaatttgagttctttcaattaggactcaatttatgtaatttgtgaggcaacatgagcaagttctatcttcggattcagtgttggatcgagaaatgatagcttgcttctttgaagaccatgacacaagagtatctccaaagtagtcacaataacaaaccacaaatcgtctatcatttgggcaacatacactacaagaaaaccttgtgctggcaaaagtacactacatgcgccggcgaacctttgccgacgcaatactttgtcggcaaaacatgtcagcgaatcttggtcggtaaagaacgttttaccgacgcataggtgaaatgcgccagcaaaatgtcggcaaaaggtaatcgccggtgtaaaatgatacccttatccgctctaaaccttctttgatatatttttgccggcgcataaaatgttcgtgccatttctcggattggcgccaaaagttttaccagcgctataagtgcgctggcaaaaagttttgtgccaatctggaaccttttagtgttaagttttgcc

SEQ ID NO: 330436 - DNA, 679 bp, Cannabis indica
cgaaaattatattcaaacagtgtgttgtacgcgtgactattttattttatacgcgtgtaaaatagactgtttgaacattgttttctatattttaaattattccgaatttttcaaaattttgtaggatatcttaaatagttataacgtacatgaatatgaaaaaaaatcagactaaaaagtttttctggatgccgaaacaagttaagggtgcaccagtacatcccttttaagggggtgcattgtagaatcaccctatatttaattcttacattgtcattattcaatgttcaaattttctaacagaaagtaatttttgtaataataatttattagtagtgcgaaagaaatatgagaaagcagagtcggtatatgtaaatatagtgtatatatatatgtacaatgtattgattaagttgagatgtatatatagtatataagcaataataatacacacaatgatcaattaaaattgattagtgattatggaattaactaatggtactcattagtcatcactaaactctcacgatatggttttgttacactttaattgcaatatttgcattattaattattaataattaatgatggaattaataaaggaagtgagtcactacaccaaaaaccccaatcagtaatattttaaaatgccactattactaatatttagtgacatttt

SEQ ID NO: 330437 - DNA, 723 bp, Cannabis indica
aagtaagattttttatagtgtaaatgaaagaaactattttccaccaaagcacaagcctagccgaccactgccatatttgtggcacaaagagtggaaatagtcggccacatcaaatggtgatgagattttttttaccaaaaattactttttcatcatctacatgtcaaaaccaagtgagaaaagtcaccaagtggtatagaaaccacttggccgaccactactatctttttggcacaaatagtggcagtggtcggccacaacaaagaatgagaagttttttttggccaaagtgtatttacaacatcaatatatcaaatacaagtgagaaaagtaacacaagggcgcataaccctcacaggtgaccactgccatctttttggcagtggtccttaacgaattggccaagaaccaatgtagctaaaatagttttctagcatccatatgactgaaataagtaagaaacaccatccaaagctttccacaagttatggctgaccactgccatcttttggccccgactgatggcagtggtctcttattaggggtttggatgcccaaatgaggttttggggttccagaacccccaaaatatgattcatcataaaaaatgtcaaaacacaccttgaggggtctggcaacatgcatggccgagaacttccacttgggcatgttgttgggttttatgccctaaataaaactccatttcaatgtaatctattttat

SEQ ID NO: 330438 - DNA, 724 bp, Cannabis indica
tttgtggaatcggatattaataacttttcagccttgtggagggaatatatgagaatccgagtaacaatcgatgttgaaaaactactgcggaggaggatgaaaatttttcgcgaggatcgtagttggttctgggcaaattttaagtatgagaatctctcgactttttgtttcatttgtggtattttgggccattcggaacatttttgtcctaagttatttcatacaccttcccatttgattcaaaagccttatgggatgttcttgaaagctaacagtaggcgaacttctgaaaaaattggagctaaatggctacggccaggtgctgttggagggatttccgagagaggggaggggagtttgaagcctgtaactccggtgatggcaggggtggggcaggcgacggtgactgaggagttgattgagggatttggtgatcgtgggctggcaactaatttaggggaaggtggagttattgctcgagatttgagggaaaaattggtggaaggaaatataaatggtgctgaagaggatatccatgtgaataataataatgattttattgtttattcggactctaaaaggaaagggttgggggtaagaatgttattggggtgggcgagcccagtgggaaagttgggccaaaagatattggattagttgaaggagttttgaattatgttgatatggagcaagatgaacatgtgttggaagtgggtccaaaaaa

SEQ ID NO: 330439 - DNA, 613 bp, Cannabis indica
tatattacatacactacattatagtctaacataaaatactattcaattttatactgccaactacagaattgtttggtagtagatgatgatatcatttttaccaagtaagatagcaagagaccaactaatgcgcatcctccggttacaaaagccaaaataatgaaataaaatagaaaaattatattatatactattttttaatttttttttttaatttatcatttagattgtttagtttttttttttttagtggttgctatgttggttactatgtaaattttaattacgatagattactctgttatttactatgagagtttctatgtgaaatttcataaaaatacaaaaaaaaaatatatatatatttttaagtataaaataaaaaattccaacaaaataataaagagcatttacgacaagttcactattgtgatgataatagacgtccaccgagattttcttcttctgtttttagaagcgtttttataaactaggtgaatgtacgtgccgagccacgtattgctagttttatttaagattttggtccttttaagattttgaatgtattttatttttaaagattacaaattttttgtttgaaaaaattaaatat

SEQ ID NO: 330440 - DNA, 1055 bp, Cannabis indica
acacaaatttaaagtttttatagtattcctcataattttttctcatatttgtaaatttttttttaagaaattgcgatatttagtataattaaatatttatgccatatataatcacaattaaaaaatctatcgtgagagatatctttggaggcgagtctaggaggttcacgaagttttttccatagccaccgtcacgtattggctgggacgtttcacgaagcttctccgatagccaccgtcgcgtccaggacgttctgcttttgtccaggcgagtcgagtcgagtacaggcgtgtcattcttccatccagtaggttctgcgattcagtttcatgttcttccgtgtcgttgatcaaagacagaaatagattggttcaatctgtttctgttctgcgattcgattccgtgttcttctgtgtcgttgatcaaagacagtaaaagattggttctatttatttccgtgagttacagtaaacgattggttgattttagttttctgtttccgtgagttattagttggctttagtcctgtgttcttttgttgaacaattggttgaccgaagaaaacatgcgtgttttacagttgttgacttcgcttttagccaacgacaatgagtcttttgataagcgataaacgatatgtcgtaataagaatacgtaataaagcaaataataataataataagaagacatagaaattttatagaggttcagccccgagcagttcggtaatagcctaatcctcgttagttgtattgacttaagaataaggaaaaagattccttttcttatagctcttacaataagaactctgaacatataattcttacatagccttagcttatagcgtttcggcgtatgatctctcctcccttgcccagtgaacattcctcactatttatagggcaggaaacttgaggaggaagagtttcctctctcgttacaaagtgcacaaatacaaagatcgtgggatcattgctgaatgctaggatcgtgggattgaggccgtatacaccgatagtggaatcgtgtgtatgccatatccacgcaagttgat

SEQ ID NO: 330441 - DNA, 856 bp, Cannabis indica
gtgattatggtaaattccttatgtaggaagatccccaatctccccttttacttgtttttcaataaatactaacactttatcttgtctcgaagaaatgaattttgagggtcttgtccaaagaaagggaaagaagaggctaaccatctcggaggccccattagatgttgaggtgaagcccctaaagaggtccaaggagactacggctaacaagaagcaagcctcccagaatgttaatctcgaggtccctgaaacagagacccaggatccaatctctcctctggcccttgtaagtaccgacgagcctattcctaaagcgacccaagcttctgcctccttgagccaagccctcaaaactttgcctatcgaggctggaaaaactagctaagagtatactgcagagtttggcgcaatatgctggcatcatttcaagtctttcctcccccatgaatgggatttaatcaatcatagggatgtgagggaaatgctcataaggagtttatctcacagcctctcggtaaatttccttacctttatttgctcacttctttttttttccttcaaaatacttatgtatttttgtttgttggtttcaagacatccttcatttctttgtcgcccagtggcgaggcatggataagatcaagtatctagagggtgaggtccagaacttgataggccagcgcaaggttgtggctaagcaatggaatgatgcccaactggagactactcaccttactaaagatgccgagaggatgaagaagaatcttgaagctgccaagaaggaggcaaaggataagatcgatttcatgcaaaaagctccaaggggaacttgatgcagccaaggtaacacttgatg

SEQ ID NO: 330442 - DNA, 2102 bp, Cannabis indica
gtaaatcttgatcctggtaaaatttttcccaacactcccagcctcggtaggtagagtcttaagtgcttggctcgaagagacaacaacttgatttgccttgggaatggactcttcagtatgtgtggggactggaggatgggtttgaacctgagtctcagtctcagggacctcgagatcgacgacttggggagctcacttcttattggcagttgtcatcctgggccttttgagaggctccacgttgacatctgatgaattctctgaggaggtcaaccttttctttcccttcttgcttgatgattgaaggagatcctcgagattcatttcggcgagacaaaacaatgtgttagcacttgtttaaaaataagtaaaaggggaaattgggaagttttttcccacttaagggatttaccataatcataagaagacgaagagagaggactataataaccactaaaatctctacatcccgtgatctagaatatatcataggaattaattggctctaaatcctagctcgcatctatatgacctgccctatcaagcatggtcccatattgctcggctatcccataatacgagttagtacatataatttagacgtacaattctgggtaccaactatcaaacctatctgcaatgcgatcttgaggaggggattctaagtgtagaaattataacggctatcccgaaaaatacactaacgtggctcactcagccctaagcactgtgggtcaccaaccgcattgattacctcaagatgctccttcttcggcttcctaagggattgcattctgaaggtagtgcgcctgagcctcgtagtcctgagtttcctcattggctgggaccagaacctactaccacgatgcatacttgggatatttgtaatcactagtatactcattctcaacgaggtggtccacggaccttaggttaacctcgttcagaaggaactcaattgattggagacagtagtgaagacccaacatgagtctgttttgcccacccatcatggggttaggagttcgtcttttcaagacagctgttgtaaaaagcaaaattaaagtcagtaaagccagaattaaagacatggaataatttaaccaagtctgaggcgaatcctcacttacgaattatacgaaaagtggttatgccaattggggagacgctagtcgtccagaagaagtcctccttaaaaggagtcttgtttggcaacccaataatgatcttatgcttgttagagtgagtcctgaggtaataaaaacctcctacaacattcttcctcacggggactgcctttaccgagtaacgatactctatttccagaggagtggggcactcccagttcaaaattttatacagaaccttcaaacttgcgaggattgtgtatgaaataggaaccaactagaatggggcgattctgagatgttttaggaagtccttgtagtaatctcgtagggggataagtgctctagccctgatgtttttgaggctccaagcgcctatccctttcgagccacttgtactggcctcgccactcgtctcttcaagtgcttcgcgagtgagtcgttcaggcgggtaacaactaaactcgctagcacctactgatctaacccgacaatttcgcttgtattcaataccacaagtccttaaaatgcaacctacatagtcatcgatggctcataccttcaactcaataagttcagcctcgaaggttatgttggggtcctggcaagtctttgatttatgaggcttggatgtcatgatttcaaagtccaggtctcctgttgaaaaagcaatcgtgactctgggtaaaaataaaggccttcccaaaggaatagatgataaactgggcggttcaggccaagtagcatctcacaagaaacgcatctgccttctgttatttcttgcaagaagcgcctgtggcgactagcaatataatctttgtgggtttttactaagtggtccctaagttttgcatcatttatctctaatttggatttgggttttgaaataatgggtttatacgggatggcaagttcattggggcactctgtttctaaactttatggatgataaacttctgaaccagattgggacat

SEQ ID NO: 330443 - DNA, 1755 bp, Cannabis indica
aacataccacttccaagattcttacataaacatcaacatgaatattatttttgaacgtttctcctcaagttactttttgaatagtacaaaataatagtggtcaatttttatcaaattggttttttttttaaataaccaatctacaacaccaccatataaaaaaaatgtaaggatataacgattaaagaattattattatattttattttaacaaaaagtaaaattatactatatttgtattattttgaaaaataccaagtcaaaattattattaaaaaaatagtgttggagggtaacttttacaaaaacacattgccaaaaaatatttacctataaaagatcagtttgcatgtttatgtcttcataatttagcagatagttgttagttaggttaccggtaagaactttttactcgtgaaagtggttgttccttgtctgtgtatatgagtgattttttttgtttcatttattattaaaatgagataatattaaaagagatttaatatttaactgcagcttatctaaaaactttacaaaatatagtaatttaccaacaggacgaaatcaatttatacgtgatcgaaacccaaaaaactcaactttgaggaaatacactcctattcattagctccattttgactttgagaatttggtcattttgagtttatcctaatcccctacctcaattccaaaaaaagaataaaaagaaaaaacaaagaagtaatatacaattaaaaagaaaaggatatataattctggttgcctatggcataggatagagtccacgcaagggaggcacgaaaagtcaattcgatagaaggttctgggcaataacactcttatatgtaaataggtcctagtcaactcaagatcttgatatagtaagacagatagagagaaaaatcacatctctacaagcattataatgaaaagtgaaagtgcattccaactcttgctcttcagaaaaaaccaaaaccccaaaatacatttatttcttagatcaagttatcaataaataaagtatatatttaatgggataagaattcttcagatgacgtcactgaagtataaaatttaatttttggaaatgaggaagggatttgcaattctgcaccacttatttcctttttttttttttcaagctaaaaacaataataaaataatgtatatatttgaattcaagaatataaatatatattatagaaattttttaaataatttacaatgttaaaattaaaatttaaataattatttatcaaaaaataattttatgtgtgataaaatatttaaattataattttaataccgtaaattatttgaaaattttctatataactacaaaagagatttattgtaaacaaggatatattataaacttatcctacattatattattaataatttataaaataaattaatttaataatattaaaatcatacataattaacaaatgaaagtgtaagagagaaaaagaaaagtgtaagagagagtacaataattttttcttataatatacaaagtttacttatacggaaaaaaaaaaaaaaattgcagaaacataattggtgatacagtagaacctctatttaagaatactctattcaagaataacctctaatttgttataaaaaaaatcaagtcccgatttgggccagttataaataagaataacctctaaattgtaattagttatacattttttaagtcccgtattaacaaagtatacctctatataagaataattatatcttaat

SEQ ID NO: 330444 - DNA, 913 bp, Cannabis indica
ctccaactgttgttttccatccatctacattactctcttcagcacaaaatcttcacaaagggatgaatgcaccagccactaaagtttccccaacaaacttctcggatttgtcttcaatttatatgccagcttttgtacccaataccaccaatacttttgccacatatcccccacagacttcactcactgatatccgaggaaaacaaccaatgcctgctcatgccaccaatgctttgcctcctaaagacacctgccactatttctcctgctgtattgcattgggagacagaaaatacaaacccaaatgtgcaaaccaaaagacaaaatgaaggactttctttacgccaaactcttaagagatgtcgaggaacaattcccaatgatgcagcttcaactttgtcagttggagaggttgatcaccacctagtttccattgatcttatggattctatgggtgacaaagacaattcagcggagactgcctcgcagtcccgccagcagccatgaaaattgtaagctggaatgctcgcggtttggggaacccgagagccattcgcaaactccgattgcttgtcaaagagcaaatccccgatgtactttttattatggagactaagttagtttgtaattctatttctcgtattagaaatcttttatgttttaatcatggacttgaagtccctagaataggtttaagtggtggtcttatgttactttggaaggatgatattgatgtaactttgcaatattataatacaaatgtatttgatggttatatggctgtctcaaatggtcctaaatggcacttcacagctttctatggagaacctgctgttcataacagacacacatcttggacacttttaaaaagactaaaagatgttgcccctttactcccttggatggtcattgg

SEQ ID NO: 330445 - DNA, 1153 bp, Cannabis indica
tttttacctcctgaactttgatatgtactaaatacatgcccctgaattttaaggtcattaaaaataccgcctgaactattgagattgttgaatttaaggacttttatccaattttaataaaaaaagtctaacatgaatgaaagttcagggaacatgatttagtacaagtcaaagttcgagggacatgatttggtagatatcaaagtctggagagcatgctttagtacataaataatcattgaaatagtaaaattgaatgaaattagacaaaagtctttaaatctaacagtctcaataattcaggggaaatttttaacgatcaaaaatgttcaaggggtatgatttggtacatgtcaaaatttgagaggtaaaaatcctaattagccatttaaaaaagataaaaattgtttaaatataatttctgaaataactacaaaactatccttactcattagtgagtcataaatatcaatagacttagtgttgataatcacttaaatctaaaaaagttaaaatagcttaacacctaactaagaatataaaaacaattcttcaaaatagttttattagaacaactttaatactaattattataagagtaaatggagttatgtgagaaaaattaaatttcaattacaaatgtgcacatttattcgacattgttgttaatgttagacttgctcttaaatgagttaaaatagataaaaaaaaaattacaattgaaagagtatctctccacaattttatgataattttctcactcatcattttatttacttttattttatattgttggaattaaatattctctttttgaacaatgaaaatgatttaactattgattggggattatttttttaaaaaaaaaattattcatattttttcgaattagaaaataaaaataattttaaaaaagatgttttgtgaaaatattaaatagttacaatgattactcattagtgagtcacaaatattaatagaaatagtatcctcattacttaactctaattagttaaaatagcttaacacgtaaaatataaagaaagctcttaaaaagtactattagagccactttaatactaattattatgagttattgtccaaaagtggagttatatgagtaaaaaaatttgaatttttaattttaaatata

SEQ ID NO: 330446 - DNA, 884 bp, Cannabis indica
caagacatgaaattaaaccaccccaaaacatacagcaaccaaagtaccaaagttcatgcataaaactactttgagttaaaaaaaaaattaaggaaaagagggctaggatactatagcttgaattagagtcttctaatctgctaggatgacacaaaattgagctaaacataacaaattcccagctggttcccttgttgttcgaaagagaaagagagagactttagagaattctaggctttttttcaaattaaatgaatctctaatattaattacttgggttaatataatgatcttaataatagtgtctacaaaagacaaaaaccccatagtaaaagacctatatgccccttgatttaaaataaaagctaccatgtccaccaagggtaatttggtcatttaaactccgacaatttaccgacactctaatgccttacaatgataccccagtattaataaaattctataacacaaaattcaactctctaatagcccaacatcgctttccaccgtttccaaacatagtcacaggtaaacaagaaattcacatataacataattaacatatatttaaatttaaataaattttcaccaatatgcaatactataattaatatttcaattttatatttaaccccaaattattcaacaactcagcatattgatcttaagcggcctttacaagttaggccttttattcatatattaggtttaagtatttttttcaaggcatcttggtgtcacgtttaatactttcctacaaaatgcgagttgttagtattcaacctcgtatgtagcttattgttgtttctatgagttatatctcatttacaaatgctacttttaattttcatttctcgtgggaaaggttctttaatcaaaaactt

SEQ ID NO: 330447 - DNA, 1453 bp, Cannabis indica
tgcaccgccattttatcagtcatgtcttcttatgcaatcgccgctaatgccaagccatctctctaaaaatactattcatttaaaataacagaacaaaaaaatgtctgttctttttctaattatatccatataagttttacttgttttacggttcatttatttattttatttaagattaatttaaatggaagatatctctgaatttaaatattaaatatttagtttttttgggaaatgttatattttaattatataatatttacaaaatttttaaattatatatgattataacaaagaattaaaaccataaaaatatgtcaaacaatctccatcaataccttaatatttgttatagttattcctatacattataacaattcgacacaaatcaattatgaacataaaaaggaaatagaagagaggaaattgttgaaaaattctcttaaaaagcctcctcggtcacttcttttctctgatagtactctctaattgcttgccaaaaagtgtgaaaatccactcctttaaatagccaaaaaaggatacaaaagatggaaaaatatcaaattttccttaggcgggttgcaacactagaggcctagtgtcgcggcccgtgtcttgtatacgatattcctctttgatttttatgcacacgagcctcaaaactcgccttgagtgttgcagccttcaaatgaagaattttggtagcaagcttataggttctattggtctttcaagatcaacgttctttggaacgtacgtagcaatctacaatctgttggtctttctggataaacattctctgaaagaagtcgcttcttttttttttccttagtatagtccagtaaatagcaaggcttcttcctctttcttacaaatggtaccccttatggggcccagttaggagtaggacatcgtcctctgactgtgtatcaccaatggccatgataatgacatctattagagtagacagtgcctcatcatcatctttttcccaatgttttgggagcacatcttcataatcactcatgagatcggtcatctgttgattgggatggttatggttccccaactttctccttcaataatgctaccacattggccaactaagccatcaaaaactacttcatctctttttgactatccagaaagaagcacattatattagtttggctatccaataaatttgttggtgagagtgtaatggcagtgtattaagcctcaattctatccgacctctttgctagtgttgtaacgtctgatgcattagctacaacagtcgaagcaaatggattgtctacttccgaaggcggtggctgtggaattatatttgccttacgcaggacttcaataatggcgttagcttgcgtttcaaacaccaaattctgtgtactatcatcatctaccgtctcattaatgtccatctcaaaacaaagaggggatttaccctcattga

SEQ ID NO: 330448 - DNA, 1706 bp, Cannabis indica
aaaaaaaaagaagtaaaaagttggggatttagggttttcaataaaaagaagaaataaaaaagtaaagtaaaaagtactttcgttttttcaaatatttgaatttttaaatattttaaattattgttttgttaatattatgtgtaccactaaaaatgtgtcacatgtatatttgtatacacgtggaaaatccaccgtgacacttaacagagacttttggatggaagtgtaaagaacaaaacagaatgttagtttggtaggtttttccatcaaaaaatcagtttatgcggttaattattaaaaaatataaagtgttgacgtcagatttggccaaccaacagtggagtcgtatttattactgatgtttaccacgtgttacacaataagaacagaaaaataaataagacacgagattctatagaggatcgacttccttagttagcgggtaatgacctactccttttttggttgtattgataccaaagataatactactcagatcacaagtattgttgaatcttcagtagttctcttaagattacaatatgagaatggagttggcaaatctcaagtgatggagaaagcctatgcgtgtgtaagagagagaagagatgattatcaggcttagagcttgagagttagaactgagagcttaagacttagagagttagggtttgactaatgtcctttatatagtagagcttaatccctaatatctaggtaaataaaactatatttacataattaattaataaagttcaaatgactaaattgcacctcaaaaatagggaagttactaatattttttctctattttcgtgggttgtcaaggcccaattcgctgcttgacttgttgtccacggatgaaagctgcacaccaaaaacctactaggaaaaagctggtcggccatgcccttgctactgccagggtgcatgctggtcgaccacatagtacttcaaagctagccggactatgttggccatagggccgactaggtgtggccggccagcccccttgaggtggctggttcatcatttcgtcgtccctcctaagtactcgaacccctcgttggttgaagagctgagtagatggcttgaccattttgttggtgagttgtactctcacgtggcatttatgttggccacgtggacatgccacgtcaagtggataaaaatcgagataatatttaccccttaaattcatgtgctgacgtctgtacggataaggactttccagtttagttgggactaatgtagccttaatctggtagatcttgcagtatttatagtgtttgaaatttagtctaattttgaaacattgaaaaaaaaaaaattgtctaatttttttcttcgtgatcatctaattttttttctaattttttttttcttcatgatcatgttcgtgtatattgtagtttatttaaactatttacaatgctgaaaataaaatttaaataatttcttacgacaggtataaaaacaataattatgcaacaaaatatctctaatgagtattatttgtctcatttttttttaattttttatcaacttcataaatattaatggataaatactattttagaccctatgttttgcaaaacttaccaattggaccatctgttttgttaaatgacaaaatggaccctgtattttttaaaatggtacaaataggaccctgattgatttttattaaaataaaatttaattat

SEQ ID NO: 330449 - DNA, 566 bp, Cannabis indica
gcccaacgcccatgctacggcgacgtgaatttcttcttttttgcatggaattatttgttgtctcattaagtagaggctaaatgctttacaatgtttattatatgcatttggttgacttgggataacgacaacttagtattattggattattgtcgttagtatatagttaaggtatttgattaaatgtcttaatagaaaaaatgatagtattttgagaattttgaatgggcgatatttgtgttaattagcagtagtaattagcttcgtcgtcagtaaaatgtataatgtagtaaaaatgtgattaaatgattcactacttgaaacatattgatgaccttgaggcatttgctatacatatgcaatatgacaacaatatattgttatattatttgatataatataatatagattataatatttaaatgtgacaaataatatattaataggatattaatatatattatgtgttagaggttatattatatcatatatagtataataatacacacataaaattgtaacatatgatgagttacaaatctgaaaatagattgtaacttaaggat

SEQ ID NO: 330450 - DNA, 1010 bp, Cannabis indica
taaatttaaggacttttatctaagtttagtaaaaaaattctaacaaggatgaaagttcaaggtacatgatttagtacatgtcaaagtttgagggacatgatttggtagatatcaaagtttggggagtataatttagtacataaacaatcattgaaatagtaaaattgaatgaaattagacaaaagtccttaaatttaacaatctccatagttcggggggatttctaacggccaaaaaagttcagggggcacgatttagtacatgtcaaagttcggggggaaagattattaattagtaaaaaaaaaatgtagtctattttagtagtttttattttacctttatattagttttgaacatatgataggtatttaagagaacataaatgttgcatgctctatctaattatcaagtctcatatagtttaatataatagcttttaggaatatcacaagtcaatcgcaacgcgacatgttgaggagatgctaggcactactggtgcctaatagcaatgctcttaagagaatggctaaaaggcacgcggtgcctaacaccttcatatgtgtcaatattgttattggtttaattaaatatcatgttctatatagtttaatataataacttttaaagagtatcgttagccaatcgcaagacaacatgtctagaggtactacgcactattagtgcccaatagcattactcgagtatttaagtattgtctacccttatagcacgtttactaaattgcaatcaaaatgggaataacagaatggctaaaatgaaagagaataaagtattaaacaaacgaaatcaatattttattatgttgtttactaaattaattggaaaaaaaatcagaatcgttttattttatttacataattaagaaaagtaattagaatggtttagatgcattaaattacccttcacaaaaaatatttatttttttatttctttattttaaaattaactcttaaaaaataaaaaaaaaactaaattcataaataattaga

SEQ ID NO: 330451 - DNA, 1455 bp, Cannabis indica
aagtgaaacgataatttcgttcgagctttgcttaacgcaataaatgattgagtgcccatttcagtttttatattagtcaactaaattatcatttacaagttgattttattcaagatacttaattatttgtttctattttaatacatttaattaaatataaaattatattcaagtttgattcttttatttcaaattaacttgaattctaataatttcaaagtatattttattttaattaaaaaataatcatttttttgtaattttcaaaataaatttatttttaaatgtagatattttgaaatcttgaaaattagattaaagttgaaaattaattttttaattcattttagatcaacttaaatcaagtaattttttatcaatgatttatttaaaataaatagactaaaatatattatatttttaattagaaaatcaataatttgtttataaaatatctagatagttgttatctatatacttttggtatttttctagatatatttagttaaataaaaaatctatatttaagttaatttgttcaggccacttaaatattaaatattttttcaagaaatttaattaaatagaaaaattatatttatattgaaattaattttattaatttcagatcaacataaattagaataattttttcaaatttattttattttgttaacgattatgagcctattttgcaataaatcaagcacagatataacgaaaataataacgatgaaaccaagatttttacgtggttttacagttaactttgcatagtccacaagtctatcttattcagataattctcgaaacaagattagggtttttacaataagtatacatgtctttctctttaagatttttcctcccttgttttgtagaatctgcccttatttatagtattataggttggcagttaattacattcaaatttgaatctcataacaatattctccgaaattatgggcttttattacgctccacttaattacgtgcatataatattagagaatcacacaactgtgatttaaactgtctttaaggcggtcaatgctgatatggatatgggcacgtcgccaaatgtatcccgctgaggcatctcgcctagtaaataagtgagtgacttagtcttctggtatctgagcaatggcctgagcaccagtgtacaaagaaaatttaagaactgccctttgacaataagtgtaatatcccgataagttaaatggtaaataattagggtttatattgatattatgaattaatcaggtaataagtgggattatgatcctactaatttatttcagcataaaatttaaattttgctataagtgagtaaataatcgtaatttgttaattacggagatttatatagcatgtgtgaatgtaatatgagctatatgtggaataaaaatatttcaggttcgacgaccccggagactcaataagtggatatat

SEQ ID NO: 330452 - DNA, 1433 bp, Cannabis indica
gcaactcgtttgctgatcgtttgataaaacaaatcttaacattattgagagaagaaaataaaatttgacaatcatgaataatcaaaccaaaaatagaattcaaagagtgattactacgaatgccttgcatagtgagcatgctatccgtctcaatctcaacatcaggccaatttttgctcttaatccaactcagtgcttctttgacccccattgcttcaacaacttccgcatcatagacaccgccataataaaacgttttggcctcaatgagattgttaaagctatctcgagcaacgaccctgaatccataagagttatcctgtggaaagagtgcagcatcaacatttatcttgattttgttcgcttcaggtttagtccaacactcagctccatctcctctattctcaaagaataaagaagatagtgaagtgttatcttgagcattacgccaatgatatgcaataacttcagttcgtgaggatgttttattattccatacaacaaggtttcgggccttccaaattgcccaacaaagcatagctgcccgtgagacaatctcctcctcaagagccataagtgctttctcaaaccaaccaccaaaagataaaggatgaagcgtgtcataagtgatatcaagagtatgccaacatgatatagcaaaaggacatgtaaggagagcatgaacaatagactcggcttggtttgtgcacacagggtagagcgcagaaatacttacatgtttagtcactagttgaaggcaggtgggaagacaattagtaattgcacgccataacaagttcttaaccttgggtggggtctttaaatgccacattttacaccaaaaaccagaattatcagcgccaaagtgctggggtttattcttctacagcagatagtaggccgttttaacagaaaagaacccagtacgatctctcgaccaagaccagaagtcagtatcagaatttggagataacggaagaccaaggattaagctagcgtctcaattgttaaatagatccttaacaacatcacaatcccagctacgagtctccaaagagaagagataactcacagtattatgcaaaagagctggatgagttgaggttacaagtctgttttcagtgtcaggcagccacggggtagaaagaattctggtaatttcaccatttccaataatacgcacggccccaagatgaaccacattttgagcagcccaaacactacgctagacaaagctaggattattccccaaatcagcagagaggtaatcactggtaaagaagtatttagctctgaaaatttgacccactagagagtccggattacacaaaagtctccaaccttgtttagcgagcattgcgatattaaagtcatgaagatgtcgaaactgttggaatttattttaccaagaacttagatctactcacaagtat

SEQ ID NO: 330453 - DNA, 665 bp, Cannabis indica
taaaataatttccaacatatagtgatttcccaaattttggattgtggttttatttattgaatattggaattgtttctatatcattcatttttttcttcattttgtttaaagttaatgttggtattatagtgaatctagtgatctcatgtccaaaagaaagtgaaccttgtcatgaaatgtgattgtaagatcttggtgttggtcatcgtttgctagcgacaacaggtctgctttgaggccgtgttgatcgacgatagacaaaagttgagaaaattatgaaacatgattggtgcgggtattaatggagtttatgctaatcttattgcttgatttataattgtttgctttgaccatatttatttcctaatcgtttttgtgtttgaatgctttattgtgattgattgtagtaaattatgtttttattaattagtcagttattttgttttggtatttttattagttttaaaaggtttatattcttaataaataattattttggtatgttttatttgtattgtttcaaaatttagttttattaggaaagttttgtaattttattttaatttttttttatttaattgatagattatatttaattttatgtaattaattatagtctcaagaaatttatcttttattttccttatatatattctttttttttt

SEQ ID NO: 330454 - DNA, 1098 bp, Cannabis indica
ttattaaaacttctaaaaaaaaaaatcgtgtcagattaaaatcaatatttatactaattagtctcagttataaactgagacgataggaaaatactttaagtgtcagttttaaaacgatactaaaactcattgtctcagttactggcacctaaactctgactttttgttactgtggaataggtatcagttctatgaaccgatactataagtataagtatcagtttaaaactgacaccaaaaatgtaatttgtagtactgttggttggtggtttataacttggcaatggtttccactctgcctggcacagggtttttccgatgtaggattccaacatagacacttgcaaaaggtgtatcctaaagaacgcagaatccaataggtgccactctaacattcgtgtgttcaatccaaacatattgaaatcctgtatctcttatagagaggccaaaatggtaggcaagatatacagtacgaaccatgaaatattacaactactcatatacaatgtataatgtattaaacaactataagtggtcttcaaaaagttcaggtactgaaaacaacttatgactttaaatgcaactaaaattgagaaccagagcatatcaaatctttatgaaaattattaaaaattagagcttaaaatcattgggacatcagaaatagaaacaagctaaatatttaaatgtataaacaagaattcgagcttagaaaagattttgtgcacaaagagagaaggaagagaatagttgaaaagttgtaatttccaatgacgatacaaccgcaagattgtctgtagacttcgttttcacatctcttaagtcttaagtatattccattattgtatttaaactttattatgtaaaaagaatctatatatggtattattcctaggccaattcttttgatttatacattaatatattaagtgttgttagtgtttcagttttagatgattgacgatcaaaaccttagtttcattgccaattttttggacatcttcattttttctctagtaattatatatcattatgttgcagctgacccaaagtatgaaaccaactaagtcttatcggctatgttatattttttttctt

SEQ ID NO: 330455 - DNA, 1669 bp, Cannabis indica
tttattttttggaaaaattccatctttataattcaatcataattatctctaaaaaataataaatatcttaatgagatgaataagaattaaattaccccttcctataattcaattaaataaagtcattttaaatattgtttttctattattaatttaaactattgataattttttaaatatcaaaaagaaactattattattattattactactatatataaataaatgaatcttccacgaaatgggtagtcaaaatggtaactaatttctcaaaaaagaaggtaactaatctattatattacaaataagtaggtgaaaacctctcgattgaactattccatctctatgttaagaacaaaaaaggaaaaaaaaaaaaaaatgaaaactattccatctctcaatatgaaaaactctctttgtttttctactaagaatattattatgatcttattcttcttattattagtagtactacttctaagtaatattatttcaactcatgatcgtgatgtcattgttcatcaaacgagttattataacttcaaaaaagttatcattgatggcaatggcgaccgtcgtatccttcgtggtggtcgctcccgccgtggtagctctcccaaatttcgagggggagtgggagggagagggaattgttcaacatcatcggctaatgtaaaatcacctaaatatttacatgtcaaatgctactctttcttggccttgtttttttcccttaggttcttataatatttttttttcggttcttattattagtttttccttttttgtaagtaagaattcattgatcaacatattactatacaataaacaatgaccccccttaatctctcattatagtagataattgtcttcttcgagacaggataaatctgttaaaatgcactcttcgaatcagtgccaaactccaattgaaccaaaattgtatttactcattttatatctcacaatagcctaacaatcacatatttatagtgattcacactctttagaaattactaataacacattacaatcaacctaaaccaatctaagttaacctttacaaataaatgtattgtgtaactaattaaaatgtatatacatttctttctcgattttttttatgtgctttataattgcattaacctaacaacaaagacattacaaataaacctgtttattgcaacgcttaatctcgagtcttaagtctctcaaccacggttaatcaagtcataaatttgattattattttgagcaattaataattttatagaactatgtcatgataataattgttggttcaatacattttctttattataatttctgaaatctgaaaattattaatatatatatatatatatatatatatataacaaactttggaacttacttatgttatttataggcgaaggggagttttaaatgaatttttattttattttttgtttggtaaaaaggaggattaagtggattaattaagaattttttttgatttaactaataaatatatttaaaatatattttttttataattattttattaaaattgatatttaaataattagatctaataaatagaaaacttaaaaaaaaattgttatttcattaagttgaaattaagtgataaaaataaaattcaggggcattcacttgccggccatagaat

SEQ ID NO: 330456 - DNA, 736 bp, Cannabis indica
tcaaaaaaaaaaaaatgctaacataaatatatatatgagggtagtgtactatttcggccggctcttatagtgtgcaagttgggttactatacaggcctaaaaaataaaatgcccaatatattttttcttttaatgcccttcaattttttttaataagcctaattttttaaagagctaacaacttgttattggtcactttcataccaattatcaaaacctattttcaattttattactgttttaagcaaaaaaaaaatcattattattatttattatctttcaaaatttttatattttttttttctattattttttggttgtattgtaatcaataatatttctaataaaataattggaaatttttggtgttttgtaaaatatataagtataagttaatatttaaatatatttataaattataactcttttttagggtaccaatttttaaaattagaacaagctatctaacatgtttaagacgatcttgtgtactataaatacataaatacatatacacttaactatttaattaagtaataaatatcttttaataaaacattatgatatacatattattaataacaagttagagtactacatagagattcttttaaaaaaattatatttaaaaaactaattaaatttaatgtttttttaaaccttttttgaatacataaaatgtgtggtatatttatttcgataatgcttttattttttttttttttttttttgtaga

SEQ ID NO: 330457 - DNA, 1675 bp, Cannabis indica
aatgcaacaccttctctttgcactttcaagatattttgtaattgatttcaatgtcgtatttcggtttcaaatcatcccttatggaagaagccatgtaatccttcccatgagtagtgtatttctccttaatgaggtgtgcaattatcataggtacttcttcacaattttcttttggtcgaacatcaagagagcatgcgtatacattttcaaaaatagtgacctcaaacaagtcatactgtggcttccttttgccccttaacctccacccataattgcgatccttacacgtaatgtatcacatattagtactagacttccttaccatgaactcaaaatattttcatcatggcaaatagcccaaaaatgtttttcaaatgctttttatttatgaaaatctttccaatatgtatctccttggttgttgtgccactcaaaaatgtctaatgattactctcctcaatgtcttcttttgtaaacatttgatctttgaatttcgagtaaactaccaaagaacaaaatggatcactacatcctccagcttcactcgttcaaaaatggccactaccactagtacctggagtttgatgtgctttatgcgagctcttctttaaagtagttgttgctccgataatcgggcaagtggaaccatatgtaacatttgagaacgtacctcagtatcagtgttctctcgtaaatcatcttcaccatcaaaatcaagctcattattgtagtatgaattacaatcatcatcaaatgaaatgtctaaattagtttctgaaataatagtgcaccttaagctccagaattacttgtggagaacaagttccaatcgaactgcatgtatttgtctcactatgttccacaatcatttcttctttaccaaaatcacaaagataggaacaaatttatcttgctttttttgaagcatttccaaatataaacttacatctttattactcttcacaagtttaggctgatacattaactcttttatttacttgcaattgacttctaattttaggtcgtatttcacttcatcgacctctagttcttagtatagaagctcaacaaattgtgagcaagttatgtttgactccaacttaaatattttatttttcagcgccattgaaaatcgaacctcttcccttgctctcccaaacaccattgtacatcaaataactaaacgacattgaccctatcaatttaaaacaaaataaaataaataccaaaacatctacaaaaatgtatagatccaagacacataatcgaagatatatcgagtaccttcgaacaagtatcatgaagcaatcaaatgtgcattgtgtaaaaattgaacaggtactataactaatctatatcaaggagttatcaaacactacccgaaatattgtccctaacctctgaaaatactaatcatcgattaagcatcaaatgtataaaaaaaataatcgaacagagttgaccctattaatttcaagtcaaataaaataaataccacaaaaaatatctacaaaatgtataaatcaaagacacatcatcgaatatacgtcgaataacatcgaacaagtatcatgaagcacttgaacaaactacataactgttagcccaagatatgtttccaagagggggtgaattagaaatttaaactaatttttcggtaaattaaaacttttaa

SEQ ID NO: 330458 - DNA, 1382 bp, Cannabis indica
agagagagagagagtggcaatttcaaggagagataatgagagagctttttcaaaaattttgagactgaaatctgaattgaaaaaaaaaaaaaaactctcctatagcattcattttataaccaaacaaataactattttctctaaataattaaataaaaaagaaaaaggataaatacaaaaggaaaagtaaattttcttgtcttctgagtaaatagatattgaacttagactatttctttagttcacttaagtctaatggacttaaaacgatgacatctttttatttctaccatatttaattaaacttttaatatttaaacacttgttttattttaataattacatctaaataattatttaaataaaaatatattttaaatacttagtattaattactcacaaaacaaaataatgtataattaataattataccattattttctctttcttttaaatttcatcaccttagtgaaaattctcaaaattgacaaaattaataatgtgaaatctagttgatgaaataatcaattattgtaacctactgttaaatattatcctagatattgtagaaattttgggcctataaaatcaagctctcaataagtagatctaaaacttaacaaatgaattttctaaacttattaatttctcatgactctactatagactcagaattgtactcttaattttatagaacgctctatattatgtcataatatagatacgctgtaaattatctattatttcaaccatatcaatcaatgatcctttatagaggatttatagtgagtatgaactaaaattatcgttttaccccccaattgtatattatcctagtttcttgtaaagggatttcagtaaactaatataattactaaaatgatatctcttctgtaacacctttaaccaagatcgaaggaaactatcatttcacttctaacataaaagttatagatgtccatatatatgattaacaatctcattcaattatactaccaagttctcaagatataagtatgggctagacctttgggtaagctaaaaaagaacaaatcaaagaactcgaataacataattaagtttaaccgtgattcaagtttaattgatctattatcaattgatattgactaataatagtataacacttaagattataatatatgttcgtttttcaatatcgatctagtccaatgtaaaccaatacattcgatacaagtctacataccactttccatagtgtaagtagactacatcattgattattacgtcagtgtaaatccagtaccctgataaatcttgagactaaaattattcaaaacatatactcataattatttttgatgtgatgacgtcaatataattatgaataactatataatctg

SEQ ID NO: 330459 - DNA, 814 bp, Cannabis indica
aattaatcataattaactgataatttccaaattaactaagcgggctttacaatatatatatatgttttggacttaatagaatttttacattaggcatataatcatgaaataaatcatgtgaactatgcaacataaaaactatttctgatctttattatttagtaaatctgtttatattgtaatgagttttatttagggcaaagggcaaaggattggactcgtcagcccgcgaaggaacaggcttagacgggtccttcgcgtggctagaaatcgacagatagttgggacgggtctttataggggcggagtaggggaccaaaatgaagaggtagagctagaaaggactagctgtagggttttttttacaaagaagggaatcacgctgaattgatggggttagagagagagggagagttatttgattttttttaggttttgaaaaaaaaaaattaaatagtaatggtatttttggtaaaaaaatatttttaggttttgaaaaaaaaatggtaagagtattttgggtaaaacaaggagttattatgatagtattagggtatttttgtattagaaatttttattaagtataagaaatgaaattttcttaataatattacagtaaagatagtttgtatttttgtaagaaaaaaaaatttaaaaaaactttaaatctatatttttattattattattattattgagtatttataaaaaaaaaatattcttcaataaattacaccatcgatcgaacctataagagaattttgagatttttttttttaataataattattattatgggattatttcacaaaaa

SEQ ID NO: 330460 - DNA, 1136 bp, Cannabis indica
aatagatgctgcaaaaaaacatgtacaaattgataaataaatatataatttaatataataattttgaaaaatgcaatcatactttttttttttcttggacaatgctcaaccattacttaatgcaaaatagaaactagaatactttgattttatttgcattatttttttttttaagtaaaaaaacgtgcattttcttctatttctttaactattttattatggcattgtttttattagcaaagtataacgcgttataattataagctagatatttaaaaggaattagtaaaataattaaattttaaattattattgtttgagtgttgtaaaaatttgtgtaatatttcaatttttctatttaaagaggtcaaaaaaaaactagaaaatatatacgatattagttttaatttagacaaatttataaaaatacatacaaaaagtattttattttatcatttcattttcaaacctcattcctctattttagcaatatatatttatattttgttaaaatattattaaatatttttaaaagaaaaatatgtccataaatttctatatgtgaaagttttaataaatgttcatgatacatatagtaaaatctattgtcgcttcagaaaatggtagctagtgcttaatattactaattagtttggtgaaagtagtaaaacctcaactaattcggcactatcatatttctcttttacttagaaaagcattttattattgtatagtataaaacagatacagagtcacgtttaaaaaaatattattgccaatgcattattgagatatattatattattttctatttcaatacgtggacactattaattgttttatattctttaaaaaaatatatattatataactaatatattattattatattatggtcaattcattttgtcgttgtcaaaaatgaaatgtattttattgctagatgaaaattacgtggctaaatattagttttatataagttttagtagtttctgtttaaaagttcagtaactaagcaacgacaacaacaatggtagataaatctatatttaagtttttcatattgtaaagattataaatctaaacttttaattttcttgatttgagattttgaattgttctgatttatttgttta

SEQ ID NO: 330461 - DNA, 994 bp, Cannabis indica
ctgtgtgaacggcaccctatcccgatgtacaataaacaaaaatggtaaatagtctcataattacctaaagttttatatttgtaagtggtataaactcaatgtttatttttagcggcataagtactcaatgtttgtaaaactgtaatttttctcaaattttgtctatacagactctgttattgtcttaaacaggtcacatataagacttaaattcttaatcattaagtctagatataaatatgtagtatcagttattttcaaatgttctgttaataaattcaaagtctatactgatgaaactggaagaaaattgcaattttacaaacatttggtacttatgtcactaaaaataaacattaagtttatgtcgcttacaaacataaaattttaggtacttatgccactatttaccctaaataaaaataaataaataaaattgtccctaaacttatcacgatcgtgtcctttacggtataccaattattaatttttttttatcgaacttttacaatttacagaaatttagttttgaaacttattttgttggggtaatctatcattataaattagcaattttatcacttaaattttaataactatcaaatcttatcctttttaaataaaaataaaaaatatttaatatttcttttgttaaattttaaaaaataatttatatcttaaaaataaaaaattatttcaaatgtttaagaattaattttacaactaattaaacaatttaaaaaatttattattatttataaaaaccctatttagatataaaaaaatatattaaaattttaatttgtgtaaaaatagtataagtttgagttttttaagttaagcataatatttttttagtttaattttttaaattagttttatatttttgttaaattttctaaataatttttcttattttgtaagatatgaatttgtaaggataaataaaataaaatttaaaaataatttttttaagtaataatttaagaatttt

SEQ ID NO: 330462 - DNA, 1596 bp, Cannabis indica
aatttttttaaaaaaaaaaaatttaaattcttaattataaaattaaaaagtaaaaacagttcatttttacttttctaattttaaaagaaaaagactgattaaaaagtgttactaaggcacctaaattttgtgattaaaagaaaaaaaaagtgtttttttgtttttttttgttttttgttgtattttttgtttttttaagttgcattccgataaaaaaaaaaacaatttcttttttaagtgcattcccattgggaataaaatccaaaaaaatcaaagaggtttggaggactattataccttgtgtgtgtttgccttaaaaatctcaaatcagtcatatgtgtggatttcttaagctattcatcctgatacgagtcattaatcccatgaaaaagttttatgatgtgaaacaatttaattgtaaaaaaaaaatgcaatcctttagttttaaaaagaagaagagtaagatttattttattttttttaataaaaagtaagatttttgtgcatagaaaaaaaaaaatagttattcaaataatacaacaaatagtcatagttaataataatttagggatttttttaaaaaaaataataagaacccgaacaaaatatcataaatatacttaacacgatttccaaaaataattatcattaccacaagaaagtcgtcaaaaaggcaccaaattatcatttttgccaaaaaaagtcattgaggattcgtcaaaaatgttgttggagttttcttcgccattgaaaaagccattaaagttgttatcactagtgataaatcgacgtagttgtcatcatcattgaaaagtcaccagagtcagacatcgaagtcgttattgaagttgaatgttggaatctaacacagagaaactagttatgtttataagctaattaaaaaatctgacatagagaaactaattacgtaaatcaactaaattaaaaataaacatacaagaatcagaaatatgtacttactcctactgaacttgtgatatacacaatcatcaataatattttatcgcaaaatcaaatgaaagaattacttgatgaaacttgtaataccattgacgagaagcttgcttgagttcataaataatttttttttaatttgcaacccatattctttgggtcactagacacaaaattttctagttgctccatataaattgtctcgtcaatgtcgctattgagaaatattgttttaacatccatctaatgtaactcaagatcaaagtgagcaacaagtgtcattattatattgaaagagtctttcgataaaactggagagaaagcctctgtataatcaatgtcttgtttatgagtatagcctttttcctacgagacgtgtcttaaatctcaccacactacttgtaataccctagaattaggaaatggattagcaaaaccctaattattaattatgaataaatgaggaattatattattatatagttcaatttatgtgaattaatatgatttataacatggtaagaccccgttggtgagccaggggaattttagtaattatgacccgagaagggtaaatgatgaaattaatttaatacgtgcttaatggaactatattattat

SEQ ID NO: 330463 - DNA, 1044 bp, Cannabis indica
ttttttaaattaattttttttcctgatttttaaatttttaaatattcagtggactaataaaaatttggcacgtgtaactttggtacaccgtgacagtccactttagacacttaacaatcaaaatggacggaaggagtgttgaccaaacgattgtagagattagggactttagccataattttttcagtctagatgtttgactacgccaaacttaaaagtttagaaagtttggccacaaattactcttaataaaaacaattcagttaccactaaaacgacaccgtctaacaggtactcgtccaggattctcaggaaataatcaagtgacagttggaaaagcccccacgaacataacctattcagataaattgtatgtatttttatcaaggctaattaagattttttttccctcaaactttgacatgtaccaaatcataccccctaaacttttttggtcattaaaaattccccttgaactattaagattgttgaatttaagaacttttatccaattttagtaaagaaaatctaacatggatgaaagtttagggagcatgatttgacatatgtcaaagtacgaggggcatgatttggtagatattaaagtttgaggagcatgattttgtacataaacaatcactaaattagtaaattgaatgaaattggacaaaagtccttaattttgacaatctcaatagttcagggggaagttttaacagtcagaaaaattcaaggggcataatttagtacatgtcaaagtttagggggcaaaaatcataattaaccttttatcaataacaagaattacttaccatctttaaaagttttgcatttactttcctataattttcttatccataacaatataataatatgacatctctatggtaagcactctagttttgttactatggtaggcatatttttacagccatagatatttaatttaacggtaataaattgatgagtgtttataaatggttaatacttagaatgtattagattattcctaaaattattttttaaataatattcttaaattaa

SEQ ID NO: 330464 - DNA, 687 bp, Cannabis indica
aggcgaaatacctttgtgcatgatcataagctcctctctgataacatggttagtgcttgggccatggattatttatggaaatatcaagatgctaataatgccgaggcagcttctttgggttcgacttctagcaatgcaagtaatcgactggtctcatctgagacggatctggttcttggtgagttcaatctttttgtggatgctggggtttgtgttgagaatcgaaaatagggatgggggctttggtttccaatcgtttggggcatgtcatattctcgagtgcagctccttgctccttgcgcgggtttgtgtgaacctcacgttgctgaagccaaagctttggtccatgagctttcttgctgcgtgcagatggggtatacggtgattactgctttctctgattgtcaacgggtagagttcttgctgtcaatagcaggggcccttgtttcaataagtttggtattgttcttaatgatattaatgatattaagaattctttcaataccatatctctgccgcattgtaatcggtcaaagaaccatgatcctcattctttagcaaaacgagcgttagatttaaataaggctcgggtgtggtggccgagcttgcctactgatttagctgtttaaatttatctatctcttgtattctaatcttttggcttgatggcttttaatagaatctctc

SEQ ID NO: 330465 - DNA, 608 bp, Cannabis indica
ttttttttttttttaattgaattaaccacagttaagcacacaattcataggaatttatcatcttcctagcattatttttagatcaatttaaagtctcacaattgactcattacagttaactaaagacattgctcaaatttaatcacataaatagtcataatttgtgtgagctggctttgtatcttgttcaatgtatttgctatgtaagctctagtctctgtcttttacagagattgggcaaatcatttcaccaagtctacacttcctcccatctcccttttctctcgttctcattttcttgttttttgcttaagaactctgttttatagtcttttaggaggtcaataattccttcttagcgtctggacgaggttcgctttctgagcccgacaacttcgcgtactcagaatgggcttgaggtcccatatctctatgcaatttgggcccatctccttggatgacttttatatgggctttaaccactcggtcttaggctggaaatgtcacgtggcggataagttggggtttggaatcacgaattgtatagggaaatttacatggtatactaacttttactatttttttacaaaaatactgtcagacagtat

SEQ ID NO: 330466 - DNA, 577 bp, Cannabis indica
aaaaaaaatagaaaaagtgaaaaaaaaatattttaattatatgttttttcggattttaaaattttttaaattaatttttgttaagtattaatattaggtgaaccaataaaatttcactacttgtacacttgtgtacatcactgtggtagtctactctggcacttaacaaaccaaaatggacagaaaaatcacagagcaaaatgattatgtaaattaaggagtttagcccctaaaatttcaatctaccaaacttcaaagtttaggaaatttagcagcaaattactcataaataaataaattctcaataacccacaaatagaaaaactcagctaataaataaagtttatttattattgttaaattatttctctattagctgttgttagtggtggttcgtgtaaggccatttcgtgtataatgcaaatagcgtagtccatgcactagttacatctgttactgtaggtgttaagatgtggattgatgctttttttagattttttaatgcttctataacacttaatttggttcgttaattagccttatataaattcatgcttttcttaaaaaaaaaaagaaa

SEQ ID NO: 330467 - DNA, 1030 bp, Cannabis indica
aaaaatgtaaaaaaaaaaaatctttttaaaacataaaaaatgtaatttcttttacaaaaaatagtgtcttatgtaattattcatttaactaatagaggagttataattacatcttatagagctcgtttagtacaccgtaatatattggattgtattatattaataattctttcatacaatattatgtttggtattgacttgtactaataggttatgtaaaattataaattcttcacaataaactcgaccccaacgtcaaccgcaacctggactcggactcgaacccgaacccagacctagattcgaaccgggaactagaccctggacctaaacctggaccctagatcccaaacccgaacctcaaatcccaaattccccaaatttgaaccaagacacggacccatgatccaaacccaaatctcgaacctagacccgaacctcaaacccaaaatcgaacccaaacctagaccctagattcaaacccgagtttgggattcagggcggaacctgggtctgggtcctggagcccgaattcaaacccaaaggctgaccgtgacttagacctggacctcagtcccagtcccaaatgggatcaggttcgggattcgggtctaggtctggggtccaggtcctagtcctcgtcttggtccaggtttggggtctgggtttgggttcggtttcggggttcgggggtcggggtttgaggtctgggtcttggttttgggttcgaatctggagtctgggtcgaggttgacccaagacccttttgtaaatattacaatacaagctaatacatgtcatttgttatgtatatattaaataatatgactaacattgtattaaaatttatgatcgtaataattaatataatacaatattttattcaaacataatgttatttattatttaatataatacgacatttgtatgatctaccaaacgagctcatataattataagtacactctaatattttaaaaaattaaattttaaaaatcactcttaatatatatatttttaaatttttttc

SEQ ID NO: 330468 - DNA, 1379 bp, Cannabis indica
cacttctttacatgggcctttgaatcttccatcatggttggtcagaaatatccttgccttagtattttctttgataaactctgccctaccgcatgattaccacaaaatccttcatgtacttttgacaggagtcgtacaacctcttcttttgttacacatctaagtaatagcatggagaagcctcttttatatatcacaccttctactatgatattgtatcgcgcaacttttctcatcatcttttgagcctcgtttctgtcatttgggagttcttcagcgttgaggtaaactgttatgggtgtcattcagtttggtgtcgtgtctattattttgacttcttccgtgcagttgatgctgggtttttctgagaattggattaggactaagttggccttatctgccactgtactgctcgcaagccgagccaaggcatcagtagttgtgttttcttcccttggaatctgcctgagggtgtagcccttgaactgtgtaagcatgtcttggatcttgcttggataagccatcatcttttcttcacgagccaggtactctcttgaaacttggtttaccactagctgtgaatcacgacagacttcaatgtactcaacgtgtacctcttgagaaagctttaacccaactatgagtgcttcattctctgcttcattattggaggctttgaacccaaatttgattgcgccatgcaggggttgcccccaggtgtgatgagagcaatttttgcactagaaagctggtcggtagttgatcctaccacatgtaatttccaaataggtttgtctttattctcttctggtagagactgctgtactagctcggggctatcctttgtactgtctttctctttacctgtacattccaccataaagtccaccaaagcctgtcctttgatcgttgtgcgaggtcggaagattatttcaactgacccaactctatggcccatctaagtaactgtccagaggcatcaggcttctgcgaaacatggcacaagggttgatgggtataaacccgaaaagagtgagcttgaaataaggtcttaacttccttgaggctaagatcgggcaataagtaagcttttcaattaaagggtattgaccctctgcttcaccaagtcgcttgctgatatagtaaactggatgttggacattgttttcttctcttatcagcacgacgcttacagcgtattcgatgacagccaagtatattcccaattcttctccgtctaagggttttaagagtacgagaggccttgcaagttgtctttttagttgttggaaagcattctcgcattcatttttccgttcaaacttcttatttcctcgaaagatgttgaagaagagaacacacttgtctgtcaactttga

SEQ ID NO: 330469 - DNA, 1198 bp, Cannabis indica
ttaattttttttttctttttaatacgttcgatatggaccttgtttgtttgtttatttaactaaagataattttcttttcaaaaaaataaagaaaaaaagctaaaggtaattttgaagtaaaaaaacaaaaacaaagaccgtcaaaataataataggcttttagtaaacaatttatttatgatatggtaattatgcaaattatagtccctttagtttgttgttttgtggttgtatagtagagtatttttatttagtgatgtatgtaggaagaggagattaatgttatgatgcaggcaaaagataaaagttggttttatatatatggatggattatatttaattttatggaatgaatgaatgaagtgcaagaatatttagagattcacaattatctattcacatgtatgttttataatttaacatatttcatttcatatagtgatatagtcttgtgttgaacattccttccaatgttgtcgtctcatctattattatttattgctcattattacataataattaatattttttagatatctgtctgtctgaccatttatttgtatattggagtttcgaggaggagcaatgagttatgagatattattttgtttgtcattgtgattgtgaataataatctgcatttttcatttcccacctattatgatatgaaaatcatattgatatttcaataattgtattattatttgattcatccacaatgtttcttttaattatttatctccatcgtcccataataaaatactcttactcatctatatatatatatacatagaaagagatttgaaattcaaatttgaaagacaaacaacatgaaatcattttatttagtagaaagagagagggttgggtttaactttaacacaagggaaataataataataataataataatatggtgaaagtgagaggcatgaatcgatcaggtatattatatattataatttagtatttaactttgttatttgtgttctcgagtggtagggtaatgcagtgctttttggcttttgcaaaatcatccttttttacattattatattctgcctttttttattttttattttttaatttcttgtggactccacactgtttttttttgaatggtaaaatgcaactttattaaccattaaaatccgctaccaaggaaggtagcaagtcgaatggaacagactccatatcg

SEQ ID NO: 330470 - DNA, 1925 bp, Cannabis indica
tctttgggtttgaccaagaaatcctcaatctccaccaggtcggtcccatgtctacccccgcagctaccggagcgaaatcttctataaatgggtccaagaagttggcaaccttggaggaggttatgaagggcccagttatctaaaagaagtttgcgtgtcgttccaacggttgggaggcagacaaacttcattcgacgttgacctacgcccatcaattggagaagattgtcactgttgttgggatcaagccctccaattctggagtttaccaccatcttcccagggacgaggagactccacaccataactacaatggctttgcggcctagagttagactcatctgatgtctagggccatgctccccctcaaagactattttattgacttctttgttttcgccgggccctcaccctatcaattgactccacaagcctaccgcctgttatcaggcttatttttttatgtagccaggaactgggctccgcctagccctgccgaaattttatacttttacaaactactcttagtccccaaaaagggggacaagtttaaggatggtttttacaaactccaggcccattcggccaatgagactccgataccctttaatttttagaaaaatgaaaaggagtatcgccacaagtttttcttctcttctggattcaaggcctttgagtgtctgaatctgctaacggactgggttaggatccccccatgcatcgtactgcccccacccaacttttccttaaccacgcaaaagtttttgctagttacaagaaggaagacttgaatgtgggggacctagtaacaacagtcaacttcaagagggccaagctgatcctaaagagccaatctgttgatgatttcaacttatccaagattctttgcccaaatgttcggaatcttggaagtgagaaggcgctcagggcggacatcattttatacgcaaaagataaatacaacaagtatagatacaagagggagcaggagctggtgtatgctcacctgtaggctgcctctgggagggtctcctgagaggaggtaaggaaggagaagacttcagtctggcccaaatttctgttcttagttcccaactccggagcccctggtgcaagcacctctggagcctgtaagtctccattgaattttcacttcgttccttctgtccaagactatgctaacttaaggccagtggaatttgataaaagattatatagcttttggatgccccattcccggtgcggtgataacgccaagggtttttatttctccagtttaagtcatttcttgggtcggtctcggatgggctgtagtcctcctataccaatcattttggatcattcctcctacatgactttgagttggtttcttccttctgatagctttttaggagatgacgacaccagctttttaatttataaatttgctagggctaagttagatcaccggggtaggattagtctcgctgcactgtactttcacttataatttttagtgttattctgacctcttgctaattttgaatagcgaaacccatggaaggtcttcttgacgccattgctcagactcatagccctgagttagacatgctggagcaccctcgagtcagtgtgactccgggaggacctgttgtcgaagctatcggaaaccaggaggtggtcttaattgacgaaaaggaagaagaggtggttcctcctctcgatcgaaagcataagagcgacgtttctgagtcggagccttcaaaaaagttgaagagggttgacacccccagccctagtatcgatttagggattccttctgaggttgacgagtatcttgtgcccctaggcatcattctgactcctgcccattgtaaagcccgcttagttaatttggaaattatcagttggttatgattaattaagaaattatttatagctattta

SEQ ID NO: 330471 - DNA, 488 bp, Cannabis indica
ttaaacaacatacttgtgagtagatctaagatcctggtaaaataaattccaacattttgtactttcgaactaccatttatcctaatcaaaagagctttatgatcagaatggtaaaaatcaagatgagtcaatattgtttgtggaaaaaatttctcccactcttcgtttactgttgcccaatctaacatctttttcaaactttcattatttgcacatgtatatttatctccttcatattgtaatagatgtagttaaaagaactctaaagtgtttcgaaaagtcttaatttgtgcttcacttttgaattctcttttatttttgtcctgttaccctaaaatctaattaaaatcctccattaccaactactactcattatatactaaggttgtacacatgtaaaccacccaaaccgaattaaaaaaaccgataaacattacacaccgaaataacccgaaaaaattacaaatcacccaatctgttaattgggc

SEQ ID NO: 330472 - DNA, 592 bp, Cannabis indica
aattattgattggaattggaattacatagagatccccttttcttctcacagtcatgccaaaaacctcagacatatcaagattttcatgagtgatcccattgggaagtttccaatcaaaatggaacaataattgtgctaaaataagctcaatatcagccatagcaaatgatacaccaggacacattcttctaccaccaccaaatggaatgaattcaaagttattccctttaaaatcaattgaactatcaataaatctttcagggtaaaacttctcagcttcactccaatactttggatctcttcctattgcccatgcattgacaagtactttagtttttgcaggtatgtgatagccattcataacacaattttctctagattctcttgggactaataaaggaccaggagggtgtagtctcatggtttctttgataaccattttcaagaattttagctcatggagaattgtttcatcaacattacctaattttctttcgaacactacttgtcgaacttcagcttgtgcctttgccatttcggtagggtttttcagtaattcaagcattgtccactctacaactgcagaaaatgt

SEQ ID NO: 330473 - DNA, 1825 bp, Cannabis indica
ccaatactaaaaaatataataaataagcaaattgaaccaaaaccttcaatggttgtcaagagtaaatcaatttaaaaaaaaatatgtaaagatgaggtaagaattttatagtagttcactcacgtttaacgacaatagattaagtacacttttttttatgcaaagattaagtagtaagtacactttagattgtattaatttaatgttgattgctgaagaataaaaccagaattatattcccaaaacttattctggagcgattacaatgagcagtatgttgtttctttctcttatggtttctaaatacaacagcagttagaatgagtgatatttgaatgagagtgatcctcttttccacgcctaggacaaagctatttataacactcaagtatgatgagtgattcccttacatttagggagataccaaactatctcgtaccttatatttcaataataataaaaacaaagcataaaatacaaatagttttttatatgtggagttggttatcatttgaaatgcttttagaagcttccgtttcttggaaaacatgtttcatatttgaacagtggtagaaggactggcactgttcgcatatgataagaattatcccccattgggggccttgatgatgctttgatcaaaccttgagacttcgtcgaagtttgaatggctttgggcttccgaattttccacaaaaccctaaagtagttaatgtacaggagcaagggcataagtttgaccttgcttgtgacctagggttttgtttccctccaattcatgttacacgagcaaagacattttttgggaccttgctcgtgtacctttgtccttaactcatgcttacacgaactacgacatttgttgccttagttcatactcttggttttcattctcgttctacacgaacaatgccatcttggaggcagtgcttgaatacattgatgtatccctcattcctcacacgagcaaagccatctcgggggcaatgcttgtgtgacttgatgtatatagggtttggtactccaacaaggtcaaattaaagtgaccttattctagtttctcctcatttatcttcaaaaagacacgagcaagggcatgcactgtgccctagctcatatggctttgtgttaccattgatgtactcaagcaagggcattagaattgcttaagttctacacatttttttagctttggttatgccattcttcatgttttgaccttgatatttcaaccaagtaaggtttggtaccttattggaattctttcttggtatttagagcataccacacgagcactgacttggtgagtcacattgcttgtggccagtggtattagggtttccaattgattaatttaggcagtgcatttgactcaaactccgcttgaagtgtttggaaaagagattacttgggtaaatcctagggttacacaagcgccgacacgcctttgggaagtgctcgtgtatgccaaaactatttgacatgaacattgacactcattcagaaaatgctcttgtataccttgtttatttttcacacgacactcgaacatggtgtcatttggcacactattcgagtttggctttcgtttcttcttttgttgtttggtccaagttttattgttgactacttgacttttataattttttgaaaatcaagtacaagttagaatctctgaatgagtggatcttacataaagactaaggtcgtcttagctcaacgttgaccttggctttaataaaatagaataaattgtctaatgataaaaaaatgttcttagcttatttttttagtacttcaaatttaagtaaaagttaaaaaaaaa

SEQ ID NO: 330474 - DNA, 1681 bp, Cannabis indica
attttgaaattatgtatatagttgggggtatttatgtaaatttattttattgagttgcattttctcttagctatatatgttgcatttttaaaaggggatgtaagaattaaaacttttaagtttttcaccatattggctactgttaatggcaatcgatgataattttgcagaatgagatgcatcggctacagaaaagagacactttaggaatgcatataaattggtgaggtttcatttcacatttgccattaattattatgcacatataaaacctagggttggctattttcagattttgaattgagaattggactataaatttgcattatgatggtcctttactgcttaagtttgtgtgttagtcagaatgacaacactttcacagattcttttcttttgtggaaagacattgttgctacctagctagtaaagagataggtgaaagactaccaaatattgttaaattgtaggattcgtaattttgaagagagtgcactactataattatggtctttagaggcagttttttcgagtcattatataaaaagggaagctaaaaggtgtgaaaatacctacctggtttgaaatttatatttagaggcagttttttggtaaaaaccgtaggtatagaatttaattatatctattttatcggttggggttggggtaaaattaagagttttttattaaccctatggcatcagttatttggtattaaccgacgccataggtgcactcattattcgacacgtgtgcacctatggcgtcgatcaatactaaataaccgacgccataggtttatatatcagaccccaaatagtatcgtcttctccatttcacaacttattgaacacgaagaacagccagccatagcagccccatacccacgaaaaaatcctcgccaaccacccataaaaaagcctcattctcctcattttttcaccattttaccctatttttgttttaaaatcttttattttcaatacctaaacctatactgtaaaaaagtttgaattttttcccttctatcactataactgaacctattataaaaaaagtggtggtataactccggccacccattttaatagaaaaaatattgaatctcaatgtccattaaggtataaacatgagttctattcattttattaatgtacattgctatattttcatttttgttaatttgtttttgggtattttttcattttattaatattatgttttgtgtgtgctataggtggccggatttttgttgcaatttatcgtcggattgcgtttataaagtaaatatttattaacttgatatataatatatatgtatacattttgtgttttattattgaatatgtgtttatatatattgtgtgtatattatttgtgtattttatgtaattgtattgtatatatatttattgtaaatgagaatgaggtagtagggatttcattagtttagaaataaagtttttaaaattatgttagtgtgatatatagttgattatggaagaggtttcaatggttatatttttattgtaaccatcatggttacatttttttaagtcattggattactattaaatggttgtgattaatttagaaattaaataaaaataaataataaataacttgtaacctgaaagtaacctaatcatttatttccttataaaattttaattaagattaa

SEQ ID NO: 330475 - DNA, 860 bp, Cannabis indica
tactttcggtcatagaactgtagagccatcccataaggagttggtcattgataatccattgttcaaactcaggattaacttgaatttcttctctgatttctccatcgacagtggtgatttggacaggcagaaatttgatagggcatggttgtgtatcaaggagatggccatgtaatctatggccacggacgattgtggaaaccatggttttccatagagtgtagttgtttctgtctaattttaggctaaatggttgattcagggtagtgagtggctgatggtagggactggtagtttgtgaaggtaagggttgagtgttatttctatttgttgttgagtcgtgcacagcagatccttcagaggctgctgtgggagctggagtattgttttcaggattttggggggtcggcatggctaaggccttttgttggctctgataccaagcgaaaacagagtaattttgggtaatgaaatctcagctcatttcaatatgagccagagtcatgatatttatatataaattctggtgtaaaaccagtacaatgaaatacagccccaaacagctattccttacagctgttagcaatacataggtgaatattctaacagaatgatttcctaatcattacaaagataatgactaattaataacagaaggtgacagcacaccaaatacaatatacgcacgagtgatattctacctaatatttgggctgcaatcttgtacagcagaatacagtagcaattggtgtcacagcacctgtcattccttaacataatatatatgatttggtctcgtttatatatatctattctatataaagtgtgcctatataactgaaattcttggtttatgagaa

SEQ ID NO: 330476 - DNA, 1148 bp, Cannabis indica
attgaaaaagcactgtagcgtgccttagcattagggcgttacaatattgcacgtcgttcataaatcaattcaaaataacaataaaatactattttgccttgtctactttcttcaaattctttttcacatatattttttaatcattcaatgatgtcatttttaggtctacttatttttaaatgaaatttctaatatgatcattatgtcgttcatatataatacttgtatgcatttatttattttattttttttgctaatttaaaaatttcataccaaagaaaaactaaacacaaagtccatggtggagagttgtaacaccctactagtttaggcgtgcgagagtgcttcttataattactgtgcaatattttctaataaaagagtttattaaaatgtgataaaatttaagttttaataaataaacataaactgtattgcatttataaaatctgggatctcgtatctatatttttcaactatacataatcaaaagatgtcacgcagcgactacaaaatcgtgagccctagttgtcccgaagatctaacactccaggtcgaactgtctcgatatgtacaatcttcatccagctccaaactcattatcattcaacaacatttttacctttaccttcacataatatagcatttatgagtctacaaactcagtaagaaaaacataaaacctaacatataatcgacctgcggctaagcacccatagacctatcaataaagtcattaaccatgtagaatacgtataactaagtctcgaacattcttgatcatagtacaattgactataatatcacatacactcagtagtctagttgtactagtgttggtagcatgaatccatactataagtacaactagccataatataccatatgcacacagtactctaacgtattagtgttggtagcactagttcatgctttcgaaagtataactaaccgtaataccacatgcacttagtaatctgtcgtactagtgttggtagcattggttcatactttctgaatttctaaatacatatattcacgatatcaagatggaattatatatacaccaattatcattgtaacggataggtcctacatctggcaaacataaacatgcacatatgtatgtgtgttgggttttgtgccct

SEQ ID NO: 330477 - DNA, 766 bp, Cannabis indica
acaaactaaccaaaaaatatggcacaaactataaaaataaggcacaaactaacacaataataattataaaatgtaatctaattttaaagaggcaataacatattaaaagagtttacaaaattaattaacaaaaaaatcgctcgaaattatagtaatagctgacaatatcaattaaatatcgaaaaattagcttaataaattaatggccaagtaataaatttacaagaaaataatataacaaccatgaaagtaagaaataaatctatgaggaaaaaacctaaaaggaaataaacttattcacgtattaaaattagccaaaataattgcaccaaaaaataaatatttaagaggaaataacccaaagataataaataataataatgtatcaaaaaataaattaccattataagaacctatttaaaaaaagattcgtactaataaatattattaatactcatatttataataaaattaaatgtaatatagtcagaacagaagattatatattaccataaatatatatttaagataataccgctatcataaacattattattcttattaaatactaataaaagtataaaacaaaataaaagtctaataaataaaacttaggggctttttcatttttacactttaaatcagtttttttttttttttgtcatttttacggaattctacataaaaactcctattgcaactagcgctgcaacctaaattgcaacaaaaaatcgtatagaaactcttattgcaactagcgttgcaa

SEQ ID NO: 330478 - DNA, 755 bp, Cannabis indica
aaattttgggcattgaaactccccccaaaaatgaaaaatctggtgtggagagcttgtcaaggatgtctctcaactctgattcaactaagaacaaaacgggtgaatgtgtcaacaatctgtccagtttgtaatagtcatgaggaatcaatttatcatgcacttgttgattgtccagctgcacaactctgctggaacagagagggaataggtacggggctgcaatataatgcagtttttttggactggtgcatctccaattttctggtgcttgattaagatcataaaaaaagattggttgctctttattggtcaatatggaatgcaaggaatgacaaggtttggaacaacaaattgtcaagtgcagaaagtatagtttattcggcaaaaacttaccttaatcaatggcttgctgctcatagttctaatgtaatctacccgactcctggttttgtgctaggcgacggggctgagcagtggcagccaccacttgaaaatagcattaaggttaatgtcgacgacgctatatttgctgacacgaatcagtttggggttggctttgtggttcgtaatacacaagggctgcttattgaaggagttaccaagctttttcagggatcggctacaccagaatttgtggaagcattggtggttaagaaagctctaagttggattaagcgaaatcgatcttaccaagctgtccttgaaaccgattgcttagtgtttattcaagcattgcgtagttcaattgaaatgat

SEQ ID NO: 330479 - DNA, 646 bp, Cannabis indica
catggatggccgtagtggtccacactacatgtgttaaaaaattaaaaaatatgaagaaaaacaaactattaattatttaaggataataaagagaaaagtatagttattaaaaagataaagagtggagcccggccccacttgagtcttgagtcttgactatgatttgttttgaagtttaaacttttctttttttgttattcttttccaaaatacaaaagattttttttttcttttcatattatagtaaaaagagcagacaagacacgtacagaaatagttgtaatttccatttaatttaatcttgtaacaaaaacaaaaaaaaaaaatgagagaaatattaaataattaaaataatatgtaattacttgcgtaacaagatttttgcttttagtagtggataatataagttaaatattattttggattttttgttttgtaaaaattattatttgaattttttgtttttgttaaatgataaaatgatctttgtattttataaaatggtataaatagattgaactgatattttgtcaaaataaaatttaataataatccaatctaaatgtgttatgacaaaactatttatatatatatttttttttatctattcttgttaggaattgtcttcaagttgattatattaaaa

SEQ ID NO: 330480 - DNA, 640 bp, Cannabis indica
aatttaacatagatgaaagttcagagggcatgatttagtacatgtcaaagttcgagggacatgatttgatagatatcaaagtttggagagtatgatttagtacatgaacaatcactaaaatagtaaaattgaatgaaaatagacaaaagtccttaaatcaaacaatcttaatagtttagggagaatttttaacggccaaaaaaaattcaggaagcatgatttggtacatgttaaagtttaggagttaaaaatcctaattagcctattttatactacatatttgcggtaaaactcatttaacatttataattgctacgcatataaccctaatgaaaaaaaataatggtaaaagtactttattttacgattttataacaatcatatccctttttagccattaagtgtcaactctaatcacatggcgatatattattagactatgtattaaataaactaaaaaaatatgtcacatgtgtttatgagttggtgcttaatgggcttaattggtacttaatctttaatataagtgttatacctactttattagtataagaccttttgtgaaggtgtctaaaaataaaactattcattattattgtaaggctaattaggatttttgctccctgaactttgacatgta

SEQ ID NO: 330481 - DNA, 1025 bp, Cannabis indica
ttaaactttttagttaaattacgtagttttaaaattaaatacaatgaattttaatatgtttataataaaacttagatattaaatgaatttttaaaaaattatttaaaaaaaattaaaataaaattaaactttttttagttaaaatacttaactttataattgaaaatctaattgtacttggaatagattttctgtccaagtattcggccagcattgactgcaaacgtaagatggtaacttttcagctagagggcaaagatctatttatttatgtttgatctgttcaaggttctcgaatctcaattatttcagttttaaaggctaaagatttattacatagtggatgtgtaggattttaagcagttgtaactgactctagcaaacctgaaacatttgggcatgaggatgtcagagttgtatgagaatttcttgatgtattttctgaggagttatcgtgattgccacaacagcgagagctagactttgtaattaatttggcacctggggtaaaacctgtttcgaaggcaccatataggatggctctagcgaaacttaaggagccgaaaatacgacttcaagggatgctagatctaaggtttactcaaccgagtgtattgccctagagagccccggttttatttatgacaaagaatgagggatccctctgaatgtgcattaattaccaagaattaaacaagctgacaatcaagaacacatatccattgcccatgattgatgattttttccatcagctctagggaaagattgtattctaaaagtattgacttgcattccagttatcatcatctgagaattcatgaggaagatattctgaagaccgcatttctgaccaggtacgatcattatgagtttttggtgatatttttcgggttgacaaatgctccagcaacctttatggatcttatgaacaaagtattcaaggatttccttgataacagtgttataatgttcatcgacgacatccttgtgtactctcagacaaaagaggagcacaagaaacatct

SEQ ID NO: 330482 - DNA, 1144 bp, Cannabis indica
aatattttttttatatatatttagataatccttaaatacttaaagtaattttaaaataatattgatgtaatacataggatagatatagtatgacacatttcattgtagtaaaattaacaaatacatcacaaatattgattcaaatacttaatattagaattttatcagtttattttaagtaaaatagcaaaataaaatacaaaaaattgggtgaaataggtgcataacatgatgttaatatacaaaagagtattttttttggacaaaatggttcgccgaactaccgtaggctgtttaggatgcggagaacacgaaaaaatacccaagttcaaaaaaaaaattgcctcaaacggacaatcagatcaaaagttattaatgttcaaagtttttaaaaatattcatgcaaagtttagccctttctttaattttttccatttattctggtccttaaactattgttttattttattggtctttaaaaatttaaatgtataacaatattaaattacataaagattaaagtatagcatattatttattatttaatatattaattattattcaaaacataacttaaaaaattataaaaatgatactaattaatatactatacaaaatacaaccacagtaaaatataaaatattaataaaaagatagctaatatacacaacacttagattaatgtaaatgtgtattatttaacttttcaattaaatttttatttatgcttattatatataatttattcttaatttaattatattaataatgaaataatatatataaattatgctaaaaaataaaattgtgaagttgaaaaataccaagattctatggtgtaagttttttcataacaaccgacgccatagggtccctatggcgtttgttgttatgaaaaaattgatgccatagggaccatatgacgtcgattgttatgaaccctacagcgtcacctaaaagagcatctatagcgaatttaatttgccaaaaccgacgctaaaagcctttaaaaattacctctaaagcccaattttgtattagtgagtcaaggtggagctatgggttttgtccattaagattcaaggcggagcagccgaccgtcgtggtctggaatggtggtctcatcgagagagagagagagaga

SEQ ID NO: 330483 - DNA, 638 bp, Cannabis indica
ggtgataaacttcccaaatctggctatgaaaagtatcggaatgacttttccaaggttaatgcttacccgttcttaactcgcctaacccgtaaaactatcacctctgtctatcctaaacacatttcacagaaacatttatcccttggctctgctcctcacccgaccctactcactaatgttgaatcctcatcacaatccatgcctgagaaatacataaccactgctgcccctgaacttccctctccatttccatccttttttcaaccttcattacctattaatgcaaatgggcctattgatgaacagccagctattcattgcccaaaaacatcttctccaatctcagcaattatgacctctgcccaatctacacccgtagcaacatatccccctgcttcatcagtcattaatctcactcccaaacactcacccatctctgctagcatccccactactgatgccatagccacttccacacttgctaaagggaaagctgtattgattaatgaagatatctcggcccaggggtcttcccaatgtgtttataaacgacatgtcgaacctgaaaatttgcgaaatgttctcaaaagatgcagaaacaatgttccatctgacattcatgctgaaggctctccatc

SEQ ID NO: 330484 - DNA, 845 bp, Cannabis indica
attttgaaaaatatcatattttttctaaatgagagtcaaaaatatttttttctctatggccaattaaatttcagggccggtcctggctatagccaattgattatgatattgaccaacacatatagcatctttttaacactagacgctaatatatacagagagaaaatatacatctctgggctaatatacaatacaatacaagaaatattattattattaaacatttcctagccccagcactagatttaagtcaacagaatgcttcatgccaagtcatgagtgattgagtgccatgagaataattacattagctagcacatgcacatgcatatgtatatttaatatagcctaatctctttcttagaggatacattatacatattattttattaagcattgccattttacaccttaaaatacctaatattacaccaatgcatcttaaagtattcagtaccacgtcaatgtagaattcagtatcaaaatgtactaaacgcggtatactatattttgtgagaaatgctaaaggacactagtggtatctaacaccttcttatgtgtcaatattgctattgcatcaactaagtatcaggtctcatataatttaatataatagcttttagaaagtatctctagccaatcacaacgcgacatgtcgataaggtgctaggcaccactagtacctaatagcaatgctcatattttgtagtactttgcgcctctgtcttatcaacatttctatattctaatatatttaacatatataccacaataaatacctgttatggatacgttatttaaatcaaacgaaaatttacaaaaatactagaatttgaattaatttt

SEQ ID NO: 330485 - DNA, 712 bp, Cannabis indica
taaactcttatgtgtttatttcattgttttagaattcatattaggatgttaatcaaacatacttggtagtaaatctagatcctggtaaaatatttccaacatcaccacccccgtgtccatcatatgggggtcggggtgtatcaccccaagatcaccccatggggggttggggtgttgtgctccgtgacaaccatagagcaacttcgtggggtggagatgattgtttgttgcatagtttttggatcttctatagatgtttccatgtgttgttttttcttccacacttagtaaaaattttaagtgtgtaattgtcattgttgtttcttccatttggatacatgaatggttgttccatcgttgtaaaattttttttggttaagcactatgaatgttatgcatatttcccttcctcttttttttattcgcaaactagtaagtgagtccatgttggatagcctactagcattactcggtgtactcatctccccgctctttctttttttgcagatgcattatggcgattattggggaggtgaacaccgagtagatgatgatcttcttcaactattattagaagattatcccaagtcatccccgcataactcgcatagggacgagagatttagtagtgggtcggagacgcctaactaccttttgttggatatattttaccacgatctagatttactaacaagtatgtttcattaacatc

SEQ ID NO: 330486 - DNA, 1085 bp, Cannabis indica
ctcctagtccacggggccacgcccagagaatgaaatttattagatgaatcttaagcgattacaaaattaaattgacttatacaaataaagactccctctttgaatttgttgcaaccgctacaacctgttcttctaatcaaatttcaaaagtgccaagaccttgaactcccttcaaatcgtagcacttgcacacttcatcttgaagagtgactcacatgcaatcttcctctggaagagtgactaactcgcaatcttccttcaaagagtgactaactcgcaatcttcctcctgaagagtgactaacatgcaatcttcctcccaaagagtggctaacttgcacttttcatcccaaaaagtgactcacgaacaagacatcttccgaagcttgatgaacaatatccaaggtgttcaacctacacaatttcaataagaaacaatatagaataacacaagaatagaatactaagaacttgttggacttaagtttttcactcatcaaagaaaaacactctctaactttgaaagtaatttagaattgatacatcaagagagctaatcaataccatcgacctaagaataaatttatacacttaagaaaccccctaggccgtggtcaaccaaccaagaagaaatcaagtcaataaatgaaaatcttcccaaataggaaagtcaaaatttgtttaaactgacagccagtctattcaaacgggtacattgaacctggacaaattttcagcaaagtttcaataaggttaacacatttatatgtatacatatgtgacccagtgggagattgtaagaaatttattggggtcacaattatatatataaaatgtgtgttgggtcgtcaaataaataaattaaatttatgtggtctattttagaataaagtttgtgacttaagggcatgattgtcatgattttaatatgtggatactataaagataatttctaattagatgaggggtaaaattagaaatagtaaataaagattaattactgttttatcagttattaataacaggtattggtccccaatttgtatcgtatcttttcactcttgtatccccatcaccaagagataa

SEQ ID NO: 330487 - DNA, 591 bp, Cannabis indica
caaaatagtatggatcatccagggatttacatttggtggttctccagggatttaagtttggctccttttgaaattggtgaattataattaaatgagcatgataaattgattgatgcagtgtcttcttttttcactcttctttccagtattcattttattccaagaaatgaatttctcatatttattcgtttgttacagaataatcgagatttctgtaattatttgaattttcattttatgttattggaagcttagtagaagattgattctcgcaactaatagcatatagaatagattttgcattctttgtgttcaattgcttccctgggtcttgaaacccaatccaacgctcttctagaaacgatttcctccctttccaggtctcttaagaaaaacccaatttcttggagcttagaaaaacatttggttgcttaagaaaagccttctctgtgtgctctgccatggctgcggagtgtggagaggtaggagacgaggataccaagtgagaaaaatattaataaattaaagtgttgaaattaattaaaacaacaattataaattaatattttttttaattataatatattcact

SEQ ID NO: 330488 - DNA, 718 bp, Cannabis indica
aaacaaatttttatttttcttttcgtatattggaacgacaatttattttatttcatatagtctaccattatatatgtcaataaacttactagtttctgtttgttgaacaacattttatattttttaatagagtaaactataatcaaacataatgatatacgccaattaattttactagtctatgaagcttccatatattaataaatgattctatataatatattaagtacataatacatatttaatttagtcacttatgaacttatgatcataaaacgtgaattatatataaatgtattccgattaatcaacaagacaaaaaacttataatatagcaaataatgtacaattttaggactcattaatttaaattccacctataaattaaaaaagaattacaaatttatatctcacatataacctaaactaatcaaccaattataaaaataaacttgagtcacttaattaaaataattttttttctacttttaaacataaacttgagttaattaactaaaataaagtttttttttgtaaaaaggtaatcaatgagcatttaattagtactataagcaactatatagtttatttaaattataatgacagcgataaaatatgtatttcctacatatcaaaatgattaccataaaatgtaggttgtgatgatatttaggggtgttcattggatcacatcaaatggatttggacccatccgatc

SEQ ID NO: 330489 - DNA, 788 bp, Cannabis indica
ttttggattctttatttgtgtatatgctattaattttcatagctggttatcaattggaattccttaaaatggtaatggatggttttgactgccacacatcaaaccaatgagaaaactttctcatccttttctctcttctctttcattatttgcttttctttcatctgtttcaaaaatccattaacattacaatatattttctgtgagtattttgtttatcttgcatgatttgtgtcagagtagaaattttacttctgagtattatttagtttagttgtaagaatattagtaccggaagagtgttccttttcgttatttaattttgttttgttcacttttaaccactttctaaatgtactattcatgtttgtttgcagaggtgagaatccatcaagttttgatcttggtgaagttcttgttcttcagcctcccaggtaaaactttatatctctcattttcttctactactcttgatttggacttatttttatactttattatttggaaatagttgatacttgatgtgtctattttttgtttccttttgttctttagagtggaattcataaagtaataatagcagtgaaattagacttaatttttggctctgaaagcatcattccaatagttaagagtcagaaaatctgtaaaaagtatatttatattttaaactttgaactaacacagaaataactgacatttcataacagaggaggttagctgttataaaattgattgtaacttatgtaattaatagattccttcaaaactttcataatctcatgtat

SEQ ID NO: 330490 - DNA, 1057 bp, Cannabis indica
aggtaaaataaacaattttataatctcattgggcaaatgattctttcttagaaaagaattaaaaaaaaaaataagaatagaatttaaacatattatcgatgacttttgatcagacgagcttaaaattatctatgtaagtagtgactgaggcagctacattcgggaatagttttcttaaaaagggtattagtgaaaaatataatgtatgaggataaaaataaaaataaaaaaatgtaaatttatagagataaaattgtaaataggtaagaatatacatatgtatctataaataaaaaaaaataattcgaacaaatatataaaatttaatttataaaaatttaaggaggcacattgatcaagagatgttggatatgaaaatgaatgatttgataattttttgagaaatgatctttcacatctctgacattctctacatgtgtcacaatatgattttgtaaaataaataagatttatctctccgaaaattcttttatagcaataatttgatcatttatttaaataatttattgatataataacaagataatattaatctaatccaattcaagaatcaagataaaaaataaatatataattagtaatttaatataacttctgtatatgtgcattaaaacaaattaaattttagtgtttaaagtcattgtactatagttataattgtaactcctatctcacgcaaattgttataaaataaaagaaaagaatatatggaaaaaaatatttacaacaatttgcataattcaagaagagaatttttgcaattgatgagacaaattgagagaacaaaattgtacaaaagtgatagttgaaaaagcaaaaattatattttattttagggaaaatactattttggaccctctgttttgtaaaaattactaattggacgttttgttaaatgacaaaatggaccctgtattttttaaaatagtacaaataggaccctgaattcattttttttgtcaaaataaagtttaattataatccgatctaaaagtgctatgataaagctgtttacattttttgtatctgttcgtat

SEQ ID NO: 330491 - DNA, 638 bp, Cannabis indica
tatatagggtactaacccaatgaatgtacaaaaattttttaaaacataagacaaataaataagttcaaatatatattcggtatatctactcctaacttatattattatcaaaatataaaataatttctaaaatagtgtgacatatatatatatatatataagtgatagagatatgtatgttacaattttattctcttttaattatacgatgctcttgtcacaatctcctcatataagaatcttaagcaatccacaatattcccattccgacctggtcataccattatcatatgtaatataataatttaattttttatagaataatattaattttttttagagtatattaataaatgcaatacatgagagtaagttgtgtttacacagtgacagaaacttatgcataaacctaaattaaaaatgtatgaaaataatatatatttcatatgaaaattaaattgcagtatagtataatagttaatttataatttcattttcaatatgttattatataatttaggaaaacaaaatattaaaaataaagtagaatttttattaatttttttgtttctcccaaattattggatgattttttttattatttattttaaactttgacttcttgaagtgaagggaat

SEQ ID NO: 330492 - DNA, 697 bp, Cannabis indica
ctctctctctctctcttttgccgatataggccatcttcgacaacaacaatgaggcaccatcagagcacctaccaccacaggctctcgtgaacctcgaaacccgaagatcagagggtttcattccctatcactcccgaactcttctcgctatctctctcttcatggtagagctcattggagttgaatctccacgactccaatttagccacttctgggtctcaatgaaccaaacgaaactcatttttgagcttttcccatcaaaacttcaagatcccattggtctcgttcccgattggccctttcaatcagtgactgccaccacgcacggtggtgctccggtaagcatctcagctccaaaccactagtggtctcattggctcaaagccactaatttttttttggtataagttttttttttgtcaaaattttaggtataaaattagaaattaactattggtttatatttccactttcctaatttttatggttatttgtttttttttacctaagaaatcagaccttgcccaactatgaatcctgggtggttatttaaggtttttttattatgatttaatttctattggtttgatgtatttcttgtgggtatagtggtgggtgtggttatggtggcagtggtagtgataatgatggttgtgggggtgataatggaagaagaagaggtaagaaggaactattt

SEQ ID NO: 330493 - DNA, 687 bp, Cannabis indica
gagttcattttttttacatataaataaaaagtgaatcacgtgatgcagattccttctccatcccttcagtagcttccatcagttgttctattcttcacttggcttttcataaaggagatctgtcttccaaacatatacttctgttccaatctgctgcacttcttattaagaatatagaagagattgcactatattgcactatatttactctgttttttttactctgtaactcttatattctgcttcttatttccgaagctttaggacccttgtcagagtttgttagagtaggttagttagttaaataatgtttagttagttagttaatggtttttggtccaaccgaccttgctgtgtatttaaagggtctctttccctttcctttgcaactcagtacagtatttttcaaatacaataaaaaactctttttctctttttctcaatacttcttcatcacacttctcaacacaagtctaaacagcctttatttagctcatcttatatatggtacactcatgagtcagacttgaagaactcaaaatgaataaattctagacacaaaaaaattcccttaagattgtttgtgaaagagtttgtcaatttcttcctcctcatcactcagccttttcgattacagcaacaacctccttcacaatctttcttctcagctttgaaaagtttgcaaat

SEQ ID NO: 330494 - DNA, 1479 bp, Cannabis indica
tttttttttaaaaaaaaagtgtacatataattgtgattaaaaaaattgagatttatcaaaaacaaaacaacaaaaacaagtcatttttcatttaaaaatatagtaagataaataatatatagaagtggaccactaattatatacctttcatcaattgttaggtagcacataaccataattattaattgaaatagaattaattgtatgaagttatatatattataagggtattgtacattgtattgtacatttgacattttaaggtgcttaatgctacactgatataacatttcataattgattagcgacttctattattattaattaattaaataaaaatgcatggaacacatattcggatgcaccaacatcacctcttaaggtgcccttagtatctatttatatatatatatatatatatataaaagagagatatgaggtggtgatataggactctgaaatttttctaaatagcattctttgttttctccttaattttgtcatttttttttaattttttattaaatttataaatattattaattattttctctaagtttctctctttttattctattttctaataaaaaaaattaaatatctaattttaaaacaacacaactttttctaactttaaaatttataaatgttaattaattaaaaaaaattctaccgtatcattaaaaaaaaaaatactaaaacaacataacctaaactttttattttctctaattttttctctttttattctattttctgataaaaaaaaaattaaatatccaattttaaaacaacacaacttattctaactttaaaatttataaatagtaattaattaaaaaaaaacttctaagaaaaatctaaaacaacataacctaaacctaaacacctaaacctaacccatatctcttatctcttatcacataatatttaaatctcttaatttcactcaaaacttttacgaggtatagttatattataagtggatatcttcttttgattttcatggagccattgtataatattagacttcgagtacactccacagcccaatcaaatgaaattctatgttttgatggagtacaatatcaaatgtcaaatataggtaaagctagcattatttgtttatttgatattttttaccatttataatattaggagatagttatataagcatatcactctcagctatatattattcaaaattttaatcatgaataataattacaaagatctgtttgatgttattagggagaaaatttatggtaaaaattaggctaatttagatttttgccccatgaactttgacatgtaccaaatcacgctcactgaacttttcaggtcgttaaaaattctctccgaactattgagattgttaaatttaaagacttttgtctaatttaactaaagaaagtctcacgtggatgaaaattaaggggtacaatttggtacatgttaaagttcagagagcatgattta

SEQ ID NO: 330495 - DNA, 1147 bp, Cannabis indica
attgatacttgctgacctgcagtaagatctctgaattgatcttttaatgttacaagtctcctccaataccaactgccttggtcaagagacttgtaactccacccgtctgcatttctgacgtaaacatagtggatccatttcatccaaaaactatcttccttatttgaaatggcctagatgtactttcccatggctgtcttgttccattcatgtacctttctgaacccgagccccccagttgctttgggctgacacaaattgtcctaagctacaagaccaggaccagttgccatagcctgaccattttacaagaaattcctgcatattgcttcaatattgttcactactttttttaggtaagatcattacctgtgactagtaggcatatattgccaataggactgagtttatcaacacagttcttgctgcaaatgggagattctttgaactctaagttcgaattcttgctgtcatcttcttagcaagagcaaagaattcattctttgaaatcttcttagcacaaattggcatccccaagcaatggaaaggcatttctttcaacgaaaatcctgatgcttcaaggattctattgacttcattactggccatgttgctgcaatacactgcagatttttgagggtttggttgcaaccttgaagtttgtgaaaaaagctttaatccttgcatcaaataataaacacttttgaactcccctttactgaacagaagcacatcatctgcaaatgtcaggtgatttattttaagctcagagcatctctcatgaaaagagaagtcttccttgttgcctaccaccttcaatatccttgataaatactccatcccaatcacaaagagaaggggagacattggatcaccctctctcaatcccctattcgattcaaaaatccatgtacagagagccattaaacataatggaaaatctaggggttctcacacaatttataatcaacttagtgaaagattcagagaactttaaagtctgtagcatctcctccaaaaagtcccattcgatagtatcataggctttttgtaagtctaatttatcaaacaatttgccttgtttgatttccttccatagtgtctcactagatcttgacaaatcattatgttatgccttatgaatatg

SEQ ID NO: 330496 - DNA, 948 bp, Cannabis indica
cccaatgtctaaaacccgtcccccaaactactaacatactaagttgtgatttttactgagccaaacgccgagttccaaaagaccggacaccggaaatgcaaaatatgcaagctactgaataacataaataacagtataataaattatttaaatagctataaataatttcataattaatcacaattaactgataatttccaaattaactaagcgggctttacacatagggttgttattatacccaatttttattagaagatatatctttgactatagtcattgatatttgtgatttgttacatgatcatttggattggagatttagcattcttcacacttcttgatgcttcaaccctagaggcttattgatattttagttgaaggtgctattagggttttcattcctatttttgtaaacattatgtttggctatcttgttgattttgttctttgaatgatatatcatcatgtaatggaatattgtctgatgtgcctaccaatggaatttccattctcttgaaaaaattatttagaatatcatcatctgatcaaatctaacaagacctcaaaattctatccaactcaatctaattagtaattgaatttgatcgattttttaaatagatatctaattacatacttactttttaatgtattaacttgatatatatataaaatacgtaaaaataaaatatcatattttatttaagtttaatactgatctataaagatatcatccctacatgtttaatacgactaagattttgaaataattaaaacaaaaacactgccaagtaatataatagaacagaatatcaagaaaataaatacacaaaacaattaagtgtcacaatatattttttaagaaaacaaccactacaattttttttttttattttttatttttcttaacattgttattatataagaagtattccaaatatatat

SEQ ID NO: 330497 - DNA, 599 bp, Cannabis indica
accaaaggtccttacatccaatatcttccatataatggttccattcggttaccaacaataaattattctgcggacaactctagaactaaattaactggtacttgaggtgagggcacaacatgagatccatgttgcttcaacctcttaacctccttctttagctgttgaattctagcttctatttcaatgaacctttgctccaaatctaacggggcatgtggtggattttcgtgaccaccttcataagtccttcatggcctttaacatagccttgggaaaaaaggggatcccaatctctccaactgccaccagttttgaccacatcgtcccaactacttgcgttttacgaagcatccatctataggacaagcctacgaattcatgagtcggcttggtcaggtagcaataaaaattttaatcaatttaccgcttacatgggaactcaatatgctcctattccgctatcaatctactaacatgctttctatcatgcttttatgatcatgcataacgattaaaactactaaaacatgtaaaagcttaccaaaccgggagtcgagcttatcttttataatgattgtacatatcttgacaatctt

SEQ ID NO: 330498 - DNA, 496 bp, Cannabis indica
ccagtgttctgataaatgtaggaatctttaatcacttagggcataaaatccaacatcagcttccaaagggtttttgcctctccaaattcctcaagtacaaatgtttgactaatcctattgattatttagataagtataatactatcatgaaggttgaccaggttccacaattggccaaatgtcgaaccctcaccacaactttggaggataatgtacacaagtggtttaatcagttgcctgaagcctcgatctctacatggaaggcctttgtagatctttttctgatgtatttttaggaaaccatgacgtatggaccactatacacaacattgtctaacatacgacagaaagaaggtgagactttgtagagttactttaaaaggtttaatgaagaagtaactagggttgagaaggcccccgagtatttactaacaaatatgtttcattaacatcctaaacatgaattctctaaaaaatgaaataaacacataagggt

SEQ ID NO: 330499 - DNA, 776 bp, Cannabis indica
ccataaaaggaaaattattttatcaactaacttaaaaaaaaaggactttacaagtaaagtcatgacctcctcaattagcaataataaaccagcacctaaactcaggatcatgacatgtctcagtgctattagctgatctgtgccagcaagaccctgcaaattgacacaacactaacacatgaataatagtctcatatatcctctgcattacataaaaggcacgagagattcacattgatatgctttgcttggagttgagttttataatttttcatcaaaactaatcatatcatattaaattttgtcatatataaattttttattcttataattcaaatgtttacatactcaataaattttctccactaattatattacaattaaatttctttcttatcatataatttaattagttgttgaacttttttttaaaaaaaattatgttttagttttttttcttatataggtctagtattttcagtttaactaaaagaatgccttttggttaattattctactctatagtttatatttatatatatatatggggcaagactatggtaggacctagcaaaagttctctaccggtaaggtactttttctaaccattgattttagatcgtgtggttattataatataaggtgtatactcttacgataagactgcttatatacaattaaaactttatgcattataataatatttaataatatatttattttaaaaaataaaataatattaataatttataaaaattattaattttaatttaaat

SEQ ID NO: 330500 - DNA, 1648 bp, Cannabis indica
gattttgtgtatatatatatattaaaccataaacatgaatacaaactgtaatcataaatgatttctaatctttttattgctcacaaatcaaattagattgtaacgggttttatttagggcataaaatcccaacattattattgtaagcaaataacttatcatcttcattagactattcaagttcaaattttaactttctattacctttggaatatatcacaacgggatgagaccaacctaaaagaattgatctccatgcatttcatctatggatttaatgagtgtcctcattctaaccttccaatacatatagttagaatcattgagaataggaggacgaacactagaaattccttctataaagggaaatatattataaaaacacaagaaaatattaaagggccacagtaagtgtaaatgccctactactttaggcatgttattgtgttttcaagtttctgtgtgctcctttgctaataaaagaatttaaaggaaaacgtaaataattaaaattttcataataaacttaaaatttaatacacaaatacaaaacatatttcgcgatcccttttacaaagtacattagttttcaaaaatacaaaatttacaaaagttttcgcttagcgactatcaaaataaaagcataactgtcttgaagatctgaacagtccaagtttaatcgcctcgctatgtacaatcttcatctagcccgacctcaatgttgtttagccttttcattgcctttacctacacatataaataatatatgtgagtcgatatactgagtaaaaaaagcataaacataacataaacataaacatgattataatcaggcgccatacacccaatcataatcgtatctcgtgtccaatgtgtgctaggtcttaaacatttgtacaatagtgcgattgaccataatattagcctatacttgatactctaatcataccaatgtgatagagttgttggaaaatattttaccaggatctagatttactaacaagaatatttcattaacatcctaatatgaattctctaaaacaataaaataaatactatataaagtttaagaaaccttacatttggtgcagcggaatataatgactcattccgttccgatctctagcccttgatttttttcttgtagcagagcattattcttgttgattggattcttcagagtcttacacactatgattgagataccacttgatctgtgtgggccctcactctatcactaaaggctgaataatatgaagagaataagaggaaaggtgatttcggcctaatagaaagaatgctcaagaaaattttctgaaagtcaaatttcatcaatctgttaagtgtgagccatcagtatctatttataggtaaccacctaggttcaggttatatttaattagcatttaaataacaataaaaaataaatggtaaaaatcaatccctagtggccagccatgtattggattgggccccactttgcaattgttcccattttatcattttcccatattattttctcaaaaatgccaattttccaattttaaccacttaaataccaattccaattatttaataactaaaaattaattattaaataatatgtcatttaaaatatttattaattagtcttaataaagtcttttaa

SEQ ID NO: 330501 - DNA, 1095 bp, Cannabis indica
tgagaacgacgagactgatagtttgcttgcacatatctgggcaattaccacgaacatacttaaaaaagacgacctaatctgcgactcaatccaaattctaattcagtaaattcgttcccttctattttatgtagcaactattttttacaacagcacatttcatttcaaactcagatcaaaatgttattttaagccatttcctttagtttaatgcagtatcaaattagtccaagaaaggggctgttttagcctgctagctagtcaaaagttgaaatagatgggtcggtggtgtttccaatttctgtataccataatctaatatccaattccaatttccaagtcaagtcatttttgtaactttgttatccccaaaatactttttaaattagacccacaaaccaacaaaacaagatcctagcaaagtatgaaatattatgaatggaatcttctccctagctattggttatacaatcataggtttttgaccccttttttaggctcatcaattttttcaaattggacaacaaagtcacgaggctcctgtctaattgtgtggaaaaccatgttaagcttgcatatatgcactataacatatatgtacggtcatgatcatgaatatctcttttaacttgtggttggagctggaacttggtgcccatttctaaaaagatttttttttcttttacatatatttataatcatgtatatataaaatacattgtgttttatttagatagtagttataaaaatttataattacaagtactctcataccacgagtaatttatttttatgtatatgtattgattcatttatataaatatgtacaattgttttatgtgttatttggttttgaaataaaataatgtgattctactatatattaattgcttcaacgaggagatgcttgacctaaatagcaataatagaccagttttaaaattaataataataaaaaagtgtaattaggtgattctactattgattgattatggtgatgtcaatgactcaatttacaggacatgaaatatcttgtagtagtggatcttaataattaattacaagagtaaaattttttttttctttttttagtta

SEQ ID NO: 330502 - DNA, 1369 bp, Cannabis indica
ttctgagtaatctaagtatttttcctaattaatttaataaataaactaaataattcacaataatttcaaataaattcaaaaaattatcaaactttatcaaaaaccttataataaaataaagaatcaaaatctaataaaaatatgtgagaaacacacctcagaactacccagaacgcggtcgccaacgttcacatcggttctgtctccgacaaagtgtaactttatccccgatttctcttgacgtgtcttttcgattggagaagctttccacagtgcttaggtactcaaaaaaaatcaagaactacccaacataataaccccaatgcgtcagatcggagttgtcttctccaactccggtgtagcgttgttaatggagtcaaaaaatagaaaaatttcgtttcagaccttaaagctctgattcttcacgttaaaaactgattattggggtcccataacaacctcctttgatctccgaaagaacttaaatgtgttcaaatatggttccgtttcaagaacggtattttcgaacgtaaacaatggtgtctgtcgaaaggtgcgattacagactttctaatcgcatctaaaactcctcttggatgaaataaaactcaaagtaataatctagagcagccaaaaactctcaaactcaacaaagatgaaatctcactttctcaccactcgatttgtttgacccacaacctctctctctcttagtatctcaccaccgtttctaaaccgatcatataaacatcttaagtcctaaccctaatataatgctacatcaacaacttaaaatttaaaaatatatatatatatataaacatgtaccgtatatatatatattagttgactaatttactaatataataataataataataataatattactgataataataataacaacaacaacaacaataataataataataataataataataaacaaatgctgtaatatatttacctatattattattattattatacttataataatactcaaaaataattaaatattaatttatcttcaataatttaattctttatctagcattatacataccctcaaaataaaataataataatgattaaaataataaatatttgaaatgataaattatccctattagtaaccaaaataaactaaaagtataaagaaaattaattacccaagaaagaagatattacaattattccctcctaaaaaggaatttcgtcccaaaattctatttgaattttttttagaaagcgaagactcaatgtcttctacctcagcacttgtcatcactttgtcctgcttggttgatagcgaagaccctcgttggaacatatttatcgtcttcctttgaatcttctttgttct

SEQ ID NO: 330503 - DNA, 548 bp, Cannabis indica
tttacatcacttatttgcatccccattaaaaatgctctaattttatatttacatcacttatttgcatccctattaaaaatgctctaaagggtgtttggtgcctttatacatttactagttttagcaaatattttttagatatgcatttttcttttaacgttttttaatccaaaatattatttttatcaaatataatatttctataatttttgaattagtttaattttttataagttaaaatatattatcaaatttttaaaaattatttagcgaagtaaagacaaattattgtaaaactttttgtatttataactaccaaaaaaataagtttaagtggtatttggttaaaaagaatgaaaacataagaataaaaataaggctaaaaattcatatatgaataagaatagaatgaaattaaatttaaaatatataataatataaaaatattaaattttttctcatctaccttctatttcaaaatacaataatcattctatcaaaataaagaaaaaataatttattagaatgacattttaatactttaaaat

SEQ ID NO: 330504 - DNA, 1339 bp, Cannabis indica
aatgtttttcattattttatttgcttttttttgactaatttattagtatttattttattattacttagttttgttgcttttaaagtctaatcaattatttactagtattatttcaaatttactacataattgtttgttttgtatgttttgtggtagttttgtttttgttttgtactacataagggtggtttgtcatatatggtagtttcacgtttaaagtacttttgggttcatcctaagaatgatgtgtgctagacaccctaagttcaagagatttttaagataagtttttattcacgacaattattatttggaatgttttttctagtactcgaattaaaatttttattttcattaagtagagtgtgacattaactaaatttcatatatttttataggtgattctctacttcattcacttgtctattcaaggatctaaggagtttccatgagataagtttttattacaatttatttttaaaatttactctcttaaacttatacatgacataaattctaaattacttattttaacatcttttaaagaaattactaatttcagctatcttttatggttttgcaaaagcttcaactttattggtaggactaagatgggtcaaaggtgttttattttcagacattaaagttttattatctaactttcttagggcatatctctcttaggttagtcgtaattttttgttacgactcatagattggctaagcatgcccttaggatagataatgagtttttttggatgaaagagacccctcctctttgttggtgcttactttttatgatcaattaaagtgatcatgacaaaaaaaataaataaataaataagctaggatttgtagcttctcccaaaaggacttttgagaagttatttttaaaattaaaataaattataattcataatttactcacaaaagatcttcttctaatgatatccaaacactttgaaaaatattttacattaaaaaaaatctttatataatagttatccacatggtaaaaattgaataaagtttatacttatcttacatttctagctgtaagcaaaaataaaaagaaagttattgcctgataataatataggaaatatatgaggtagacacccttaaaaggctgaatgggggcacactcaaatacataaatttgattggtggtttacttttcttattagttgttacggtgagcctacattgcataataatatttccctcctaataaaaagtagggcattttacaattttgtatacactattttaattaattacaaaatatgtgcaaaaaaaaacttattatcattttctcatacatttttatatataatta

SEQ ID NO: 330505 - DNA, 682 bp, Cannabis indica
ataatatctttaccaagatcaataccggtcccagtccaatgtatactcaatacatccaatactaggatatttttccaatgtcttggaaagagcatataatcacaattaccttccactatattgacatcactataagtgtgaataactatatgttccggacttaacagaacttttatattaaaccataaacatgaaaactacatgtaaacataaatgacttctaatcttctactaataacaaatcagatgatattgaaatgagttatatttagtgcataaaatcccatgagggtccttcatttaaggcgctctccaaaactggtatggttttcttttcttattttaaacggctcatcaggttcccgtgtttggcgttgagtttttaccttaaatcgatcggagggtccttttggctttttccctttctctcccctggctttggatgcatagatatgctccttctatctccccgatcatgacgaccagtctttcccttatgaaaaactcccccctacgaacctttccctctagggagattgaaacaaactttttacgggtctcaagcctttgagttcctttctggattagttgtaggatttcccgttgggcgaatttttggaagggtaacagataagatttggctcttgattcttttgcttctgattacctgatggctaagaag

SEQ ID NO: 330506 - DNA, 1112 bp, Cannabis indica
aagaagtctaggggtggtgagacgacctcgtccagaaagagggcgccgaccgaggtggttattgatttctctaaggagccaaccgtcgtacacccttctgcccaaaaaatgactaagtccaacgactctcgaggagggagctcggacaggcccgagcagttgaagggccgatccgagctagtcaggagcagatccgagcagatgagggcccctgccccacctcccgtactgcatccagagactaagagtggcgaagatatgctcacccaccacatgactcggttggtccctgaggtgaatgagcagctggccggagctgataatgacctttccctagagctggtgatgggaggagtcttgaaggagtttacgagggtaagtctttcctgacagtttccttttatccttctttacttagctcagattttaatttcatttctctgtgcagaccgatctgaagatggcttatgcttattcccgagctaagatggctgcctccaaaaatgctcccatgtccaacactatgctggcggaagtcgacttggcttggaaggatactgatgaagccagggttcaacttggggcggtccgcatggaactgggagaagttaacaagaaacttctcactgcctagaagaaggtggccgagctgaccaaagatctagagtcttctgatcaacttgaaactgccattgcttccttgtctaaagaagtgaccagcctccaggaagaaagggaggtccttcgatctgtctcacgcagattggaagcagagaagaaggctaaggaggaggagcttgaagctagggttgagaagtacaaatcaaaggtcgagcaacagagagcggaggtggcgaggcttggagggaaggtgaacgccttagagacagcaggtcttgagattttttatgactttttgaaggctaatcctaaggcaaactttgattacttaggcgatcccaaagacatgtttctcgagtattgcacttctcaggtgtcatacggagaattcgaggcgaccacttctacctctggtaagaatgttgacatgccccctgctcagacaactgatccttcagctctaaccggccaagaagacctgtacaaagagc

SEQ ID NO: 330507 - DNA, 974 bp, Cannabis indica
gctttaaagtttatggaattttcttcttcaaatgtgtctttcatctttcatatcatgtattttagattgttagcacatattttagttcattcttcattgtgtgaaaattaaaatttactttgattaagtgtgattcattagattgttcacatctaattcttaaaatataaaaattaaattttttcctaaagataatatctttgattttttgtagttttagtctcttgtttcacaactaatgctttgaaattatattctttatgtgaaaaaaaattcatatcttttgaacttaacttgtgcttaaatagaaaatatatgttgtaaatgatagtttgaatgacttgaactataaaaaaagctttggagtcaatacactattaaatattattaataaatattattgattttaaagtcttaataatcttttctctaccatttatcatcaaacttcttttactatgtttagtttaaatcttaattttcttttcttttatgaaacaaatctcatcaaatatttggagcaaggttagagtttatttaattttgagcttaagctatctatcttagatgtaaatcaactcctttgggtttgacctcgtactgacatgaaaactatattccatacccaattattgcacttgcgagtataaatatttaaaacacataacacctgtgggtcaacacaaatttctcagttaatcgattcattaaagtaaatttagtgtctagattttttattttaggaaagtaagtcaaatattgtatgttttaagaaattcatatctttgtatccacctttatattattcttattcttataatttcttgaagatttgattaggtattaattgttgaaaatttatttgaaagtttacccttctataaaaagaaaatttgcacttactgttcaccagtttgtaggtataattttgtaggttgattgaagaattattttaggaaagtttcctatgagtt

SEQ ID NO: 330508 - DNA, 757 bp, Cannabis indica
cctaatatacactatataaaaaaaaaataatgtatttagaatatgaagttaggtctaagagtttatgctgacaactttttaggatttttggagaatgacggtcagctaatggtggagattttgagacttttgatgttgtcttctaacttcaattgaggtatacatcactataatatatgctttttagcatatatgatatttttttagtgtgtatgatataagatttgggtatcaccgtggtggtaggataatctatggcggttgctagaaaatcaatggcggtgctcgaaagtatagtagttttgacggtagtagttgaaaaataacattctttaaggatttttattttagggtttcctgggtttggggctcggtggtgacggtgttaacgatagcctatgttttcggttatttcataataatcgaagacacaagtggcctatgtgttcggttttttgaagtaaacgaagacatagatcccccatatgtctttggtatttttgaaacttacatcttcgcctcaaatgtcttcggtagtgaattttttttaactaaagataaaccagcttaaaaatcaaaaagaaagctattttttctagtagtgtaaaatacaataattgtattttagtttaaaatattactatggaaattattctaacccaatttgttattgagcaatttacgacaatattgtgggaatcttatcctaaatttaagagaaataaaaaatcaaacaaaacctctaaagactatctaa

SEQ ID NO: 330509 - DNA, 2563 bp, Cannabis indica
aagttagattatggttattatgttgaattgagctagttttggttgagaaagctttgagttcaagaactgaagttttgctctttaatggtgaattttgattttgagcatgttatgttgttctgttgcttgggttattatgcaggtctggaagctttggattcaaattggtccaggtttcaaattttttaggttacttggtgtaaaaccgattaactggttaaccggatcagcagcttggtttccaaacttttcgtgttgtcgatttgtggtagttttagatctttggttgggtaattccttgttagtttagggtatttccatgttaacattcaataggaaaacttttagttgaaaacctaagttcccagttgtgattttgcatgtcacttacctgtcttatgaatgatgtgatttaggggcctgtaattcgccgagtagttgttccactcaggctggccggcacacctaaattcaaaaacaagataagattagtacaatgatctgcatatgcttatacatgtttagcgtacatgttagttgccgtcagaatagacaaatcgatagccgtcagattagcatcggtgaggtgtacataaagatgcaccgagatgccaataaatatatgctaggctatcagattgtatgggttatctgctacaacatcagtatgactagagtactgagtatagactggattcccagttagtcatactttgtcgtatgaacgttctagactcagcaccgtgttcgacacgtggataggattatggttggtgtatgggcgcttgattataatctaagttattgttatgttattatttatgcttttcttactgagtctgttgactcacagtttctatttccacgtgtaggtaagggcaaggctaaggttgagcagccgtgagagcgtgcagatggagattgtacatgtcgggtcggttagggctggagcgtatggtctttgggacatcagggcctattttgtatagtcgctaggcgacaaacttttgtatatgcataatgaaacttttgtaaatacttttataaacgggatcccagatttatgtaaatatggtatttttatgtttccaattaattaaggaaaattttaattaatcacgattaacaataaacttgtttattagcaatgagctgcacatttaagtttaaaattacattaacatgcctaaaatagttaaggtgttacaatttggtatcagagctactaggttgtctttcaaagatcgtcacgacatgtacaatcatcatcagtgatcagctcgtctcatggtttagtaagcttttattgctttagtagtttattttaatagcatgatttaagaaaagcctgataagaagtatgttagtagcctgatagctgaataggtgcatgttttaaatttccaaaataagcggtaattagtaagctttacttgatcacgatctgaccagactagctcttggttacgcatgttgttctaatagtatggatgtcaggcaaaacaccaggagtcagggtaactcgctcagatcttgtggtggatagggagtttaaattcccggaaatgttcatggtcaagctagagcccctagagggagggcacacgtcgaggtgatgttaacccgccacaggctacccaggctgcccaagaatgggaaaataggttttgcagaaatgcaagccagaattaatgagcaagatgaagagattagatgcttgagacaacagggtgctcctgcaatccctgctccagaaatgtaggtagctcctgcccctgctgtgcaggcaggaccagtcgttgcagtgaacagaatggaaccactgtatgaaaggttccacaagcaagcacctccagtctttctgggaggtcccgatgttatgaaagccgagtagttgctaaccgtcattactacaattttgaattttataggcgtcaccgacaatgacaaagtggcctgtgccacatttcagtttcaagaagacgctctagtatggtgggacatggtatccctgaccaatgttgttactacgatgacctgggaaaagttccaggaattgttcaatgtgaagtacgataatgaagcagtcagaagtgcgaaaagaaaggagtttactcagctaactcagaaagaaaatatgagtgttactgaatacacaactcaatttgatcgattggcaatattggcttcgagaatagtgccaaccgattttagtaagaaagaaaaatacctagacggattgaattcaaagataaggcatgacttaatgatgagtactgatgacaacaccacttatgctgatatggtgggaaaggcactgtgagctgagggcgcagtggagtgcaccctagaatctcgagggactcaggtcgttggtggggctcctactcctcctaccttaggctttagtaggggaggtaatggctcgaccactaaccagaaaagaaaggcacctactgcatccggtggctaaagtcagaataagagattccacgagaaccaggggagaggcaatcattagggtagctctgaaacatgatacacttacctagaatgccctagt

SEQ ID NO: 330510 - DNA, 1349 bp, Cannabis indica
gtttctttcatttttgaagcaatctatccacatctttttcctcggcaacttctcaacgatatcattctcaactatcgataggagatcttccaaacataatccagctgccacaaacaggaaccgaagaaacttcgataaaatgaaatttaaggtgtacccccaacacatgcattttcatatcctcgctttaatgtggtccgaagaaccttgactagaaactgcaagtattctaacccgagctccttcaaacatgcagccaaagcagacctagcttcatcacggatgctttctaaacgattcttcagaaagtttgatacgcgatgcacaatagtagggagctgcgagtccattatgtctccaggaagcaactttaatatcttaagtgcagcgaggttgacgttaacattaaccctatcagaatcggattccagtaacttctgtatctttggcagcacagttttctgaagacaaatttgtatctcagacagcacagaagagccactacacttactaagtgtaatcaaagaacttgactcaacggtcccggaatcagaaggattgtcacaagaggatgcagtggctgaaaaatggaactggtctaaaataaagcaaattagccgtactaaactcttctgcttatcgggatgcaagtttatctcattgaagcatctcaataacagagaataataagaatcccacttcatttggccagaaaccgaagcaagggcatctatgcatgcatctctaacatgttcaccctttccttcttgaacttcaaaaagcatactaaaaaagaggggtacaaaaactttatttattattccctgaaagtaaaaggaaaaaaaatcagtaacttggaaaatggtctggaaaatcaaaataattaatgtgaaaaaatattacctctggcatagagttagaaccgatagcgttcctgaagcgtgccaaagctcttgctcttctgtgcctctgcaaagtgaagtgtccatatatgagaacaataataatatcaacaatcatacaagatgcttttctagttggataaaagtattgataaagatttcaatgattcctcttaaaatcaatcaatgtattagaatttagaacacagcaactggtgattatcaaacaatatctgaaatttaaacaataaaaaacacaaatgcggtttcttttctttatgaaaatgattaaactgagcatgagcataataagcatgggaaatggaatctcacctgtaaatgaatgatattgttgaaaaaatctatttcaacgtcttcatcacaaagaacctttaacgaatccaggttgcccatatttggaagtttcatcaccatttctcgtagtaa

SEQ ID NO: 330511 - DNA, 1258 bp, Cannabis indica
aatctattatgagttaatttttttttcttgctaaaattattttactgactagaaattgtgatttgatatttgttgctatgtttagtgaaatgattttgttaatttaagagtgcttattgtgtaatagcttatttttacttgatcatcgttagtaagttgcaagctgatcttgattttggaaaaaatagagttagtaaaattacttgaatgatgcatgaatatcactttaaaaaaatgtggtttgtaaatgacataagaatatgttatttacattgtatgacttgaaagaattgtgcttaaattagtattattaaaattacatgggcgtaagaatatgttagttaatttatagaatcataacataaacactttgaaaaaataattatgacattttaaattcctaattgacattatcaatttacaataatactcatttacaccattttatcaacattgtatttttagtctaatttaataaatctagcttgttttcttctcatagtttgtgtttgttaatttttacatattctcatcactttattattttgttgaaaccaatttgtgagtaattagttttataaactaatttctaattttcaatccctatggagacgatactcaacttatcactttattacttgttgacaattgtgtgcacttgcatagagtaattttcacaacacttatccaagttcaatttagttgtatgcctagcagtagttatggaaaatttagtaacagtagttcccttagtagatagatctgggcgggcttcgggtagagtgtcagcaaccgcgggctggaccctgtgcatccaagaagcaagcagataacaccttcaacctttctttaactcccagatgaattgctcatacccttctccacgtatttggtctgggtactagtgatgttgcacctcgggctctggagacagtgtgtacacactactcacttcccaatattcaaagctagaatttaaaaggttatcactagatgaagatgaacttgcacggagttgaggatgatctttgtacaagagttggagaaagtcttggtcgatatggtgcttgcctccctagaaatcaccaggattcatctacaaaaagatgggagacaagaaagttagagttagacggatcaaaagatgaaaaatagattttatatgccgacaaggcaagattaaagacaaaaagaagggatttcatttaaaaatagaattcccaaacccagaagttcatattgggttttatgccctaaa

SEQ ID NO: 330512 - DNA, 1070 bp, Cannabis indica
aggcacaaatcggtggctctaacctgagatccatcgacgagcacccggacaaccccaaccaccctgtcgttgaggcatagtcatccccgacgaagaagcccaacgcttcgcagctccttccaaggacacctttgagaagactcacctctggccaaactctccattccaatcaaaagcaaaagcatcatccttaataaatcgcaccacgaatccccctcagctagggggcaacatacgcacatttaaggccaacgatggcttccccaaccgagaagaagagaagagaaaaggagaaaatcctagaagagagaaaatcgtttaggagagagagaaatgattattgatcgggaattgtagtgcttaattggtagtaattaattgagtacttgagtcaattttcgttctaaccatctccaatgtcataaggttcaaatattgtgctaattttgacacaaaaattaacaagtgttatatttgctacaatatttatatttactattgtgctccaatgcacaagcattttatgatgcaaattataacaaaaaataaaatattgctaatgattatcaataaattaaatatttaaaaataactaataacaatataataattaaaaagataatggtgatcacatgggaattcacctctaaaatgttagcaaacccattacattcgtgcactactaaaaaaaatagttttacgttggtcaacgttacgggtcaacgaccacgatcgatgcaaaaaataaaggcaaaacttttgcttcagttatcaactgacgcaaaaaaagtaatattttgcatcggtggctactcgacgttaaccagcgccaaaaaattaataaaacaaatttatattatgcgtcagttattagtagacgctaacattgttagcgctggttcatgaccgacactaacaatgttaatgtcttataataaccgaagctaaatccttaaaatttaacaaaccctatttattacattcatctcttatttttcaccattccgaaaccaagaactgttgggttttatgccctaaataaaactccatttcaatgtaatctattttat

SEQ ID NO: 330513 - DNA, 634 bp, Cannabis indica
atatagtgcaaaataagcaagttagtaaattttggggtcggtttgtgggactgctgtgggaggctatttgtgcggcttcttttgttgttcaaatttttcaagctgcctctcattatatccacaatgacaatctatatatatatatatatatatatatattatgtatatctctatctatctattcaacaaacccttctagatagtattatgtacagtgaaacaatggattggaggggagaaattgattaggacatgtctcttaacattaacttatataatattgtaagttgtaacaaacaaataatataatatgtttgtggggcttgaatgacttaatcattacttgtgctctatactcttttttgtaatttatatatagggaacaactctcgtcttttcttgtcccatgccacccaaacatgatatgtatgctaaaaaaatgattttacaatataaaaattaaataaaattaacttcttaaatataaactaccatgacttttttattaaatggaattaccatggtctttaaaaatataaaaatattcatggtctaggtccgagtttacggattcagtttaaggtttaagttggggtcagagtccaaaatactaattaaaaaaaatatttaaaaa

SEQ ID NO: 330514 - DNA, 1055 bp, Cannabis indica
tttcgttttttttttttttattgtcgcgtggtttaatttgagagagagttgactttgaatggtacgtaggggtattatgatgcatagcaacaagttttccaattgtaaacgctagtgatgtgatgtcatgtttacatagggaccaatattttgggatcggattagattataaagacaaattgaatttggattgaactataaatcaagattttcaaatctaatatcttactgaaaagattgaattggattcagaaaaacacactctctactagaattatatgtatgggtgacattttattattttgcaattagacataatttataaccggagttcagtactacatatatttataactactaatactatcacacacaactcattaatattcttcttagttgtattaccaataaagaagagaaaggaattgattccaactttaacaacgtacgtacgtgtatagagagatatggataccacccccacatgcaaattaaacatttcacgagacaaccagaaaatattttcttttatttatttttgcaatttaatgaacaataattaattttaaatttctattatataattaatctataacaaaagagaatatatatctttattttctcttttagttaacgagagaacaagcttgttatctaaatatataataatatttatcgatcgttacaagacaatgaatctaatgttttaaaattagcattaagaaacaaagatggatgtgtcgtaaaatatagatagtacacccaatattcttggatgcatatatacgaaaatagtatgcaaagtacatgaacactttcaattaataaggtcaattttgatacaccacttaagaaatgattgaacgtaacgaaagtaaacacaattattctatggaaaatggtctgtttttaaatgaagcatcggtccaattttatttaaacttcattatatgatgtgaactcatcaatagttatcttagtattacttgatacgatttgttaacttaaatgtacctgtatatatgtacaaaattatttactatatatatatatat

SEQ ID NO: 330515 - DNA, 877 bp, Cannabis indica
taattaaaaaaaaattgtgaagattgtaaaataataaaatttgaaaaaatatataatagtttatatgaatgattatgtatagagcttaaattgtgaagattgtgaagattgtaaaatttagtttatatgaatgattatgtatagagcttaaataactagtacgcctcactaaaagtatatatgaaaataaatagtgccccattgttaattaacgataatttttaacactaataatattttttaaacactaataatattttttaacaattgctattttatttagacatggcctaccaatatatttgccatgctggcctggcctgcagagcctaatatttatacataaatatatataaagggtgttaaaaaaaaatcaaagagaacagatttttggacctcttatcgtgagttgtttgttgtttttttaaacaagtgagttgtttgttgtaataaaaagattatgtatggagagatttcatccacgagtatcaattgggtactgttcaaagtcacccgttaccttactttttgtggaccatttactcataattatgaaagaatttaagtatccaaacatacaaaaaaatcaactcaattgttgacagtgacctagatatttttctttcctagtgtacacatataaataggaatttatgtataattaaaaattaaaaaatatatatattaagagtgcgttcattatactacaaaaatattattatggtcattcattaacgtggcaaaattacaattaatcactagatttgacagtaatgagaataatggattatatctcaaaactaattggtgatgagtggagtagtccgtgttcttatatatggctcaatacttttacatttaatccatgtgagacaat

SEQ ID NO: 330516 - DNA, 1032 bp, Cannabis indica
tttagtacaccgtattgtaatgtattgtattgtgttggattgtgttatattgtattgtattgtattagtattatttaatacaatacaatgtttgatattgacttgtattaattgattgtgtaaagttataatatatttttaatgcactcgatccaggtccaggtccgggtctgggtcggggtccgaggtccggggtccaggtccgggttagggtctgggtttgggtccggggtcggggtccgggtctggtccgaggtctgggtcggagattggtgttgacctcagatcctttgtaaatattataatacaagctgatacagaccatttattatgtattagataatacaacatatattgtattaaaaaatttagtcgtaataattaatacaatacattgcttaatccaaatatagtgttatttattatttaatacaatacgactcttatacggcgtaccaaacgagccatatagatcagctgtaattaattaattttctgctagtaattagttgtaattcttgcactgtataaatactgagcttgagctcattcacagggcacatatatatcatccattcaacagtcccaatgtaacaaaaattaaaaatgagcccttaaatgaaaaataccattaaagctcgaactttgagctttaaaaagctcaaactcgatttctaactcaaaagcacatcaaattcagtaaataaatatcgaaaataatccatagcaacccaaaaatagtttcatgaagtcacaatttccacaactactctaaatcacaaagtcattatataaaaccaatattaaacgaactcaattcttacagctactactgaggcttgaatcactaagtttttggttgaaaaacaaagaaaattaaatagtgggtgggagtttcgttgcatcaaaagaagaagagtttcatgttgttcttgttagagattttataacaatggaagaaaatcaagatttattacaactctattgtaaaataatacaaggactaaaataagagattgattaaatatatgt

SEQ ID NO: 330517 - DNA, 489 bp, Cannabis indica
tttatgaccaagaggatatccattaagtttgtagcacctctcaattgagtgtccattcataccacaatgagtgcaattttactttgatctgaaaggttgaacagctccagcaaactgtccattgttgctcgatgttgctttatccacatcagatgaggtattgcctccaccagttaagcctttttgtctctcttcttgaacaacaacagcatatgctttgttcacccttgaaagaggatcatgaatcaaggtctgagacttaacaaagctataggaatcattcaatccaaccaaaaatttgagcaatcgatccttctcctaatattcttgaatcactttcattgcaccacatgtacgaacaagttgtggtatatactctctgatctgatcccacaaggccttcaaacgagtatagtaagtagtcactgttggaaattattttaccaagatcttagatctactcacaagtatgttgattaacaccctaaa

SEQ ID NO: 330518 - DNA, 571 bp, Cannabis indica
ttttttttttttttatggaagatgataatgatttttcttttaatggaagatgataatgattttgggtcaactaaaacacgatactaatactagatattggataatgattagctagagtgtccaaaaaggactctaccaaaagtatgctatttttagattacgtgttattgtattaggctttaatttattaatattaacttttaatttattaatttatctaatagatcgtattgacttagttttatcaattaattaagaaatatacggcatgcggttgaattttagtaaatgataactaagtcataaaattatatcaaaatttaaattttaattatattttttttaataatataagtaactattttttttactcttaatagaaaaaaaaattatagagtcttcatttttaattattttaaacttaataaattcttacaaaaaaaacttaattaaagatcatttttagttaattaacttattggagatatactgcattggcgtgcagttatttaaaattttatatctatatatatatatatactagcaaaaagttacgtgcgaggcacgtata

SEQ ID NO: 330519 - DNA, 868 bp, Cannabis indica
actccaacaaattaatttgatcgattatctaccatgttcatttcttaagaatttgttttttagtaacgactgacaaagttttaatttttcttacttttccttctaaaaaaaaaaaaaaaaactaatttgataggtccatccgtccaacgtaaacaaaattattatggtagcacgtggttcatgtgatatgatgcttgtggcttacgtggaccccaatatgagacaaaggctgcatatcaaagccaaaaatatcttacatctcttttcaggtttatcagaatattcaaccaaataaaactaaacaataaataatattatgaaaacaacaaaatcaagataagtttttagatcaaaatcgtcgtctctattattgcctatgaaattatttctttattaaataattctaagtgggcctactagaaaattaacttggttttaaaacatattaatacattacgtaaacatgttaatttgtgttatatatttaaattaaggatttcaggtacgtcacgtgtcatagatgaacaagaattgtaggtttggaataagtgaccattccttaaccttatattattacacctaatttttattaataatatagtcacacctaagaggctaagacttttcagtggaaaatatcagcatttttattatatatatagttttgccaaaaagaaactaatatatacatatataaacaatatccttattctaattttgcatagtgctcacaacacaaaaggccgaccaattagaacttattacttttctagtgcatattcatcaaatctataaggaggaatatataagttttagtttctatgtaattattaaaaatataatttatggcataaatatttaaatttaa

SEQ ID NO: 330520 - DNA, 632 bp, Cannabis indica
tgataatagatttgaagtaatggtctatatatttgtcttattttttttcttatgtggcaaaggatacattcttttacctttatatttcaatgtagtctatttttagtaaagttgctctttaggatattcttatagttaatattatttattttatattctaatgttgaggtaaaacactatagctatatgtttttagagacactttaaataaatgttatatgattattaacttttttaaaaaataaaaataaaataaataactcttaatcttaaatagtatttgttaattgtcaaatttttattgtagggatttatcaagtaatttattaaagtagattataaaattatcttacatatatataactttctgtagctgctattctttttatcgtattaacttaattttattaaattttatgttttttttatcaaatttaactttagatgtagtgacgactacaagtgaaatacgatgatgagaacatattcttttatttactgtaaaatttgaagatagttcttttattaaataattataaaagattaaaattaaataagtttattaaaaatatttttgtaaaaataacaaaaaaaaaaaaaaaaactaggcttaaaatgtaaaaataaaaaaa

SEQ ID NO: 330521 - DNA, 1236 bp, Cannabis indica
ggactcgggacccaaaattgggactagttcttacgatccgaacaggtctagctccaagttttgtctaggtcctagtctgagtcaggtacgcgtctagtttcgggttcaggtcccagatctagacacctactacaagttgggtccaagccccgagtcctaggtctcggctccagatccacattcagatcccagtctttggtcccggtttagtttaagtttaagtcccaagtttatgtccaagtcccaagtccaagtaagatgtcagatcttgattagtgggcctaagtccaagtacacgatcctagttcgagtcctgggacccagtatcggtccagattcgggtcctagtctgggtcccattctgagtctgggtttgggttgaggtccaggtttgggcctgggtctaggccctagtctagatccaagatgggtctagatccaagatctggtctgggtctgtgtcccggtccaggtctgggtccctgtttaggtccaggtcctattcctaatctaggtatgggtctcggtctgggtttgggtccaagtttgagtcttggttcgagtccaggttcaagtttgggtcccaaatccaggactcagacccgaacctaaaccaagaccaaaaccaagactgggacccaaacccgaacccgaaatgagacccaaaccaagacgagaactaggacccgaacctggtactgggatagggagctaggcccccaaactgggagtgggacccaggacccgacccaagtcctggacacagacctaggacctagctcgggacccagcacttgaatgggaaccagactgagaaccgaggttgtgatctagatgtcgacccgaggcttgtactgacccacagtctatttttggatctgggacccaaaccagactcgcacctagacttagacccagacccggacccaaacctgaacctagacccagacccaaacctacacccgaacccgtaccctgtgacctgaaagtggaatcaaaactgaaattgggctaggacccaggaaaaggactgagaccgggacctagacacggacccagaacctaactggataaggacctgaacttagacatagacccagacctggacccagaaccaaacagagactgggacttaggacccgaactcggaccaaaactcagacccaagcaaaaaaacgacccaggacccaaggagtgagactcaaactgaacccagtctctcaaccagacccattc

SEQ ID NO: 330522 - DNA, 605 bp, Cannabis indica
tttttttttttgtttttttgatattttctagttgattttgataagttagcgttgattagtaagctctagttatttttttttaattgtgtgttcgctttatctattttcgggtgcttgagttcaagtatcttcctttaattttgatataattgtttcgacctaagtgagtaattgatatgtaatcaaaggataattagaatcttttggataataaaaaaaaagatgataccacacaccaacattattgattaagcgaatacaatatgtctttttaatcttattttaagcatattaaaagatggtgtcacttagggccatttatggatggagaattcatttcatttgacttttgagtaaggcctttgacttttgtagcctcgaccatgaacctctagatgtaatccttcaacgtttctccttgtccctatttgactttgacaaggtcttctagctgcgatggtacaagcctcgaggacgagaattatgtgtacaattctcgagagaactcggcccaagagttgaatcttcctggggtgagtttgaagtaccattcttgagttgtttttgacaaagtgactaggaatatgctgttggaaattatttta

SEQ ID NO: 330523 - DNA, 735 bp, Cannabis indica
aatagtaatatcatgagatgagttgtaaatgacgaaaataattaataagtgtggtaattagagaataatttaattacatgtgataaaaaatataaaagtaaaaaataaaaaagcactatatgagatataaccaacactataaccaatactatacataataatagattttttttttatatataaaaataaaaaaaaataagtggaaaaataaataagataaataaggttaagatataaaagtatatctagctaaatatatatatataaaaaaaaaaaagtaaatgacagttgactgatcaatcatattgacaattgtataagaaaagatataagagtataaataggtgagtgatagcatataaaatataagagtattattgtcattaaaattatcatacaaacaccacacttttataatagaaagatatgtatacttattgtcaggttgtaattaaatatatttgaccataagatcctaattaggagtgacaaacgggttttaacatggcacataaacacgaacacgacacgaattttacgggttagggtcaagaaaattagacgtggatcgaaaacaaattaacacgacttggcaggaaataaaaacgggtcaaacacaacgacacgacatgcttaacacaaattttacacgtttgatacggtttttttaaataaattaaaataaaaaaattattaataataatataattatataaaaatatatatttagtgatt

SEQ ID NO: 330524 - DNA, 702 bp, Cannabis indica
ataactataacgtacatgaccataagaaaaaatttgattaaaaaattatttcggacgctaaaacagataggggtgcatcaatatatccattttaaggagatgcattataaaattttcctaacttttttatttttttcaaaactattattttcatcatattttattggttttgtacataaaggagagtgagtattatcacaattcttcatcagtttgtttgtgtatttttgatgtgttatgtttatttgtgtttatttatatttttaagtgtataaatagttggagattttaatgagtattggagaatcagtgaatatcgtttcttttattatttaattgttatagcgaatttttacttttttaaaatttaatttattttttataagttaaattcttacctcatttatctttttttttttgtgttttgtaggttggttatttattcttcgaagcagaacaattcacaaattgcagaagatgtaaacttattggttacttcatgtcattgatgcaaaagaattagcaataatggcagtattggattggtctcacatattgttcttcctctttgttgtgtggagtctatttgtgtagctttggcttatgcttttcattagcgctttctcttttgtaatgacttagttttttagatatttttgctagtttactttccagttttcctgagacatctctagttcatgt

SEQ ID NO: 330525 - DNA, 1140 bp, Cannabis indica
aaaaaacagaaaacaataccaaacatgctcttactttttcttttttattgttttctttctccaaagccatattgggtgtgatcaataaatatagtagctaagttaagcaaaaataagtaaataatatagtagctaaaactttggaataaaattataaataaataaagattgaatattaaaattgatccacgtggcgcttatttagatttattacaaatttcgttggacaatcatatatggcaattaaagaccatcgccctgccctcaattttatttagagataataaattaagaataaagatgatttttattggcaatataaatattttatatttttaattttatacatttatatagtatactaaatagatattacgtgccaagtcacgtatgttaattttattttaatttttaatttttttaatgtcataatagtgatttaaataaaaataaaaattactattatactttgtaataataattaaaaaagtttattatttgtcttaaatttatcttcggaattaatgaaaatgctcatctggttaaactattaaaacattcaaatttaatttaaaataatatttaaaatttaactaattttaaatatcaaaatttaaaataatttttaataaaaaaataaacaatatgaataaatttattattaactgcaacactttaggtggattaattatatttaagtttaactaactacatggatgttgaccatttacgtgacaacatctaataatttattattttttttattttttaaaaaaaagccactcaataatttctcataaaccaaaaattcagttatatagccacattttatatagaatagatatttttttttcgacaaaataattaatttatgttacattttgttacaactttttaatcttagttttgttaagttttattagatctgactaaattaacacttataaattgattagtgatccatttttaaaagaattattaaataatttttaaaattgaaaataaaaactaaacaataattatttaattataaaaagtaaataaataataaaatataggggctttttcattttttacacttcaaaacagttttttttttttttttttttttgtcattttttacggaattctacttagaaa

SEQ ID NO: 330526 - DNA, 1802 bp, Cannabis indica
acagacaattctaatggtcaaactactttcaagtttggtggacattatatcgataacctatcaatatctcatcgataacattgtttaaacaaacagacactactgatgaacatgcagaaaaatatccaaattcgcatacacaatcttaaacaatctaatctgaataatatacacaaattcgcatccaaatctataaaaattctaatttttaataaaaaaaaaacttacggttggattggtggtggcgcagtttgactccgggttccctcggtggtcgtgggtcgacgtggttctctttgccgtcatcgttcgcctttaagaaatgaagagagagacaaattgaggggtgaggccagttcatgggttcgcgggtgattgaggggtgaggtcggctagagattggtggagaaggttgggtcgactggtggagaaggttcgtgggtcgcgtgaagagaggaggacagagagagagaggaaaagtttaatttaggggtattttaagaattttttaaaattagtggaatcaatttgtacaaattataaatgggtctaaattttgatatggagtattttgttagaggcaaaaagtaaaatttccctacaaaattaaaaaaaaaatactttgcgagtcatattcccatttgtttcaatcttttttctcacttacattatcttacctcacttacattctttaatcattaataaaaatatatttttttgtaatgttttgcagtttatttggatttgatctttaattgatttacatattgtaatgagattgatatcttatttttttctttattttttctattgtgtttaagttattatttttttaggtttttatttattttatttttaactaaaaaatggtatttttgtaattttaaaaatataaaattttttttttaaaatttaaagttaaaactattaaaaaaaaataggaacaataaaaatgtaaaaataacatcagaaataaataattatgtacgtaatctttataagaattgtagtgtatttttacattttgaaatgataataataatatagaaacccaaaaatttaaaaataaatggtgaatggaaagtctgtcatgtggtgtaaatggtggtacttcattgtcttatcttcctagcaaaatagtctcaaatttaatgtgttgtttacttgaaataatgtgttttaccctccctttaatgttcacttgctttatgttgcatattactataaaataaatacttagccagattgccaaaattacttattgtaccatttaaatttaatgcaaaataaactattaattaaaaattacaattacaactctagctttatttaaaacaaatgtttaaaccaatcaagatttactggtgattaaaactcaaaatattcaatattgttattggttcttctagtgaatacccacaggcttgaattacttttgagaataggttcagaactttaacatattaaaatattaaataaattgtgtcatatattaaaataatttggcgtgcgtgactcatccggcctccgtactaaagaggtatggaatcgacagccttgattatatagtattatatatattatatatacatactatatatacactctttatatctctactatataccatctattatatatatattctatatcatgtacatatatactctattatatatatcctatatcatatatatatactctattatatatatatatattctatatcatatatatacactattatatatatatgcttttatatagtttacatttacatgtatctttgagttttgagttgt

SEQ ID NO: 330527 - DNA, 732 bp, Cannabis indica
atttttagaaaggttgtggctggctacattgatctataagatcagctaaaaaaacaaaaaaaacaaaaaagacaaaaaacaaaaaaaaaacaaaaaaatccaacattaatttgatggcaaagaaattaaagttttagaaattttatcttgggccaaaaacatcagcccaaaaaataaaaaggcttcccttatttatatcacatatatatatatattaatagtaaagtagtatattttatatattatatatacattacatactaatcttctacctttaaccgcctcattattcattcttttttttttacctttgagagcttgaagatacaggtatgtctctcttattcaattaatttgttccttatatatatatatttttcttattgaagagtcatgtcaattaatggtagtcgtttctttctaaatgtattatgtgctttcttgtttgctctataaaataatagtgtcgtactgtgtatttgatcccatttatataaacaacattttataataaatggattttcgcttgtttatgttaaaagaggctgatgttttctatatgtcctttttaatttatgtcaacagtgtactttcaaagtctcacagttgtttcttctaccacaaaaattagttttttttagctgttacgaatattttttttctttttgtattatttatttgagatataagactaaagcagaaatgccaacaaagtatacttgctcattaatc

SEQ ID NO: 330528 - DNA, 426 bp, Cannabis indica
ataacaaaagtcaaccctaaaactaacaaaacttcctataaacatgaataaatccataatagagcaagcttaaggctttacctcagattgagtcttcaaattcacacctaatagcctgtgaaattgacagaaaactccaccttaggttggaggttcttgctggccaaacaaagaagaagaagaagaacaatggaggagctttttcttctatttcctcaattcctaaaaccaataactaaaaggttaattaattcacctttattctcttaagtggcagtagtcactcaatggtaaagacacctatctaaaagggtaaaatgactaaactacccccacctgtaaacgtaatgaaataatcagattaggggtaaaatggtctaaatccacaaccccaccaacaccaaccacttgagcttacatgacata

SEQ ID NO: 330529 - DNA, 1701 bp, Cannabis indica
acgtttaaaaatcacgtaatacacctatgctagttagggtgttacatttaaatctacgcttgtggccaaaggctacacacagtgagaaggcatcaattatgacaaaactttctctcctatggtaatgcttaaattcattcgcattcttctttccatagctatagcatatgattatgagatatggcaaatggacgttaagactgcttttctaaatggcaatcttgataaagtcatttatatagaacaaccagaaaggtatgtattaccaggaaaaaatcaaaaggtgtgcaagtatcttaaatctatttatggattgaagtaagcctctagattatggaatatcacctttaataatactattaaagagtatgggtttgaacaaaacaaagaagaatcatgtgtatacaaatacattaaaagtaatgtagtggtattcctagttctttatattgatgacattctacttattggaaacaatgtagaaatgttatcatatgtaaagaagtggttacccgacaaattccaaatgaaagattcgagagaagcaagctatgtttttgggatcaaaatctatagagaaagaaagaggagaacattatcactttctcaagtaacttatattgataaggtgctagaatgattctcaatggagaattccaagaaaagacagttactgtctagacatggaattactctatgcaagaatcaatgtctaaagactccgcaagaggaagaggacatgagaaaagtacccttatgcatcaatagttgggagcctaatgtatgcaatgttgtgtacaaggcctgacatatgctacgttgtagggatttttagtcgttatcaatctaattcaagtttggaacactggatagctgtaaagcacattctcaagtatcttcaaagaacaagagatctcatggttatatattccaatggatagtaaaattctactggatatactgattctaatttttaatcaaacaaagatagtcgaaagtttacatttgggtcaatatttactcttggtggagtagttgtagttttgagaagcatttaacaaaccagtattgtagattcaaccatgaaagccgaatatatagcaacttgtgaagcagctaaggaagcggtttagttgatgaaattctacaccactttagaagtagttccagaagtataaaaaccattagtgatctactatgataatagtgcaacggtggccaactccaaggaaccaagaaaccacaagagagataagcatattgagaggaaatactatctactaaggaatatagtagagagaggtgatgtgacggtcttgaagattgcatcaaaacatagcctagtagatccattcacaaagacgctaccaacgaaattttttatggtcatattgctaatatgggacaaagggagatgtcaagttttcttttagggcaagcgggagattgttagggtttatgccctaaatacctgtaaagacattttgtgattattaaataaagagttgaatatttgatatatgtataaatgttaagttattaatattattattgaataatttatattaaatatcaaaaaatccattattcatatatgagattgtggcttgtagctatacacagaactaagaccacttagctataaattaaatagttagtaacatattaaagttatggaatctttaatcaacagttgctagt

SEQ ID NO: 330530 - DNA, 758 bp, Cannabis indica
gagttgcctcgacctcgattgttgggattcgaaccacggcctctgtttccttgccccatgttacgatttggctgattggaatttggtggtggtggctttctgaactgagccatgttggctgaagcacttgtgagatcaagagagagagtagcagcatgtgcttcaattcgggtttcttgattttgcagcaagaattgcacttcttgcagagtaaggttgtcacgagaagtaaggttgacaacaactgcttcgtattcagggcccaaccctgcaagaacatagagaatgagttgatcatcagagatggcatttccagcagcacgtaatccgtcagcaaggtttttcatcttcaggagatattcatcgattggcaaggatcctttcttggtattctgaagttggctcatcaattgaatcatgcgagctttagatgtggtgccaaacaattgttccagtgttctccatagctcatgagccgtattgcaattcacaacatgtcccaacatagtttcagaaatggaagacattagccatgatagcagaaattgatctaaacgcatccaacgtatgtattcaggattggttacctgtgtggtgctctcaggtggttgtcgaatgcgctgttgaggaggattctgattattcagtatggattcaagatcatgtgcccgaatagctggtagaacttgtgagcgccagaaaaagaaattgttgcgatcaagacgcagtgggggaagaaacattgaggttgggacagc

SEQ ID NO: 330531 - DNA, 761 bp, Cannabis indica
ttttaaaaaaaaaaaaaattcgatgatgtttattctagttattaagacttgtgtgttatagtcattttatacattttaagagattcagaatatttcattatacaaaaatagggtccaaatagtatattataaaataaaagagacacatgtacaacaagttgtagattatatcgtgcagtggcggagcaacaaggggtcatatgggggcacatgaccccactcatgttttgaaaaattacatttctatatagaaaattttaaataattttaattttgcccccataaaatttaatttttagtagttttatcctttaattttttttttaaatttttatttataatatttttatgtttatcctcataaaatgtatagtataaagtttaaagaaagttctccaacaaaatttatattttcttttattaatattctatttatatttataaagaaaatttgccacccctaaaatacatggttggctttgccacagagattgtgtgcaccataaaagctctctgtatattattatggatgttaaaatagtaggatgtgtattgatttcgtaaaaaaaaaaatgcactataaaagttccttgtatattattattgacatgtttataaaatttaaaaatttatttattttattaaaaagataattttaaatggatgtattaatgtactcctatctgttttagcatcataaataactttttagtccaattttttttctcatgatcatgcacgttataactattttagatatc

SEQ ID NO: 330532 - DNA, 667 bp, Cannabis indica
attattattaattaaaagagaataacaaaataagattataattacttcatattgatattagtattagtaaactaaaaaataataataaacaaaggaaaaaggaagggtgacaactcaataatctattaatatacagttgtctcatataaagaaggtgtgacaatgcacattctatttagaaagagttgtaattatctaattacttgatttttttctaattttttattcaatatttattatgagtaattaaaagagagaataaaataaataaattctaattactttttaattaatattataaacaactaaaaaaaatcgcaactcgagaataatctattagaatatttaaaatcaagaatagtttaaaggcatgactttttattattgtttttattgtaataattcaaggaaaaaaaatacttatttatttttataataatttaaattacatcaaaactatgaatttaaacagagtaatcagtttaaataatagtaatgagagattgagaaaaaaattaaaaactatatatagcttactataagaatataaaataattttaatatttaccattctcaaatgttacagaaatcgcgcgaagcgtggtatcattccttagttttagtataaattaaaatttaatatagtattatataaaaatatgatata

SEQ ID NO: 330533 - DNA, 1069 bp, Cannabis indica
atgtggcattgtcaccaagttgtggtcaaatacttctgctagctagaaaatatttatatacattatatggaccgagcaagtaattttgagaaaaataatcttttaggaaatgtagaatacaatacatgcaaataaaataaagtgatgaggaaccgttaattttgtgtatgttcacatttcaaaattgataaaagttttttctaaaactgataatatataatagtaccaattacctcaactacgggagtatcatatgctgaagatgaaaactaaagttggcgtcgagtttctttattaagtgaggtagtagcatttatgtcctatacataggataaattttaacaaaataaatatataattgataggttagtaaattaaaaaataacaaaataaaataaaactaaaccagatttgaagatgtggcattgtcaccaagttgtaaggcctgcagacttaaaagtaattttagttcgtacatattatgggttaatatttgaatttataaaaaaattagtattctaacctgtgcagtaggtatgtcattgccattgctttggttgttcaatatagccttaagattttcaacttgagattctaaatcatctacttttgactctagagcatctacatacttattttgatttcttttccaagttgatttatctttccactcatcgaacgggcagacacggaatccaaacatgtgcatttatccatatttttctctgccactacaacattcaggagcaatagcggcgggcccctcggccgctattgctccacaatgtggccgctaaagggcaatagcggtagacctcggccgctattggtccgccgctattgcttggccgctactaatagtattagcggccaaaaacttgctccgccgctacaacacccaataataaaaaaaaatattaattatttttaaaaattatttatattatatataaataaataattaaatatttaataaataaatctaattaatataattaaaacaatttaattaaatatttaataaataaatctaattaatataattaaaacaatttaataaaatttaaaa

SEQ ID NO: 330534 - DNA, 681 bp, Cannabis indica
tcttgccctatatatatatatatcgctattaaatattttaaggtgttcaacattttacgatgtgaaaaatactgtgagtagttaacgaattttttatattatatatattaaattaaaatatgtatgatccaactaatattattttatactaataatactatatatatatatttacatcttataatgcttggtaccttaaatatctatgaagcaaaagaaaaattagccataaataaatattatatatgagtatatatttaaataatatgatctataaaatggcctcatattaaagctgctcgatcatttttttcttattattgtacggactagggttcaaagagaattattgtgtaagcaaaagtaacaacatatatatccaattcatttatttatgcgcaatggcgggtcaggataatttgtataaattatcatataaaatatgtgtgcataataaaaagttaattatataggatatctttatctattaaaagtacttatttaacggtattttttggtttaacagaaagaatataagaatattctgttaaatttaacgattaggtttgatcttctattaacaaataaacccaataattaaaccaaaaaattaaacaatcttttaaatattaatagtctaaaccaaaaaaattaaacaatcttttaaatattaatagtcta

SEQ ID NO: 330535 - DNA, 1164 bp, Cannabis indica
tcccacaccgcctggggaaggtcaagtggatgattttgagacggtgtaggtatgggactacacagttgaagatggcttaaatggattgattggtactacctatatcaccaaggtgcatcttatttttcggtagcccatcacaaaagaactccagagttaagcgtgcttgacctggggcaatttcaggatgggtgacctcttgggaagttttcctaggaagcgtgcaagtgaggacaaaacacgctcgaaacactcgtgttggtctgtagggtcagtcgtcagtgcatgaaacagccagagtgacgtactcatgtataagagccattcattccgtgggtgtaaagacccaatggagggttgaagcggggacgttacatacttcccccaaactcataattggaaggacttacaattgtgagtttggatcaaaaaataggaaaagtatggcttgagacagattcggtgaacccgtctacaaactaatctgtggcaagaatatgcttgacttggacttgatggcgaagaactttttctcgaacaaaataaaggttaagttcaatatgttttgttcgagcatgcaagacgggattagcagcaagaagaaccgtgctaagtttgtcacaccaaacaattggaggcttagactgaggaatctaaagttcactaaaaagggagtgaagccaagtaagttcagataccacattagctaagcttcgatattctgcttttgtactcaatcaactaatggtttgttactttttacattgccaagtgattaagtctccccctaagaagatagcaaaacccaagttgattgcctatcatcaggatctgatgcccaatcaacatcacaaaaagtaactagatcattcaatatagacttgtaaatatgtaagccatagtcggttgtgccactgaggtacctaaggattcgtttgacagcttgccagtagggttgtaaaggagttttcatgaactaacgcaccttgtcaacactaaaggatagctcaggccgagcaattaacagatattgtaaggctcccacaatcgatctgtaaagttaaggattgtcaaatggttcatggccatgagcaaacaacttcaagccactcaccatgggagtgggaagaggtttttgttggaagttattttaccaggatctta

SEQ ID NO: 330536 - DNA, 1191 bp, Cannabis indica
ttcatttgagctttcatcccaataccataaggcttattgacgagctccaaaggttgatcaaatcgtttaggacaaaacctctcggaatggcctattatgccacaaacaaaacaaaaagtcggtagatactcatactgaaagttagcccatattctccattctctttgcacagcttcatccttctttttaatggtttatcgatgtctaccgtagctcttacacggaggtaatctctccacaaaccattgaaattcttggggtccgacttaacataacctcccacatacgcaccagcactcctcaccaccttatccagcataaatccggtccttaatccatgaatctgaacccaaaaatcaatcttattcaataccacagctttaggatcctcaccttttttcagacgatgaaacacaagaggacacttgttaaacgtccatgggctgccatctataaccgattgtatatctaattcatggtagaattgaaaaagatatctattagtgccaagttccttgatgtataccccctttcccggttgccaaagagatgccatcatatgcctcattgcatcaaaatcaagagtccttcccgtaataaaccttcccactaagcaccatctatcatcaaacaagatttcctccccttcatcttccccacctatgagtactccttcctcctcatcctccaaactgatttgaccatattgttcattaagatcaaaatcgttacgactgctcgaagccatcatacgcaagacaacaagaacaaagaataaaaacttagaaagacttagagaacattagaccacatgtcaatagacaagacttcttgaaccactcaactttcttttatactgcaatggttcttcattgaagaagaaataatacaaaataactagtcattattcttttgttaatatatatgatacatataaaatatagaatactgtacaaggattttgatttctaactatttatgtgtgcacaagtgttgcttgaagaattctgaaaacaatattgtaagtattgttgcctaaactactgtacaattatatataccattcatgtaataaaataaataaattatcattttatactaatattttttttactttatattgcaggtttttctcacacaaaaacacacatatctttatatattaaaagtgcctatctaacggcatttctt

SEQ ID NO: 330537 - DNA, 607 bp, Cannabis indica
ttttttttttaattaaattgtaaactttccattatttattaaaatatctttaaaaacgaatttgaaatgagttagagaaaaaaaaagcatgttattggttggatatgagaaaaataaaatgaatggagtaacttggagatatatatatattctgaagatgagtcttgtttaagttattaaaaagatgtgcacataatttacataattatattatattgtaaaataatacaacaagatcctatttttggacgtgtttaaatgaaatttattaaatataagttaaaatgtaatagaagtaatttagaacaattttctgaatcacttcaaataaataaataaataaaaagtaattaagttggcgtagagcaacaccatcaacgcctcacatttcttttgctgcacatctaagcttttacacacaattttgagtaccaacggattgaatgaaactgttaaaataacaattaatcataatcattaaagtcaagatctagtatttatttagagcatcaaagacaataaaacacatacctctcataccatccatgtgagccattatccttcaatgtcttcaatgagaatcaccaccaatccttgagcaaaaact

SEQ ID NO: 330538 - DNA, 1062 bp, Cannabis indica
ataagggggttttgccaccaaaaataaagataaaggggttaagtagtataaaaatcaaaaacaaaacataagggggtttcgccgcaaattgctctaaaagatattattagtgcctagtactcctgtcggtgttataccgttattggtgtaattaagtattgtatcctatataatttaagaaaataacttttattaagaaatattactaactaatcgtgagacgctacttataaaagcaatagtacctaatagtttgaattgtatgagcgagaattatcccgcccatttattagcggcggggtccgctgctaatactaatagcggcggagcaattgcggcgggtccgccgttactagtattagcggcggagcaattgcggcagactgcccgccgctaatatgttttcaaaaaaaaaaaacggccaacattagcggcggagggcgtccgccgctaaagggttaaattgttgtagtgtgttgggtaattgctttgcaactgtcatagataataacaatacataaaactacattcaatgctatattgctatatgcaactacactattttccattttaaaagaaatggtgatggtgaggtatgctatctatctccattcacggaaatggtgatggttaccagggtcgggtagggcgaccggggttattgaccaagacccatcagcctaagatgccctcaactagagatagccctaatggttactactttttttttactttataatacatcaccaatattctaatttttctattttacaatacacttttatattacatcatacatcaaattctttaaagttatcacaaaaatcctattttttaaaaaaattattatatttattcgtttcaattatataatattattctatacacatatctctatacaaaatagttattaaaatccaaaacaattaataaaatatgttaaaaacaattaataatgttttataaatgtagagcacgagtagagtattttaataaaatttcgaaatgaggaagtgttaggttatttttagtattaattttagattaagtttagtatatttt

SEQ ID NO: 330539 - DNA, 796 bp, Cannabis indica
ttctaatcctaatttctctctcaataaattgtaaatcgctattatcacataaataatggtaattaattaagagtgagagatctgtatagatgtagctagatttaaatggcatcatcattctcaatctcacgtatggcttttcaagtaagttgttcaatagacggtaggccctcaactccaaaaacctacgaccagattatcaagaacgcattctcttcaattaatataatatcctttctctttaagcctttctctcaaggtgaaacagtctgaaaatatctaaatcccaaccacagaggttgagggaggataagggttggcaatggcgtgttcgagcctgggtttaggttcatgcccaaaggtgcttactttttacccagataatactttatttgtatttaatttcatgcatttcagcaaaaattattttaatactcttccattgcagacaccaaaattccatgtttattgcagaaaaaaggagaaaaacagagaatttaggatttgaggtcatgttgtaagttttaaaatttaggattttgataagaatgagaggccattgctacgctttacttatgctaggagagagataataaacattagactttggtaaactggttttgaaagtgagtactggggggttcctgtcatttcttgttgtagggtgagctgctcatatagagtgtgaatatactatagggtgattaatctagaattagaacattctcagcatctcctaagctctttatcatcgtaaagacctttattctttttttgcttctattatcaataatag

SEQ ID NO: 330540 - DNA, 821 bp, Cannabis indica
aggcgaggaggagttgctattataagtactaaactctgtagaactagtgatcataaagagatcaagggaattaaatggagacatatcccaatcccaactagcaaccctatgagtatttgtaccatattggggatcaatttcataataagaactattgttagtcagcttcatggaacttagggtaccaactatcaaacttatgggctattaggtcaacacaatttcagataaaaaagttgtattgactatcttcaaatttcaataaagttgttggcttggccctaaagacggtaggagaccatctgtaaatgtaagaagttttacctcggagagccccctcttcagtctcaatggtttcccgagtggttacattatttaagttgtgagtgcaggcgacgtagtcgcggtcctcttcttcctcaggcactagtatctgctgccaagtaggatacttattgtcttaacgccataagaccttagaaatggaccaacgtaaggggcaattgatctaacttttgattcaatcaattctgcatagaaagtaatgtcaagtgttgtagccaaaatggtatacatattacatttatcaactcgcaagtgcacaaatctttattgtagtataggttataaagaatgagattgaactcatagaaattgcgtgagatcgaagaaaatacttatttaatgacagtaataaatattttcagtgatatttgggtcgattgggcatttacttcttgggttgtttcagcttcaaaaaaactatttttcatgttttgggccatctttttaccatatatatatttttttttcttcttttt

SEQ ID NO: 330541 - DNA, 664 bp, Cannabis indica
tcaaaaattgaaatttccctatcctaattagcctaaatttaaaaaataagacacgacaagagaaaatataagcttaaacattaaacggtacgataagcctctatacataacacaaacataaactataactataaacaaattactaattcaaaaatacaacacattaaaaaactcgataataataataataataacaataataataataataaatatatttgtctaactatatataattaaaataataataaaactcaaacataacataaaatatttatattttataattaaaaaaaatataaaactaaaactatatactaatttactttaagatttttaaaacaaaaaattaatatttattatatcattctagtctaatgtaaatcatatacattcgatataagtcaactttagacataccactttgtcttagtgtaagtagactacataatcgattatcacgactatataaattcggtgtactgataaatctcgagactaaataaatttaaagcatataatcataattatttttcactgtgatgatatcactataattgtaaataactatatgttcacgttttaatagaatttatatattaaacatataatcattgtagagaatggtgaatagaattatgtgttgtattccataaaatagtat

SEQ ID NO: 330542 - DNA, 707 bp, Cannabis indica
gaaattaaatttgttttttttttattgataactgaatagaaaagattacattacaatagaattttatttagggcacaaagcccaacactatgttgttggcgcaccaactctccgacctgagccacctgttcgacctccaaacccacattgccccgagagagagatagagatagagagagaagttggattcgctttgaagttgataatatgcggttagggtttatttgggttgaaggaggaagaagaagatgaaaatacaggttatgggggtttgttcctaaagaaaaagaaagagaaagtgaaagagaaagaaaaagaaaaaagaaaaaaaaaagaaatttttttatattttaaattattttttatatttaaaatttgaattaccacgtggaccattaaaaacgtgacatgtgtacacaagtgtacacgtggacagtccattataacatattattgagatttttggatagaaaggtaatgaccaaaacaaaagtgcaagtttattgagatttttgaatggaagggtaatgaccaaaacagaagtgcagtttaagtaattttgccactaaaaaaatcaatttttgtgattaattgtgaacaaatataaagtataggtaattttgctattaatatcattaaaaaatatacttataaaataaaaaataaaatatattttaaatattaagtcaagaaaattaatataaaaa

SEQ ID NO: 330543 - DNA, 583 bp, Cannabis indica
aaagtttagaatgtattttattctagttatgttttcattccttctaactaaatactacataatagtgtgtttgttatgtgtgtttgagttagagagaataaaattgaaaaaagtagacttagagaaaatatgaaactagcgttgaagggaaatattattactaccaatttaatttaaaaagtgagacccactttaaaacatatacgatccatggtcattaaaaattaatttaagtttgatattttcattctcatcacgtctaatcctcgtatcaaacgccccaagggtttgtacgtagtagatttatttagggataatttacaaaaaaaaaaaacgaaaacaacaaaaaattacaaaagtacgctttgtattgaatttttcaatatgtttagggttatttaaattttatttacataaaatacgacctttttgtatatttttttttgttgtactcttgttattttgttgttaattttttgttatttgtatattattttttatgttgttttgatgttgttttcttgttactttcatgttattttcttgtatttttataaaataccgtaaaaatatatatataaaa

SEQ ID NO: 330544 - DNA, 1382 bp, Cannabis indica
ttatgaatccagtactgctaaataatgtgattttttcatccaaataaatatttttttctttctcattgtggaggttcttagcacttatgatcgattgtcagaaataaaaaaaaaaaaaaagaaagaaagaatggaaatgaaactgaaactgaaagaatagttttcattaatgaaaaagagtaattgatgagatcgattatatgtaagttttgtcatctaattttgttgcaataacagttataatacatttaagcatcaaacttaacaaactaataattctcaaaattaattgtcataacacctcgcctcaaagtcataatttagacattcaaatttaagtttagtgcaaaaatttacaaagcaactgctagtgattgcctttatcaattcatcatctaactaatgaaaagtaagaacattcttaacttcaatagccctttgtaaaactttttcttgcacaaaatataagtcagattcaatgtgcttagttcaggcatgtagaataagattaagagtcaataacactgcattgaggttgtcagactagatagttggtggttttgactgttgaatatatcaggaaacagagatacagtctgttgtttcttgcaagaccaagctatcaagttgaaccaaagaaactggtatgacaagaagttcatcatttggatcagatgccaagacaatatcacaaatgtccataatggcataaataggaggttcttagctgaccatgttctatacttaaaaatttctcataagaaattaatttagaataattatagcaaactttattaagtttatattagggctatattattatatagttaaaaattttaaatattatatgtatgtgtgtaattaatttcttaaattagagaatttagatttaaaattatgtgtgtttgaggatcatattattatgtgatatatttaataactactgaggaaggtggaattgttcaagcaagataacaaaaagtcatgaatggtacaatgtactagagtgtgatatttaagatttaaatgtattgaccatttattaatagaaatttaccaattacctttagtggtcgagtttctcacacttagtctatttctgtaatacctgttggattaaaaatcttatgagggcacatatgtataatgtatatgctattataaagtgtgatacaaaattaagtgaccaattatgttatgggtatcaaaaggatattaaattatcatggaattaatgtgtagataccataagttaatttataatttgttgaggggccaaattataaatacctaaaactcattctaagatgagtctataaataggtagtggtccccaagaaacactaggaaaatactctagaaaatagtgtattcttggaaga

SEQ ID NO: 330545 - DNA, 1230 bp, Cannabis indica
cagcgttcaagacgccaatcgagatgtcatcatatcggttggtgtttggaaaggcttgcaatttaccggtggaattagaacacaaggcgtattgggctatgaagactctcaatatggatttaaaggctgcaggagagaaaagattaatgcaattggaagagatggaggagcttcggcatcaggcttatgagaacgctaagatctacaaggaaagaactaaaaagtggcatgaccgaagcttagtcagaaaggattttaacctgggcagcaagttctacttttcaattcaaggttaaagatgtttcctggtaagctaaagtcaaggtggtcagagccatttacagtggtcaaagtgtttccctatggagcggtggagctgaaaggagaaagccccgatactttcaatttgatcaagccaagtcagccatgattctggcgtcactatgaagaactccgtcaatgtctagctgtgcgacgataaagacagcgctaattgggaggcaaccctagttttctttatgttttagttgaactcttttatgttttagtcgttattttctttttctgatctttctagttttgtttagaaaactggtaaaacaattttgtggttttctttaaatttttgtagtgtataaaaaaaaagtttttttcgaaaatcgtcccagtagccgcggccatacgatttgggcagaaagctattttaggtgcctaactggccgcggcgatatctcctaggcagagagcacattttttcgtgttatctgaccgcggcgagataacacgaggcggcaataaaaagggattcataatttcaaaattaaaaaaccattttttccaaaatccctaacaatgttcaatagagttcttgtgattaggatttcgtttgtttgtgagtgggttatttcccgggaagtggatttttagggggaagtgcagccaaatttttttaaaaaaatcttgagtgttagaatttttgggtaagatgggtcctaaaagatctagagtgagtgaacaagggggagcttcatcatctaacccacctaggggtcgctctaatctagatagatcgaggtttgctaatatggatgctcaagagcagtttttcaaattgaaagataggccattcattgaagacagggggatagatattattaaccttagccaaactacaaacattccagctgtatttgactccatcagagaacaaatctaaaataggcagtggac

SEQ ID NO: 330546 - DNA, 922 bp, Cannabis indica
attttgatatagtgtaaaaaaaaagtattttttgatatctttttcaattaagtagctaaattaagcatagtaattcaaatttctcttttattattcactatcgagctaaaatctaatggtttaatatttttaaaattaatgtttatagttaaatttgtttattacccatcaatgggtaatagccattaagaagtattccatatatatatataagttgaaaattttaacaaaaacaacaacaacaataataataattataacaataaagcattacttatcgtttcttagcccctcagaaatttctaaccctagggtattttgtcaaacctgagtatcctaaaatattctaataattctataattaacttatctcaataatctcatcaattttttcaattaaacccgttgtggtatttttaacctccgatcgggtctccaagatcacaaaatatgaaatatttttattatacaaataattcacactatacttacatattacaaataaatttctataattaatagattatgcttgttaatccacttatggcaaaatttataatttacgctgaattaaattagtaggatcataatcatgctcattactctctaattaacccataatatatactaactcctaattattcataattaggttttcaagatagtgtcacaataatacagattagtattttaaaggtaccaggaatagttatgagcctttacaatttaaaacttcgttagatatggcctccgtaggattgggcactacaaattctgactaatgcaaatcttcataccctctattactttgcaaataagggataggaaaaaccatatcctgtctctcctagcagagtaaagaaatataactctgttgacctgtaaagcccgcttagttaatttggaaattagcagttgttta

SEQ ID NO: 330547 - DNA, 499 bp, Cannabis indica
attaataaaaaaaactgtttaaaaaattattaaaagtgacttctcttctccctctctctcgacctgcctgctctggcgatggcattaccctcctccccttctctcttatgtttctctctcccttctccctttgcctcattgcttaggcgacgacgaaggtcttgatggggcaaccttgaaaaagcgtaaaagaacaaagcaccagaaattagttctgtcgtgaatagtgtacaaattataatgatgttttttgtggtggtgttggactcctatggggtaagaggaagctcgatattgatcaaaaattatgttccgagaatcttcgtcatgcctttgaaatttctctggtcagtttcggattcatcgatgtgaaggaacatggtgttctctgttcccggtgaccaaaacccattcaaaagcccgttattcaaatctttctttaaaacgcaggtcttttattgccataataaacataaaccctaaacaatcacgattctta

SEQ ID NO: 330548 - DNA, 1082 bp, Cannabis indica
tctctatcattaccgtatcacctaaagtaacttaggtaatcttctttgctttattgataccactacttttctgacgttcttttatacgctagcccagtaacgtccacgcttcatggggaagtttcctaaatgaaatcaccccaaaacaagaacactaaaccatagaattccttcatggtgggctaccaaacacaagattcttcttgctaacataagtagtcccacgcctacataatctcaaaattagtacacaatcgccaccttcaattcacttaagattccaaacaatactcataaattgtcccaactttactaatggtagatcactcataaatagaatattttgttatttgaatcaattagatcaatgcgtctattaactactcgtgtcctatatttcacttaggaatatcagcaatttaactcatatcgtcatttctctaatttgtctaccccgtcaaatgggttaccactaaataacatacaagcacagtctattaagatttcttgatgtctgtaactgaatgtacaattttttatatacattgaaacaacaattgtaatatttcccataaaattttaatttgagtgggccgaaggacagatatttgggtccctttgaatcatatctggcacttgtgcaggacccatacacttttcttctttaagatcagtctttcttaactacgggtaggttcttttaaaatgacccactacccaacaataaaacaagaactggctctacattggttcaaatggcgcctttttgcatcttaaacactcaagagaaggtcaccatttcttattctcaccttgacctctatcctgaccaccctggaacctttttatcctatcccataattggtggttcatttagttttcacttcctgatctactagtaagttggcttcatatattccacaacttctagtggtacaaaaataagtctcggtagtacaacaacagacacaagattagcctattattctttcagatctcggatctgttttctcttgctgtctaatcatatcctgcataacagaatttacatgttcccagcattatggcaataaagaattctc

SEQ ID NO: 330549 - DNA, 971 bp, Cannabis indica
acgagctaagttgagggacgaaagcttcaatttataaccgaaaaagaggaagaagaaaactcaatttttctttctaaaagttttagtcttttttttttcttaaatctttgtatacatgatacagggctaggtaatgaattaagggtagatagtctcttcttgtcttcttttttctttttcttagtacaattaatgtttaattacaaattccttttcactctaacttctctgttgttgatgatgattatgagcttcataatatgaccaaaaaatagcaactttatgagtattcatatttgacttttaatttcatgataagttgtgtcaagtcatttgtacggattcaatagttgatttaatgatgaaatggagaaatcaaagctttttttttttttcttacttgtggtaaaaatgaaaaagaaatgattttaataaagaaaccaccaaatcataagacccctaattagtaattatcactcatttagagccatgcaaaatccaaaagcaaaaattgtcaaaatcattagtaaggggatagtgaaaaaaaaggcttcattgaatttatttgactttttgaagtacacaaacaaataatctatatagtacatacaatagttaaggtgctccttttttttagagaatctttctctctccttggatccaattaaagaagctcccacttaaatttaataataataaaaaaaacatggtaaagggtattatgtgatatatgattaatgtaatttaatattaaattttatttattttaatttaataaatattataaagaattaataatccaattatatgttgtggtctcatagtagtgttagatactttgatgacctatagcaatactctaataaaaaaagaaaaacttgtattacacaagaaatgttttggtagatactcttgtttcggtatttaagagaatttttaattaatttttttttataattatgtacattgta

SEQ ID NO: 330550 - DNA, 684 bp, Cannabis indica
gtccacgtatattgggcgattttaggagcaacactcttgttcatggttataatatcttggagtttgacactgaaataatcatcaataacaaaattaataatcctttactactactttgttcgttaatgtacttataattagtagaatgacaataattaggaggagattcacataaatagatagaaatagtgttaggtgtatatatatgtatatatgttatgtattaatgggggaatgagataagtggtaaattgatcccttgcacgcaatatataataacaaattgaaaactttttgcttcatttaaagcaattagtattggcgtggattggaattctcaaaaagtgagcacacaatatatatcctaacacacaaacacatttatttctttcttttatttccaatcacaaaagagagcacactttccactcattacaactatttaataactaatcttacgcaaagaaatctcaattcaacatatttatggcaagcaaacaatgttaggcaatgtaaatatgaaaacaaatgtacatttatgtatgtacatactaaactaatgttaaagagaatcatagtgcttaattattgattaatattcaataaagatattgttggaaattattttatcaggatcttagatctactcacaagtatgtttattaataccctaaatatgaactt

SEQ ID NO: 330551 - DNA, 1245 bp, Cannabis indica
ttttttttttaattttttttagacatgatcataatcatcctatttttaatgtcctatcctattgtatagtatatatgatagtcgatatatttaatacttttaaatgttatatttttataaatattattgtacttttatactcaatctttcaaaatatttggtggaagcagtgttaaaatatatattgttaactcaaaaaattttcctggtgacattgatatcaatattttacacgtgacaagaaggatgacattatggagttgagtaggctcgagtcataggagtcgactttggaggagaccttagccctatgcccaggttgacttccagagcttcgggatagaagtttagacttaaataacttgaatccaactcactatctttcagtattctataccatagagacatggagcaatcaaatccaagtctcgacagctgaaattatatgaacttgcaacccggaggccaacctggaaacctagggtttcacccagcgcccatgttgatattttcaactagggttttagttttcgggaccgtcttagttcaaatgggtcaaactttgtattgagatataaactagacataccacaaaaatatttgaggtatgagaactagattcggaaaaagttaatttttgagcaccgggagcactcggtgcccgggcacctagcgccaaataagttgacaatttttcaatctgggcaccttcagagtatcagattgccaattcgacttttgcatcttcttttttcttcataaaaaatgggaagataggtacttttggagaagaaacaacacttttgggttccaaaagcaaggaacaacgcccatattgacacttggggctggcccagcatccaagttaacattttgtcaacctggaccaattttgatgatgtttttcgagaacttttttgagcatcttctctgttttcagcaactattaagattcaactatttcctgggacaaaatggaacttctgaaggcccaagaaggggactagcgcctaggttgacatattgtcaacttgggttgtttccgatcaagttctccaaaaagtattctgggcattttttttattagaaataatgaatattcaaggaaacttagggagaaaaccataattttgagaccctgcaaatagggctcagcacccagactgccctactgctaggcccaacgcccaagttgacaatcaacatgatgtgttggttttgatcactcaaatgccaaatctgatt

SEQ ID NO: 330552 - DNA, 767 bp, Cannabis indica
gctgaaataaattagtaggatcataatcccacttattacctgattaactcataatataaatataaactctaattattcaccattagacttattgggatattacatttggagtccgtggctcttcgtactggttcgatgtgtcatcagcggttgggttctcactaccttggttggtcggagcattggtgtcagctgcctcgtattcttctttgtatttttgggcctcacaaaaactaagatacgcctctttattttgattgaggtaatcaaatgggtttgccttccaaaattcataaaagacatctagggcgatcgtcttcaagctttccacctccttatggagcatctccccctcggtaccaaactttgtccgctcagagtcgagagtttcctctaaaacattcttctccttggtcaaatgggaaagaagagtctgaaggcctaccctcacatcgtttagagtattgacatccttcgctagagtatcattgtccgcttaaagctgagcagtggatggcattgttggaaatattttacaaggatcttatatttactaacaagtatgttatttaacatcctaaatatgaacttctaaaacgatatgaaataaacacatataaagtatgagaaaccttacagtggttacagcagaatataatgtctccttccactcagatctctaacccttgtatactttctatcgcagagtatcaccaagatctgagcccgaatgtccttctcttgaattgggattcttcacatcttcc

SEQ ID NO: 330553 - DNA, 1662 bp, Cannabis indica
aatcttcagccttctatttgtgatctggggtgcctctatcagtcctcttactgacattaccacccacattagggttcgatgttgtgatgacatccttagcagcttgctctttaattacgtgttgttctgcctcttcaacaatcaacgctaactcgatcactttcttgtataatgtgtcatgatcggtggtaattttcaagtcccaactgatagtggaattcggtcaccttacatattttttttctaggtaaagtctgtcggtaccaaatcacccacgaacttggatagacgatcaaattccagggtttactcgaccactgtcttcttcccttgggtcagcttcacaaaatcttccatatgtgaagttcttacatcaatgttataaaaaatttcttcaaacatggtcataaactcttcccaagacatggtgctaacatctcgggtctgacccacaatatcccaccagatacgtgcatgatcttgtaacatgaatgcaacacaattaactggtccctccccgtcaccctcatgttatctaggatgcgggtaatagtgctcatccactgctcagccttgataatatcagtacctcccaagaacgttggaggttgtagcttcacaaaacgttcgaacacagaatctcggtgtggcagaataaatcttgggttacccaccagtggaacaggagctggcggtaacacttgttctactagagctgccggtgtcggttgtctaaactgatgcagttcatcttcttgacgaagtataatgcttcgcattttgtgaattatttgctgccaatcagcaggtagattagcattattaacccccgcgttatcccccgaattctgcggaggcgcaggcggtgccagtggattggcttggtcattaccaagctctatgtgctcgccttgtggtctagatgattgtagaggatccatttttttacaaatagccctgaaatcaacaactctggcgagtcaggcaccagtaccacacttacgcacttattgccttaaccttaacttaaacttactatttctcttattaaagtaaacatttatcgatttaaacattaatcatgcttttcatataactgtcacttttagatgctcatatactgcctaaaatgaaaagtggtaattaaataatcacataagcagttaagcatttactctcaacacttactgcaccacgagtcgagcttgtctttaacgatgattgtacatattcagccagtctacaggaagtttaaaaaccttggcactctgataccgaattgtagcaccctaataattaggcaggctaccgttttcagataaacataaactaatcccgctaaacagaaattactagaaataacagcgacattaaactttaaattatttacagaatgaaaacataacttgtaactatttaaactttacaaatcattctaaaatattatacatgtttcaggatctcgtaaatttttttcacaaaatattacaagtcattttaacttgtcgacctaagcggcaaaactgagaatataaaatacatcagctggtagacccaacccacatggtctagtgtgccctgaacatgtacaatcgaccgccaagccctcgaacttatggttgatcacaaccaaatttaccctttcctgcacagtagagcacc

SEQ ID NO: 330554 - DNA, 598 bp, Cannabis indica
tgactaatacctttagttacggatctttatttagtcaataaaagaataataatttataattagtcacaacttttttacttttagtcacaaattttattattaccaaaagtaaaatttttacagtaaccatttacattatactattttttccatacattttatttttcccataatatattttttaaaaaacatatgtaaaaatgaaaattccccacttttaaaagagattaatttgctttttcattaaaaaaaaaaagctaagagagatagaattgatcttgttaaaacttaaaagagaaactataatgagttcatctttgggcttcggtttattgggtttcaataaaaagcccattgtactctaaattcatatatgcgaaatgtacatatatgttccataacacatttttttaccaatctatcttaaatacaaaaacaataaaaaaaaattacaaaagtaccgtctacagaatttttaacattttataatctacataaaatgtgatctttttatgttgtattattattattttattgttaactttttattatttgtatattattttttatgttgatttgttgttattttgatattttt

SEQ ID NO: 330555 - DNA, 1039 bp, Cannabis indica
cggccttttttcatgcaatgaagactttcgaactcccaatatggcattatcttcgatgagacgaaccccgaataaatgcactttaattttccgaaatgacttctttaagactatccttcatcctattggcaagacattttgctataatcttataactcacattgcaaagacttatagggcggtagtccccaacttgtttcggctgtttgatttttgggatgagacaaaggagagtcttattgagctgtctacagtccttgttattgttgagtatgtccaagcaaacctttgtgatgtccctgcctataacttcccaatgattctcatagaagagccgaggcatcccatctattccgggggctttcatagcgttaatttgagataaggcaagttgaatatcagctgctgtaaaatctgttagcagccggtcattttggattctgctgaggcgtaacggcacaaatcgttgaagggtttcggttgtagcttgaccaccatccgttgctgagaaaagatcttggaaatggtcacaaatggtgctttctatgtcttctttagagctcctccatatcaggtttttatcaaacagtccattaattcggttcttttttcgccttgatgttgctttttggtggaaatatcttgtgttgcggtctccatgggctaaccaaatagctctactcctttgtttccaaaacaattcttcttttgctagttgaccattgaggtctttttctagcattttaagtttggtgaagccatcggttgagtgttcattcgagtacttctccacctctttttttagatcttttattttggcaaggttggtctttctttgggttttattccattgatctaacatagtaccacagttgtttagaatctcatcaaagtctgttgccgaagtaatgcaattgccttctttccaaatgtcttcaattatttgttggcactcttccttgtcggcccaagccttttcgtaatgaaatcggtatccccatcgttgtttcttttggtctccacaaggaattgtattgaa

SEQ ID NO: 330556 - DNA, 611 bp, Cannabis indica
ttggttgtaataaaaaaaaaagttgtctaaaattaagctcagggtcctatttttaccattttagaaaatatagggtccattttatcatttaacaaaacacagggtccaatctgtaacttttacaaaacacagggtccaaaatggtatttaccccaactttctattataatcactttagttaatttttactttcaaaaaattttaataattatattcgaaaaattttaaatataatttacagtagtgaaaataaaatttatagcatttcaatttatcacgagtattcaaaaaatttcaaatatatttttagtacggtaaatacttcgaaatttattaaaaatttatgagaataataatgttgtaattataacaaatacaatcatgataaacagaattgactaaggaattctaataaagttaacggtaaaacttctctaatacgagaattgctaattagttaatgtttctagtactataataagtattatctagtaacataaaaaaaattaattaactaactcataaaatctaaatgtattatagaataatgataaaaattggattaaatataaatttagtttattttttaactaaatttaacataaatttta

SEQ ID NO: 330557 - DNA, 1103 bp, Cannabis indica
actagtgatattgacttagaaagatacaacggtaagattataatatctttaccaagttcaatatcggtcccagtctaatatatactccatacatctgatactagcatactttgccaatgtgctaaaaagaacataacacttatctaaggtgtaagtaaactttatcgttgactatcacatcagtgtaaatccagtgccctgatgaatcatgggacataaaattttaaagcatataataacaattgccttccactgtgtaaatatcactgtaattatgaattacaatatgttttgaatttagtaaaaattgtatgctaaaccataaacatgaataatacatgtaaacattaatgacttttaataatctgttgataacaaataagattatattgaaatgaattttatttagggcataaaatctcaacaatatttagtaatatgttcataaaagggggttagtttccataccttatggacagttgaacaaccaaaaagagcatgtgttagggtctcctcaacgacttgacagcggcagcaaactggattatgaatgattcaccaatgttgaagcttggatctgtggggagcgcatcattgtaagcccttcaagcaaagtgcttgatcttggagggaataggaaggagctagaaagattttcaccatttatgttgcgtagaagagtctggaggagaaggttctgttagtgtagctaagctatgtgcatggtggtagcttgagtttacagtgtaatttccatgaggtgtaaaaggccagtaaagtgaatcaagtgtttgggtattggggaggggaatggaaagtatggcgtggcaaatatcaatggggaaaagtgtatgaagttgggcaacatcctaggtgccactagcagtgattaagctagaaacggtataggttcaactagaagggatgttgagataggtgtaggaaatcaagctagctgtaaattaggtgtaaatttacatttaatgcttttttatttactctagtgttctaggtgttcacattgtattatatataccctttgtatatactaaaattgatcatcaaaaaataaaaatcattttctctcatttgcttcatggtat

SEQ ID NO: 330558 - DNA, 1085 bp, Cannabis indica
aactaagcgggctttacaataacggtaataactgtctcattgctttcataacggtaatgactgtctcttgctttcataacggtaatcactgtctcgttgctttcatgaccaactaagtcacgaacaatcatgattgtattttgacatgctatgtggcacaaatgtacttttcttacctcaaatttttattcaggtgtgtcggccaacctaaatagagaaagatcaacgatcccaggccctacgtcacaacaatgaaaagaacgattaatcacttgacctaacccattttaggtccttaattcataaccgcaagtccccctataggtcattaaggtaccaataccctaaacatcgagaaaaaatagaggttctaaacatcactaaaaatggtaagccatttaaaaaatggcaaaccatttttgggatttcctggcagggaacatggttgaccatttttccaaaaacggtatgccattttctacaagaaacgtgaaaccacgagttttaacttctcaaaatcctaccaaaacctaactcattgatttcaaacttaacagaacaatcctatagcatccatataacaatatctatgtgacaaaaatcaaaatcatgccctcaatagaaaattgtcacgagagctcaagcttttagcttaaaaactcaaacttggctctcacctcccacaacaagcaaacctaacgaatgagcatcaaaaccaatcccaaaacaccccagaaacaaaaccaaatgcttacctataccccatcaactacacaaccaaaagtcaactcataaacctaagcttttccaaaaaagagagaactaaattctttccttagcttccacttcaacttgaattacgtcttagctactactagggttggaggggctgtgtttggacaaagaaaataaaaaaaaaataacttgggttgttgggttggttttggcttgctcgagagaaggtgagagagggtttcgatgcttttaattttgtcttttggaatgtttatccaaatatatattgtatatttcaatttataataataataataattaggggtcttcattagatcacatctaatatt

SEQ ID NO: 330559 - DNA, 520 bp, Cannabis indica
ctgccaacgatcctcaatctctttcatgtgactgcttgacgccatggaataccaacgatgaaccaggaaaatggttggaacgaaaacagagcaaaaacaaaccaggaaaacagagcaagacaaaacagagtgaaaagatctaattcagatgatcaatccaaaacagcaagtagacaaagcaaaacttttgcatacattcgaaccactcaaaagagagagacgaatgatagtgatgatgttatttaattcatcaatatgtaattttttatttcttcttttggacgtcacatattttctaataaatttaaggctttaaaaggttaattaaatgaataatctccttgaaaaaaagttaaatgaattataaatgcaaatatgttataaatatgttaaacaagtcattaagggttcgtttggaacgccgtattaggtcgtattgtattgtattgtattatattgaattgtattttataaaatatttttatgtaaaactatatgtggtaataacttttatggacac

SEQ ID NO: 330560 - DNA, 877 bp, Cannabis indica
tgacaatcttgacaacaatgcattaacaacatctacggttctgtttacttcagtgagttttccaaatttggagcacctttagtttaatgatttttttagagttgttttggaatttcaacttaggagatggattagagagagaagataaacaaatctctcacacagtgagagacaagaaaaattatgaatgggggaaatttcagaataaaaaaaatatcattgtcatatgggaattatatcatgacatcttttaaattattgagccaaaaatactaaacaaaaaatattaaattttccaaacaaataattaatatcagtccatcattttatgatccatttcattatgtatttattgttaaattctattttaaatcctatgtcgtaaaaaataataaaaataaccctctcataattaaaatggtgaaaaatagttccatgaacatatttttggtaattttttttcaaaaagactaacaatgttgttcatttttaataattaattcttcaaatcacctaaaatgtaattaaagctaaattaaaaaaaatgtttaaacaaaatttgactaaaattgtattcaggagactattctttactattttaataaatatagggtcgtttataatttctttaaatagatcattcaaattgaaatttaactaaattaaatagatgaacttttttatattatctgattttgaaaaaaaaacaaataaagagatactgggtgtcttttttcatattaattaggaaaattgtaaaaaatgacttgtttttgatctaattgtcaaaagtgacttggctaaatttctataacatttttatttgtttgggtatgtttcattacccttatttatatcttttttttctttctttctt

SEQ ID NO: 330561 - DNA, 593 bp, Cannabis indica
aaaaaaaaagaagaagaagaagttacaatagtttaatttacgagtgtgtgctggtcattctagtatgtgaatggaggcatgtgtttcataattcattactaacacaattaaatatgtagtatgatccttccaaattggccactaaagagaaccaataatagttgtaaataaaccttaggtacaaccgtagaagtaggccaagcagaagagcctcattcattgactttttctttaattgatttatttacttattaattattttccttaaataattaatttataatcatacaaaagtataatatataattaattatattaatcacttaaccggaagtatccgctaagcatctcaaattgtaattataaaatacaggtgcatgtccttattatatcaaagtatgaaagtcaagtccttttcacattacacaatcaatccccccttgaaccatgaagttaagttggaaagagagagaaatatgaaagaggctaatagtataagtgtttgaaattagtgatacacatttttctattttatattatataatactcattgcacgagctgtggtaaaaggtacatggtgcgtgtgtatata

SEQ ID NO: 330562 - DNA, 774 bp, Cannabis indica
aaaattttagagtcatcaatgtgtcactaaaactcatttttttagtagtgaagtttgcaatgaaatgtcagtgtacaaagtttgttggacgattgttccaagtgacagtgtctactgggcaggtggaatcaataaatttggagaccaaaacatgctattgcagatgttatgaccttgcaggtattccctttggtcatgcattagcttacatatggtattccaaccttagtgagtatgattttgttgctaaatgttataagaaagaagcattctcagctacttatgaaggggcaattacacctatgcctggtcctaaacattaataaaggcctaaatccaatcctttcgctcgcaaaaattattctacttggcaggcctaagaaatcaaggagaagagaagtagatgaacctccaaccgatgtaactaaaatgaggagattcaagccgtctaacaattgttctaattgaacacaactaggtcatacaaagaccacttgcaaataaccagtacaagaaaatgtatattcttttaactttatattgaaatttgtatagtatacacactatgttaacctaataattattatggtatcaggaaccttcccagaagaaaaagatgggtcgtcctcctaaaaagaatccaaatccttaaactgataagaggaacatgaggaaaagcaagcagcaagcaagggaatcaagaaacactcaaccaccatcatctgcacattagttgctacacttttcatcttttgtattgtattttggattaag

SEQ ID NO: 330563 - DNA, 529 bp, Cannabis indica
atgcataatttatcttatttttaacttaatattatttcacttgttttctttttgagttttccaaaacaaggtttgtcagaatttaatagagaattgttaaaaggcatatttttggtgtcaaatagttattgaggtttcatataatttaaaagaataatttttaaggaatatcgttaaccaatcatgatgtgttacctatagaaagtgttgagcattactgatacccaataataattctcaatttaatattatttcacttgttgggttttcatttccatccaaaaacaaagactttgggaatatattgaatgcaaagtatgatggcttatttttttattcggtaaatactaagtatgagattgttattttgttaattctttcttaatagtcaacacattcctcaacaagaaaatctcgatgtgttgagaaaaaattaacaaagtaacaatctcatgtcactttctacaatttaaataaataagaaaaaaaaagatatttatttacactgtcactttctacaatttaaata

SEQ ID NO: 330564 - DNA, 772 bp, Cannabis indica
gtaatgggttttatttagggcataaaatcccaacaataggtgatctgaaaggtttgggaaagtttggacacaatttggacaagttttggaatttggggggtttcctagtaccaaccagtcgactggttctacaagatctgtagaaccggtacactggttcacaggcaggactcctagaaaacccaatttttccaattttagttatttttagagccttagtttgttgtttccttgataactataggttatagtcaggttagttatcgatagtgaaacctatagttctgtaaaaataataaagtgtcacaccacaccaatcagtctgaatcaaacaacgcgcgctcatgtgtggtgggtcaagtgtgtgagtcttcactcattcgcagatggatttttgtagtgaaaactatgtttatttttcgatatggaaaagatgtattcttcccatcagttcaatcgcattcctcacatatctccttggcagatttgtcaaaattgtaataatcataaaaatcagcggacaaaccattcaaaatcaaattcttacacagataatcattctctacccaggagtctcttttcttaacctgccattcgtacttctcaacttcatccttcttctcgataggagatggagtctcaaacacaactggtttcaaaacagtcagcacaaatctccaaaacatgagaaattttcaagtagcttcaatgacatgattagagaagcttatggtatagtaaagcctaaatgaccatttcaactacctttacc

SEQ ID NO: 330565 - DNA, 630 bp, Cannabis indica
aaatagatctaagatcctggataaatataataccaacacttttttcctaaagctccgatgggccaattcctttgtctgaaaaagtggctaatctgttgacagataggggaaactgggacctccagaaactgcataacctgttttataatgaaacaattggggccatcttgaaaggtggtagtccgacgggacaaggaaaagattattggatctagacaaaggaaggtaatggccaattctcttgtaagtcggcctatcttatccaagccctcaaaagaaatcccctgctgtaatgtggctctagttctttggaacaagctttggaatagcaagattctcgagcgtcacaaggttttgtggtggtgcattctttcagatgcgctcccgaccaggtcggctctttgtaaaaggttcagtattgaggacactcgttgccctatttgtgatgctgatcaggaatcatcttagcacttatttctgcattgtaattttacttatcatatgtggcgctcatccccatggggaatctttcctatatctgacagcgggattagagtttgggattaggttaagttcatctggaatctttagcataaaggtgtaaacccggacgaggtgtttctgtatgct

SEQ ID NO: 330566 - DNA, 1308 bp, Cannabis indica
atatattttttgagtattaatttagtatttttataatttttttgtggtatataattttataactacggtatattaattttcagtactacgatatatctaatactgctgtatatatttaaatgatcaaatatatttatttatttttattacaatataataatatgcaataaaaaaaaattatgtaacttaattttattattatatattaagtttttaaaaaaatatgtgattaaattttattttttattttcttaaatttttttaaaaaaacttaatatatatatatataataatataataagtataatcacttgaatgtcctgatcaatagtagctccatgagtctcagcttcctagaaataactagccatcaggagtaggtgatcacacacaaactgatgaggtttcatccatgcattgataaagttcttggtcgcttcaaaacaagctagatccgatgctatccaaaacagttcagttaacttgttcttgatttttgtagtcgtgagagtgttggcaaacctggtcttcaaggtatcaaccatgctagacaacataaagtatcgagctttgttgttagcattctgccaatgatcaaacttttccttgactaccttgattgcattcttacctagtttctcagagcttcttcaattaacacaaacattgagttttcacctatgagagcaatattaatgttctctttccatttagcaaagttagctccagagaacttgttgtcagtaaacaatggcacaattcggtggttcattacgggaaactacaaatatcaacaaatatgaatcaaataaggttcaataaaaaaattatacacaattcgaaaattaataaacatttagcaagtaggaaagacatgtgaaaatacaaaaaaaaaatatatcctaaataatttctaaggttttttaactaaatgacataaagtgtcctgataggggaaagtcaaagacatcattagctgaatagaaatgtcaactcatctaaaatggataccattttagcaaccttttattcgatcaaaataagaattcaatgttgtcgcggtaggcgagagtcaaggttattcttattctatgagcttctaccattatttcatatttgtaaacttaattctaagtagtcaccgtagggatgagtctaccatttaaactttcaacttgaattggacccataagatccatgtgaagcaattccaatacttttgagatattgatatcagacacaggtttgtgagagatttttaattgcttcccaagttgacatggttcacacttaccaacactttcttta

SEQ ID NO: 330567 - DNA, 1032 bp, Cannabis indica
ggcacggtatagtcacaactgggtattttgggctgaaccgggtttgggcccgaaatgtaatttgaaatagaattattggcattttatttattgatgaataatctaaaaatatatttggatttatgtgtgtgaaatgacttaaatacccttgtgtatgtgtgggcatgctttatagccctaggggcaaaatggtcattttgacctttaatttataaataataaatattaaattttgagaaaaataagagtttactttctggtttccttctctcttatctgaaccctctctctctctctcaaaccctctttgaatttcaacttggatttggtgaaaattgcttgacatttggcttgaagtgaagcttgttgtgggaggatctttgagcttgcttttggtgtgattttgaggtagttttacagctttgattttgagttattgttgctgaattttagtgattaaaagcatgaagtaaattgaattgatcttcggttgcatgttggtgatcttttgttaatttgagcatgatattacttgaatctttgaaattggtgtatgattgagcgttggatgaaattctagggtattcttcttgagtaattttcagttgtatgtgttgtttgtttgttggaaattaaagattggagctagcttgtaagttctagcttaagagcatgaaattggggatttagtgattgttgtgcaatctgaaattgggattttatgttggattttaatgcatgaattatgtgttttaactctctaatagtttttagcaattccactttgtgatttgagattttggttataatttgaatgggtttgaatgtgttttggttgctgaaattcaaggtgttcttggctgatttctcagtttggaacccaggtgccgcagcatggcctttagcatgtcgcgacctgccctttttgtttgaacataggaattggtcctaggtgccgtggcatggcttttgcatgttgcggcccaccctcgaatttctgggcaaattcgagtgtaactttgaaaatgcata

SEQ ID NO: 330568 - DNA, 861 bp, Cannabis indica
atttaatcctggtgtcaagaggcgctcgaacgttttaaccgccctttctcctcattatacccgttcatcccatccgttggatcatagaatgcgaatcgataccaattcccaccatacgatggtgcctatcacagctgccttgcaccctttctggcctataaaagccaacactttccttttgtcgggttacttttgccactgtcattttgactcaaataacccatttgaaaaaattccagaaattatccacttcttactgctattactccaccgctgccagtccaaaatctactgtcggacgacattaacttcttgctcatcaccattgtgtaagtttctgggtacactttatttttattgttcatttacatgttagggaaaaacttaggatagtgtctttgttttaatcgtacttgatttctacggtaggacggtcatggtaaagaccatcgtgtgccgtaatgctttgcatgtttactgtcgttttcccttctggggttagagaaaaatttcttaacttagggaccgtcgagagtgtgaaatgactttcatacttttgtcccttttctctttgtctcttttttcattgccttttggatatttgcacctgatgtttgcctaggagaaactctggatttcctatctttggcaaacatccagagggggcctccttccaacggttaggggacccccattctcttcttttatttgagggtttggtttgggggctaacggctggatttctttttcagatgagtgagattctccccgaccttcacgaacatggtttcttcggctttgaccaagagatttcaacacttcatcaaacccaaagcatgtcttgttgggaatattttacca

SEQ ID NO: 330569 - DNA, 524 bp, Cannabis indica
ttcaaacagtttatttcacacatgtataaataaaagagtcacgagtgtaacagattgtttgaaccttgttttgccatattagttcttttttccaatttctcaaacattaaaaaaaactagactaaaatattctattgaatgtcaaaagtatatcgatacacccattttaaatgatgcattgtaaaattttctaaatatttttatttaataaacatagtaaaataaattgaataataaattgtataggaaaaatacaataacacaagtatctcaaaaataataaagaacataatttcacaaatttacaaatatatgagaaaaaaatatcatcacccaataatggcattaataaatttacttataacttcttttttttttcttcttttcccttaaactaaaattcacaacatataatcttaaacaaaagataaataataaatgaaaaatttagtagaccgaaaatttgaaaatatttgctggcgtttggtaataatattctaataagttttctatttttaaaatta

SEQ ID NO: 330570 - DNA, 704 bp, Cannabis indica
tttccagttttgttaagcatttcatattcccagttcgagtacttaccattctatgttgaatactcgcaattgtacttcaaataattttcttcttgtcattaataatatcacatacatttggtgttgcgaatttcactcgacaacagtattgtattgtattagtattatttaatacaatacaatgtttaatattgacttgtattaattgattgtgtaaagttataatatatttttaatgcactcgatcccaacaccaactacgggtctgggtcccgagtccgggtcctgtctgggtccgagtcgggatttgggtcccgaatttgggtcctcggtccgggtctggggtccgagtctaggtttggggtccggggtccgagtccggggttcgggtccgagttcggggttcgagtccaggtctagggtctgggtctgggtttcgggtccaggtcggggtcccaggactgggttcgagttctggatttgggaccgggtccgggtccccagtctgggttcgagtcctaggtcgaggtccgaggtttgggttcgggtcccgagtccgagttctagtctgggttcgggtccaagttcgggtcggggtcgggtcccaggtctagggtccgaatccaggtcgggtccgggtccaccggtccaaggtcccaggtccgggtcagattagtgttaaccccaaatcctttgtaaatatt

SEQ ID NO: 330571 - DNA, 1254 bp, Cannabis indica
taattcgtggttctaaaccccaactaactcggaccaaattatttgagactagactaaataaatccggtgtagatgatttgatcaatttggaccgctttaaattttctggttcgatcatggttttagaaatctcggtagtagttcaaactaaaccaatttatacaattattacatatatccttaatatatttttcttttgagacaaaatgttgatatttgggaataattttaagtagaatattgatattgagtttatattgttacgataataattttttattgttacttattaaaagtaaaaaaataccgaaaaatgaacaatcattgtaaaaaaaattagaacaactacgaaatacaacccatggttcaaatcaaaccaatccgtttttgagtggtttggtttgttttaatcatttcattggtttggtttggttttgaatttttaaaaaaccgtaatagtagtttggtttgaaaaaattaaaaatttagaccaaaccaatccgtgaacacccttattaataatattgagcacccctaaaaagaatagtattgactgagcgtatgctatgccatccataattatattactgtgaattaaagacatttagcaatgttgtgaattagagacatttagtgatgagaattaaagacatttagcaatgttttgcgatatagcaatatttagcaatatttcacaacatcgtcaaaaaaccaaacaaaaaaaaacacaaaaaagtgagcgagttgagaactccaacgatgggtagggatttcgaggatttcagagcggttgagctcatagattttggggctttagggtggagacaataagacttggagtgagagagttaaagtattagagaaagactttttgaaatgtaaaagtattttgagtggaaaagatattaaaagtataagtagcgatgtgcataaattgatccaatccaatgacaaacgactaatctaaatacaatcggccgtcaaatattcgatattcaattatgatcgaattggatgttatttttaaatatccaattagatcagattggatattggataaggaatccaaaaatccaatacatccaacattcaatcgaactaattagtattttcatttagtttgaatgagtcattagattttatgttgttatacgcaaaatatatatatgtatatatgaaaattaatattaaaattttactatttttttcttggattggatctctaatacatattgaatctaaaatattggatgg

SEQ ID NO: 330572 - DNA, 739 bp, Cannabis indica
attaaaaaaataataatcatataaatttcatttcatataaatataaatttctaacaatagactaataaaatgaactctttctaattcttaacaccattaattatttaacgaatcttaaacttttgtccatgtttgtaaatatgacgatattacagatcatgatacataacatatagaggtatattgtaatgattttgatgatggccatgtttataatgatggtgtttattttattcatatatacaatgaatggtcatgatgatgatgatgatgatgtagcacccgcattatgtatcgtaacttctaagcaccacatatatccaacaattttaggattaggaacaacgttaacaacaatatttatatatacaaaattatatataattatatttttaatttttattttagtgttgcttatttttaaaattttataaactaaaagaaattgtaaattaatgttttaaataatattaaattttttaaaaatttaaataaaataatataaaatttaaaaatatgaatatttaacatgccccaaataagaaaaataataatgaaaaataatcatgttacaaacaatgtataatatttaccattaaaattaatataagttcagttaatttaattaaaataaataatattaatattttaatatttttaaattaaaaataaaataatattaatatttatatatatttataaaattaatcatactattactaacactattaaatttaac

SEQ ID NO: 330573 - DNA, 858 bp, Cannabis indica
atggttactagtaaccaattttttggtactaaaagaactcaattgaatgattcttttcataaataccatttatatatatgctaattatgtatctaatgcgttatcttcagcaaatgaatcaagcaacaaccagccaataacttgttcttctcatcaacacagaaaacttacaatttcgattcgaatcggaatctattcgttctttgttctttgtggacaagcaatagcaaccttattaggaagattgtattatgaaaaaggtggaaagagtaaatggatggctacacttgttcaattagtaggatttcctatttttcttccttactatttcataccaaataaaaatcataagttactagttaccaaaaccaaaacaaataagttactagttaccacaatttactttgttcttggcctactcatagcagaaaattgttacctttactcaattggacttatgtaccttcaagtatcaacttactcaatcatattatcatctcaattagctttcaatgctttcttctcattctttctcaactcacaaaaattcactccttacataataaactccctagtacttctcaccatctcctctcttttgctagttttcgaacccgaatcacaagactcttcttcttcttcttctaaaatctcaaaagggaagtatgcaattgggtttatttgcacattgggtgcctcagcagggtctggtttgaacctaaacttaactcaaattttcatgaaaaaagttcttaaaaatgagagcttttcagttatcattgatgttatagtgtttcaatcacttgtggcaactattgtaacacttgtgggactttttgcaagtagtgagtggtcaac

SEQ ID NO: 330574 - DNA, 756 bp, Cannabis indica
agtaaagacatatcagattgattatttaaaacctccaaaatagcattgcaaaattcattaccaatgactggccaatttttttttttttttgaaaaaataagaattcaaacatcagggccaggggctttatcccaagatagttgaaacaaggccttcttaacctcatctgcaataaaagatttggccaaaaactaaaatttagaggtactgattttattggtaatgcccttaagaatgctatcaatggagctaacatccgagccttgagatgaaaacaaatcagtgtaaaagttaacaaaattatcacaaatatcatcaaaactattgatacaataaccattatctaaagtaatagatctgataaaattaattatctttctagcaaaagccttatcatgaaaatacttattatccccaaccttaagccagtttattctagaacgtttcttctagtataattcttccttatataatagacatctaaagaagattgaatttctttagccttatttatatcaacatgggagatatggggggaagagaaaatattatcaagagaattttgtaagtgtctaatgttatgcttaaacacattcttatttctactccatacttaaatactttgagcacaagaggattgcttctcaaggaaagaaacaaggtgattcctatcagcactaatcaaataagggccagtttggtaaaactgtgctgtgggaaaaagcagctgtacctgtgctgtgggaaaaagcagct

SEQ ID NO: 330575 - DNA, 1340 bp, Cannabis indica
ttttttagaaattatttttaatatttttttaaatttctttttcacattattttcttttaatactagttatattttaatttgctacatttttttaaaaaaaaaatatgtatattttttttaataaaatttcatgtaattttttacttttatttgttttttttattttataggtatttttttaagaactgaaattgccaaaattatcaaaacaaaaattaaaagtagagtggcaggaatggataagaaagagattacatgtaaaattagagattggattgatcaattgtaataaaaaagcattttcaggcctgaatttaggctgtatatagatgagatttttacaaaaatactaaattttggacaaatatttacaattttactgtcacacagaattttttacaaaaatactatctttttataaaataatcataaaacagcaaaacataacaattaaaacaactgtgaaaacttaacacagtacacatataaaacttacacagtatttttaaaaaaaattctactccacagtaaaaaagtaaaaaagtttaaaatttcaatatgttggtataaaaaatcttatctacaaaaaatcttacttttagtcacaaaattttgtgactaaaagtaaaaaagttgtgactaattattaattatcatttttatgttgtgactaaaaggtccgtggctaaaagtattagtcaaaaaaattacaatttattgtgactaaatgtgattttagtcacaatacttgttgtgactaaaagtaaattagtgacaacttgtgtctaattactatgttttagtcacaagtagttttttgttgtgaccaaatgtcatatatagttacaaaaatttcatgttgtgactaaaaaatagtcactaaaaataactattttttgtagtgttatatgtagattgtatttgtaaaattgatgttaatataccactctttgattcatttaaaaattgtcaaatagtatatacaattttttatacttcaataaaaacaataattattcacttgaaacaactctattcacttaaacattaaacatgaaacacaagtatatataatatacagatcaaatatgtataaaaatttctactcagacttgaatattagtgcattacatcaaatgtatatagttaccttgccctatgtacatgttagacttctaattctatctcctaattaagtacttatacatgtacatatataattaaatcagttattattgtagattttagattttagttacattacagtgagaagagttaaaagattataaagggaaatttgacaattaatgctaaaagattacacatagttttaaaatatt

SEQ ID NO: 330576 - DNA, 791 bp, Cannabis indica
gctaaatctataatcaaactaaacattaacataataaacatataaaataaaagaaaatgagaagaaaactaatttgatattgtcacggatcgccaacttcttgctccaatcttctttttcttctttcctaaggtttagtttctatctctagctagctaccccttattttcgaagtacctctctctcttttaaaacaaaagtttcagccaaaaacacgcgaaaagacaaaaaaagtctcactttgcacaatggtggcgccgcggtgataccaagcctccccacggcgactggtgcttctcgaaaattcattttggctctataaatttccgtcgcggcgactgtggcacaaaaacatattgcatgcataaattttttcagtttttgatctcgcattgtcctgttgatatttgaccaaattttaaatccaaagtgttggaacctaaaaccaaagaaattggctaaaaataactcagtagtgcaattacctcatttaatttaatttgagctatatattcccatatatatgatacacaccacaacaatattcacctctcttttgaatataatatatatatatatatatatatatatgcttactcctcttgataaaattcatagttgcagtggcaataatattataccaatttacctgatagccaaaactccttgatcactatttctcgactgtaccagcacagcacctatgagtatatatatagggaaatttgattttctatacttagaaaatcaaaattttttttccctaaaccaaaaatttaaaacctaaaaaa

SEQ ID NO: 330577 - DNA, 1220 bp, Cannabis indica
ctttattgatgttgaataaaatagattacattgaaatggagttttatttagggcataaaacggaacatccttctccagtactataggccacgacaatagaaaagctgacaatattgagatagattcctctgaaaatcctacaacttcaagctcagttgaaaagattagagaaagtgcttctacttcctcagattatcttacacaacagattgaactagcaataagaacaattaaggaacagttaagcaaaaaaattatccaacgttctcattgtggatagaagggacatttcaaatctaaatgtcctagacttttcaacactaataacgaaggtaatgctttaatatttaaatcatgtgttttagagaatgacaaatccatttggattgtttattctggatctactaaccatgtctgttgttcattgcagctacatgaaaattggaagtatttaaaatccagagagttgaaacttaaagttggtaatgtcaaaatggtatcggttagagctagaggaaaagctaaactcaagtttcaaaacaaatttttgaatttagacaatattttatttattccaaattctagtagaaacttgatttcggtttcatgtttacaattgcaacaatataaattgaattttttacgttttaattctattatttctcgtaatgatattcaaatatgtgtttctactatagaacaagggttttatgttcttagaccagatgaaccatttgcgcttaataacaaactatttaagatagctaaacctagaaaccataaaaagcaagagattgataatgaagatgaaacatatctatggcacttacatcttggtaatataggctatgatagacttcacatgttaaccaaaggtggtccattgaaaatatcactttaggtgaattaacagtttgtgaatcttgcctagaaggcaaaatgacaaaacgttctttctctgcgaggggagagcgtgctaaagaaccactaggaatagtgcattcagatctttgtagaccactaaatgtcaaagctagaggtggttatgagtactttgtcactttctttgacaattacactagatatggtcatatttaccttatgcataagaaatcaaaaacatttgagaagtttctagaatttctagcattagctcaaaaccaattaggtaaaaccttaaagatcttgcgaactgataggggtggagaatatatggatat

SEQ ID NO: 330578 - DNA, 1090 bp, Cannabis indica
aaaaacaactactagtctactacctaacatccatcaatattctctgcaaataatggtttatactccattcaatttcttcaatatttatggtaggataactctcaatcatatatcatcacacaagccaacatatacttgcctacttggtataaatattacaattatttgagtacgatattttatattattcagaatttttttttaaaaaaaaaagaaaattcattagaagtcactttgtaactatattatacattttaacataacaataaatttttttaacttatccatgtatttaaaattagtgtggtatgtttgtgcgtattgtactggtctgacttatatttatttatatttttttaaaaatcggtcatgtcgtgccgtgtcatataacaattaaagggtaggttctgcatgccctgtaggtccagtattttcgtgtcgtgctttgctcgtaccgactcgtattttttaaacatcccaacccgtattaaaaaatgataaatatatataaaatgatatgttatatataaattttagagatagatatataacttatatatatatatatttaaatgttaaaaatttattaaaacaatgagaaaattaaggataaaattattagatgtatttaaatgattttagtttaatataaaataaaaaataagagaattaaggagagaataattagaattgtttgtaagtaattttagtagtgtcacattaccacttctatatctctctttaatacatatatatacatatatatatatttatattgatactaaataaaaaagaaaaatgttaaaagatattagtagtgtctagcacatttctatgtgttaatattgctattatttaaactaaatatcgggtttcatatagtttaatgtaataaattttaaagaatattattagtcaatcgtaaggtgacatgtttaaaagtgttatgcactattaatgtccagtaacaattcatatgtatttataactcgtgcattagcagtatatacctactagtaaacacattctagtttgggcaaaatactaaacataaaaaacaattagtaatataaatttgaaacaattcttt

SEQ ID NO: 330579 - DNA, 785 bp, Cannabis indica
tactctgcctccagcctctccacattctgcaacattttgagagaagggaaaacaagttgtcgattcttctcacattgaagaaggacataccaatcaagattcgacaattatctttgttcaagcaaagatgcctcatattgttggaatcacatcctatggcatgacttccaacccatatactacaaacaaaacaaacacaacattccataatgaaataacaaccaaaccatcctcatcttcctctagaaaacaaaaaataagtgcaaatcctgacatcactcctccactggtctgcaatgtttcggactccacaaatattcaccataaattagaatgtcatgccaactcaacctcatttcaatccactggactgtcgagtgtggatgtgtatccccctggatatctccctaacaaaaaaaaaaaaaatcactctccgttgcaactcctcctacatatctccatctcagaaatactacagagaataaagcaggctacaccagcagcaaactcatcatgcctggcaacaccattgcagacaaacaaactcctgcaattccttttcctacttagacaaatgcatcaacaactgctagacataccacaacttttactaaaagacaaatggtgaactccggagggaatatttgacaagttttgaaacgatgtctcaccaaggatacctctttgactaaagttactaacacaatcatgcatcaacaacctgaaccaacctctgaattgtctgcactttcactggtggaggatgttagaaatattttaccagg

SEQ ID NO: 330580 - DNA, 619 bp, Cannabis indica
aaaataatttaacgtgtcgaaaacatggttcaaagaatctgttgcacacatactttatttctataatttataagtgtgtgaaatagtcagttttgaaccctacattttgtattataaatttaaattattttaaatttctcaaaattgtggatgatatttttttaaaaaagaaatgagcacgatattttaaataactacaatatacattataaaaaaaattatgattataactatttttgaggtgcattatagaatatgggttgattaattcaagcattattaggactaaaaaaaatgaaagtgcttttcttttacatttttacttgctggtgtttttttagagaaaaataacgttggttccatgttgtcgcaacattaatatttttacaacgtgtaatttttttagaacaacctaaaaataacagtctgtaagaaaaaaaaatagtattccatacaaatgtaatttttttttggcatttctaaaataatcccttttctttagatcatctctaatgtaagatgtgaaattatttgtgctatatttgacatattatttacaattgtgttccaatgcacaagatataaaaaaaatataattattgttgatcatcatttaata

SEQ ID NO: 330581 - DNA, 900 bp, Cannabis indica
gcatatcacaccgtgcactagacacataactcttgataccaatcatacaaaatgacatcctaaactgagtggtcgcaaataaccaaaatactggggctgaaattcaactcacttcctgcatatagattctagatcttacacctacaggtgagtgcacacctgatctacctataattacaaagagactaggtcgtgaaataacaatatgcacaatatatgataaagacaatccgaagctctcaagttttgagctctaacttttttagtttaatcttagatatcaatatcacatataccatcaaatggataaataattatcatcattgtaatctacattcaaaatctaggccaacaacatataacacgactatatttaaagtttagaattctgaaacctcacctaagcagtcacactaactatcggtggtggtagaaatttgtgtaccaaaaacatcaccgaaaatagaaacaatatatatcgaaacaaccacgtcaactagtatatcacacccatgctaatcatttatcaaaacaataccaccaaaaactcactcgaaaaaagcatagcttcaaaaatgtcataaaaaaaaagtatcaagttgggtgaaattacttagtgtagattgttctcctcaataagctaattctaatggtgaaaacagatagtcaaacagaaaatagaggtgatcgaaaaatgtgttcaaagttagaacctttaaatttttactcgagatctcttgctaatggtggcgaatgaggaggccccgcttgagggttgagatcgctagcggtcaaggatttgaatggtgcagtttgtgggtcaggtgatggccagagtatggtcgccagtgatggtggtggttatggcatctttgaagctttagagagagagagagagag

SEQ ID NO: 330582 - DNA, 1419 bp, Cannabis indica
attgtagaattggctaatataaatcacaaggttgatcaagaaagcaatgccatcattttgttgagattgctcaaaattgcatatcaagaagtaaaggctggtatcaagtatggcaaagatgtgattgcattgaaggatgttcttgtcgtactttagtcgaaggatttcgaattacaattagagaagaaatcctagaaagaagaagtgtatttggcaagaggaatatcacccaagaaaggaagttcaaatagtaagcaccttcactctcaatcaagatcgaagtcgagggagaaggaaaatcgaaagtgttacttctatggaaggtccgaatacttacaaagattttgcaagaagtatagggagcaacaagacttcaacgaaattcacaatggagataggaaggacaagaagatacttgaatatatgtgcatgttgatctgtgggggccttacaaagtatctactccttttggtaagcaaaatttttttctatagttgatgattatagtaggtgtatttggacctatttactagcaactaaggatgagtgcctagaataatttagaatttgaaaaacttaggtagaaaactaaactgatctaaaagttatgaaccttaggacaaacaatgggttagaatttgttaacttcgagtttgacaagttgtgtcaagaatttagaatcactaggcttagaaccgtagtgaagaccctagagcaaaatggtgttgctgaaaagatgaaccgaaccttgttgaaaaaagttagatgggtagaagctctagcaactacaacctaccttataaattgaagcccaaattgagttataggcctaaaaatcccttatgaaatgtggtacaacagaacaaacctaacacatttaagaacttttgggtgtacagcatatgcacaccaatctattggcaagctggaacttagatcagttaagggaactttcctaggttatgccttaggtaccaaggggtaagaattaacattcccaagaagggtagaccaaaggttgtgattgctaaaaattcaatgagttggaatatcctcacttgacgtcttagaaaattagtgtatctccgtgtgatgcaggaatttttttaaatattttttacacattaaattttttacaatattaactaactttaaaacacattaatttttttaacaatatcaattttttacacattaaatttaaatatataaattcaactaaaaaaatatgtatataaatatatatttagattatttaacaaaaaataataaatatatatacaaataaataaataattatatattaataaatatatatatacctagacggaggacggcgatgtcgcgatggaggaaggcagttgtggttacttgcggatgcgacagagacgaaggagacaacgagagagagagagagag

SEQ ID NO: 330583 - DNA, 546 bp, Cannabis indica
aatatgagactcaatacttaaactaaaaatgatattaactgaaagtattgtgcatactggtgtctccttacattttttactttaaaattatatataatagtaatagtatatatttatagtattgtatgtaattagtgaaatccgagtatatgaaatgaataaattgttattgggatacgatgcccacgatgtcaaatgcaatatttacatggtatttttttttttgttgcaatgaatatttacatgtattttaatataaaataaaatatataaaacttaaattaaattataccaatgaatattttgttaaatggtgttggaaatgcttcatatcgttaatgtcggatattgcataaattcttaaaaaaaaaacctatttccaccaattaaatcaatttctttttaagatgtcattactacgtacattaaatttactatgatttgttagttattaaaatgtacatgtggatgggacactataaaaaagaacattgctattaggtaccagtagtgcctagcactttctcaacatatcacgttgcgatt

SEQ ID NO: 330584 - DNA, 2747 bp, Cannabis indica
actgatgatttgagaataaatttgtattggtttagatttgtatgggatggatattaggtagtgtagtatgatgatgttgataagttgataagttggatgattggtgggacaacgaagagttatgtgtttaatttttatgtgtgtagtaagagagcagacaaggtacgtagtaagttagtagtaaaagacttgatttggcttactcaagcttggttacaatttggaagtttgatggggtatttatagttgtttacccctacatttaatttcatctagattattctagttctacatgatttacaatttttctagacttttctaattacattcttctacaatcttctggattggttacttctagttttctaaatattctaggcttttctggttatttattttgctaggtttctaaaaatttcactaaaatattctaagatacaaatattttagaaatgtgtagcacattttaacatcaactacaactatttttcttcacaacaaaaaaaaataatactaatcaaacgtaaaccaacactggccaaatgaagaaaaataaaactaacatcaagaccccacaaagaattaatattccgacggtatcaccataaaagttggacgcttttattaataatagtaagtgcaaagacacaagctggttttagcgaaacccattacatggagatgcattaattcagtaccttttgaattaattaaagtaagaaaaaagtaaaaacgaatatatataattaattaccttattagaaatttgaaaatgatcagaatcatggagtagtggagaaacgatatatagacagaaaattcctcacgaagtgagattacatgggtctgccaaaacaaatacatagtatttatagacaaatttatatacacacccagactcaaatatttttatacaaatttatctattcttagttcttttcgaaagaaggaaatgacgtcggtttaagacaatgaaaaggagatggtaagaaagtaccagtgtggagaaagacgtgttcggtgggatgaataacttcatacaccagaaatcgtgccgtttcagtcgatcaaattggaaccactactaaattggacccttccaaacgactactgttgccatattatatgaacaattaaatcgacctctcacttaaaacttattatataatagaaaggaagagaacaaataatagaagaataatgtggaaaataatgaatagtattttgtcgttctacacataacattataagtatgtataaccaattggtatataaatttagaggatagatgcgtgtagatagatgtggatatataaatgggccttaaatatacgtaaactaacttttcttttgttgaataaattcacataatatattttcatcatcaaccttcagctacgtgctagactaattaatgttaaattaatttgcatatgctgggattaatttttacttagattgtttttctaaactttccatttacatactatgcagtaccattttttaaaagatctgcctgtacctatgacaaagtttcaaaccattctctgtctttaaattgtatctttttaggcgtcatagctctaattctagtctttacatcttgtttaattttttttctctactgtagctgctgtatgcactttttgtttcaaccaaacttcattatggcaccactatactcgataaacattttctttacttcgttttattaggtagatgtacatttattgaaaaactatctaataatcttgctaggcacggacccacgatctaaatctaccgttggcaaatatatatttttttttacaaaaataaaacatacaaaatataagatatttaattattacttcgtaataatttatattgatatataaaatttgtccaatacacaagtaaaagttatcagaatacataatattttcactttttatagctaagaaagatactacaacttctcccttcgatttctcggactctgaaattgttgcaaaatactttaatcatcagcaccataaccaatttctttctcaactatgaggagtgaaacctgaactggttcttacaaagagaaaagagatgaagctctgttttattaaaatggaaaagtcaaattacaattggaaaagttacaacaagaatatatacccatcaagaggggtaaaatggtcaacataactaatcaagaattagttatgtttaatcagccaaaataacaaaataacaaccccttaacaactttaactaaccctctaatcctaatagcccccgtcaagatggagtatagatattagaaacacccatcttggatacaatatgattgaaatctgacgggagtaaggcttttgtgaagatgtcagcaacattttgttgtgaagagacatgaagtaacttgagagagccttgttggattttctcccaaatgaaatgacaattgatctcaacgtgtttggtgcgttcatgataaactagattttcactaatgtgaatggctgtcgtgttatcacagaagggagaggcagggcggttgagtgagattccaaagtctttgaggagggcaattatccaagttacttcagaggttgcattggccatggcgcgatattcggcttcagctgaagactgagagacgacttgctgtttttttgatttccaagagacaagagcttggccaaggaagacacaatatccggaaatggatcgacgtgtgtcttggcaagctccccaatccgcatctgcaaaaaaag

SEQ ID NO: 330585 - DNA, 1044 bp, Cannabis indica
tagctaagtcccctccctaactctataaatacatattgtctcatcgcaattgtataccttttgataattagataaataaactggttctgatttagagatctagggaggaggacttagttgatactattgcactatcgaattgaagtaattgctatggatcgtattgaggtaattgctatggatcaatcaggtacgcatacctaattattatatattattattgtgttctatgttatatacaaattgatcttgggtttattattaatttttctaacattacgttcttgttaggagagtcaatttagatatatacatacttgacctcactttttaagttattttgtaattgttgatgttttgtttcaatgcaatctttctttcatatattttactattttaagagtgtcttaatgaggtgataattttaatgacacatatactctttagattaatagtgtattatttgtaatgacaaatatatcctatatatcctatatcttatacctttaaaagtcaaattttagtatttaatgattttagtatacatctctagcccaaaaaacaaaattattaaataacattattatcagtataaaatttgctttttgtcttattattcccaccaattggctcaattcattttgcctacactaaaatcacgtaactttttttaaaaaaaaaattattttcttgcaataaattatttaacaaatatctcactactaatatgtatatacaatattttatcttatttatattatcattttacttgtattatatttatagtatacaatttatccatattatatttatagtatattaatattttactgatatcatactatattaaaagtgtcttaatgaggtgataattttaatgacacatatagtgtattatttgtaatgacaaatatatcctatatatccgatatcttatacctttaaaagtcaaattttagtatttactgattttagtatagctcttttgctcaaaatttactttttgtcttattatccttgttcgaaattattttaccaggatct

SEQ ID NO: 330586 - DNA, 602 bp, Cannabis indica
ttttttttttttttgaatagaacgaaaaggagagcaacatttcaaatacaaaaaggtgtgtcaagccagcaaactttattatcatcaagagaaatagcaattttagccaaattatgtgctaaacaattgagagacctattacaataagggaaactaatgacatttagactaggacataaagaaagacaataaaaaataacattaccaaactctacaaaggagttttattcgatagagaaaccacaacacgcttacaatttgattctaccttcacagtgtgacatcccatgcgagcacaaagaagcaaacctcgcaaaacaaccattgcttcagccacacgcagcttcattaaggaagtgacagggacaacagtcgaagctaggcagcgaccagttgattcatgaatcactttctcacacccaatcttttgatgtggaatcgaaatagtattcaatccttaatcgagttacactatcaggcctcttgttctctccagagtaacgatgatgaaactccaaggcctgaccaagcataccttcgtcctcaatgatcctaatgatcatgaacaaacttattgcgatgaaaccaaattctccaaagtc

SEQ ID NO: 330587 - DNA, 694 bp, Cannabis indica
taataattatttacatcatatatgcagtaccttagcttttctgcattgatgtggaaattatttagcccaagcagatctagatcttggaccacacgtatccctcctcccatttacataccccaaactatgcagattgaattatttatacaattatatgaatcaaattaatacttgcatatatatatatatatatatatattttagatagaaggaagaaaccgtatgaagtcaacatatggttggtaaagatatatacgtaaaagtgaatgcgagatcatgggataataattaacatagggtaaggttaaatacgtacgacaatactagacagtacgtactactatttatgtttaaaggaacataattatgtttggtatcgtagcttaacgtgaacataagatcagttaccaaaaaatgtgagaaaaaaggtataaatatctttggtatttttttttttttgacgcggtgatcaaaatcacacatgattaacaaagcagcaatccacaaacggcggaggtacctctcgaaccaagataactcaacgtctaatcgaagggcatgctttgccaaaccatgtgctgcagaattctaatcccgagccacatgagacaaaactgcccccgaaaatttaaacaatcaagctataacgtcttcaaaacagcaccacatcacattgaaaaacaccttcccatta

SEQ ID NO: 330588 - DNA, 698 bp, Cannabis indica
gaatgtaaccagttttgtcataacatctctagatcaaattattattaagttttattttgacaaaaaatcagttcacaatcctaattgtattattttaaaaaatacatggtccattttataatttaacaaaatagaggattcaattgataacttttacaaaatacatgatccaaaatgatatttaccctttttttaaatgtagttttattagatgtttactttgtataaaatattctataatatttttctttgtgaaaagtcaagcatacattatttaattattttatttatttattaacaagaaaaagtccagcttcattaaatttagtcatcaatttagagtgcttccttccttcccataaataaataaatataataaatgtaacgtgttgactttaatagtttccaaaatgtcatttctattgggtagagttttctaataattggataaacactatgtttaggatcagtttgggatagttgtgctgtggaaaaaaactgttatagttatactgtgagaaaaagcagttgcagcagaactgtggaaaaaaacctgaactgggtgtttgtaaattataaattttaaagtattgtgagttgttaagatctattataatgataatgataatgttataatctagtttagtataatcacaaatatgtaaaaaccttattttatataatattttattttctat

SEQ ID NO: 330589 - DNA, 772 bp, Cannabis indica
taaaaaaaaagtaaaaggagaaaaagaaaaagatgtatctaaatgatgattgaggaagaagtaaaaaggcatgaatgactaatttttgttttattgagaggtgactgacttatgttgttttcgttatttaattaaataaatttgaactgacaacaaagtcagagctcacattcattctctcaattcgtcgtcggagcctaccctaacaaccgctgctcctattgctaactcttcttccctctaaggcttttctttttgcttctaaaaaataatcattttcaatgtttaatttccgagcattgttatagggcaccaattatacctaatactcttaaatatatcgctttataattggctaacgatactttttaaaagttattatattaaactatataaaacccgatacttaattggacaaatagccataataacacataggagggtgctaaacactactaaagccctttagtatttttcttaattttcgtttttggggtttgaattttgagttatttggtttttttaggattatttcacaaaaacataaaaacaacaaaaaaaattacaaaaatacggtttcacggaattttaatcatttttacgattttttttaattttatttacagaaaatacggtctttttatgttgtaatcttattaatttattgttgattttttgttatatatatgtaattttttgttgttattttgatgttattttaatgttacttttatgtaatttttttgttgattttatgttcttttcgtgttat

SEQ ID NO: 330590 - DNA, 682 bp, Cannabis indica
ccgaaaatgtattatttatatataactcaaataatgtcctttaacttattaacattagcaatctaacaatagtaatggtccggattgactaacaatagtaattaacactgaatatttaattagtctgttcttaaaaatagtttaatttttttgaattggttaattaaaaagatttgcaagtatacatggattccaattgtattaacgtcctagtttttatttgacaattggtcccactaaataacaaattaatgtagtgacaatgtgtagagtatgacgaaccccacgagttatttcaagaaaaaaaaaaatattctttccaagcaacaagtaataatattcttgaagctggcctgtacgtaaagtgagtacgtgactcaccatcaaagattcaaattggtatatacagcagtactctgatgtatttatatatatatatatttatatttgtatacatggatatatatagctaggtttcaaatcatatatacgtgtgtatatatatatttccaaagacatatacctaatagagccaattgtagaggagttggaaataacatggtatgtcaactaagtgggtacaagtatatgtatatcactcttcctccacgctcatcaattatattattaatcctatatcacctttcatccttaaagagagagagagagagagagagagaga

SEQ ID NO: 330591 - DNA, 545 bp, Cannabis indica
atagtgaatagtgatcaggtctttagataaatctagggacatgaagggtggtggtgtcatgattggaggactgcatttctaaatcattgttgagattttgattattatgatcagtagtctgagaatttcttctctttcgacaatgatgaagtgtataatagagaaggcgtagacaaaatagaatgcttataatcaccaaaactgatagatatacttcaatatgaaatagtatactctatatagggttccttcttgttcaagttatataggattttcttagctagatattatataggttgatacatgcaatgaaaggatcatttcagatcatgtattcttgccttctacttagactgtgtacgtataatcacttgtctatcaagtttggaatagtttatgtaatatatatttatatagatatatataaaagaataatttgcggctaaatcctcccaactatcgtttcacttgcacttaaccatccaaccttaaattttggtggtaaaaccctcctaaactatcattctgtttgtatttttaaggtg

SEQ ID NO: 330592 - DNA, 707 bp, Cannabis indica
actaaaagttatttttttaacaattctctaaaaatatcaatcttattgaaagtacttaaacgatttattggtgcttgaataaataacacacaaaagaaaaaaaaaaaaaaaaaaaaaaaaaaaaaaaaaaacagagtcgatcataattcataagaactttaattatagaaaaattctgtcagtgaagctaataattaatttaacccaaattaataaattcaattacttgatatagttcaatatagaaaaatttcaaaataagtacataagtagctagctagctgtgatgtataggcagtattggttatgtttatttatagcttaataattcatgaatagtacgtactgtacctggcaacaatcacattattatattttatatacatattgtggggtaacaattctaaaaagtggttgaaacacaaataaatttgagaattgtttgaaggtaccatttctcttaataattttgtagtgttatactaacttttggagaatatcactaacgaatcgtgagacgtcacctataaaaggtgttagacaccaccagtgtccaataacaatgctcaataaatttaaaataactttatagtaccccttgaaagactgttccggtctcttatttgtttcggtatgtatataactctagttggattaggccttctcatcaaaggcttcagtgaactagaaaagcccacacttctact

SEQ ID NO: 330593 - DNA, 1737 bp, Cannabis indica
gaagaccagctccatcttaatcattttttgagcattatcttgatgaattttttcctgggcagcaacctttgattttttttaggaggagctcgctcacgtttcgacagttgagaagcaaaatcggagtcatcgtcttattcctattagctacagatttcaaccccattttagaacttttctttggcaaagggggaggagaagagttcagctatggaggttttattttaaaaaaaaaaactgaaaagaaattgaaaataataaaaaaaaaaaaggaagaagagaaaaagataagtgaatgatgtaaggtgtgattgatataagtcatcaatcaatgacgtggctgcatgcatggaattgatgtgtaagtggtataattgtaataaaagaaagaggaaaggtaaaaatgatgatgtaagcgtgtaggggtttttttgtaataaattgagtaaattggatttttgatgtaaaaatttcttatatttatatagtattttataaaaacaacatagaaaataataagaaaatcacatgaaaataacagaaaaataatataaaaccaacaacaaaacaacaataaaagaacaagagcacaatataaaaataacataaaaagtaaaaagaccgtatattatgttaatgaaatcttaaaattgttaaaatatttaaaattccgtacaacagtaattttgtaattttttaaaccaaaaatgactagtgtgtatttaaggggctctaatttgaatttaaaatcttaaagtatgttttcaactatatttgtgtagttactttttattggtatatagaattatggtttaatactattttagaccttatgttttgtaaaagttaatgatttaattatttattttgttaaatgacaaattcgatcctgcatttttcaaaatggtaaaaaaaatagtaccctgaactctattttcgataattttttttaatataactaacttgaaggtaatttttagcataaacatatacataaaacgtaaccagtattatcataacacattaaatcatattattattaaatattatattgacaaaaaattagctcaaagtgctatgttttatacaattttaaaaaatattacgtctaatttaaataaaacaaaaaatccaactatatgttgatttaaaagactgaacgataataatatttacttttattgataataatttaattaaattgaattttaatttatttttaataattataatatattttgttattcttaaaataaaataattatttttattattatattttttaatagataattattattattattattattattagaaaaaataaacttcaaatggaattaggaagtagtaaaattaacaacaaaactaagataaaataatatttttactaccaaagcctaaaagctcaagaacaaagcccagtctacaagcccactaaaacccaaggtgacacgtgttccatctgaagtaatctattatagtattataaataaagttgtgaaatattaattaaagaaatttttacatcaaaaatacaaaatgaaatatttattgcactaatatcactacacggctatatcaatttttttactcttattctttattttattactattttaccacatgcacactcattcaaagcatcggtatacgtgctcttatgaccccctatcaatcaaccatccatcgtttctctctttttttctttttttttttctatttcttttcaatttt

SEQ ID NO: 330594 - DNA, 913 bp, Cannabis indica
tatatatattgtatattatgttgttgtaacatttatttaatctctttgttgatccttgtattgtattacaatagagttgtaatattttgattttcttccattgtaataatatctctaacagtatatatataatattattgtttgactatatcttcattagaatggtttacatatataatctaagttctaaactgcaattgattcagactaaatcatttcacaccaaaccaaataaatttattgttaataatttagtcaattcacaccgtttatttataatattttggttcagttatggttttaaaattcttattaacagttaaaatcaaactatatcacctaattattttatatacttaattttttagatgcaatataatattggtatacttagacaatctttttatggcttatggtgctaggtagagtatcatattaatttaatattgtttttttgagaatattttctttaatagtttatttatatattgtaaactttaaaaaataaaagaaattaggaaaaagaaagaacaatcacatagaataaattcagaataattataaaatacaaataatagtttttgaacaaaattaattcgttgttaatgtattggcatgggtttgaatatttattaatctatatttaaatttttagaaaatctcaatgctagtatggttcaaaaaattaaaataaaaagagattattgtatttcgcaaataaggttgtacggattttaaatatttttataattttaattataaataactgaaaatggaaaaagtagcttattcatcttatatatgataatttatttctacatcttagcaatgtgggactaactctaatatttgatctatttttatagtgtactcttattaatttgttgttgattttttatgtttgtattttttt

SEQ ID NO: 330595 - DNA, 654 bp, Cannabis indica
taaaataaggcaaaatatcggggcgtcacaatatgtaagaaaaaaaaacgaaagctttgtagacaagtaattcaagtcaaaatctcacaagaaaagttctctttttttctctttgaattttaaaatatactttcccgttctcactctcaaaatcgcatctaatagtgagttgagtatcaacctagtctaattaaggtggtacttagatgtttgtagaagatcgtgaagacttgccacttttcggttcgaggatacaattctaggttcattacttggcaataacctactacagaaatggaagcgagggttagagtgactaaacaaaatgagtcacttaattatgttgcaatcaatgtaagaaatctgaaactttatatgtgtttatattaattgtttgataaataatattttaagatgttatattgtaatataaataatcaaatatatatggtaataaatagatttaagtaaaataagttccaacaattacaacaagcaattgacctataatcaatagctagtgaatgtttttcaatcttgagaattaaagagagaagagtattattcacctgataaggaatctttcatgtttcaaagaacgacaatacatttgtggaaattgatcctctaaaccaacttattatccaactcctt

SEQ ID NO: 330596 - DNA, 611 bp, Cannabis indica
attccaacctgtcacttaacaccaaaaaatggacggaaagggctaactgctaacagaagctgggtttaggaggttttactaccaaaattttagaatttggggttagttgcaaaaacctgcctactttagggggttttaccgcaaataacccttaattaaaataaacattttttattccaattataattatattaatcatttgaggtaattttgtgaattctttggatgaatttagaatccggggtgaatttggctgactgatttgcttacttacttcaactaagtcatagtttttaggatattttgacgaataagtaaaaaactttgggtaaatctatagtacactcttagaggatgttttggaccatttgaaatttttagaaaattctaagtagtttacaataccgaaaacaaaatttgaatatttcgttacatgtgttgacgttaaaaaataaccaattttgtatcacatattaagcaaacagaaaaaataagaactaaagagagaacatcaccgaattatagtagttcatgttaagagtcattatcaaatctagaatatgttagaatgttttacaatgttctaagaaatttataagagaaactaagaa

SEQ ID NO: 330597 - DNA, 1229 bp, Cannabis indica
cctttgaccaagttttcagctaagatttttaataaggcagttattatggacatccgaaggggagtgttataaatattaataattatgtggatgtccaaatcttttatttattaccatgaattgtaatcaacattcctcttttccttagtttccctttttcttagtttcttaatatctcactcttgtatttgtataaataggggttcaccccattggaataaacaactcagaaattctcattcactttctctttctctcttcatcttcttcttctttcttctcatctactttatattattttatattattttataacactttccaattattattatttattagttttatttgtatagtttatactttttattttgatgaaaatgaaaatagtttataggttttttttttcttttttgcaagaaatagtttataggctgttacttataaagtctctacaatacaaatttgtctatatatattacattatctgtatgtgtgttatgcacaaataaagattgaatatttgcaacaaaatactaccaatttctctctcttcttctgtgaaatacacgtatactctctttctctctctctctccacacatatatacacccgtgcatacaatatagagagagaaagtcagcttctctataaaaaaggagtgaacccctttcaaagcctcactccattttttctcttcctcagattttttttagagaaagagtgaaagtgagaaaggatttggcttgaacaagacgttattttaattttactttttattttttgttctgatttctctctgctttacaacatttgttcctgcatttttacacattttcaagaagaaggttcttttttcccctttccttttaaaataactgatccgagaactagggatttttggcttgtgtgggattgggtatgaggttcaacggagaaaacccagctgagaaagaaggagatgaagaagaacagaagggtagggaagtaaattccctccgaggagttgggtttcatcatcaaccacagaagctcatcgttggctatgccttaacgtccaaaaagaagaaaagcttcttacagcctaagctcttggctttagctcggtatgtaataaatttgtatctaattttttaaacccttttctggatatccttgtgttctctattacatgtttgtattttgccttatatatatatataaatatatatcttgtttttttttttttt

SEQ ID NO: 330598 - DNA, 566 bp, Cannabis indica
ttaataatagggtgtatttataattttatggggtgcaaacataactccccttagtattattggtatctagtattttttataagtgacattttaggattaattagtaatattctcagatagttattttcttaaattatatgagatttgatatttaattatactaatagcaatatgacactaaagcatcactaataataaaactttagaggatgcttagtgaggtagacatattatgtgtcaaaatattgagatgctataacattaaagagaaaagaatgatatctaaaaatttacatagatgttatgttgtggcattgatgttattcatttgtttttaataaaaaaatgaagctaaaaagtagagttgagcatccgtcagtttagtcggtttttttctatataaaaatctgaaattcaattttcggtatggattagtgtaatttgaaaaccgaccgatcaattcagaacctatcttaaaaccggccgttttgaacctcagtttggtcggtttaaaccgcccaaaccgaatttttttttttaaaaaaaatatgatctaatttattcta

SEQ ID NO: 330599 - DNA, 755 bp, Cannabis indica
tattaaattaaaatatatggaccaaaccaatacctattatagtgtttcacacttgcttttagcgtttattagtagatgacgtgaagttgaacacaatttataaaaataataacagtgaataagcaattttttctttcaaaagaaaaagagaaaagaataagcaatttttgcgtttcaaaataaataaataaataaataagcaatttttcgatggtgggatttcgtactaagcaagtactagttatagacgcactcacttataatatatattttgtattcaataataatatatccgtgccacggaaaagccatgtgatccgtacatgcaccacgcacttaatttccagacttttctctggtgagctccattccaaaagataatgaaagagaaagacacttccaaactctgtcgtttatgttttttattgttatgattggatattaaattagaaaagtgggtccactgcatttgccatgtgtcggccatccaggggctagttgctgcatcgtcatccaacctgatcctcaaaattgggtcccaccctacttcaatacttccaccgcaatgcatccgataaacccttttctttttcttttctttttaatccctcctttcttctcttaacataattagtccttttctttgttacaagttcataccataatcacctaatatatcattatttaacctttttttacagtaattattgggttattatttttttaaataaataatattattatattagaaaatt

SEQ ID NO: 330600 - DNA, 937 bp, Cannabis indica
ggattatggtttcagacttagagctttatggcctgaatgagatttagcattttaggattgagttaaggctctttatataagagagcttaaatcctaattagcagataaaataagagatatttacatattaaattggtaaaatacaaatgactaaattgccctttaaaaattaagttgccaatattttcgtagcatctttttgggctgtcaaggcccaactagcagcctggctttgttgtccacggatgaaggctggacattaatatcctacaagggaaaagctggccgaccatgcacctgtaggatgcaggctggccagccatacaaggttttcaggttgaggtccggcagctttaacatgtggaggccagcttttagagatgaaggccaacctttgtgcaccttttccttccagaggtcatgctccccttatcgaacggaagctcccttagtctgaaagtcacctattggtcagccagcttatgctcagaccctggctgaccatacaagctcatccttaccagcctatagactccccttgggcggccagacatgttggtatagctacttgacggcttgcttaactcctttcgcttgttgcttgacggtttttgttaaaaatattttaccaggatctagatttactaccaagtatattttattaacatcctaatatgaattctaaaacaatgaaataaacacatataaagtttaggaaaccttacattgggtgcagcggaatataatgactccttccattcagatctctagccctagattcctttctgtagcagagcataatcaagatctaaacttggatctttttctctccttcctttgatgctaattctccttcttgttgtttggattcttctacattcttacacactatgattgagataccacttgatgtctgtgggcactactcattcactca

SEQ ID NO: 330601 - DNA, 809 bp, Cannabis indica
gccagccaaggcatcattggacttccgttaactgtaggagagccattgtaatctatgacattaatgcaagacttcttgaacgtcgatctaccatcagtttataacatattgatgggtcgcccagcattgatcggactagaggcagttagttcaatcaaacacctatcattaaaattccaaacaccagcatgaataggtgtagtgcgaggtgaccagttattggctcgtgaattttatcgcgtagaacttcaaaatagaaaggccagccattaattaatggttgtcataatagaagaaggcaagaagagagaagaggatctcgaccctaggatccaagacgataagaaccagttaaaactaattgaagaataggaagaggttattttagatccagaaagtcccactaaatatgtatttaccaggaaaatctggatgaaaaattaaaaatagcagttaatcaactttttgaaggcaaaccaagatcaattttcctggagccattcaaacattgtaatgaccgcttagtttaatttagaaattagctgttaattatgtttaattatgaaaattatttatagatatttaaataattatttatgctgttattattgaattctgaaatgcattttatgtcatattatgaattttataattttttatttccggtgcccggtaacatggaactcggtgtttggctcagtaaaatcacaacttagtatgttagtatatcgggatggtttattagtacattggaaatgtcgggagtggtcgagatttaaaatttcccaaaaataccctttagtacccct

SEQ ID NO: 330602 - DNA, 913 bp, Cannabis indica
ttgggtgcggcccatgacctcagggctgacctgaacaaaagaagagatttggacaaacaatacgttcaacgagctgctcaaccaggtatccgcatctaggacccagctccaagagatcctgatgtgacacaggtcagttaagaggctgaaccggttcatccatctgtgcaagcacagttggatcaactgaaaaatatggttcaaggcctggccgacccaaaactcactgatctcgagctggactgagcacacaaatcactcttcaccccggagatcgatgtctttgaattatccctaaaattcaagatgctaacctggaaaatgtatacagggaaagaagatcccttgtcacatcttgaatattttgagattcagatgcatctgtagggagtacggggtgatgtgcgatgtaggatattccctgctacacttgcagaagccgcccaacagtggtacttcaagctatcacatgggagatttaattcgtggagagccttttcctctaaattctacacacagttctcctcctctcgtcaactcccctcatatctagaagacctggtcgaggtaaaacaaatactaggagaacccctcagagcctacataagcaggttcatgacaaaggctacaaatgctgcaagattaaccaaggatggaaggctggccgccatattgggaggcattgagccacttggagaactgtggaaagactttaaaagatgtggccccgtgggatctatggcagagtttctagaccgagcagatgggtttatcaagcttgaggaggctattcggcgagtggatgttgttgaacctaagcagggtcaaccatatatctcctcggcaagagcacctgctcaatgtacacaataccctagcagctcaactccgagcgggaaaaggtccaataaca

SEQ ID NO: 330603 - DNA, 667 bp, Cannabis indica
aaaaattaattattttaataataaaaaattaatttttttttctttaaaaattaaaaaaaaataaaaattaaaaagaaaaccctaattccctccctctttctttgatcttctcgttctctctctctctctctgccttacccgccgcccctcctcctcctcctcctccttcttcttcttcttcttcttcgtcttcttcttcttcaaccaccctcacgaatggatgtggttgatcgtagggatgcaagccggtcccaatggatgtggcagttacttccacaagaatcaccccttacgcttcctgaaaactgagcccaatgttttcttcctttccacagagattttggtctccatttttttgggaagacgagatcgtcgatggtcttcaaggaagacaatggccatctggccttgaggcagctgtcgtcgaggatcgagaaggagagaacaagaaagtgctgccttctaggatcgacagagagaattcgagagggagaggatgagaactttcatgctcggagtgttgccatggaggatcgagagagagagagagagaggacgttcgctagctgttacctggccgtccactggtcgttcacctggctgaactggaagtcgggctgccatggaggatcgagcaagagagtagtttgggttttttttttttttt

SEQ ID NO: 330604 - DNA, 655 bp, Cannabis indica
aaaaaaaattaaaatatttagggggtcagggtccctccggccccctctccctcgttatacatatagttagggtcagctcaagagtaacgcagaaggggcacacttagcccaaaaaatctttctcaaaaaatgccttaaatttattttgtaaaagaatcatattttgtatttttattattatttatataaaaaataatacttaatttatttttttaatatgctacatttgatattttattaagaaaaaagtttaattatattttcaaacaacatttaaatttttatcggtatatataaagaaaaaaaaaccataaattttttgatataagaaaaatccaattatatataaaaaaaagtttagtttctttacttaatttgccaagttagcaggcaaagataacatatcattaccaactgtgatgagctgatttttgagatttagagtcagttagtggagaatgatgctatatattcttgattctaaattctaatagattctaactaactttaattttagtaaaaactttgagattatttgattcataacttaaaaattattttcaaattttaaaaataaaagataacatttaaaaattaataaaagttctggccaaattttttaaaaacagttttttgaaaattgagttttaaaaaa

SEQ ID NO: 330605 - DNA, 868 bp, Cannabis indica
attttaaggtctaattggattggatcgaaatggtgattttttaaatctaattactaattagattagatcggatgagaaaaaataatattggaagctattggatcatattgctatgttttcctataaccctatggtcattaagaagtgagggatgtcattcctaaaaatgagcggaaggacaaaaaatctagcagctttacacactatacaaagctgaaagttgtgattactaaaaccgttgcgcatttacagctaatataaataaaacagccacagggaattacaagtcagaaacattagttaaaatcagtctcattgtagatgagcctcgtccttcatatggaatgacacattatgtacatctcattcaagaaaaaaaaaacatttagtagatgaaaaatcgaaatgaaaagtcacccactttaagacatattgtagatagtagttgcactatactgactgaataataccaagtgaaatgtacaagaaacttaaccacttgcatttggcgttgtattcctgctactactccagcttattgtaacagtgtcaggggaaagtgtcaatggaccacattttagcaacccaacatcatctctgtggaatcatttttggctattcttggttttataacctctactctgtatggcctttagttcttccagtcatcaaccatagatggtctcaaatcctctcattttgaagacattgaaatgctaattcagctacgcctgttatagtttgcttcactctaatgtctgtatcaaacttgagcatgggtcacaatctcatgtaatgtgtgattttgaatccgattgatagccatagtgacaattaatgtcgtgtcgatgccttgctatgtcaacag

SEQ ID NO: 330606 - DNA, 715 bp, Cannabis indica
catgcaagagtcatgtttaatttttatgaagcaaactctggcttccacaaaggaaggctagagttgcataaaaattcaagcgatgacttcgcttgagaaagatgaaagggtgaaaacatcactgggagtgagacagacttcaagtagtccttccatttcgggaaggagggttgaagacgtgttgtacccgcagtgatctttcaggcacaaaaatcatcgtgcatgtgagagtcatgttgaatttttatgaagcaaactcttgagttttgaaagaacccttaacttacaagaggaatactaaaatctcacacataatcataagcataattataaatagaaataataagaatttaagtggaaaaactagatgtaagtgcatattctcttcttctcttaagttctctcatttaaaaatgtaatgaaaaacttgctgaaataaactctaaatgtcctatttataaaaccctaagaacatacttaattttaaactttaaaactaaatttttaaaaattgtacggacattgaacgagcacgagcgtctgggcacttcttcttgagtttttactgccgcgcctagatcaatattttgactataacttcttcaaagctgagaacaagatctagaacttaatgatcaactccaagtccatatctacatttaaggtcatcaaaatttacaaaatacgttcacatttgtcaaattgagctctccca

SEQ ID NO: 330607 - DNA, 655 bp, Cannabis indica
tctctctctctctctctctctctctctctctctctctacgttatctatacttgttgctaactttgttaacaaagaaacaaaacacgaaggtgttatagtgaaattttttttgcctaaaaactcgagatcagtctcctatgaaatggacatgtggatccaatctctaaggaatggatgagctattaatgactctctgttagttgacctcgcttgaactaaactcgttagatgatgcgctcttgacagagtctagtcgcatactatgcctcgcatagaataagataagcaagaccaagagggatttatacaagttgcgcatataccgagatatatgtgatgactaggtaaccttcttctgtgactaagtaaagatcgtttctcaaatgacaaagcgtgttcgataacttgataaggactcgcgtgtatcatgttgtcaacgcatatgaggtgtccatatatgcaaatcaaatagaatgtagacactctagtacgaggctcattagccctccttagaaaaataaaatgcacccaaagcctgccagcttgtgcgatcatatgaacaggcaactcgcaccctataggtcgcatacgttactgcacttattaaaacaatttaaactgttcttcatttattcttttacgtttattctaattt

SEQ ID NO: 330608 - DNA, 524 bp, Cannabis indica
tttgttaaaaatatataatggaaaaatctggtgtgcataattttgatagttatcgtttcttgagaatccctcacaactctcttttgtacaagtttactttcatacttatttgataaggaaatccaatctctaagaaaaaatttaaatacacgaattacctacttgattctttaacatgttgttttgaacattttacaatgttgtgattgattctaacaaactttatctctaattcacatcttacaattttataacctctaatttagggtggcacatagtataaaaagaataagaaaaaacccctaatccaattctttctttccctactgtctcgtgtctctctcggtgtctccctctcatctcttttggacggtgccaaaacatggccagccgggccaccccattggccgaccgcgacgcacactgctaccaccacaagccttctaatttgaccccagaaaccccgctcgtgctaaacttccaccctcgagctctctctcttttcatcactctctctctctctc

SEQ ID NO: 330609 - DNA, 691 bp, Cannabis indica
agagagagagagagagaggagccggacctggtcgacggaggtttgagaaggtctgggtcggagtccacttccatggatgttaaagtagactcggacagtagtgactggtcaatgaagcttttaaaacttggcgggaaatagctctcagagagagagagagagagtgttcgcgatcgctatggccttttagagtagaagttgaaaactgtcttctctttctcctccggaaccacagtaacgtaagctccattaatattaaaattatttaaggattttttttatttttaactctaaaatagtttattttttaattttttttttatagaaatttacataacaatccatatagcaattaacgaagaaatctgaattgcaaccaaaatttatatagcaattcatgggaggaacccaaactatcaattttttttaaaaaatatatatattaggaaaattctataatgcaccccttaaaatagatatattgatgcacctctatctgttttagcatccgaaataatttttggtcaaattttttctcatggtcatgtacgttacagttatttaagacatcctgcaaaattttaagaaattcagaaaagtttaacacgccgaaaactatgttcaaatagtgtgttgcacccgtgactatttattttatacgcgtgtaaaatagactgtttgaacattgttt

SEQ ID NO: 330610 - DNA, 1261 bp, Cannabis indica
ttgacaaaagtacataaatccaacaatctcaatagtgcagggggcatttttaacgatcttaaaagttcagggggcataatatggtacatgtcaaagttcagggggcaaaaatcctaattagccttattaaaataattatattataatataagtcgagatagtactttacttaaatccaaacaattaatgatgtagctatagttcttttttaaaagtatgatattttttaaaagtatgataaaaattaagttttttttttttttaaaaaaaaaaaaagattaagttcttgatgatacaaacaaagagaaaacagaatgtactcaaagaaaaaaaaagtggcgctggtgaagtttaaaagtagtagatctctatctattatttttggaagctccgtatataatagacgtcattttatgattaaaatttcttttgttatttgtataattatttttcaaattaggtatataattaaaagaacctttttattttattagtttcatgaaaaaattatttaaaagttaatttattttactatattacatagatatttcatatatttaatattactcacaacctgaaactaaattaatgctttaattcatgaaactataaatttagtagtaatagtaatatatgatgtcaaactataaaaagatttttagatattactagtacaccaactaaaaaaatacaatgcaaaaattatggttgaatacataatataattaaaacatataattattatttgttcactagatgaattaatttaatgcgaattagaatatgatgcaattatattagattagtggttatgtttgttatgttagttactagttataggaagttagtttttaaaaaagtgttttgagaaatgagaacaaaaattagagcttgtttagttgtgtttttcagttttcagtttttaaaattgtgttttcaaaagtgaaaatagaaaacagttttttgtcattttaaaaatttaattgtgttggacacaaattttaaaaactggttttagatttttttctaatagaaaaaaaaatcaatattttagcaccataccatgacattaacccatccgggtctaggtttgggtatggtttcgggtctaggatccgagtatgtgagcaaaaatataaaatataatatgttatacaaaaaaaaaaagttgtttttgaaaattgaaaatagcattttggtgttttctgttttctagttttttaaaagggttaatttcacaaatgcacaaaaacaacaaaaa

SEQ ID NO: 330611 - DNA, 721 bp, Cannabis indica
acttgtcttttttttttttactattgattcgatcccaccaaaaaaaaggttttttatatcataattttaactttatgttctgattttatctacttgctatatacatatgatttaattttatatgtcattgctttatacacgaacgaatgtttaacattagagaatcttgttttttgtttgcataaatgccaaacgacatttcgtttagttgatatcacaaaacgacacatcgttttattgggaggattcaagattcatcttcatggattgcacggaccgtgtcctcttgaacgacacaattttattttctttgagaaaacgacatggcacaagtcgacgtagtgttgcttagaaacgacattctaaatgaaacttcgattgtcgtttatcacaaattcaaacttcatttatttcctaaaacaaaataagaaatacattattaaataaactacatgtcgtttataaagatcaatttaaagcaagatagctttttttaacttttggatattagcagcaaaacaattttaacagtacttaactatatataaattcattttttaaccgcaaaacctactaaacttctattttgatttggtatatttatgtttctgtctaaaaattttagttaagtaaataccgtgaactgctcaaatctacacaagtacacacatgacaatttttttagtgtccacatattattaaaattttataaaaaaaatta

SEQ ID NO: 330612 - DNA, 971 bp, Cannabis indica
gatattattaatttatcatattgtataccactgtaagagtattcataatgtgtattcaaaaggtttatttatatatatggagagagtgtgtgtcagactatgtagttgttaacttggaatttggtgacatgtggcaagaaagatgacatttcagagttgagtagtcccgagtcatagcagtcgacctgggaggagtccctagccctgcgccgaggttgacttcggaaactctaaaaagaagtttggacttcaataaactcactatctttcaatattatgtaccatgaagacatggaacaatcaaatacagatctcgggagctgaaattacatgaacctgcaccctaaaagtcaacttgggcacctagggtttcacccaatgcctaggttgacattcctaattagggttttagtttttgagaccgttttagtgcaaatgggtcaaactttgtattgggatatgaactagacataccatgaacatatatgaggcatcataatcagattcagagaaagttcatttttgagaaaagagagaattataccgatctttcattatattatgtatatcatttattaaatcccaaaataagataaactcgttgactatgaagaattaacttcaaaaccacgttaaaaatcttcttgttatttattattattattattattattattattattattattattattattatttccattattatttatttaaatcctaagttcatttattacaaaaagacttatttattggttaacaaaaatttgtgttaacaagaactaacaaaattgtaattcaagtttcctagccatctacattattagcttttcaaatagaagttgtaagaattatcttctctaagaactttaacgaatgaatcaaagaaactaataacttgaacaggagttcatgattaccacatgtgtaaagcccgcttagttaatttggaaatcagcagttgttta

SEQ ID NO: 330613 - DNA, 652 bp, Cannabis indica
ttttttaattatatatcatttaatttttaaaaaaataaatatatcattaaatattattataacaagtataaagttttaattgtatacaaacagttctatagtaaaaatatacaccttacattataataactacaaaatctaaattcaatggtaaagaaaaagttctctactagtaagcaacttttactaactcctactataattttaccctataattataatctaacaatatatatgattaattgaaattgaaaatgtctcacactgattcatacactacgtagaattagttaattaatagtttatataaatataaagagaacaataatagagcagcatagtcagaccacacatgataattgaacaaactacgaagtagtatgtatacatgaaatattattataactttattgtaacgtccccgcttcaagtttctattgggtccttatatccacggaataatggctcttatacacgggtacgccactctggctgcttcctggattgatgactgaccctacagaccaacacaagtgtttccagcgtgctttgtcctcactcacacgcttcctgggaaaacttctcaggaggtcacccatcctgaaattgccccaggtcaagcacgcttaactgtggagttctttcgtgatgg

SEQ ID NO: 330614 - DNA, 1041 bp, Cannabis indica
tttattttttaaattaaaataataatttagaccaataatatttcgacacgtggcattttgaattgggtttgacggattttgttaacttggagaccaacggacaaataaaaaatatgaccttgaggactattgccgctatttttgaagattggggacttatctgtatcaaactgaactttttgggggccgcaaatttcccttttatttttaacagttatttttttattcgaaaatactcatttaatctcacttttaaaccgacattaaaggaagaaaaatagttaatgtatattttaagtgtctgttttacaatgacaccaaaactatttgtctcagtttataacagacgcttagaatctgactttttgtgactgtggaataggtgtcagttttataaaccgacactataggtataagtgtcaatttaaaactgacaccaaaagtgcagtttgtagtagtgtttgcactgtttgttttcttattttattttgcaattactgagttgtgttccataactacagaataactgtttcaatacaatatttattattcctcatttaattaattgattaataattagataatcaattggtaatattaaaatacggaattttaacaatcttatttcagaaaaaaaaaattgtgtctaaataaagtctgtggttaaaaattttagtcacaataataaaaataattttgtactggaacttttggttaggacatttttttttttagttttgttgtgagtaaaattaaattttttgttgagataattaatgacacaagtgcacgtatataatgccttaatatgttcctttgaagacaattgtttaatatataagtctttaaacatgggcatgttagagatattattacaatagacgaaaatcaagatattacaactctattgcaatataatacaaggactaacaaagagattaaataaatgttacaacacataatatataatatgtatacactatacatattatatatataagaaaggtagaagaagaagatacaacacatgtaatataatat

SEQ ID NO: 330615 - DNA, 1471 bp, Cannabis indica
tgtacacaaataaaggctttaaacgtatcaatttcagtctttagtatgacttctcgctccaactcagtattttgtcagtttgatttagccaggcgttgtcaaagttgcctattttcaaattctaccagtaggacatatctggtaggatcataggcattttcactcattcattctggaatttgatcactagcagtattgagattaccatcgttcctctctgaacatggtattttagatgtgttggatctctgagatcccataggttctttaccaggtcgatgggtagtttcctttggatgattacctttgtgtagaattttatcagccatttatatggatttgtaattgtgtttataaggagagatttttctgtgtttttatcaccaaggctctcaatgaaaacatcaaactgttaacgcagattttcgttaaccaaatatatagtcttttacgtaataaatttactacagaatttaataattataataatgaacaccaaatattttacgtggttttgtagtttaaatcttcatactccacgagttggcattattagggatatttatttgaatacagagtataattctcaataataataaataataaaattctctctctattttttttttttgtccctttttttatggattctgcccctctttataggtgtctaggttggcagttatttttatcgggatcgattcatttacaaatgctaatgaaatgtggagattcccagttttatttatttgcacatgagataatgtctaatacctacccaactgctccttgtctttatcctttaaatggttttgctgacttagaaggttgtttctcgctgagtatgagttatcattcttattcgtcttttgaggaaaaatgcgaagtgtagacatgcttcttcttacagcattctcatgttataatgatattagcgagatgactaatgcatcacataaaaagtgagatgaataaaagtaatcttcttcacgtacaattgtgtgtcaatgagtcgtaagatctttgatgtctcgtcttgcatattcttattatataattttttttatcccgtggcggatatattgtctcgttaattaaattcgttaataattatgattattattatctcacatatgcttatgtaattaacgagtttgaatataattaattaaaatgagttgctttaaatcgcatttaataatacaatttaattattatattctttgagttgatttcatattctttttgtaggacacatgtcagcttttgattaataaccgaattatggatataacatcttatattcttaaaatattttgttaaactaacaacaataaaaatatataattaatattaatattgaataacaacaatatataatattataaaaatatatgcatctcaataaaaatatcgaatagtttattatgtttaaattattaccacttaaattaatatttttatataaata

SEQ ID NO: 330616 - DNA, 725 bp, Cannabis indica
ttgtcatggaatgaagtggtgctccataatgcttagattgttccaaactatgtgccaatttttcaccttatcaatgatgatgtagctgttgtataacctgcccacgataaacttccctttaaaaccagctcccaaaatatcatctcgagaaaaagtggcacgagtattgcataatttcctccaataccaggtagtgtcattcttaagctggtaattccaaaagctttgcccctttaagtaaatattattcacccattttacccatagggtatctttctgcttgcatattgtccaaacatatttggcaattatggctttgttctatttgactccttcacgaaagacaagcccccccaaaaccttaggaagacaaattttctcccaagaaaccaagtgaaatttgcttcttgatccattgtagccccatagaaaccacatacaaagcctatccacttatttaacaatactttgaggcagtcaaaatatactcatccaataatttcttaacaccaaaagaacagagttaatgagttgagatctacctgcatatgaaagatgatggcttgcccaagtatgaagtctcattttgattttcttgaaaatgactccacagtcttcaactttccatttggttggtctcattagcaccccaagatacttgagaggaaacaaaccctcttcaaattaaataatctgaaggagctgtttttttaagctaagacatt

SEQ ID NO: 330617 - DNA, 610 bp, Cannabis indica
acgaaacctaacaaatgactaaatttttgtaaatgcaaaagtttagagagaattcttaacaagccgtatattttaagaagcagaattactattatcgaaagttcaagaggtaaaattactaattattcttttatatatatactgggtatagaagtcaactctcaagaaatatattattctatttccatatacatttccatttgtattcatacaccaatttttataaattaatggtgcgttttgtaacacatttttaattagtttttttgttttttttaataagaagtgaaaatattttttaaaaatatattcaataaaattgtttcgcatttcaatttttatcaaaaattttaaacaaaataaaaatcactttcacattttttttaatcattattttggactctgacgctaacctgtaccttagatccggactccagtcctgacccgaatcctgaactcggaccacggccgcgacaccagacctgaacctggaactgataaaataaaaaaacaaaaacaaaaaaaaaaaaagatagagaacactactttttgttttcttagtttttaaaattaaaaaacaaaagtgattgtagaacacatttttattttt

SEQ ID NO: 330618 - DNA, 1008 bp, Cannabis indica
ttttaatagtatttgacataaattttttattactaattttagattttatcttactaaaaaaattaatattttaacatcataccatgacatgaactcatccaggttcaggtttaatgtggatctaaaatctgagtatgtgagcaaaaatgtaatattttttaaaaaaatttgccaaacgacccttattattttttaaaaactgttttcaattttaaaaataaaaaataatttttaagttaggaaatcaaacagcttttaaatctaaatgttattgaaacttaattaacttgaactttactccgaatcaagatctcatgttaataaattgtgtgtcataatgtgttaaactaatttaagtttgacacgtcaactaatttttcatttattaaaaaatcaattatctatacagttctttttttttaaaaaaaatggtcaaattaattgacgtgtcacaataaaattgatttaatacactatgaaagacaattttttaaccgaagatcttgattcctttactcccctagctagctatatgatttctatatatcacatatcaagacgggattgggtagtttaaatcaacatctgatttgctcataatatgagaaaattaaggtgaaaaaagagaaaaaaaacatataattaaccttagttataattttcataatgatatcgatcacgttaggtacttaatttatattaaatggaatatattaaatctaaacttaaatacgtaaaatcaagcacatgagatgagacctgtcccctatcagaagaaaattgttattattctttaaaaaaataattgtagtttatatatttatatgttatgatcatcactgtgtcatgagtccatgagagagaggcattaattaatgctcgttattaattaggctgttcagaaagtgacaaagcactacatttccattccaacaattttgcgtaaaacaactcatcatatcgtaaataaatgaatattagctttttttagcccttgtacttatgaca

SEQ ID NO: 330619 - DNA, 1300 bp, Cannabis indica
aacaagtgtaggcagtctatttaaatagacagccgtttgaaaagcatcccacaagaattttaaaggcatttgagcttgtgcaagaagagtcaaacccatctcaacaatatgcctatgtttcctctcggctcgaccatttagagcagaggtatgggggcaagaatgttgaaagtctattccattttgaataacacagtcactaaaaggctgaaatttatctccccaatcagttttgagagccttgattttcatctcaaactgattttccaccagccttttgaattgaacaaaggctgaaagagcctcttttggctttaagggggtaaatccaagtgtagcaactgtgatcatcaacaaaatgaatatagaatttgtaatttgtgttagatgtgactggtgcaggaccccataggtctgtgtgtattaaatctagtatagtttgggctcaatcagagttggtattaaaaaggtaaggcatgcaatttaccatattggcaagcttcacacaaatgttctttttcattaacaacagattttacattaagagtgcttaacacttgactcaagacacgactggaagggtggcccaatctcttgtgccacttatcctttagggaatgaaaactgtgttcagcaacatgttgataacttgatttacacactacaccagtaaacggtttcacagatatagaattagaaaaactagaggaaccagtactcaaacttccttgttggctagaaacttgatacaatccatctttaagagtcccttggagaaccactttctttgtgttcaggtccttcacaaaacaacatttggcaaagaattcaacaaacacgttattttcagatgtcagttgagaaatacttagcaaactcttaataatatctggaacatgtaggacattattcaaaactaagtggttgttatcaatagtgagtaaggagcttttaccaacatgagtaatttttaacagattaccatttcccacagtaagagtatcctcaccgttgtaattagttttctgagtcatattgttggtatcaacagtgatgtggctgctagctcctgagtccatataccaagctccatcttcaaccatttcaggtgtggccacaaaagcagatgccccattgttgttacaagtgtgtgaacctttgtttccaggtacagatccagatgcagtggggtcagaacccatgtagttttggtcataacaattgtagcaataagcactggaatgcccataacgacaacacacctgacaagttggtttggtgttgttgttggaattatttt

SEQ ID NO: 330620 - DNA, 492 bp, Cannabis indica
ttgataatcgatcactaccatagggtagggtcggtatcgagtcaatttcattaagcctatgagacaattctcatctttatattttgaaacttaaatatcccatatttcctttcaaaatatatagtaccttttttcgatcaagttaacaactaattacatggaagtttagttgcactttgtgagtataacctactatttcaaattccatgaattgacttagtaatgctatcttagggttgatattgcactaaaatacatcatttcctcttatcttagtcaagagatcaaccttgaacaacactatagacaaaccttccttagggggactaaaataaaatcgtctcgaggctagtttatactccttcaattttaaccaataatggagaccgtaggttacattaacatgtactctttctcccacacactattttaagttaatgtatttattttattaattctcagaattaatacatattaaccactttaataatt

SEQ ID NO: 330621 - DNA, 1091 bp, Cannabis indica
agtggactggcccatgatccgtaggtgggccagggatgggttcatgtggtgatttaggagtaggtggttgatcaggtgaggtggctagtggagaagaatatgtgggctcacgtggagtaatatgtgctggatgagattgagtattatgagtgggctcatgcgaaggaggagtagggagtggttgttggataatttgggttgataacgaatcaggtatccccaaaaaatcatcaataatacaaggatctccactcaaattcatatttccaaagttaacatcagaaatagtagtagcaattacattatcaaccaaaaagaaaatgattttcaaaaaatttaacatccctagaaacaaaaaaagatttagtttctagatcaaaaagtcgccatcattttttaccaaaagggtacccaacaaagacacaatttcgactttgacttgcaaacttatcacccttagcacgttgattatgagcataacataaggatccaatcacacgcaattcgtcgaaggtaggcaaagaattaaataagacttcataaggagttttattttttagaacactagaaggtgttctattgattgaatgactcgccgccaaaacacattcaccccaaaaataacgaggaaggtgaccttgaaagagcaaattccttgccacagataaaatatgacaatgcttacgttcaactctgccattttgttgtggagtccctacgcaagaagtttgaaataatattccattgccaatgaaataattttctaaacaatgaaactccgtcccattatcacttcgaacgattttaatcttttgaccaaattgtcgatcgaccataacaataaaagacataaacactttaaaaacttccaatttatcaatcaacaaacaaacccatacaacacgggaataatcatccacaatagtcaagaaataatgagcctcacaaaaggagactgtattgtaaggaccccataaatcacaatgaactaactcaaaaatccaagaagccttattatcactcatagaaaataaatatctagtttgtttggcacgtggacatacatcgcatggcttatttaatttatctct

SEQ ID NO: 330622 - DNA, 560 bp, Cannabis indica
taaaacgatgaatattgtttttgtattaatttggatgtgtccatgttggtttatgtgttacttgatgaatgtatgtgaattacgaaatttttccatgaaaataattttattttcgttctgaaaatattttatttggattccttgtgaaaaattaagcaattttggtttttacggaactcaatgccgataaaaattgaaattttttatgaattttggaagtttcaggtttagttggtgcatcgagtgcaccagggactcggacaaggtggcttctgcgcgcgcgtgacaggggacaaatccatatctgaacccatgtgccccgcccacgtgaccctgcatccatcgcccagcatgctgcacacgtcgagtgacacagtgcagctgaccaagatttctcagtcaaggaggctgtaggtcctccaatccgcacgcgcatcaggcattttgcaacctatttgggctgcacgtgcagccttgctggcagccacaccccatatgcgatttttgtgggattttttcaaaaattttaatttttcctattttcaaaccctaaaatcaaa

SEQ ID NO: 330623 - DNA, 832 bp, Cannabis indica
tatttataggagtctaggatgacgcttattcctttgggatataatcattcgtagctgcttataaaacgtggatgtttcccacgtttcattttcatgctcatagaataattataaataactatttaactgctctttgtctctatctatagacggttatgctgactatgctcaattgttctcgccatttaagtgatatttttcttaaacgtctttgtggaaaaaatactaagtgttgagttatgatgcattttgtagccttccttaactgtttgactgaggtataagcgagatgattacttcaacatgttaagagtaaggtgagtaaatgttgaagttgtttttattccttaaacatactcacgagtatatggatcaatgaactgcaaacacatactcataagtatgggggttaatgagctgcaaacacatacttacttgttctaaacaatcttattgtatattatgtttatcccaagatagacctatttatctcgctgatctcatcagtcaatagttattactcacgttttgctattgtctatatagctgcgagtttgagtatttctgttaactatactccccgaggcgagtcaattaagtgtatttaataatatgtaacttgagctggttcatattccagttgtgataaacgtgtcaacttttaattgctgattggaatataggcataacattcttcttaacaattaactaagggtgttcattggaccacatctaatatttttaggcctacccaagtctgatccaattatatattggatgttatagtttactatccaagccgatccaattaatttcagtcatcctatcgatc

SEQ ID NO: 330624 - DNA, 1148 bp, Cannabis indica
atattcatttatcagaaaatcaattatttatttatttccttaaatacaaatatatttccttaaataataatattcttatacaatgttccaagttccaactaaaccttggctcattaatcccaagatcttcctgatccacaatgtgtcgtacttctttacacgttacacctttacacaagcagaagctgactatctggatagccagataggaatgaaactgggatctgaaacttgtggatgactggagaagattttccaaaggaggcaacacggtctatttcattagtctgagcacgcaacacagcttgtcccattcaaagttggttataccatagattactatcactactattatactattactactatatattattagaactctctattttatattttttactagacaaagagcatgttatggacccaacccctcagagtgaagatttagagaaataatattgataggaacactcagctcaaaggactgcagaccatttcattaaataaagagggaaatataaagagggtgcagtgaacctgtgttggaaaacttattgcaattaactacaatatttaatgtcaaaaatgggatacttatcaaacaccaaacactacaataaacaattatcaaatatcaaccaaagcaccacaaacaatataaaatacacaaattaagcataaaagtgagacactaagatttttacgtggaaacccaatgcgagaaaaattacgggaccgtagtccgttcaaatcatccactatcaccaaagattaatactggtattacaaagttcttctctaataaaactagaggctcacaacaacatcaagattgtttaatcttggatcaccaatacaatcatcatcatctcaaaagatgaatacacaaataaaaaagtttgggtctcaccaagtgggtattgtagaagagcaccttagagaggacaattaccaaatcgaaactggtagatttgaagagcaccttgcaaggattcaccactcaaaatttgagctaaaatggatgagaatcaaccacttgatcttcaatgcagaataccgaaatccttttctctctagttttctttctcttctttccctctatttttatttctttttttttcttggctgcttgctgctcacgatac

SEQ ID NO: 330625 - DNA, 951 bp, Cannabis indica
taagagccattcattccgtgggtgtaaggacccaatggagacttaaagcggggacgttacaataaaacacattattgatataatgaaaatgtattgaatataattaattaaatggtcggaggcaaagcaaattaagcagcggcctcagggggctgtgacaatggcatatgcaactatgaatggcccccacagcacccaaccccaatgcactagagtcacatatttatatgtatatcagaagcctgatcgatgaagctgcacaaaaaaaatgcacatccaatgcgtgaaccatataattgtgtggaagccaaaatcatccctttactaagcttactccttcacttggcttggcccctgcaaatattatctcttctcttaattacttaccaacacttgtatgtagtacaattgatactatacccaattggcatccaatgtgtctatatattattattgttattatgttattttcctttatctctctcactggtcacaatcttgtcaaaatgccaaaaacccaaacccatatatcagctcgatcggactccctgtcctcttcctgggcccaacctcatatatatatataatcacttgactgtatctacatatatatatatatatatatatatatattttctatataggaaaaacaacttttgtagttatgtttagtatacaatactaacctagtaatagcgttttccttatcagtacaagtacgctgggtgtgataatataatgaaataaatgtaataatgcatgtacgtacgtgtctctctcaatgtgtgtaggccatattatatataattactatcaaatctaaattaaattatatgatttattttactaataatattaacaacatatatttactatattgtcgggacatatagttattgtctgtatatatatatgtagctagaggccggtacgacttactaaaaactaata

SEQ ID NO: 330626 - DNA, 457 bp, Cannabis indica
tgaaatgagttttatttaggggataaaacccaacagtgaaggtgctgaggtttttccaccaaggggaaggagaagaggcggagggaatgtcaggaggggatatggaagagaaactcaggtggtatcaagttttaaccgagtaggttcccaattttgtgagtttccaaatcaggtcgtcctcggaggggtggaggggaaggggaacggagaggatttcctgaataatatgaggagggtaatagtggctaagacggctaaagtcccatgtcatattattgttaatgaacgaggccacccaagctgggataaggttgatagggatgacacaattgtaactaggaatccaaggatcatggatagtaaaggtgttcttgttgggttttatgccctaaataaaactcatttcaatataaccagatttacttattaatatagatcagaaataacatttaatgtt

SEQ ID NO: 330627 - DNA, 1119 bp, Cannabis indica
aaaaagaaggtaaaaataaaagaggacaatataaaaagagtatagagtgtaatttcctctttttgttttgtttttttttcgaagaggctacatggactatttagtttgcatataactaattattcctttagtataaggtaatcgttcctaaatatatagttatcagatgttttttttttctgtggctaggcccacttactttttttgggcttaggtgtggcttggttaggattgtattttgctagtgtaatttaatttttgtcattgcaattagtcttgtctctgtgacatagttttgagtgttttcatcatgtctctataaaataattttgagtgttttaattttgtctgtgtgtgacatgactttgttttattttgtttcgttgttggttcttttttgtccttagacgactcttcatcaaattgctgttagtggttgagtttaacaagttttttgcgactgaaggagttgttagtagagcaattacgtaccttacacaatagttgagtgttcaagctacgaggttgaatgaacatactacaataatttctactgttgtatcttctcagcggtagatgaaacaaaatatagatgttcttaagattggttgtgatgctgcaatcttttatatctaattttattttagttctttgtcaaacgaactgggaattaggtgactgattatttggctcatttttctaattctaatcctgatcgtatatctaacggggagatgtcccaattagattgcaagctatattttagttgattaattattgtggtatagttcctccaaatgaaaagatctctaaagttgtttgggtcatggaaagttagatgaatttcgaaagggcaattctgaaagtctaacttgtctattcgaaagaagtctcgtggaatgataggtgtcatccaaaagagcattcttggatgtctatcatgtccaccagaaaggagtttaagacatttagttgttcctcctggaagggagtttcgaatagtcaactccaactgttgtctttccaatctggaaagtcccttctacatacacttttaggaagcgtatgttgttgggttttatgccctaaataaaactctttacaatctgattagttatc

SEQ ID NO: 330628 - DNA, 1775 bp, Cannabis indica
taacttttaaagacccgaaatataggctaattataacctaacaataccacacgtcatgaatcaattcggccagaaaacatcagagtcggttcaggaatttttagatgtatttcctgatgaacttctgggttcaccaccacaacgggaaatagattttgttattgatttagcacctagaacggagccagagcttaaagaatggcttcgacagagcttaaagaattgaagattcagctttaggggatgttgacctagggttttcgcgacctaatgtgtcaccctagggagctttagtgttgttcattaagaagaaagacggatccctacgcatgtgcattgcattgactactatgaactaaacaaactgactatcaagaataaatatcctttacctaggatcgacaatttgttcgatcagcttcaggggaagacgatcttttctaagattgatctccaatcaggctatcatcagttgagaattcgagaggaggacattccaaagactactttctacactaggtatgggcactatgaatttttggttaatgccctttggattgaccagtgctctgacaactttcatggatctgatgaatagggtattcaagaatttactagatatatgtgttatagtatttgtcgatgacattcttgtgcagtctcaatcaaaagcggagcatgaacaacacctacggatggttctacagtgattacaagaacataaactctatgctaagtttaaaaagtgcgaattttggcaatctcaagtgtcgtttcttggacacattgttagtatagaggggatcaaggttgatccatggaagattgaatctgttagggattggtcaagaccgaagatagttacaaaagttagaagtttctgggattagctggttattatcatcggtttattgagggattttttatgatttcaacacccttaactgaactaactaaaaacaatttacaatttctatggacagaaaaatgtgaagcaagcttttaggaattaatatagcggttgatcacagctccgatattggccctatcatttgataaagagaagttcgtggtttatgttgtgatgcatccatactgggtctgggatgtgttttgatgtaagttgatcgggtaatcgcttatgcctcccatcagttaaaggaatatggatagcaatacccaactcacaatttagaacttgttccggtagtttttgcttttgaagatttggcggcattatctttactgagaaaagtgtgagatttacaccgaccacaagagcctcaaatatttctttactcaaaaagatttgaatatgagacagaagcggtggttggagttggtaaaggattacaaatgtgaaatcctttactatctcgggaaggctaatgtggtggcagatgctttgagcagaaagggtcacgggcaagtaaccagtgtaattatgatttcaccctagttagaaactgacatggtcagatcaggtattgagtttgttctgggcaaacttaataatttaacattacaatctgatatgttagatagaattaaagctactcagttaactgatctagaattggtagatcccagaagaggttttagccggtcaagctaaggattttacggtgtcaggtaatgggatgctattgtatagactcagagttgtattccaagcagtgtagagcttcaaaatgagattctcgagaaagctcataccactcctgttgggtttttatgccctaaataaaactccatttcaatgtaatctattttat

SEQ ID NO: 330629 - DNA, 1234 bp, Cannabis indica
tatatatattaaaaattcttttaaaatatcttatatataatattatatatattttttaaataaacgtgctttcagaatactattacataatttaaatataattataaatttatttttttgataaaaaataatttaataaatttattaatattatataattataaatgttgaatattgatatgtaaaaaaaaacaaacagtctaaatatttcaattttaaattcagatatgtatccagattaagatgtctatatcttaaaaaaaaaaaaataaatgcctgagtataagtcaaccaaacttcattactatcaaactaagtataagtcgaccaagcttataatatatgaaaaaacttataatatattagaaaataaaaataaataatccataaacatgatacacgagtataagtcaaccaagcttcatcactatcaacctccacatattattttacactattccaagaaaagccacttgtgttgaccatgtcgaagactatgttgtattgtttcctcaacattcgatacttgttcttaatgtgtgggctagctcttataccaatgaaggaatcaaaacactcaatgcttctatctctttccatgtcacaagtctaacagttccattataacatatgttatcgcctttcaccaaaacattcagcaacacatcatcttcaaatctactccatgtacgcctaaaactcttatcgctacaaacatgtttactactaactccaatatccatatccacatgcatttctcatttccaagtcaccatattaataaattttacatatacatatcaaattaatgtttccaatacaaacaatgataagaattaaaatgatccaaattgttgatgctgaaaaattatcatataacaatcatataaaatattttatatagtcaatgatatatttataatttattaaaatttacccaatgaccatctacacatatttgaccaaataaaaattgtatattttataatttatttcattttgcaaatatatatatagtgttgactggaaaatttgccaactaactcgaagtctaaattatactaattaatcaccaataaaatgttagaaataataaataatagaaaaaatactaggaattataaaggtttggcccccttatgtatgggtaatgacctacttgttaactcaaacttttatatctccttgttttgatgattaacaaatatttgattattatttgttactaatgatt

SEQ ID NO: 330630 - DNA, 576 bp, Cannabis indica
aaatttagtgatagtgtgacactaaatttgatgagctccttggagatgctctaagataccaatttgttttgaatttttctgtgattgacagcaattgtttcaattgtagtgttatcattaataatttaaatatctattcttacttttgaggttgttaaaaattctttttgaactattcaaattgttggatttaaagattttttatttttttttttcaattttactaatatgtagttgtccatatacgaaatcgtgcctccaaattttgatatttacaaaatcatatctcctgaactttaacatgtacagaattgtactccctaaattttcatccacgtcagactttctttaataaaattggacaaaagtccttaaatccaacaatctcaatatttcaaggaaaattttttacgacctaaaaagttcaaaagtataatttggtacacgtcgaaattcaagagcaaaaatccaaattaacttataatatatatatatagggtgactattcaatggttacatttttattgtaactatatggttacatttttttttaacctgtaatagcaggttactaat

SEQ ID NO: 330631 - DNA, 1454 bp, Cannabis indica
caaacgttcctaactaacattatgaagactagctttatcatcccctctcaaacaaaagggagtggtacacatattgagtttggtcatcaagtaagaaaatctgtctttgcctaaagctattgtaagaatgttagcagtttggtcaagagaaggaataccaggtctcacttcaatctccttagcgattatttagtctcaaacgaaatgaaggtcgatttcaatgtgcttggtccttgcgtgaaatacggagttggtagcaagagaattttctccttgatttccaacccgaattattaatgttgcagggtaataaaggcacgttgagtttagagagaatataagcagagccatcttactttagcagaagtgtttgctaaagatcaaaactcactttttgtgctaattcgtgcaacaacatgttgatttttggcagactaagagataagattttccccaataaagatggcatatactcttttgacctttgatcatcaaggaaactagcccaatcaacgtctgaataggctttaagacaaagccttaggcttggcttgatgtgtaacccctcatggatagtcccttttaagtatccaaacagtctcttgcatgcttcccagtgcaccgtggtaggagtatgtataaattgactcagcttattcactatgaaggcaacatcatatcttattagtgtgaaatattaccaggctcctaaggtactcctatataatgtttgatctgagaaaagaccctattgtcaagagacagaccatgagttgaactagtaggacttgtactaggcttagctccttccatatgagcttggtaagcatatttaagatgtatttggattgagaaaaatacatcccagtattgttttgaatcacttcaacaccaagataaggtaatgaaggaaaccaatatctttgagagaaaattctctgtatttgggccactaacgaatatgtcatcagcataaacaagtaatatgattagtgttacacttgctccatgcacaaatagaaaaggattaaatcttaatgccttgaatcccttgcttagtaatgtagtctaaacttgtcattccaagctcacaaagcttgtttcaaaacataaactaccttatgcaatttgcccacatagtgaaggtgtgctgaattttcaaagctagagagttgcttcatgtatattgtttcaaaacaaatataaactgccttatgcaatttgatataacgatacaatttgattagaaattgttaatgtaattttggccaccacccaatatatatttaatcataagttttattatgaatataaatatgtttagctataacaagtgaaaattttaattaatagttttagttatggcatttatatattgacattgaatgatagtttttttatcacaaataattttgtttgatttcataaaattataaatatttattaaattattt

SEQ ID NO: 330632 - DNA, 850 bp, Cannabis indica
ttaatttgttattgattttttgtcatctgtattttattttttgttgttgctttgatgttattttcatattacttctatgtaattatcttattatttttatgttgtttctatcaaaaatcgtaaaaattttaaaaaattaacataaaaatataatttttttacggttacttatctaattattcctttaaatttaatatatgtgtagtagatatttggaaatctatatcttaaaaacattctgaaatatcaaacccaactcttcagtaatttaggatcgggccattccagtggatttcctaaatgggcctagtccaaagagagaagtacgaagttcccatttcctaggtctttttctttccttttcttttctagagcaaatttccgatgtctattttagttaatagcaaaatttttatttgatagtatgttgttagtttagtttttcaatatttgttttagttaatgtatttagtgagccattatatgtgaaaaaaaaagttaattttaagatgttttatgttttgaattgaggttgcctatatggtattgttgagaatactaaatgtatgttgtattgtatgactcttcttgtagttgttcaggtaattaatggttcggttcaaatgccatctcagtttggtttactcatttaagattgccaaatgcttctttcgaatttacaaaatatctttatttcttttgttaaacgatctgcaaataaggccgcccattgcattgcgagacggtcttgttttatgtcagattgtatttaggggtaagttgaaaaatacctcttttattaatcaattaattaaatttacctctaattttatatttatttgaaacatac

SEQ ID NO: 330633 - DNA, 803 bp, Cannabis indica
gggaaactgtataagttgtacctagtgaataaatacaaaaagctttatatagaaagaacgtacatggatcaatttctccgagggaaagtctaaataaggaaataaattcttcatgtcaagagaggaaatgatgcaaatagaaatggcagtggctcctaaaatgaatctaggggttctgatcatgaagtaggggacacctaattgggtaggacaaatgattgtcgaaggaggtgcagagggtatcgggtttcctaatttggtattatttaaggctaaagggagaagtaaatgggggtgattaatgaagtaagagaaatgcaggtgtgatgataatgctagagagaaataatcggatgggacaaaaagagaggagttaagactgaagtgaaggttacctgtattaaggaggagatctgcaatggatgcttcgcccagttcgtgaagagccaaatccaccattaatgatgaagagacagactccttcccaccgccacaaggattaaaagaccatggacggacgcaaacgccgaagaatggcgacgacgacagcaatcgacgacgaaacattgaagccctagagaagacttttttcagagagaaaacgagaactatccagaagtctcttaattcacaacatatacatgtaaatctcaaaactattcttctttaggatttttgttcttgcaaatgatgtttaatgaggtcaaacttctttatgtcgacatgtctctcgaagcccttccaagagtactgaataacttatttgaactttttgaagagtttgccaagaatacaagaaacaa

SEQ ID NO: 330634 - DNA, 837 bp, Cannabis indica
aaataaaaatatattttaaaaaatatacatattttttaataatttttaaaaatatcatttatttttatagtaagagctcaaaatttgttttgtatatgacccatttcaactcaggatcggtcctgcttaaacttattattcatctcgtcaatcaaacgaattagtattggccattttttttttcagcgtcaacatcctttatttctacccttactattttattcattctcttaggtattctctctaatagtaatggctgctaagaaagtaatttgaggtcctctttttttaagttagggtctagttttcttcctacaatccccaaaaataaattccacatgtatcctttttagccttgttgaaattcttcacaaaaatataataatatatataagctataagttacttatttttcaccacctctgtcatttatctccacctcaattaatgagatttcacattctattttcctacattattttaagctctcagctcttgctacttttgttgcagtaaaatttgcacaaaactgcaatttctcttttaatttatgttccttaccaaaattcaataacttcttaccatcagctgtaaaggaaagaaaataactcgaaatacacactacaaagcattacaaataactttttatttatgagttatcaattagttataaaataggtataggaaaaattattaaggttatgataagtataacataaaaagtaaatgtcactaaatatgagattctttgaccaatcaaactaaaaatatagtttttttttaaaaaaaaatcatataaaatattaaaaaatatatataaatttaagattcataaaa

SEQ ID NO: 330635 - DNA, 858 bp, Cannabis indica
acagaacgctatttttgttttaactaaaaattaaattttttaaaaacaaaaattttactttcattttgtgattaaaaaattaaaaaacaaaagtgttatcaaacggcacctttatatttttatattcaaagattttttttttacatttgtacagtattataaaaaaataatcaaaaaatacataaaaataacatctaaacaacataaaaaaaatagcatacaatcaacaaaaaattagaaagagtaaaatataacaaatagataccgtattttctataaataaaatcgtaaaaatcgtaaaaaaaatatttaaaattttgtacaactgtatttttgaatttttttatttttatatatttgtgaaataattcctaaagtaatttatgtatttacattggagacccacaccaccaataccatagatgatgaagaaattcattgagtgatttgatgggagagaacctaaaagaagactcaaaccttaaagcccaaataagaaattggaccatagatgatgtacatttttattgtaaatattaggaaattggacttagataaatggaacttatatgggccaaagccaaattatttctatttagtattaaatttataaatatcagttttaaaaatacataatagatattttagtataaactctcaattgggaatatacaaaaatggaagaggaaaaagttatttgtcctaaatcctaataatttgtgtgtagaaattggcaaaattatgagttaaataaccaatgttttactttatgggcccgtttggtacgcaggattggactggattggactgaaaacgattggactggactagacaagattggataatgctgaaagtaat

SEQ ID NO: 330636 - DNA, 513 bp, Cannabis indica
tttttattaatgaatataaaaaagatgcattccttaacttatctcgaccgaattggtgatttgcaattaacgatcatgtggggagtgtaagagcatttttatttttagcatgtagagaaattatctcaattttgtatacgatgatatacattatggttatagtagatattttacaaatttttagtaaatttgaaataatttaagatgcttaaaactcaggcccaactctaagtataggcagcctaggcctataattagggcttacttagtctagggcctaaaaaaatattcagttttaaaaaatacaatttttttttatttgatttttaaaatactatattttttttttcttaaaaataatctaaattattttttttttgtagcaattttgcggcgaaacccccctttatgtttttgattttttattacacttaacccccttatctttattttttggtggcaaaacccccttatgttttaatttttattacacttaacacccttatctttttt

SEQ ID NO: 330637 - DNA, 685 bp, Cannabis indica
taaatgaccactcttccagctcacccataaagtgaaatttcaaggtctccaaagatgtaaagaataagggctttgtttgtattgcaacagaagaagaagaagaatcaagagtagtactacaataaaactctgaatctattctcaccacaccacaatcctgaatcaaaagatctttgagagaaggcagctgtcccaacgacggcaagaagctgcaattagaacaacatgaaatctccaaccttactaaattagataagcagcgatggtctcccatccaatttgggaaactgttgccttcgtagtccgaaatcgtaagttccttcaggtttgaatgaggctggagggcactcagtacctctctttctatgtgcaacttgtcgagtttactagaataccattccaaagatagatgactaagaaacttgaaattctttaatgctgctgctgaaacttcctccaggctactcacattttcaagtcctttaatagaaagagtcccgtgtagatcttgaaactctttcagcaacttaatgctagcagaatctctattgtttcccacaacaaatgtattcagtgtttgcagattttgcagtttgcccaattgcaatggcatctctactaagtttatcttaggaacactaagatgtcgcaacttgattaaatttcctatatcatttggtagtct

SEQ ID NO: 330638 - DNA, 1462 bp, Cannabis indica
tttgtaattacaactttttagttcacttttgtttatttccttttttagggccataaatgtaaatttcatctatttttggtctataatagaaaaaatctctaaaataaacttaatcttacttaaagaaaataaaccttaatatatatgtagacaatctcaatgaagactaaaaagacagaagtcaagtcaattgtttatttctattttacaaatttgggttgttgtgtcttgagacgaaaagtagctttgtaaaatgcaagaccaaattcccaagtactacacactatttcttactattttacccctattggtggagtgatttagaaaccaaaaaatcatttaatattaagtaaaatatgcatcaaaatattagtgagtcctaattaagataaatatatagtttaaacaaaaactttcatgtatatctttactcttcaattataactaaaacattattattagatgttagtagtatttaatactaatactttttgaatggttaaattaaaatatataaagctcaatatattttgtattacatgttgtgttactactaatattatttaagatacatttagaattaactgtgtaattattaagttgtacaattacttgtaagtagtaatttaccatattttctaaaagttaatatattaataacatatttactaataattattgaaaattaataataaaatagtcattctcttacattttatttacttattttattaaagttagaaaatagagaacttgattaaagaatgtcaagagtaataatttttattttattttttaatattaaatatataatgatatataatgataattttatcctttaaaatatgttttacaaaataactattatatattatagtataactcaaaaggctatttagtcaatttaagcattccgattacgtttcttgataaattattcttattttatttctaaattagtaaataacatattacaaatattttttcgattattttttatttattctgtcacatttctctattaatttattctgattccaaatactatatagtaaacatactataaattatatgagatataatatttaattacatcaatagtgatataatactaggagagtactaattgtgccttctagcatttttctttagaggaatttgcggcgaaacctccttatacttaacccacttatttttttatttggtggtaaaacccccttaagtttatttttctttgtaaatttaaggtgtcaattagatattaccgttaaatactaactggattactactctatcgactttgagattttactgttacatatacacaggtgtacacagtggtcattcagttgatatttaacggtaatatttaattagcatgtcaaaattgcaaagaaaaataaacttaagagaattttgctactaaaaaaataagaaagttaaatatataggtggcgtttgg

SEQ ID NO: 330639 - DNA, 1472 bp, Cannabis indica
tatgcctctactttgagtcaatctaggtctaaatttactcatagataagctccttgcatttttcttgattttctacatggagacctaaaagaagatgtttgcatggctttgcctcaaggatataagccaaagggggagctaccacccaatcctgtttgcaagttgcaaaagtcattatatggcttaaagtaagcttctaggcaatggtttgccaagttttctagtgctttggtggatgagggatttcaccattcagcaaccgatcactctcttttcatcaaacattttaatggaaatttcatattcctattagtgtatgttgatgatataattcttgcaagcaacaatcttgaggaacttcaagccttgaaaattaggctaaatgacaaatttcagctcaaggacttgggaaatctaaagtattttcttggcttggaagttgctcgatctgagtaaggagtctttgtctctcaaaggcattatgccttacagttgcttgaggatttggggcacttaggctgcaagcccatgaacacacctatggaacctaacctcaagcttggataggatgaaaaagagaaacttgcagacccgactctctttagaagaatagttggaaaattgcagtatttgacaatcactaggcctaacatttcattctcagttaaaaaactgagtcaatttcttgcaacacctcaggtaacacaccttcatgcagctgaaagggtgctgcaatatatcaaaagcagtcctggtcaagggttgttttttgcagccaaaactgaggtaaagttgcatgcctataccgattttgattgggcatcttgtccagacacaagtaggtctaccactggcttgtgtattctcattggaacatcaataatttcatggaaaagcaagaaacaacatactatttctagatcttcttcaaaagccgagtatagggcaatggctaatacaacttgtgagattgtttggcttttgtctattttaaaagagcttaaagttgaacatgaagggcctgcacttttgtattgtgacaacaaatctacacaacacatagctgcaaatcctatgtttcatgagaggacaaaacacattgagattgattgccatttagtaatggaaaaagtctaagaagggattgtgaaaacagtacatgtttcatctaaagaccagctcgccgatattttaaccaaacctttgtttccttctcagttcaagggattcaaagacaagatgggacttagagatatctatggtccatcttgagggggagtatcaagaagtttttagtagttagtttgtaatgatcgcgttagtaatttgggttagtaaaggcaattagcactaatttctgttattttataattatttatgaatttatttaattgtgtatcccaatatttagaaataaatattagagttataatttctcaattctgaagattttattaaactctaggggtatt

SEQ ID NO: 330640 - DNA, 551 bp, Cannabis indica
gctttagggttaattaattaggaagctttattaataattaatctcttttgtacgtataattaattactaaagtgtattatatataatatatcatataagtctgtcttctcaatgataggaaaggttatataactttcaactccaattaatattcaaacatgttagctatagctaattaattaaggttataaattatatatttatattgaaaaaataataatattttgtgaaaatataaattcaaattagataataaaatagagttcaatttcgaatgttcgacaaatttttaaggacatatgttaacctatttttcattttatcttttggaaaacttacatttttgcaaggtgtttatagggaaaaaaaaaatcatcattcatggtaaaaaaaataattacaaaaatacaaatacaaatttgtaaaagattaagtaaaaaaaaaaattagcctatattatttacaatcattacaaaaaaatcttttagtcacaataaaatttgtgacaaaaagtaaaaaaattgtaactaattataaatcggcattcctat

SEQ ID NO: 330641 - DNA, 927 bp, Cannabis indica
tttacttttttctaagcttaagaatctacaagatgtctgagttttctatttttcactctcttggtctcgtgctaaatcaatcttcaaaatgttttgcactacaatataatcgtttaagttgtggaatcaaaggcttgtaccacattactttttgggggataagtttcctattttccttactcttgttcatttcatggcaggataaacaataagttgggtaattttccatatctacatattctttacgttacaaaatgcaatcattcagacatgcatggatcttttcgtacttcaatcctatggaataaagtttttttttgtacttcatatgtagattccaggaagcaattgtcaaatggaaagatatctttaaaagtagctaaaatttgagtaaaacatttatcgttcacttcattttctacactaatgttgtaaaattttaccattgttgttaatcttagtttttttacaaccatcgaacaagagtttatctgcatgacttaaaaaattatcgaatttttcaagatcattaagaaattccttctgtgcttcatcaagcaagtccattgaatgatcatcgaaatcattaccctcaatatcatctaccctccgcttccctaatggatatagatcatcagctaaatattcaccatgccaataccaagcaatataacttctattgaaaccttttaaatatacatgatccttaattatcgtaattgttataccaaaaatttggatatgtaccagaagcttacacgtgtcttacagaaggaatatgaatcaactcaagaaatataataaatgacaatgtatcattaaatacaagtttaatgaaactcgttccaattaaatacaaagttttgatagaaatgttcaaactcgctgactcttaagtcttatgtgtagacaagaataataactatt

SEQ ID NO: 330642 - DNA, 694 bp, Cannabis indica
atagcaatattgacacgtaggagggtgctaggcaccagtggtgccctttagtattactcatatatagatagattgattgatattggtgtttagttttgttgattgttatggatgagataattaatgattgacttttcgtttatccttaaaattaaaatatgtgattaagatattaccaattcatcagcaccaaattgaatattagttattcctatttgataagtctggctgaaatgatagcatgacgatggcatatataatatatgttttatttatgaccatgtgtaatcaatgattaggtcttataattaatttatctattaaatcacgtagtttttaacgtttttggcattgaaattagataattaaacaagtggtgtctttagtttccagaagaaaaaaaaaaacaaaataaagtggcgtctttagtcactaaattaattaattataaatttataatgagataatcctaaaggtctttggtaagccacttgggattggagccaaatcatctgtcccaattttttcctgtctccctatcccaatccaattaaaatgctccacctcaattaatttaaaatgtatatcccctttttcaatagagttaatatatttaaagactattttattttactattaatttcttctcatggaattttttttttttggttaaatgttcttttcatactttttt

SEQ ID NO: 330643 - DNA, 1036 bp, Cannabis indica
atgagtacttcgatcagtgtctggggcatgcgcctgtgatgcatgagactcatgtcatgacaaatgaattgaatctcttcctactaatgttgttaagtcttcattacgctccaaacttacatgcatagagctggcagctaaaagaccgcttaggggagctggcaagcatagttcatgagtgcttcgaccagtgtatgtggcatgcgtctgagataaagaaaacggattaagagctctagaaaaacttgcaaacccggttgcttgcataagatatatacatatgtaagtacttatattatactacacatatacttgaaatatatataccggaaagacttccatacctttaaaggcgcagttgtgggagctaattcatgtgtgatagtactttgaattgtgctgctactaaaagaagggacaagtgggtatcttgtagtgaccttgaaattagaaaaaaaaaggggatatgtaatgaaaaataatataaatgtaaagatatatatatatggtgaaaactacgaacatattaccataagcaaaaatatatatatacatactaaccaagttcgtggtagcatcgctgtcaccattagttcctgaacaatggaagggtcgtggttcagagtttggtcgaaccgctacatcattcccataagagttaccacccaaagcgtcagaagatttacccactaaagctaccattacatcatcttctatggacccgatattaagattggcaggagtatgacgctcatgaactaaacagagttcggagggtgcttcagagggtgctaaaggaggcgacttttccgaaggaacatacatccctgttttcaacaacaaagtcatactaccttgtataaactagcaaagatttagcattattaagagaagaggagcgagtgaggagatacctgacgacggacacacgtctttctcccagtcacaagcctcacctcgactaattaatccaatacaatgatgccgcatccatatgttagcaaatttaacagaaaccccaccttctctttcttta

SEQ ID NO: 330644 - DNA, 898 bp, Cannabis indica
tttttgtgaaactttgaaaacgacgtgggtgcattaaataatttaaattactaagagttacttgtactcccgatcacagccgttacttctcacacgtggcgagatctaattatgagttcatgagaatatatggtttgactcttgcttaagactttcaacgtcacaatatgagtttgatttgactaataataattatagttatataacattattaatttattatgcccctagctgtgaatggagggttcagatttatttgtggggtcaaaaatgtagggttggagatttatatttttgggtgggctcacaatgggccatgactaataaataagatgaaatacattttatacctattttattttatttgttttaaattttacttttattttcatatttttttaaatatactatttttataaatgatgtccctattagatcccttaggttatgtaaattatatgatatacttaagtagagagtgagggtatattggcaatccactcaaaaaatgagtatattttaataaaaaaataatatgagggtatttttgattgatggatacaaaaaagaagtatttttcaacttatcccaagggataattacataaaatgatattttttaatagagaaaaaattaattttttacagtattttataaaaataaaatttgttgactatagatttagttagcttacaacaaagtcttatttgtaaactataaaaggaagtaaataaatagacacaacaatttataaaggttcggccctcttgattatcaggtaattattgggttgtttatcctaaataaaactcatttcaatataatcaaatttactaattaataaaatatcagaaattatttatagttgcatggttcacatgatttttttattgattat

SEQ ID NO: 330645 - DNA, 595 bp, Cannabis indica
cactgctactttccttctattctttttggctacattcttcgaacagctccccactacaaatggtgtggctctttccaaaatccgggcttcttgagcataggagacaggaacgttgtagagttcttgatcctgaaggtctttggatgaatctgtggtcaattgagaatttgacatatttaaagactttgcaaaaatataagaatttataatggaatcatagtgaaaaatactacacatttttatcatattataagacataattgactcaaaatatatgtagtaatttgaaatgtcaaatacaaacctcacatattgggacaaagtttttttaaaaaaaagggtcattaccaatttacatttcagtttatattagagattagagatgatgctttattgttatttttttatttttacaaatttattaagattttatttgacacgttattacaatctctttagttgtgaaaaatacaagagaaaaaaaaacggtgtatatatataaaatagagtaatttgcggtataaatacctaagttttataccgagtagcagataaatacctaagttgtatttttggcggtaaaaataccttccgt

SEQ ID NO: 330646 - DNA, 999 bp, Cannabis indica
gaattctgatcttggtctgggtcctcgtccttgttcaggtttgggatcgggtctaggtcccaaattcatacatcgactacagggtgggtccaagccatgtgtcttgggtcatgggtccaaatctagatccctgtctagttctggttcaagtcctaggtcctggtttaggtcccatgttacggtttgggtttggagtccaaacccggatcaagacgaggattgagactcagactcggaccgagacttgaactcagatagaactgggaccgaaacctagaccgggatcaatactgggacccaggaaccaatttaggaccgtaatataggtctgggtcctacgtcccagtccgagttccagccttggtcagagtgcgggtcttggtacgtgttgggttcgggtcccgggtcccaacctagtcatgctttgagtcctggtctagtaccagagcgtgagtctcagtccttgctctcggtcacgacatgggtatcggtccgagtcctgatctagatttgggtccaatcccggtgaaggtctgtgtcacactcttggtccaggtcaggttgcaatgcttgtccgcatctaggacgcagtctcgatctgggtctgggtcccagtcccgattcgggtctgggtgacaatcctaatagtggttcgagtctctggttcggattcaggtctgagtctgagtttgggtctgagtgtgaattcgggttctggtttgggtcctgagacaggggttctgggttttagctcccaagttcgggtttagattcgagtctagattaaaaactaggactcaaaccagaaccagactaggacgcgtgaccgagatctgggtcctaggtctcggtctaggtccaagtttaggtttgagtcccagttggaatgcgggtccgagtacgtgttgtggtctaggtcctggtctggttcctgggtctgagtctcgggtccccgatcccagtctgggtctaggtctgggtcctagtctatgttcgagt

SEQ ID NO: 330647 - DNA, 861 bp, Cannabis indica
gcgtgactaagaggacagcataatacaaataattttataagtatttaaattaaagtttgaatggaaataccagaaagcttaaaaagaaattcctagatttatggccaactttggtcgctccaatcgagaaacgcggtgagagaaatgagattttgttaagactaaactaagtaactaggatatagagaaagagagaagagagagtttagcctagattctctacacctcacacactcttctcctagtactcttcggtccataaagaaaaaacaaacaaaggagaggagatacaatacaatacagtacacttccctacctaagaaataagaatcttcctttttctttctttttagttcctttaatctcaactcatccttcagtcttcgccgacatgtcccactacagaaggaaataaaaaatttcaaacgacaaataaggaactttacagacttgctttctttgcaggaaggttttcctctccaatcattttggtactaataatattcattattcacttttatttttcttaaaactcccaagaaagtgcagaggagatagtgtgaaagagaggaagaaatgggtgagtataggagtatttgttctttactattcttggccctgcttttgagctccacccatggagaaagcccgtacaggttctatgactggaatgtcacctatggtgatatctatcctcttggagtaaaacaaagggtaatcagttcttcatctttatatataatgtgtgtaatatatattggttttattgttgagataatgaacgattcctgatagtttgaatgttttaattgaaattcagggcatcttgataaatgggcaatttccagggcctcagattga

SEQ ID NO: 330648 - DNA, 1247 bp, Cannabis indica
taaattatatattttatatatatatatacatattctttttaattaaattaacttaaatggtagctaaattggattggatggatccaatccaatctaataaaaaaccaatcaacgcatctaatggttataaccgatccaatccaatacatctattggatcagatcggatcggatgactcaattcgattggattggatcggatgataaaattcaagattcctctattgcactccctaggatgcctctgagtggccctaggctctgtttcaggctcaacctgattaacttctagctcttcctcttgaacggccataggctcctctgcctagccggcctctggctgttcaacttgcttaacttggcaaacccttcctcttgccatgagctcgacaatgtgaggatcagtgggaggtgccttacaatacatttgcttagtcctcaccatgtttggatgtttctcggaaaactgggcaacagtcataataaccgttactataggaagatctttggacaaaggatgcctatccaacatgaaatgtgtcaggcacaccctgatgaacaatataagtccaagacttgggaaggaactatctccaccgctggttcagttgccagaagaatctttcgtagatttcaccacctatttgttcataatagtggtgatgttgaacctcaggttctagagaaccattgctgacttcaaagtcactcaaagagctacccaatgagctctaagaagaagaaccagctgaacgatagtgttcatacgaaagactaataaatccttattgtttcggatgtcacctccccaatagtcacgtgggttcatctgtgcagaaagacaaagggaggtgaaaaaccagaaatcataaataagaagaggatgaaaacatgattttaatggccaagacttgaacaaactaactggacagcccctggatgtaaagccacgaattggccagcttatggttggttcaccaagaaccggctagtttacggttggttcatcaagaacccggccaggatagatcaaacccaagaagaatcgatagaaatcctgtaaaggatctaagtaccgggtaggagttttggacaggattaagcaccaagcagagtcataaacaccaaaagcctatttttttaaaattcgaagttatgttcttcgtgtttttcgaaccctaaagtttaaaatctcaaaacaaagcgcaagattcaatctttttcatcaaagagtcatacattatgcat

SEQ ID NO: 330649 - DNA, 532 bp, Cannabis indica
tccatgcaaaaggttaaaatctcaatccttaagtgctcatgaaaaatttagggttcaaacacttgtataaatcataagacttttctagtcgtatagcaataatagtgactcgtgaattaagactctttaataccagtaaaaactctagtttcattcttcattgattattatttttttaactttattatattttattagtttctaaaaatctcgataaataatactcattcctataatgtgtctctttctatatgagccaaaaaaacaaagaagatcggaatgacaatactactagaaaaaaaaaattagccgtcaaattaaaaaaatattacttttattataatagaagcataaaatacaatttttttaaataaattatagaattttattaatagtaattaattaaattaatatcttgcaatttaatcgagacatctctcccattataaacacgattaggattaaaattagaaaaacgaaccaaataatcagtcgcctaattctcatcgtttgacaaaaaaaaattaaaata

SEQ ID NO: 330650 - DNA, 557 bp, Cannabis indica
aaaatataaaaaaaaaatgagagaattaaggagagaatatatagacctatttgaatcagttttagagtgacatgttagtgtctcatttttctcctttatatatatactagtaaacaactcgcgcttcgccacgaatgtttaaaaaattttaaattatatatatgaaataaattaggtattttatttgatgataactaagtaataaaattgtatcaaattttaagtttatcaattttttatataaacttctttgaaaaataagagaagttagagataaaatcaggccaaccgacctataacaatttagaatctgagtcttatttgtatcatgtttaagttaataacggagtcattgctgatataaatgtataaaattacagttttataaatattgtatacttatgtcgctaaaaagtacagttttacaaccatttggtacttatgctggcaaacattagaattatgaattgaaattcattgatcgaaatgttaactatttctcattctagtctctccactgaagttgtaactaaaaataaaattttatagtcatttga

SEQ ID NO: 330651 - DNA, 614 bp, Cannabis indica
aaaaaaaaaaaaaatgaaagcactattaaaaaaattaaaaataagttatttctttttcatttttcctaattatcaagaaatgacaatgtttatttattagacgttgtaattaattgggtaataattatactctcacaagataattatataaaaaagtaatattgtataataattaaggacttttcttaagagaattacaggtgtctataacacatacaccctaaacataataaatcaataaataattaataaataacaaacacaaactaatacccaaataagttgatctgatttttatgggatgtagtttcaatttcgggccaaaaaataataattgaattaagggtaaatagtggtataagtactcaaagttttaagtttgtaagtggcataaactattaaactcaatgtttatttttagcgacataagtagtactaatgtttgtaaaactgtaatttttctctagttttgtcagtacagactccgttttgaatttattaaaagaacatttagaagtaactgatactacatgtttatgtctagacccaatgatcaagaatctggactttatatgtggtctgtttaagaaaataacagagtttgtattgacgaa

SEQ ID NO: 330652 - DNA, 993 bp, Cannabis indica
tttttcaaagacacattatttttggattgggaccgacagaccgacatacaacaagcccacaaaaaaccctaacaacaaacaaaaacaaaaacggcaacaaccatttcttgcacagaattagaagcaggacctgaaaatcgattcaatctgataataaaacataagaagagtgagatactgaccttaatccaattcctaaaccctaaaaatagagaaactttgtgacagtatcaaggtcaaggagaagatccgaaatccagggccataaagaagatttctcagtcaaaaaaccccccaaaataaattccaaatcacaaaaacaacccataaaaacctaaccctaaataataatgtttattaattattattacaccaaacaaaaaatatatatatatataataaacaataaacatatattattatatattaatctgttaccagattttcatggccatgaccgaaagaccttccgagtaaaaccacaggaaaccaggaaccgactcgatctcaaaccacgcttctggcgtttagagagagaaggagtgagtgagaagcttagagagagaaagtggttggtttttttttagagagagaagctgcgctttttttggttgcagtagagagagaaagtagagagagaaagaagagagaaatgaaagagtggagtgagtaaagtcgtttaagacgacttttaaaagttaaaacgcggccatcaattactgtcgttttctattgaaacggcgccgtttcgatttttgatgtcgtttgctagtggtgggaatatttgacgacgctttattttttttgtttttttattttaaaattacaaaaaagtaataattgtttattctcagtttctcaagtcagaaaaatttttttaaaaaaattattatttggtataattttgaaattaagggaatgattttttttctaaaaataatgaaatacttttatttagggtgtttcttgtagtgatggacttttttctttttt

SEQ ID NO: 330653 - DNA, 828 bp, Cannabis indica
aaagtcacctttctttttagtcataccataatttatttttaactaaatttaacttttagtcacaataaaaaattacttgtggctaaaatatagtaataagatataagttatcactaatttagctttagtcacagtatatttagtcacaacaaagaattgtaatttttgtgactaatatttttagtcacggaccttttaatcgcaacaactttttatttctaatcacaaattttattataactaaaagtaaaaaaatttgtagtgaaaatatatatacatgtaacatgcataatatatataatatattgtccgttttctatctaaacttctcaccgatttatttttaagcactttctcaaaaaaaaattatatatgtaccaattgtaaaactttgattgcaccttactaaaattatagttgttgtttagtcaataatgtacataaaaacctattccttacattattataatcaactactataatcaccaaattaaaattaatttatttcttagaataaaattaattaaattaaataaaataaaaatagtttcttaggatttgtttttaattgagattttttctattataaacttaaaatgtaataaatttacatttatgaccctaaaaaaggaaataaacaaaaatagaaactataaagttgttaattacaaaaatgccggccaagcaaaacggaacaccatcttcttcgtgacccagccgcacccttcttcgtgacccagcgatccaaccccaacaacccaatctcaaccatctttcttccaaaaccagcaaaatcaaaatctaaaaaaatgtagaactcctaggaaa

SEQ ID NO: 330654 - DNA, 1468 bp, Cannabis indica
gcaaagacattgctagagtctcccagagacagaaaggggatgactccgactctaattgtgaggaccgagaactatgcacctgacacatattggaagcggaactccccaataaaattacgatgcccgaaatggcgacttacacgggagattcagaccctattgaccatctgtcccaatttaacagggtgatgaccgtcatgagggtcagcaatgacacaaaatgtttatgctttcaactaaagttgggtggctctactgaggaatgattcaaaaagctggagccaggatcagtcgattgctggaacaagttacaagtcagttttcggagacagtttgtcgcggcaaggaagatcaacctcgaggtgagcgccctgactaatataaaacaactaccctcgaaaaccctaaagaacttcataaaaagattcaaagaggatgcttcaaaaaccaagaaggtgggtaacagacaacagctggcccttcttcaagccagaatccgaacggggacccctttctggaacgaactgcagcaagagggagcagctagcctccaggacttttagaggagggtccaaaaatacatcaactttgaagaagcccaaataatagcttacgaaggatactacttgattggggtatcgggatatgtgcctggagctcaacttctgagagctccatctccggccacttctcaaacaagtaggatacaattctctactacctcaggaaacaatcaaagcctcactttggctcgcgcattatcacactttcgggcacccatgagcaatccctcagggttgagtatctaaactccatctcaatccacactagccaccagcatggcaagagcttcgcagagctcccagagtaagagatcctcaaagggaactacccgacctgtttacaagcgacaacgaaaggggtataccccccagtacacccaatacacagagcttacaaaataccaaagggcgtgtatacttcgccactcggcaaaatacacatcatcgaaagcctcccccttgtacagggatatctcccagagggatcccaataaaagatgcgagtaccaaaacgacattggccacaccaccaacgagtgcaaaaacctaaaagatgagattgagaacctaatccgattagctcacttatatgaatggatcaaaagcaggttaccgcacttaaacccgattctagcaggaggccattgccttagggaagaacggggggtatgcccaaaaggtagtctcctagaggggcgcttccctaataggcgttcggattaccaccctagtcgaatggaagagcgaccatgatctctggtgggcctcatgttggagggaccaccaggaacgagttgaagcgttatgccgaagccataaaacatgatgaagtatgggaggtcactcaactcccaacgcaaaggcccatactcatggaccaacctattgttggtttttgtgcccta

SEQ ID NO: 330655 - DNA, 909 bp, Cannabis indica
tatatatatatttagaatattttctttacttttttaatgctataaaaaatttatgggaaaaatccaaaattcaaaactgaatagatcagcttttatattaatgtggaaatgaaacaaagctataaagtagtttctattcctagtcaacaatatttttttctggaaaaaataaataatgataaatgaaaaaaattaagattgagacatttagtaaaagcttaaaagttattttttcttttataaaaaagaaaagaaactcacttgagttatgtgatgaaacacagtttgaagcaccaccaacaatattggattgcttccattgaaaattattgtctttgagattgagtagcttcttctcaggaaaacagagaaccccatttttagaaaagtttagagaaattagtagaaacaaaagcaaagaaaagaaccccatttccattgttgattgggaaaaaaatggtatagttagaaagataggaagaagaaatggtatttatggaagaagaaaaggagagaattaatgaagatgagtctgtgagagagagagagagagaggagttgagttgagtgagtttggagattcctgggaattggaatttggcatgaaacaaaagatgaaggcctggccttttaggaccccacctaatgcatgagaaattattggggtttcacgtgcatatattatatatagtcttatgaaactaattaaagatacaatacaatacaagtggttttgtttcttgtttttgttaagctacattgtacttacaataattacgcccggcctgggcataggtgggttaggcttgtgcctagggcccacccagttcaggggctcaaatttttttttctcttttaaaattatacattttttttaccgattttgaaaaatatcacattttttctaac

SEQ ID NO: 330656 - DNA, 1066 bp, Cannabis indica
taccctaaaaatgagaaaaatgtgatcttttcaggtatatagttttaggtatgaaaaatagaagatttagaaacaaaaatgagctaaaatggtgaaaaaatggtgaaatgggggtggtttttcgtggtggttggcggagagggtttggggttctctggtttgggggtttctgggttggctggtcgaatgaggaagatgatgggctgggctagggttataaaccctttaggcgtcggtttttttagaaataaccgacgccataggggggacaccctatggcgtcggttatttccaaaaaaccgacgccataggtggtgtcaaaatcccttccaaaaaattccaaccctatgacgtcggttctttaatatttgctgaaaaaagtgcctctaaaagcttggtttgtagtagtgttcagattgctgatgtagtttgacatctcaataaatgtgctgtatataatagagattatatatgacaggactgatatgtaactattctgtcattatcaaacttgttgtttgtcataaaaactaaatttatatcactaatgatgattaattagtagatcaacctaaatcatgagacttcatgaactcctattcatgctgttatatactttgattcgctcgttaaaatttcttgaatacgagatttacaactttcatttttggagtctaataatgtggatggttgtgaacatgatttacaatataaaattttaactttcccaacagatcgaatattgggtcccttttagtgttatttctagaattaaaaagttgtgcacaaatttaaatgaaatttttacattaaaaatacaaaatattaattttattaccaaaaaaccactacacggttacccaaacatttatacccttttcttttaattttttacatttgtaccacatgcacacacaataaatgctttcttgattgacacgtgagattgatgtaccacatcaatctttctatatatcatttctctctttttttttctcttcttttttctttttatttttctatttcttttcagttttttttttaaatattaacctccatagctaaa

SEQ ID NO: 330657 - DNA, 546 bp, Cannabis indica
ttttgtttaataggtatattttttaaaaatatgaattggttagaaaaaaattgaaaaaacttagtacaattaaagatttaaattttatataaaataaaaataaagtgtgtttagaaattttgggggtgtaactaaaatttcctttattaattgatgaaatacaataatgtctgttaaattctctcttcaaaaattaggaaagttatactaactgtattttatatattgagaaagatatatatatcgatcgacaaaaaaaataaaatatacataaacatagaattatatttaatgaatatcataattaccaaatttcctttatttctttcagcaagaaagagaaaaaaaaacaagtaataaataagtttctaacatggaataatcatcgtccaaaattaaatataataccaaaattttaatcaatacttttatttctattttggttgtttatatatatgggtccggttttaatagaaactgaaatatatacccactgatagaactctcatttttaatctttagatcttaatctaatggttgataatt

SEQ ID NO: 330658 - DNA, 812 bp, Cannabis indica
gagaggataaaataaaattttaacctcctaattatatgtatctatcaaaataaaagatttatattataaaatctcaaatacaccatcgatcataagatacgataaaattttttatttttagttacaacaaaatttatgtttaaaataaaaaaattgtgatgaaacataaatcactatttcatgctatcactaaagtcactgactaaaagtatattagtccaaaaatcataatttattgttattaaatgtattcttagccacaacacttgttgtgaataaaattaaattattaataatttgtatctaaatatactatatttttagtgagaagtaatttttttattagttttgttgttactaaaagtgatatttagtcaaaaaaaaaaaaattatattaccactgaaaaattatcactaaagtagatttttttgtagacgtgagaaattaaaagattaaaatcatttaatttaatataattttattaggctgatttaagataccacacacattgtttaatttctcaccatttatttatccaatgaattaaagttctagcctttgaagaagcttgagtgatgtaacacaaaattttgttttcttccttactataatttatttagcactccaaaaattagctcactactttaaaattgatctttttcgttggtttaagactggcttaaaaattattttcgtcaatttataaaaccattggctatgtgacctatcaaaattgactcctttagcgacgatttataactaatagaaaaataactttaagtgattattataaatagatagtatgtgatgg

SEQ ID NO: 330659 - DNA, 1026 bp, Cannabis indica
aaaattgcaaagtgatgggcccacatccaaggccgaccactaatgctctattttagaatttattttatcaattttttaatgccaaataattcaaacctaaacctagttggattcctataaatagatagtaatggtctcaaattaaaaaatgatgaaaacctaaatcttttgagccttctatctctctctcatttgaattcttctctctctctttctctcttcaattttcgaaccctgtagtgattgagtgcatgcccacacataacaagtaagttctcaatcatagtgtgtaagactttgaagaatccattcatgtgaaggagaatcgagctcaaatcttagtgatactctgctagataaaggataaaagggttagagatctgagcgagatcctggtaaataatccccaacacccaggcctttacaaattcatgataatcttatttggcactataatatgagtgtttattatactgtgaaaattggttattggtatgtgttacccatgtttctggatggaggacatgtataatttcaagatggtttcaactcaattgctccaggctcaattaagatagtggactagatccattagtgaagtcaagccttccaaatgctggacaaatgactcgcctacataaggtgcacctctgatacagtgtgtatccgaatggcattgaataggtctttcgaataagtaattagtgggcctcctgatatctaggtccatatcatatcaatttattatcaaatcccacaatattagagctttatgtaacgccctagtccataggaacgccacgtgtgtgatttaataaactagtttaatactaatatactatttaattattaaaaactacgatgatgataaaaacttaactaaaaaaaaataccaaaatggatattataacggcagtaaaaaaatattctactaaaatgagtactccactatttaatatcgtttagccaagcttgaaggaaataattgtttcacttctattcaattatagaagctatagattttgt

SEQ ID NO: 330660 - DNA, 606 bp, Cannabis indica
tttcaaatttagtagttaatcgttttgattggattttgggcttgggctttttggtcaaacacgccataatcttttgaaaaatccaaactaaaaacccaccgtacattgggcccttaaacaacagtaatgggcctagaaaacttagaagactttgattaaaaaaaggaaaagtattacttatttttaatatgacaattaagcaattaagcttcaaattttacaaccatttccaaaaaaaagaaagcttcacatttgaaaaactaattatgtaaaaccatacattcaatgtatagtgaaatttccacaataataaataaataaaaaaaaaaatcaatgttattttcacttttaagagaaattaagcacaatgaatattttttttcttcacaataataataaattgagatggtacccatcgagttaaatagtggttcttccttattttaacatctttattgtaaaatatcatattttgaaaataaatataaaaattccaaattttagttaaaaaaaaacaagagaaaaagataattaacaactaaaaataaaattaagaaaactataatcaaatcaaatgaatatctccatataaaataaataaataaa

SEQ ID NO: 330661 - DNA, 1359 bp, Cannabis indica
aataattgaaatatatgtataaaagatagagtacctatatgtgtatgatgagatagagtgatcgtgctgataacgtgttataaatttagacagatatgagtaataatatttgtattcttttatgctctttcttcatttcacctttcttcatcaaacttatacatatatataagagtatacatgcatgtatatgcatataattattatactttactgctacaagttgaatactattctatagtattgtaggtttatcatgtagagtatactacatatctatccgtagtcattcataacatatattaatttgtttcatttatttttaaatattttaataatttaatggtttttttaaaattattttctattttatattattgtaataattaaaattgtatggaccaataaaaatatgtctcgtttacacttatgtacacattagtagtacaagttgacatttaagagtagtattctaatagaatagtgaataggaaaagaggacttatgtttggagagttttgtctaaatatgccaaacttatagggttggctcttggccgaccctccaattcttttaaaaaaaaagtatttatattgcgaaaatttctcgtttccctttcttttattatgatatttaagtagtgcaccataagctagataaggtaggcaaataaacttatctaacataaatcatacatcatcgaatcgggtgtaaatgtaataacttattttttaacatatctactacccaaatatcaaattatgcgccatacaagtgttgggctagcctgggttggggctctaccatcaatggtgcggcccgttgtaatgtgagtccataagcttcatccatgttcagtttctcagtgactagcccatttggtaacttccagttaaaggcctggactagggtcgcagtgagtagctggaccatgcgcaagcccaaactcatcccagcacatattctacgtccagcaccaaatggtatgacttcaaaattattacctttaatgtctacatgacatttttcaccattgggtaaaaatctttcgggcctaaactccaatgggttagtccattgttctgggtcgcgagctattgcccacacattaactagaagggttgatcccttgccaatgtggtaaccgtttatttcgcaatcctcgcttgccatccgaggaagggacagtggagtcgatgggtgtagacgaaatgtctctttcacaacagcttgaagatatgttagttgggctaggtccatatcacctacgagcctatctcggcccaccacacgatcaagctcttcttggacttgggccatgatgttggggtgtctgatgagttccgctatggcccattc

SEQ ID NO: 330662 - DNA, 1211 bp, Cannabis indica
ggagttgtagtaataggtatgacgtctacttgttctgattaactgatatatatcttatcgcgtttcataaaatgtaaaagtcttgcatagatatagagatgacaattatgtcatactgtgtgataatatagagatgacaattttgtcaggtttttgtttttattttgttattactttaataaaaataaagtcattgtcataatcatactttgtgaaaactaaaataaaaaaaaattaaaaactttaaaataaaaactaaatattacgtgccgaggcacgtaactactaactagtgtatatatataaagaagtaaaaaaaaagataccttgcattattatataatattcccttttctttaaaaataaaaataaaaatgaaataattaattaaccttgattatgttctggttacgtttaagtaaaatctaataaagtaaaaagacatttgatgaaggggagactatattaaaaataaaattatattacattattaaacacttttattttttgtccttacaaaaataacaacaaccaatacatgaactgatcaacaataacaggtatttcactgtgccaattgatcagatataaatgaagtataatctcatggaaaataaataaataaaaaaataataaaaaaaatgccattgaagtaattaataagttattattggttgagaatgtaggctatatatatcgactgttgtggaagatgttgagaatggcttcaacagactgttcatacatacaaaaacaaccagatttgtgcttaggatcactcttaataataataaattcctatataaaattttaaaaaattaacattattaatttttacatgcaaaaaagtctccaagatttgtaataaaaatgtcattttatatatgaaaatgaaaaaaaaaaaacaatatatgtatagttacatattttccgaaatagaaattatacaataacttccaaatacaatataaatattatggtacttaattttatagtaagcaattatacattataaaaaatcttacttttgttgtcactaaaagtaaaaaaattgtcctcactacaaaaaattgctacctttagtgataactttttagtcaccatataattttttttgtgactaaatatgacttttagtcacaacaaaatgttacttgtgactaaaatatagtcttttagatacaagttgtcactaatttagttttagtcac

SEQ ID NO: 330663 - DNA, 848 bp, Cannabis indica
accagaactgtatatggtggaagactcagttatagtccttggtgctctctcaaccacggaagcagaattcatggcaactacgaaagcttttaaggaagcttatggcttcgcagagtactttatgtgttgaaacaaatcaaagtgggagtgactgtgtatttggatagccaatcatccatttacctttgtaagaatccaatttatcatgacaacatatatataagactctactggattagtgagaagataaaagaaggactagttgattttgaaaaggtgagaacaaaagataattggaactaaggtcttgatagtaaacaagttcaaacattgcttgaacttgatcaatctcaaaagttagtatactgagattcctagaacaccaaccatatggctacattctttcttcatcattgtctcacttttaatttgaagtaactagatggaatttgtggtatagttcctccaaatgaaaaggtctctatttgttatctattattcatggaaagtcgttcacttgcagaagccagccctggaaggcttccttgtccttccgggaagggtctcttcagtgagtgccttttggtctgtgatctcggaagctcataaatgttctcagacgcactaagacttacactgacgtggagatctagctcaaaggagtgttagctaagttagttcctgcctaactaacctaacaacttcatttcttgcagctaccgattttaagatcttgatcctaagcctataaataccacattgacttgtcatttcaatgatgcttcaaattgagattgagagttaaaagagaaaatattgagaggtagagagagagaggtacaaagaaa

SEQ ID NO: 330664 - DNA, 1289 bp, Cannabis indica
ctttaggcctcgcccacccgagcaatgtggaaaaaggggatacatcgaactcagacaatcgagaggctaaccttgacaaacaggacgacagtttcaatgaagaccgggatgttaggaggaggacgacgatggagaatactcaaagatgaatactacaaagatggctaccactatgagcaggaccctgaagtgattcgagtgtcgaaagagttattggagactcagcaaaggctaacccatcaagagaagttttctcaaaaaatggaaagaatgatggctcgccttcgaagtaagttccaagacctagatgagggagattaagacaaagaaccctcagtggaatgtgttggaggaaacaacagggaaaaccccaataatgctggaaccattgctcctactcaggacaggtgttacgaattttgtaaatagtacgtaagtgcacgtaatcaagtagtaagctcacacaggtgaggtcgaaccacaagaaattggactgagtaccactagattaaatctatgtttctatttggcaaatcaatatttttcaagttcaataatcgaataaaaattcaagaagctgaaacagacaataaaaattaatcagaaatgagaagataggaaagagaatcctgttgataggtttacccaattgttaatgcctaattactattccagttcttattgtgaatgacagattgttctaattaacctagctgttttcaaatcttctaggttctaaatctcatgcattttaattaatctcttaattagaattgcataaaatttgcattaagcagtaatctaaaaagtcacaaaagtcatgtaaatacctttgttctacaaaaacttaggttatccaaattttagcattctcaattctcactttttaaatttcgaattgagatcatagacatgcaaaaggtgatcaaattttaacatgaaaataacacaaataaggataatacacaatcaaaatgaacaggaatggcaattaacattaactatggcaaactttaacaaacattcatcatcttccctaaatggaagattagctcatgttcaagtccataaccgttcctaaaacagaattcaacataaagaaattaaaaaggaagagagaaagaaactgttggtggaatgactctagatcttcactttgctcctctagccgctcttcactgcgttttaggtctcaaaatcgcttcccctcatttacaatcccagttttctttttatttctcatttttagggttcaaaagacgaaattaccctcgcttgtacgggctctc

SEQ ID NO: 330665 - DNA, 1020 bp, Cannabis indica
actaaaacagataaaagtgcatcgatacactaatttcaaaaatgtatcgtagaattttcctaaaatataaatcactacatataaacatgaaatgttaaccaataaaacaaaaattaattatgaaatattaacattttaaataaaaagtaatttacggcttaaaaatctaaatttaactaactttcaggttctagataaatatctaagtttaatttttaaagttaatataatacttaagttatatttttaaaacttatttgtaggtacaatgaccattaagtgtcaaattattatccacattatattttaaataaaaaataaaatttaatgacatagactaattaaaaactgtgctaagttttaaatttataatttaaatattattatcgttaaaaattaagtatatatgtacaaataaaaattaaatttaagtatttataatattaattaaacttaagtaaaaataagttatgaatattaaacttaagttattaattaagtatttaagcctattgttgaggagatcatttctcttttagcggctgttggtggtggttcttgctgtgccatttcgcgtgatgcgaatggtgtggcccatgcactagctaagtctgttactaatcctttaggagttcagttgtggacagatgcttgtcctatttttattggtcctcctgtaacagctgatttgctttaattggatgacattctttctttcaaaaaaaataaaataaaataagttatgaatattaattgttatagaaattgtagcatcaatgccaaaatataaaagttataaagaaaaaaaaaatcatgaaattgtcaaccgtttcataaaatatttctttaattttggctaggaaaaaccttaaatatggaaaatcactcacttacatagaaactgaaaactaataatttgtgttaccatttacttctttgttaataactctcttttcatgcttaaaagttattatttaatactcaaagggctcgtttggaacgccgtattaggtcgtattg

SEQ ID NO: 330666 - DNA, 706 bp, Cannabis indica
tatatatatatatatctttgtagaccactacacattatgcactaagggaactctacgtgttcttttaatgcttagagataaagaaaataaatttttggacaaaggtctaatacagcttgttcaaatcatggtgattcctactaatttacactattttacactatgtatatacatgtttagaaaaatttgatgtatatatttgagtgaagtgaattaaaatgatattttactaaataaataaattcaatcatgtcatcaatattaaatagaagaagtaaagaaaatgtcaaaactaggttaatgaatatgagggtggtactactactatgtatttatttattataaagaagaaatacattctagaagtaaaatagaaagcacacaaatgtcactacatggatgtatatatattttatgatcaatgactccggccatgctaatttttatggtagtctttgatcttttcaaagttaatttttcaataagaaatatatagttttctatatgagtaaaaatattcaattcctagagtaagggcatgcattttgtcctttagtactataagttagttaaatggtgataaaatatttattaagaaaaagaagtacccctcacaatgactcaatttgaattcttacaagttcactatgcttgtaatatatatagttagagaagtacaatcgtcaaccttttattataatttttt

SEQ ID NO: 330667 - DNA, 1095 bp, Cannabis indica
aaagtagagtgatttgagaacaataatgaaaaactaatttaaaacccatttctcattatttttggatatgtgagattgtgagttatgtaatttcggcactgtaacgccactttgaccagtcaaacaaaaatctcccttattattattattattattatgggtagttggaaaatcaacacacaacaaatttaataataatattattattattattacggatttattaaagattaaataggtgttacttcccttttcccaaagtaaaaccttacttttggagattgctgccttatttatttatttatctgcgggtatccattttgggttttttctgaactagaatctttaaattttttttttagagaagtgttaaggagatttttttgtactcttttttatacaatttttttttatatataatttagtgtcaaatattattttttgagattactttatttatatttaataactatacataatattattactttattataactatactatcacaataaaattatcctactaattttttacttaagataactttaatgccaaaacttaaatttaatgttaaatcgaactaaaagagtactattttagcactattttttttttcaattccaatcacaatactaaaaattatattaaaatctatattctttattataatgttattttattaatataataaaaatattaatttcataaataaaatatttaattaaaaaaaaaagaaacttgaagtattttatgggaaaaattacactgaacataagtttttcattaaagtgtaattgaaaatgactttaaacctgaatatatattaaaaaaaaatctctaaaacaaaatcataacacatgtttacaattatttagcaaaatgaatagtcacaaagtcacaacaatatatatgattattattttatttattaaaaaaaaatccatgtccaactaatatatactaagaggtaagtatttatatttactttcatctatacatatagaataattctatagtaggcacatctattttgttcctatggtataaggacagttttttgaccactgatatatatgacttctgattgtgcat

SEQ ID NO: 330668 - DNA, 1222 bp, Cannabis indica
gacatcagatgaagaaaataacttcgagaaatactcataaataactcagccaaaccgtgtttctagtcggtccatatgccatgtgagtttttcagtttagtgatgctattattctttttacgagagcttgctgctgtatgaaaaaacttactgttttggtctccctcttaaagccacagttgcttagatctttccagaatacttctcgctgatcaaggatgtcaaacaattttttcttcatttccatataagcctgaactaaagcagagtctctcttattcttcaactggtttaaataattactattatcaaataattaatttaaataataataaaaaaattaaatcaaatacaattcaattatattttttaaatatataaaatttaacatagttttaaatttatttataagaaaatatatctaactatttttattagacaataaaattagtaaatatttttagatattttaaacaatataactaatcatctaagctatatgttaataaataaatttaatttaaatattttaaaaaaaatattaaaaaacgataattatttgattgatttaacggtgttagttttaaatgttacttcttaacgaaaaaatgaaatagtaaaccaacaatttccttttgatagtgttatccgattcactatgaagtgacatctatttaagtgacacatgtatcatatttcataacctgggcagatgattctactcctagtaggtcgtacagactgtcatgatgctcaaaatcacacatagatagtaggatgttcaaacaagatatgggtagacatctgaccagctctactaagcaggtagcttgcatgcaccgactagggggtgtgagttatcaatttctaagatatactttatgtgtttccaagcttgcaaatcacggtacaatctctacatttgtggaatgaattcgtatcttcagagaataaaggaaatcaacctgaattttctattttcattattaaaattatggaaataaaatagttttctattttatttatcatcgattaaggaaaactaatttcatgtaattaatccttaaaaatagtggtttcatctcactattcaggggcacaaaattatttagagagaaaacacttaagagtgatatgttgggttttgtgcgctaaataaaactcatttcaatataatcagatttactagttaataaagaactaaaaaataacattttatgtt

SEQ ID NO: 330669 - DNA, 708 bp, Cannabis indica
gggccaaagtcgccccttgggacaggggctcaacccggcccgcgaaaatggtccaaattgccattccaaatgacaaaagcacaattgcgtatgcatatggaccaaggcagatttaaaattttttttttataaagtactcaaaaaataaagaaatattaaagttgttaatattcatctgatcattgatatgagttaatttcaaaatacattattacatacaaacatacataatattaatttcaaaattattataataaagaatgagttaattaataattaacttgattattcatgtatgcatgcagctggatggttgtgttctgtacaagttatactataatggagatgttgaaaaagaatacagtgcaaaacaaaggaagattactactactacaacaacaacaaaagaagagatggcacactacccactgcaacaagcatacattccacaacaatcgccatcaacaaatgatactgaaggtgatgatgatgtatcagtagaacattgggaattaaaactcaacattactctagaagatcaaggttattaattattgcaccatgtttattattattattgttagacataatttcttaaaactggttattaattcttattgcaccatgtttattataattgttgtttccacatcattttaaatacaaaagttaaatattctttcaattgtgtttcctatgtaggatatt

SEQ ID NO: 330670 - DNA, 937 bp, Cannabis indica
ttttatattatttattaaatcatgtgggatttcaaaatgaattgcactgcttatcatgtaatcacctgtagcaagctgtaaagtatttgaagaatactgatgaagcttctaagtgagattagaaacacagataaaatcctatataatacatactaaaaataaagtagagataataattattatatcatgcattaaattattataattctgcaagtatcttcgtcctagttagttatgataattaatagcatatatcatatgcggatattattaatatgatatatacatggttaagagtgagctagctagctaaatttctttatcagttgaaagatgtaatacttattacattaactaataaattaaagttcagtaaagggtttccttgacgtactttccaacagtactggacatacatgtaacgtggtagagagagagagatcatatgtggaatatttcacaaggaaggcatgaagccagaaattaatattaacaataaataaattaaattcatatgaaagtgactatcacacgtttgaaatattctcaagttgttgaggagggaataagacaaggtttccgtgaagccaggcaaccaagagagatcctctcccactctttttcaacaaaagaggagatccaatccaaccccttataatatatatgtgcacacaaaatatgtattaaaatataaatattatagttttatttttctaacttctgaattccatcttaactccatatatattttgttacatattaatttaatagcgacacgattttgtcctatgatgtatttttacggaataaattttgtagtatattagatgggtcttagggtacattagatgggtctcagggtacgttaccatttttaaccctaattacgtactcctagatcaaccccagccctcagatcaaataacttccccatcta

SEQ ID NO: 330671 - DNA, 533 bp, Cannabis indica
ccacaaaactgccaaaatcaaaaccatgtgttctttcaaaatggatcatgacaaaaataccctcagtaataatttaaaaagcacttttcattaaaaagaactttttaagtgataattgttatacccaaaattcagttggtactttgaaagctgacacgtgttaatctcaaagaatataaaccaacaaatgtaatggaaattatattaataaatattaaatggactaactccttaaatgcatagtcaatatggtataattataactcgcaggctgcacagtctttagcgagtcaaggatgtacaaactattgattcacatattaacgggaaatcatttcgcgtcaaaggacgtaatcacaatgatgacatcgataatacatagggaggcatctacctcgcaatatgtagagtgatgatgacaaggaaaattggctgttagaacacttagcatataatatacattatactaactaagtgtaacaacttgaatgtaatgaccgctttaataaattgaaatagtaaaggcaattagc

SEQ ID NO: 330672 - DNA, 696 bp, Cannabis indica
tataaaaaatcactaactaattatagagtgatacttcatcgtagtattaagtatatactataaatatgtcttgtaacaatactcatctatataggagattagatttagagtaagtatgaacataatacaaaagaagaataatacaaacaagtgggaggattcaaatatttcatgtcaatatcaatatcagcaaattggtgatatttttcacaacttgtgtaatgatttcttatttattttcattgtttttacatttgtattttgtattcatgtgatgtaattgatatcatattttgttttgatgcaccaaataatgaacaccaacatattctgaatcgaatcttttttattgttatttatttctcaatcccaagtcaatatatataccatataaaatattataattaatggttcttattcaatggtttttatttttattaggatttgaatattggtaatatttatacgaaaaatgggcactaattaatattggatggattgaaatattccacaaacccatttacttgtgaatccaattcttcttccaatagatatgtaatcaactggtacaggtattatctcacaggtcacaacttaaaatatattcatatatataaacattttttaatcacataatataaaaactttataatgtacgtacgaggaagactatagaaatatatatatatactagta

SEQ ID NO: 330673 - DNA, 1218 bp, Cannabis indica
cctagggctcgggttgtgacaaaaaaacggtatcagaaccccgggtttaattaccttggagtgtgtcaccaaatagtttagatttaatttaaataatagttgtaacaagtatcttggtatttatatatataagacatatttatattattagaacggttggagaagatggccctccagttaacgtccaacctctacaagctaaattccctatgaactttcttcttaaagccttaaaagcagttcccgctcaatagatggatccttccactcgatagagtcatcactttcaaatctttcatcggatctaagtgtctgagtttgagggtggacaagatcccatggtagctgaaaggtggttgaggcagataaagaaaaaattcaacacaataggaacacctaaggatatcaagttacttttattgtgtccaagttagagggtggtgcagcagattggtgggagaccttgtccaggacaacagagactgatgggatgacttggcgagattttgagagagttttccagggaacaatattttattccatctcctcggagggctcttattggagtatttaatggcataagaaaaggggatatgattgtgaatgagttttacatgaagtttgcacagctatcctcttatgcatatcctggtgttgttgaccaacccttggtggttgagcagttcatgcgtcatttgagacctgcgatatgtggtccaataacccctttgatctttaacaacctgtctgagtgtgtgacaacagccttgcgaactgaggcttgtgtagaagggaatgagaaataacacaagcagaggaaaaggaaacgattgaaagatgactaagaagaatcaagggcagtggtcccaaagacaataatttagtgggggtagcactagtagtggttcatttggaaagactcatagtggaccatacgggtgtttcacttgtggtcaacaaggtcataagaagaaagattgcccacaatgacaacgaaaatttcaagcatctcacggaggacccatagggagctatgtagagtctactcctttccatggacagctcaggaccaaccagtctaagtcttcattctacggtttcacaccctaatcaggccagtagtctcagtatcaacatcagtttatgccacaaagttcagggttcaacatggggtactcatagggtttccaaactcctactcctagtgggagtcaaaga

SEQ ID NO: 330674 - DNA, 901 bp, Cannabis indica
tgttgttctacgatgagagactcaaaactcttcatattcgagtggttttcccatgttagaaatgagaaatgtgaagttgtgaatttgacttctctgacttcatggatcttagctgttgtgaaaaactagaagaacggtcgaaacagaattgcaatcggataagcagaagccaatgcaccacaccatttgtcaacctcagcactaggtgtttcttttctgggctctcgagttgtcatttggatacttccaaggttcttaaacttgaggacgagttctcccaccccatttttggccattttgaagagaattatcagatcaaatttgacatttgaatgatcgaaactagcgcagcaatttgattgtcaacctaggcgttgggctctgtttccagaccctcgggtttgtggttttcttcccgagtttgcttgaatcttaattatttctaatgatagaaaaaattctcaaaacactttttcgagaaactgattggaaacagcccaagttgacaatatgtcaacctggtcgatgggtcctagttttggccccttagaagtttcgtttggtccccgaaaatagttgaatctaaatctttgctgagaatggagaatatgcctaaaagagttctcgaaaataatttagggatgtcaatttgggcgctgagtgaaaccctaggtgccaaggttgacttttggggtgcaggttcatgtaattttagctcccgatgtcttcatggtatagaatactaaaatatagtgagttggaaacaagttactgaagtccaaacttccaccctaaagttcccaaagtcaacctgggcgcagggctagggacccctcccaggttgattgctacgactcgtgtctattcaattatgttacatcatctttcttgccacatgtca

SEQ ID NO: 330675 - DNA, 1109 bp, Cannabis indica
ctccaaacacgattaaaactcaattaaaaatatactaaacttaatctaaaattaatactaaaactaacctaacagcttccttgcgggataagccgtcacagagtagaagtaaagaatttctagtggggtcaaacactcccacttcagaatatggtatagaaattttaaagtagctagtattatgtaagaatttggtgccagttggaatggagcaatgtcgaggtagttgcaaaattccttgaaataatccttaagagtgagtactgctccaactctaatatgttcaaggctctaagcgcctatcttagataactcgctagtactacaaccttcttctcgagatacatgtttagggtgataacaactgaactctccctcggcgacagacctaacctgacatccttgctcatatgtgataccacatgattttaatacttccccaacatatgatcttatggatctaactttagactcgatcagttcatcctcaaaggtgactgtagggtcttaaaaggtctttgatttgcgtgctttttgtgccataatttcaaaatctaagtcacctggtgaaaagcaataatgacgggaggtaaaaacattggtctcgctaaggaaatatcaattaaatttagaggttcaggccaagtagcttctcgtaaaaagtggcgcctacccttaattatctcttgtaagaattgtctataatgactagaggtttcatcttgtctggctctaacaagatgatccctaattttttcatcatttacttcaacaatggtttgggatttatgtgttttgagtttgaatttgatggcagagatttgaggacaaactgattctaggaattctgggattgtgatttttagaatgaattgggacatatttataactaataatatcctaatttctaaaaaaagagaatggaagctcaacccagaatatctacgaatcatataattacctaacaaatttcctagccctagagttattcaaataaacataatcaaaattatccaaacaacaaaacaatgcagatagggaaacactaacaagggaaaagaaattatgaagacagaaagaaaaatcaataagaaaagagagtgtatcac

SEQ ID NO: 330676 - DNA, 962 bp, Cannabis indica
aaaaaaagaaaaacacaaaatcccaaatactataccaagcttcacaagataatgcagatgggttttgctatttcaagctcatggtccattctcaaagcaatgaataataacaatcaatgataagttgcctccaatctccagttcatatgataaagctatgctaggtcagaacacttccaaattatccttatcataccttcaaaatatgcttcttgaaaaccatcatttctctgggacatttcctcgaacagctgttattcaacaccagtgcacccaaattgacactgtaagcctaaatggaacaagaacacaacatataattatttaagtcaaacaatgttcaaaggtcataactgaaaaagatccttctttttcttggttcaatatttctaactttcaatttctcgattcccaaattgaaatgcccagaaagagaacttgcctactgtagcacaatcaaatgaagttgataacacaatcaaatgaaaataataaaaagacagaacctttgttggcgaaaaggtagttgtttgtatctcacatttccgtggagctggaggtgtttgcgtgtaatttgtagggtttgaagttgaagaaaggtaaaatctcctgtaagggaagaagaaaagggtctgaaactgaaactgaaaagagaagagaaagaaggagagatggctatgggagtgcatcaaattgtatctcttcacttattttcttttaagctaatttattttttttgaaacagttgttttaagctatttgaagtgctaaaatataacttgttaaattttagaggagttgtaccttcaacctcctattacaattttttaatcaatttctacgctcgaaaatatatgtcgaaatattttttttcatttttttttcacgggatgttcgttatgcttacaacatcatctctgtgaatttttgaaaaatttcgaataatttacagtgccaaaaat

SEQ ID NO: 330677 - DNA, 805 bp, Cannabis indica
acataattattaatatttataacagttcatatattctttaaaatattgtaaaaggaaatactaaatattttttttatatttttatagatgaattaacaggtttttaaaaaattataataatgttctatttgttcaacgttattacctgaagtgaatgcaataattttaaataatcaaagatactatttactcctaaaatatttctagaagaaactaaaaaaaataaaatagcacacataatcaaagtacatgaaataaacattttacgtgtggaattaaagaacagtattcacgtatctgtagaacagacacacttataatcaagattattttcaaataattctctaaagagaatgaatgaacatggaatagtatttcaaagtatttagattttacatttattagaaataccataagcaaattaatatatatttattatttcttgaaattaatgatattgatgaaactattattggtgcaagatatgtatatatagtgactacttaattcagttttgcatgttcttggaagtgaatatataatttacaaatattatagtaaagtttatgagtaatccaataaatttaatatagttacattccttaaagtgataaagaatcacaaaatgattatttgaaaagctttttgaggaagtcttaaatacaattgtttgaagtagtcaaatatatttgtatgtatctaaaggtgacacaaggtgctgtccgaatgcacgtgctgactgagtgacacttagttcctcgtgcgcacgtgggtctcaccaccccttagatattttcaatttttt

SEQ ID NO: 330678 - DNA, 721 bp, Cannabis indica
tagagttttatagcttagattaaataagtatttttttcgatctcacgcaattcccatgtgttcgacctcgttcttcacaatttccatactacaataaaaatttgtgcgcttgcgagttgataaatgtaaaacgtaccacttttggtacacaacactaggataccacaacattgaggcagagtcagattgtcaagttgtcacaaagcttttaaatgcaaaagatccttgtttggcaacatttagctcaagtgatattttttttttttagaaacttgtctatagctaaagttttacactgtaaccgctttgcgaatattattgctcatgacctggcaaaacttgtggtgttcggcaaggctgatcctgtgattggctgggccttaagagaaaaaaaattgttgggcccttcatttgaataatatgtggtattttttgaaaattattaaaaaatatgtataattttaaatgaaaaatatttcttttgggcccttggactgattggccctaagcgcgggcctagcctgtcttagcctagggctggcatcggtggctggggttacctaattttgtataagtctttggttttttttttttttttttttttttgtcattaacttaatgataattatttttcattcaaaaaaaaaatggaaatttataaataaaaaaataaaaaatgttgtaagtgatacataagcatttttttttttattttgtctaa

SEQ ID NO: 330679 - DNA, 485 bp, Cannabis indica
ttcatattaggatgttaaacaacgtacatggtagtaaatctagatcctggtaaaataattccaacatatatcaggtaaattaaagcaattgtcttacttattggggaattgaatactcagttgaaaccctccatagtccaaacaccatcatatagtacatgaacaaatactgtttaatctgtccaagaaaaaccacaaacaaatacgaaaataaacaaaaaaaatcagcataacatattgcacaattatcgcacaagaaaaaacatatcacataatgttgcacacaaaaggcaacaagaaaataataaaaaatgaaacaatgttgcacaataaccacacaagaaagaaacaacatcgcataatgtcgcacaaaaacaacaatatcgcacaagcataaaataatatcgcacaatgtcgcacaaaaaacacaataacgaagcaattaaaaaaaataaaaatcatatcgcataatgatgtaaagatat

SEQ ID NO: 330680 - DNA, 1636 bp, Cannabis indica
aaatcacgtaatacgcctaaattagttagggtgttacacgacaagtactataatatatatgtaatatagtgaaataaataaatacacagaattttatagaggttcagccccgagaagttcggtaatatcctactccccttaatttgtattgacttaagaacaaagaatgcaatgattccttttcttagagcttttacaaagaatacaaagaatgaatatgtattcttagacaagattttcaaccctttgcccagtgagaatagatcactatttatagggctataagctatgagggaaaagtttcccttttgtttacaatggatataattggcaagattacacattaaatacagaatacattgattaggggatttggacagcttaccatatctctgtgatatgatcccaaaattatagggatttcttctgtgattcacgatgcgagtgttgaaattgctaagtgttggcatgttgttcagactcccactgcctggttaaggaggctttgttcgtgcaaatatatgtggtgttctgttcgtcagagtgccaaaaatgggataacatttgcccccaaatctgtacgggacttttgaagtcgcgtgtagacttcatccgaactacctttgcactttgaatgggtgacacgtgctaggtgcgtctatttgcgatttcatatgaggctgaccaggcgtctcttcagttttcggctaattaatgctctgacttaattagtgcctcaaaacccagtatttcacatcacattttgacgtttacacatgattgcatttgatttccaaatatttgcttttaggacggaaccgatgcgtctaaaggcattttgaaaagattacctttttcaccactctgcctataaataaggctgagccttcctcataacttttcttttactaatttctctatcaaacaaattcagagcaaaaaagggtttttacttcaagtctgtcgtgcgattcttaccaaaggtatccgagcagctttgtctcgactgaacctagacgtcgaacagtgagtgagttttcaatctccctcttcttttttttacttttactttgcatgtttaatttctaggtttcatacatgcgttctcgacttgttgtagaagatagttagtaaatctaggctcaaaactttgtgatttttctctgtaatagtgtgtatagcttcacagttcacgacatttgcctttaatcgcacattgttcgtctttgaccttgctcatctgaagcttcgtgaaatttaaccctaaacccaaaaaatttcaaatttctgggttttgacttgtttttctacatttcatccttgtaatctattgagtacttctggtcggcatattttcctgtttattgttcgatatcccgaccaaacactaatctcatgtgttgtcttttgtagatgaaccctggtgagttttggggaaacgaacaccgaatcgactaggacttgcttcaacttttgcacgaagatcaacctcgtcattgtgccagttcgtcctcttcgagtgacggactttctaactcaagctttgaagattgggaggtgagtagggatcgttatcctactccagaatgttggattttgtgccctaaataaaaccctttacaatctgattagttat

SEQ ID NO: 330681 - DNA, 976 bp, Cannabis indica
aattttttacactactaaattgtatctgctatagtataagcttcgttaataatattattcaaaatataatatttttacagtgaaataattatttcatcatattttattttattttaggctaattaagattttttttcccaaattttaatatgtaccaaatcataccccttaaatttttttggccgttaaaaattcctcatgaattattgagattgttagatttaaggacttttgtctaatttcattaaattttactgttttagtgattgtttgtgttctaaactatgctctcaagactctgatatctaccaaatcatgcccctcaaactttgatatgtactaaatcatgtcttctgaacttgtttgaacatgctttcgatatattaaattattcttaatttctcaaattttctaggatatattaaataaggttcaaactgtctatgcatgcgtgactctttcattttatacacgtatgaaataaaaaataattacaacgtatacgattataaaaaaaaatagactaaaaaactttcatgaatgtcgaaactaataaaaagtgtacgaaaacattccttttaatagatgtacaataaatttgcaaatcacattggaaattaatcgtgaaacattgcaaaatcatctcaaatcacactcaagctttcatttttttagtcacgcattgcaaatatatcgcaaaagcatcgcaaaaagttgaaaagtatgaaaaagtaaaatgttttagtcaaatatcgcacaacatcaagaattattgcaaaatgtcatcattaattttaaatttagtctactataacaaatatatcgcaaaatattataaaatatcacaaaaaattggaaaaattaaagaaaaaaaatcaaaaaaaaaaaaaattaataatccaaatttttgaagcaaaaaataacaaaatacaaagcacaaatatgtagatttgttaaaaacaaactatatatatat

SEQ ID NO: 330682 - DNA, 643 bp, Cannabis indica
aaattgaatgtgaaaaaaaataaacattaatgctcagtttagacgggttaacccgactaaaccgaccaatgctcaccaatccaactaagtacagaagtctcattagaaagctactttatcttaccataacttggccaaacatcttgtttgttgttaacaaactctccaagctccactagtccctcacctcacagcagctaaccgcatactccaatacctaaaaggctcaccaggacaacgacttttcttctatgccaatgcacctgaacctcttcatcttcaagcctttgtatatgcggattggggagcttgcttagacataagacgatcaatttcgggctactgcatttttctaggacaatcccttatctcatggaaatcaagaaacagcacacagtatcttgttcttcagcagaagctgaatatcgagcaatggccaacaccacatgcgaatcacatggcttcactctataatttgagacttcaacatcaacatcaaacttccctcaaccttgttttgtgacaatagtgcggccatccacatctcagaaaatccagtatactatgtgtaacgtccccgcttcaagcctccattgggcccttacacccacggaatgaatggctcttatacacgagtacgtca

SEQ ID NO: 330683 - DNA, 1597 bp, Cannabis indica
agactataaattaccttagtaaacctgctattgcatagaaattggtaataggtagataatcatattagactatagtcaatagatacaattaaaatcgaaagccctaacttttattcattgttaatttacctattaatttacttgcttcctaaattttattattcttattgttttatagtttaattttatctcgaatttatttagccaaatagaagtaagagtttaattttaacgtacttaactacaatcttcgtgggatcgacctcgctctttatgagtaatacttgttcaaacgatacgtatacttgcgtgttaaaaatatcacaacacaagattacctaaccaatccataaaggagggtcctacaaggcaacaagacccatgctcaggcctccatgaactagggagatgacatcaatgatccagatctagatcctaaagacaactattctacaattgacctcagggacaacctaaatgtgcggagagaaaaggcacaaggagaaaggatcaagcctcatggaggtaatttaagaaacaacatcaacgattggatgaggaaactgttggaattttagtccttaagtagcacctaattttaatgtaatcttatttacttatagataaaagatcagagatcattttttttactattgtatattgcttggttcacatgttactttcatgattatttaattactatataaatctgctaaatctagaatatataattattcatgattatagtgttgtcaccatagtagaaaataatcgtgattgtatgcttcaaactatttagtcccatagtttattaatgctctatatttacactggcatgataatcaacgatgtggtttacttacacttggttaagtgaaatatcttttccaggataagtttatatcggaatggaccaatgttggtagtaaaaaaatatcgtaaacttattgttatatcttttttaagttaatattacttacttaatcatagatcaattgatcttaatcctgaaatgaataatcttctgctagttgtagaattagagttcttttacttgctcattactagcttacccgttggtctggcctatacttataacttggaaactcgatattgcaattgagttggagtgttaatcatagatatgggcatctacagcttttatgaacatttaaaagtaaaatgatagtttcctttgagcttggctaaacgagttaaatggtggagtactaattttagtaattatattagtttactaaaacatcatttataaggagctaagtattttgaagataaaatgcattgaagagtaaaataatagttttttccttattcaatgtagagttctaaagaggatcaaagattagtttgattgaaataatagataattcatagtgtatctatattggatatgtttaccaagtttttcaaaaaccaaatatttttagagcttaagaaagtaatgatggcgtaaacagtgaaataacaaataagagattttacgtggttcaggcgttaactatccttagtccacgctcatcgaccggtgactgtttatacagatacaaatacaacggacttttactcctttcccact

SEQ ID NO: 330684 - DNA, 822 bp, Cannabis indica
gaaggtggtataatgacatcatggatgttaagtattagtgtaaataaaataaaaacaatgataaaatatagaaatagccttgtatttttttttaaataaggcgttttataaataaaaatcaagttagacatcatcgtcgttacaaaagatagaatctggtatagaagatagctctaccataccgataacattgttgataaaatccacttgcccatgttacgagccacaaatttataagttctaaaataaaagaaaaattataacttaacataaaagtagacagatgtttacaattacacacatagttatcaatgctccaacagttaccggtacctttcagagccttgataactatttcagaatcactctccaccaacacaaaaggatgatactatgaaatggtgtctccatggctagcagacaagccgcaacttctccaatgagagaatcagaaaaattgagcatgcttgtaagaatagccttgtaaggataataatggggttatatttttgggtttttatatttttcatataaaattttccaattaaaaataatccatataagaccacgtaaattctaatatagggtatcatatattttaacttactattattattattttcttttttgtaatatatctaattcatattaaaatatgggcttttttcataaatgtacaacaaaaacaaaataattataaaaaatgtgcaaaaaaatattattttaaaaatttatacattttgaaaacttattacatgaaaccatacatttttaatatgtttattaaacctcaaaataaataatttcgtaaaattaattaaa

SEQ ID NO: 330685 - DNA, 1087 bp, Cannabis indica
atggtccaattggtaacttttgtaaaacagagggtccaaaatagtatttacccaatttttaaatattctgcatcatggttgctcaatacatactcaataacccatatgtattctaaaataaataaaataataaatcaccttagttgatttttattttcaaacttttttacattttttaattcattgtggtcctatatcgaactttatcgaacaaaatcattaaagataataatgacattattgaagtacatgactaaaatcataatataaatatatacctaccacctgactgtgaacaaaccctattagaattgctaaaattattattttttggtgtgattattattggtataattaaatatcaaatttaatcgtgttatatgcaaactttataaaaattataatttacaagaatacataaattaatcgtagattttttgtttaattgatgaaaaaattaaacaattaaaatatatttattctcttataaaaacaaattgctgtaaattggtagaataatataacaatttaattagaatgacacaaatgtaatttagttataatattaagatatgtaagcattacttaaaaatgatacgtacttgtcattagaatataaaaagaagtacaaaaaaaattgtaaaataaggtgtgattagcactcatcttttctgttcttattttcacatgtttaaagtatttttaaaagtaacaaatttaatttagtacattgagttacatgataattaaagttgtacctccaaaagtcattactatcaatggtgagtaaaaatattcctatagttgaataaaacaagagtacttatactagaaattttctatatatataaatataaaaatgatatctagttttttttttcttgtactaaatgatagtctagtttttattgtggtagaaatggtacatgcagcctatttttttttctcaaataattaatcttattttttataaatatgtttaacacatcaatattcattattcgttgcttgaaaaaaaaattgttccaccttttcaaaaagaagagattaattattttacttccagggagattccaacttaagacca

SEQ ID NO: 330686 - DNA, 504 bp, Cannabis indica
aaaatttgagtaattgagcatcactgtcggttcacaactgatatttatactcaatctgtatatatatatattcaaatatattaatgcttattatatatttatattaaatttttccagtgtcggttatgattttcggccattaacaaattataggtgttagtttagaaccgacacctaaaatatagagtagttttaagtgtcaattttttaagttctctcatattttaaatgaaacaaaaaatatattttgtagtactggaattgtcctgagattcgaagtgtttaagaaacaaggatttcaatcgtaaagggaatacaactactagcccttattaaggcactgctcgcgcaagcctcctttctgtcatgtggtgttttattttgtcttttatttttttgtcaaattcattaagtttgatttttgtgcatacgaagcgtattctagcatactctcatggagaaacataataaatatttatatgttataaatattaataattatgt

SEQ ID NO: 330687 - DNA, 612 bp, Cannabis indica
aaaaaatattagccaaacaccatttaatttttaaaatgacaaaaaactgttttctgttttcacttttaaaaactgtttttgaaaactaaaaactgaaaacacagccaaacagcctctaagtttttcatcatttttaagtgtttatgaactaatctatttttttaatctaaaatagtgttcaaattacccaaagtgttagctgaacagtcctaatacaaacacgtattttttgagattaattaaaaatatatacatataagatctttaaaagcttcttctctccaatcaaatttagttatacagtgagaaagaatcatatattttaaattatacacaataggttgggttggtttattagtcatttcaagtggtcctgggaaattataaagtgtaaaatgtttcgtcgtgtactaaaagccataagtttaatttttttcctcaacttttcttcagtacatgttaattccatttttggcatatttaattgacaaaaatattttattatttaatgtatatttcggctggcatatattgatttggtttccatatttgtgtaaatcaaacttgaaaggaaagttgtctagctttcctatttttggaaaaaaggtaaaa

SEQ ID NO: 330688 - DNA, 840 bp, Cannabis indica
agtggtgcctagcaccttctcgaaatgtcgcgttacgattgactagcgatactccttaaaagttattatattaaattatatgggacccgatatttagttggactaataacgatattgacacgtaggagggtgctagacatcagtggtgccctttagcatttaacgatataggtggtttttagtatttcttttaggtagccacgtctgtggttaataataggtcctttacatactgcccatacacaccaaaataatgttggtgatgtggtccccttttaccaaaccaaattatgcacatgagtttgtcaattgatatgagatcttctgattagactaagcttttctatttatcttcctttctccaactccaggcttttaaagatttatggttgaatattatcattgcaatttgccataaatattgtgtttttgaaatacaactggaaatttcagaaacaataagaaagacatcgtccatagttcgacacaaactgatcaagagcaattatgcatcccttgaaaattaaaagatgaccaatataagcataaaaaccgcgagtaatataaaaagggaaattataataaataatgccaaattataaaattttaatactatgtaagtaaatgttttcattttaaaatttgtagataggagtgttcatccaattcaatctgcactattttgtttagtgtatctgatctgtactaagtgcggatttcatattttagatcaaatctgcacaataactcaaattcaattcaatccgcaaaagtaccgatttgattaatattttagattggtacttttttaatattaaattatttaatatttatagaaaa

SEQ ID NO: 330689 - DNA, 1261 bp, Cannabis indica
ctccaaatacacacacatgaaaaagatttataacaagtcctcaatacaaatccttgaacagtaacaaaatatgaaatctaaacttttaatatattgatgaatatttgcctaattaactaaagtacaaagatacatagcgtaaagcttgtgaattgcatgcggtggtcgttagacaagttcagcgctgagttaaaatagattataggtaaaaaaaattcttgaacctttatttaaagataaataatatttataaaaattattaaaaatatatatttttttaaaatatatttttttatttgaatccctaaaatgagtggaccctaggtgcgggcctagcccgtctatacctagggccaatcatgtcgctagaaatcattctgatgaagtggtttgggttaatacaactagattagatttttcaaatgctctttgtagtaaggaggctgcatcttagcttagcacttgatacaacaaagttcaaagggtactcattcatcatcatggagagtaattttagagtggtgatgaattcttttaatcgcttgtcattttgctgggagattgagaattattataatttttttttatttttgcttaaaactctttaagtgaattaacagacttattattattttataatgtccgcaagatctaaattatttatcaatgaataaaaaaacaaaaaagtgagatatggtaacataaaaaatgaaggggtaaaatgataacttggtttggtatgaaattattggtgtacgtagtataatgatttaggtgaaattgtacagctcattctgtttgaccggtcatatattgattgtgatcgcaagtatttatcaaaagaaataataattgtttaacgtaccatctttgataagattgcgtttatgatattttgaagaagattatagaagagtagagtgatgagtaagtagaggaacaatgtcagttggcaggggtctactctacaaacacaattccattcattcaatccaatcttaatatttgcagttgtgaattttatgcaaaaccaaacatcattgcaaaccgcatatgatgtgatgttcttgaatgattgtttttcaaacttttagagtagaccggtgtcacactatcaccaaatttgatgttacactatcaccaaagagctcatcaaatatggtgtcacactatcaccaaatttgatgttaaaaactatcttcactccaaccacaacaccaaaaattacactaaaaaaatattccttattattatataattt

SEQ ID NO: 330690 - DNA, 817 bp, Cannabis indica
tttttaattttttttctctaaatcatcgagcctaattgattaattggaaagattacatgtgattccaacaaaaaaaaagttgtttaagtggaatgattaaaaaaacattaaatttgaagatagaaaataatatatacatgttgaattattttgggtgttaaaaaatatagaaaaaagcttagcatttctaataattattttttaaaataaataataaattaatatgaataacaaaatggataataaagataaacacctttaatatataaagataaaaataaaaatataggatctacttatataattttttttataactgaatatttatttaaaaaattaaaatgaaacactaaaaaaaaaaatgagaaggcacgtatattattatttttatttaattatttggtattaatgtaattagtattaaatagaaaaatattaagaaaagtttaaaaaattagaaaaaatgagagcaaaaaaaatataggaaattttatagaggctatcatgcctaacaataatattatataaatagatagatagatatagatatagataacaatagcattaatgaattggatttggataaccaatcttaatttcctacgtcatttcctaatttgtctttccttatcttcccaagacttgttacaatttggttctccaaactttttatatctttctaaaaaagaagaagaagaaagtttctattatgaaatattaatattatgtaatattataatttaaagaaagaaaataaagaagagatgagaattttctgggtgttttattccaataggtgatctcctatttatacaca

SEQ ID NO: 330691 - DNA, 1068 bp, Cannabis indica
aagtcaattttgtcttttttttttattccattttaattcaaaacataaccctaatagctaccatatagctagaatattatagctcttattttcataacattaattgactctttttgtcaaacaaagagaaaataaacagagctctctattattcgaattcttctctttttcttctcaagaattttgaaccctatagtgaatgagtaattgcccacaaaattcaaggcaatactcaagatagtgtggaagattgtgtatacttttgtcacctgaagggaaaaactaagttcaaatcttgatcgtactctgcaatagaaaggatcaagggttagagatctgaacggaaagagtcatattattccgatgtcattaatgtaaggttttctacaactttatgtgtttaattcattgtttttagaaaattcatatttagtatgttagattatagaattataatcaaacatacatgttagtaaatctagatcctagtaaaatacttccaacaagccctccaagcaaatattttaacttttgggggaaatccaagacagtttcgaaaagctaccatttgagactcattttggagacacccaccagatttgtcattattggaaagaatttcattgaaatctccaatagttaaccaaggttagagtggatcaacatcagcaaagcgttgaaaaagagtccaagaggcagacttattacttgtttcgggtgcaccctaaaaaccagtaaagtggaagctcgggctttcattaaacatcatatagcagtcaaagaaagtggagccatagtttaacaaagtaacataaatatcatcattccataagagcatgaggccaccactaagccccaccctaggagcttcaataccattcgagaaatgaaaagactattggagacaagaaatcaaattaacacggagctttatttccatgagaaacaaaacatggggcgattgttgttgaacaagcaatcatagatgtctaaatgcactcgggttccccaaactcgtgcattccaactaaggattttcatgtgttggaatttattttaccaggatct

SEQ ID NO: 330692 - DNA, 934 bp, Cannabis indica
aaaagtaaaaaataccgcctgacagtatttttataaaaaaaatggtaaaagttagtataccatgtaaatttccctaataatatacttaatttagaatgtacaataatttaaccacctcttataaaagtataaaaaatagttctttgaacttcaaaggaaaagaagaagaagaagaagaattttctctccctaatgttgttgtttctgagaaattattggattgcatatgcgtgtttttttttaaacatgaaatcccgaaagtcgtatttttgtaaatgtttctgtggctttggtccagacttacttattgggctattgagtctaaattgctttcatctaccacctctttgataccgtttaatacttccctaccagttattatgtttttatttgatttgtactatttgttcagtaaaccatataaaaaagtcataaaatcttgaaattgctttttttttttttttgaaacttgatttaaatgctatttgaatggtgagattcaccacttacgtagtagtagtactaataataataataataataataataataataataataataataaaaatagtggtagttgtgaaaaatggtcttgtggcccttcgccagagatttaaatttgtgttggcgggtgttgcaaagtgatagttatagtttaattgttcccatgtatgaaacaatatttttcacttgggtaatgttaaaaaacaacaattttttgtatggaaataacaacattgctcggtatattcctttaaatagtatataagttataaaagttattttggaagacaataaaaaaaattaggaataattacataagacactattttttgtaaaatatttacatttttacgttcaaagaatgtttttttatatttttatggtttcccaaaaaaaataatacgaaaacaacataaaatcaacaaga

SEQ ID NO: 330693 - DNA, 585 bp, Cannabis indica
aaaagaaagaaaaatgaaaaaaaaaagtatgaggtgtaatttttttaaaattaaaaggatattttaatttaagaccattgggcttgaactaaaagagtaaaatcatattggaccaacactttgcgtaagatggccgaaagatattatttttacctgtaattttagttaaataactattttgcataattgtttaaatatggtaaaaaatgatatttttagttaaaagtcaattggacttttactcaaaattaaaaaaagcccaagtctaaattcacataggagatttcgattatgaatgcatttttcctattagttttatttttattaattaaataattagaagaaaaataaagtatcaaagttgctataaatagaggggtatagctagagttgtaatacactaatgtgatacatgaaaaaacttaacagttaacactatataaaaggtcttaacacggtaataacgtagaatggaaagaaaatgaaataatctccattctatttctttgtttagttgcatattaaagtgttggaatgtcattttaatggaatgacctttctaccattttggtagaatgacaattc

SEQ ID NO: 330694 - DNA, 1275 bp, Cannabis indica
ttatggactatattattatatatatactggtcttgtccttttttaggtgttttctgataggtcgatgtggtatagtcacaattggaatttcgggccgaactgggtttggggccaaaattcattttcgggattatgtattggaattttattgatgtgtgaatattttgaaatttatttgagtgtatatgtgataaaaaaaatgactttcttgcccttgatttatgcttatgctctattaaggccctagggtcattttggtcatttgaccaattgatttactttgcaacaaaatggatttttggcattattgaaaatttaatttctactttgttctagccctagccgaatcccctttccctctctctttctctcaaattttctttactttgcttatttctcacaattgagtttgtggtattgaagcttgggagttagagctttgattttgataaggtttgaggtagattttcaccgtttgattctgaattttattgttgaagtttgaagttgattaagtatgcttaataattttctattcttgagatgcatgtgtgtagaaaatagattgaattatgatgcttttgctatgtcttttagctagttgggattaaagttaatgttttgattattggggaacttgtactgagtttttatgtgtaaattttaagtttgaatctaatttttataagctggatgtttggggtgagctcttgtcatagtgtttgatgatgagaggtgcatgtgttggtaaaattactcatgttattgttgtgttggagcttgttttaatgctcttaatttccttactgtggtgattataaattgtgaaacttgtatttggagttttgatcatgctttgggtatgtttggtgtgcattggggcttgattcgtgttgttgtatttgggatttcctgggtttggaacccaggagccgcggcccaactccttgggcgccgcggcccgccccctgctggtggcctgggattcgagcccaggtgttgcgaccccatgtgggagtgccacggcccgcccctttattttattgtgtagattcgtgcatatttttgaatattcataactttgtgatccggactccgttttgggagttctatatatcgttggaaagatctttccgacctctatgtgattatctttaattttaatgccaattttatattttgtggaagtggatttagggattaaccctatacttgtgaatcctagaaattgtgactaagattaccagcacttggtcaggagcacccggggatttg

SEQ ID NO: 330695 - DNA, 1001 bp, Cannabis indica
tatacatattttttaatttttttttttaaaataacacatgtttttaataaaagcacaataatatttttttttgtcctaaaaggcctatcaatctcagggactaggaaccttgaatattaacattgaaaaattataaaatatatgctaatattaacaccttttctattcttaaaatgatcaaaatttctatattaatctagaaagatgtgtttggtggttaggtggaatacaatggaaaaatatgaaaaagaatacaatgaaattagagtagaaatgaaataataactatttcaagaatatccacatgtttgtttgaactttatacataaatgtatgaattaatattaatattttggtagttagaatgaaattattgaataataactattaaaaaatgtatgtataatttcaatcttatgttctataataatagtaataatacatttaatttcaaagagcaaacacaaaaaatttgtattctgattctgtattaaaacgagttttgcgttttattacacgaattaataaagaaaaataatcatgaagatagacaaatcaatatcaataaagtgttgaattgtaaattgagtagttggtttgaaattaagatcaaaataaaaagtgtttaagtaccaaccaattaagtagagaagaatatgatttaaagtaggccaatgatgggttgtagaaactttgaaaataaattgattaagttgggttttcacaaaagagatcataagtctagtcattgtgaaaaggggtgcaccaataatttatgtatatatacataaacataaatatttatatatataaaattcttggatcttctagcaaaactttttttttttaatataagagttggtttgatgggcaggattaaattggataagattggattacgttgaaagtaattctatgtttggtttaagaatagacttgactattttatttgtttccttttagaaaataaaactcaaattacaataaaaatatataataat

SEQ ID NO: 330696 - DNA, 739 bp, Cannabis indica
tctaattttattcaattttactgtttcagtaatagtttatgtactaaaccatacttcacagactttgatatctatcaaatcatgcccctcaaattttgatatgtactaaatcatgtcccttgaacttttatcatgttagaacttttttactaaaattagacaaaagtcgttaaatttaacaatctcaatagtgagacacgatttagtacatgttaaaattctggggaaaattactaattagcctagattttaagactttagggtcttaatttattggacaaaggctgccccaaacgacagcgtccatcgccggatctctatcccgtactccgtcgtggtcttcaagccatgtactcctccaatccttgaatcgtttcaagaagcacaaatgctgggaatttcttacggagagctcttcctattgattggagccaccgctgcacttgttggtaaggtaacctctctttctatcttttttcctaactttaaaacaccaaagctgaattgggtttgtgtttatttttggttttagggccaaaggatcttccaattattgccagaactcttgggagatttgcgggtcgttcaattggatatgtacaattagctcgtgggcaatttgaaaatgtcatgcaccagtcccaagctcgtcaggtaccaatggcatgaagaaattcatgtttgttatgaagttagagacgagtttgagtttgtattcacttgtgttgtaggatttaat

SEQ ID NO: 330697 - DNA, 779 bp, Cannabis indica
gtttccattcccctgggttgcaaatctctggggtctccgaggcacctcttgatgatgtgccaggttattcagttgctcatcttcaagggcatccttagtttccccaggttgttcttcctgagcgttttgagggtccccctgtactatctcttacctcctggtttgtgagccacgaggtctacctcatggcctcctcaccccaggatcaggttggttttgagtgttgtcttcctaagccgccctggctgcggttacctcccattcaacctcagtattccattggtttgcctcctctaaacgtcactagagttgacaattttccaactcaaccaacgatacatatctcgtgggtcataggcgccatctctcatggatgtagaaccaccaacattcgtgttaggctccacattccctgtttctaggtcttggtcactttcatgttggtttcttctcgaacatgttgatcgtatagatcatgttgttcgtgaattaggagacctccctgagcccgccgactcttttccagtgcgatcagtagtctcttcaggttaaatactatcgttttcaccattatcttccatgaagaaaatttttcttttggttaggagggatttttgtggagcttttatcacgtaggctctcattaaaagcaccaaactggtaacgcagaattttgttaacgataataagcctattttcgtgataggatcaacatagaaattgatagaaatctaagaaagaataataaagcaaaaataacaccaagtttttacgtggtt

SEQ ID NO: 330698 - DNA, 548 bp, Cannabis indica
tgcgaagttgtattacttgatgggtgattacacagataacatgtacccaggtcattagcaaaaatagtaacaagtttagaccttgtgggcaaggcatctttatacaacttccaaaaaattaacttaatgcgagaatgtagagaactacaccataaaatcttaaataactcatcatcaatagaaaaagtgttcttatttaaagcccaatacgcagatttaagagagaaattaccttgaggatccggagtctagaccaaggcatcattttgagcaagatcaaaggatttaatttttgcttcattccaggctagtccatcgtctatcatcagatctccaatcataagattcttcttttccaatggattaatatcaccaacccttacgaccatctcatacaaaataatccagtccccagcccaaagattcttattggaatgaatacttacccgcggtcgtaatagatgcaatcaatgacttaaccgtccactattcccccgagcaaagatgtaacaccctaatgctaaggcacgctacagtgctttttcaat

SEQ ID NO: 330699 - DNA, 335 bp, Cannabis indica
aaaaaaaaaaaaaaaaaaattatggacactttccatttcctgtttggcttggggactataacaaagttggacatttatacggggtaaaacgcctctatgatgaacttgttcagccataacttttgtacctcgtcctttaaagccttggtcgtccttttgttgaatagccttcatttttgttgtacaagcgtgaagttgggttggggttggggttggggttggggttggggttggtgggggcgggggggccgggggaaggcaagtctactcttggcttgattgtgcctccgtccttgttcatttggcctataagaaaaaacagacgcgtatgtaac

SEQ ID NO: 330700 - DNA, 512 bp, Cannabis indica
atataatatgtcagacaaaaaaatagtttttaaaattgaaagcaacattttgatgttttctgtttttagttttttaaaactcagttttttaaaaactatttttataaaattttaccaaacaacctctattagtttttaaaaactgttttctgtttttaaaaactgaaaacaatttttaagttataaagccaaacaaccccaatgtatgacataagtcaaaaaacaaaacaataatcatttatagataaaactaaatcaaagagatgataattacttattgtggtattattcctaaaactcctaatcaacatttgtttagttagttagtctttaattaattaaactgtcaaaaaggacaggttgcgtcctttggcctatataaaaaagactactcatctcatttcaataggaattataaaaaagtccatagaaaaaaagaggaagaggaataataagagatatacaacacaatagagagagaagttagagtgagaaattgagagagagagaga

SEQ ID NO: 330701 - DNA, 971 bp, Cannabis indica
aagaaatcttgattatctaacgaaaattttttctcaaattattaatccaaaaataaactaaaaattattcgactttaatagatctttttgtttatgtaagatgtcaattaaagtaaaacactaatgtttcatgaacatacacatgtatatgccaaaatcatcacctaaagggtcaatcgtattttttttttatttaatgagatttattttatttattttattatatataaataaaaagtgatccatgaatttctcataaaccattttatttttaatataaataaaaagtcacccataaatttctcataaattattttatttttaataataaacaattttatttttaatataaataaaaattcacccatgaatttctcataaactaagaattctgttatataggcacactttatatagaatagatattgtagttatagtagatatttcacttgtttttaaaaaatttagaataatttataatattaaacacatggttcaaattgttatccctattctcgaataaattgtacatgaaaatcacggaaggatgtcacgcagattatatattgttaatttacaccctttacttatcgtggttacgaaaggagctgtagtacccagaggctcttcccgccagcaaaggcagaaaggactctaaaattctcatcagccatgctgctgcgggaagagaaccgaagtcatacacgctccaggatggtagcaaattagttggtcgaagaaagccttacccaaactttccttgaactccctaatgcctaacccggagctaaacccgacagttgcatatcttctgacaccaaatcaaatcttgtctcctgcgtcaaaccttagcaatgctcatacatgctctatagctcctttttgtccaacagtttgtctattatttattgttttgtattttccttaaggtctaagtaatttgtttttgaaatctcgataaatattttggt

SEQ ID NO: 330702 - DNA, 412 bp, Cannabis indica
atggggattagcgaatctttgttgaacccaatgagggtgagaaccactgggagacaggtcttgattcgtaagttcaatggcaaggaatgcttcctcaaataatatttttacggagcttccattatctatcacgatgcagggcactaccttgttggcaataagtgcttcgataactaatagatgatgatgtgggaaacgtacaaattaacttagctttttcctagataaaattgatgggttaatccatgagtcccaacctttgtacaggtagttgggttacgtacttcctatatttcatcatgatgatccaactcgtgtgcgtatcatttcaactcattgcgagtgtgtcatttattttagactttctttactaaaattagaaaaaattctaaaatccaacaattttaatagt

SEQ ID NO: 330703 - DNA, 973 bp, Cannabis indica
gttctaattgattatggtgcgacacattcttatatatcaagtagagtaattgagaagttgaatagacctagtgatgtacttccaagaggcttcgaaatcttgttacctactggagagctggttgtctcaggtgggttcgatcccttctagtttttgtggaaggaagggaatcctcagtcaaactgatagcactaaatttggaagtctttgatgttattttgggtatggattggcttgcaaaatataacgccactattgattataaaagaaacctttcatcttgagggcaaggatccttttgtgtttgtgggtaagatacaaggatcctggattcccctgatcttagcccttaaggcgagagacttgttgtgtgaggggtgcatcagtttcttagcaagtgtagtgggtactactaaggaaccacaagctggaccggagcatgtacaagtggttcgagaatttctggatgtttttctagaagagttaccggggttaccaccgaagcatgaaattgattttgagattgatctaatacttgggctagagcctctatcaagagctccttacagaatggcgcctccagaagtaaaagaatttaaagtccaattactggggatgttggatttgaaatttacaagaccaagtacccagtcttgttcgtgaaaaagaatgacgaaactttatgaatgtggattgattaccgagagttaaacaagttgacagtaaagaacaagtatcctctgccaaggatagatgacttatttgatctgttacagggaaagaccatcgtctccaagattgatcttcgatctggttatcaccagttgaggattcgggaagaggatgttgggttttgtgcccaaaataaaactcatttcaatctattcagatttacttattaataaagatcataaataatattttatgttgcatggttcacattatttatttcatgattatatatataatgtat

SEQ ID NO: 330704 - DNA, 956 bp, Cannabis indica
tagcttttggtttagatcttctttttcaaaaaaaaaaaaataaataaataaataaaataattctttaaatttttttacttttacatcaaagtttgtttgggcctataattagctgttcaacccgcaaattctaccatatatacaccgaactcacaaacctatgagctagtagatattatatagtatatataaattgttaaataatattgttggtgtttagtattctctgcagtcccatactgtatatgtaaaatatattatacaatataaggtgtacatgacggtggcaaatttaatataaattagtgtatacatagtctaaaactagtggatttgaatgaaggtaggttcattatcgtttccacactaattaactaagaaacagtttcaagttcagacaaaatataaatcagatcagaataataggtcacaattattatctgattgaattgcgcatttattttaatatagagatatattgtatatgtattatgtagtgctagctatacccacctcatcaaacatatcacagaaggatactattattggtaagtttggtaggtgtgtacagtgctatactattataatgtctagttgtaaaaaaaaacacctcatatattcaataattttatttttctagaaagacggcagtggaaaaagaaatgagaacatagactgagacactaccgtaatgagaatgtccttcaagcagcatatagtttaagtttgcattaattagtatatatttgttgtttgatgtttgttgcaagcagatggcatgatttggtgaaaaaatatttagtcatttaaactgcagtgttataattaaatattaagcatatccaatagaaattagggctaacatgtaaaatggccctaaatttaacaattaaataataaatgtctatttttaaaaaattaacaaaatgtttgttcaattaaaaatttgataataa

SEQ ID NO: 330705 - DNA, 1091 bp, Cannabis indica
ggtgattataattagtacccctcctttaaaacattaaacaaattttttatacaatatataacaagatgaattactaaataaaaaatttattggtatgggtttgattcgtatttatttatcgtgcttttgtgtcgtgccatgtgtaaatttatatttctcgtgtcgcgtttaagtcaatatttatttgtgatatatcgagcccaaacccatattttacatagtatcctgccaaaagattcggcctgaatgtacgacttaccgtgttgtaccgaaacccatatatatttttttgtatgtttagtcgtgttggtacattccaaactcctaataatttaagagtaatttacaatgtaaatatttaaatttaactttcggttataaataattacctaagtttaatttttgacagcagtaatacttaagttatatttctgaaacttctgcatgtacctagacgttaagtagtaagtcaatgacccacatgactatccacgattggtccacgttataaattttttatcttttgtttaaaaatttattaaaatatacaaataaaaaatgacacgtgaatattgacttagaatttaactgttatgtatttacgaaaaaatttagtaatataacttaaagtagagcattattattgggtactaatagtgcccattaccttttataggtgaggttctacaattagttagtaatattctttaaaagttattttcttaagttatatgaaacataatacttaattacaaatatcaatataatatcaagaacaatgctaggtaccaataatatcttttataatttttctcaaaatattattactataaaaaattaaacgtatttatttattagtaaatcgaaaataaacttagttacttatttctaaattcttagaatcaagtttttttattaaaaggtgatatgtcatattgtattaaattaatttatgttttacaagtttgaaattccgtatttaaaattctcagtttaattatttaattaagtgattaattaaatgcagaataatgaaactggtactaaaaacagttttttccgtatttacagaatacaactctgtaactcca

SEQ ID NO: 330706 - DNA, 1410 bp, Cannabis indica
gaatagatgattgatttttttttataatataattatgttagtgaataattaattgcgtgtttatgtactcacttattgtgagtttaaacatgtcaattttgttaatcataaatacgtgagaattgtgataaatttattgtcgattaatttaatctcatacaaggctatttttcatttaattatcattttataattttattatatatatatgcccttggtgatatttgagaattttgtgtgaattttattattgttattattatgaattctatcgggatatatactgtgaaaaatgtgtaataaaataatgatcatagtttgtgcatatatataaaaaaaaattattgttaatatttaattgatttttcaatagtagaatttgctagaaataaaaaaatgtataactgccttattagataattatgagattaaaattattcgttgaatgtgttatgcttgttggtttttatggtccatatcagagttataaaagcagaaacagaattttgaataaacaatttttatctaatatgaaccataagtccaagagtgtcaacataatgaatatagattaaatctaatctaatgaaagaaattcaattaccttttgatgcctattagggtatccttgattcttttcgtattacaattgaacatacaatccaagaacttgattgaaaaatctacatcttgatcttctaagccaacctcaacactcaggaatagagtggactattagatcttaaaagatgatcaaatttaggtattacagtgtgtactcaattcatgagacactgtaatgaaattaaggactaatctcacatacatttaaaagtggctgagactagagaagagagagatggtgtgaggagaaagagatagaggagtgagaaaatatcaatcatgttttctctcctttcagctctttattttttgttatttctagatgcttaattatgatactatatattcctataattatgatactatgtatccctatatatagtgttatatataaactattttaattctttattttaaataaaagataaatatctagtttgattaaattctgaattcaaattcaaatacaaatatctaataattgaatatcaaaatatcagtagatcttttatttaaataattatcctttttaattaaattatcatccaataatatatttaattaataattgaaaaataattaattgaatttaattaatattagtttaacttttttttaatattaaaaaaaaatattattttaacttaataaaataattaaattaaattaatcatggacatttatatgtcattttacaagtgtagaatagtcctatacgtgtgggtcatatttcaaggtccaaaattaatttctcaattttgccaaaaataagatttattatttatt

SEQ ID NO: 330707 - DNA, 770 bp, Cannabis indica
gttgactagagatttagatagacaaaatcaactcatcacttatgttagaattgattgggcaacatcttttagaaggatttgtttgccaccaatggaaaataattgttcttgccaagccgataggtgattccacaacttttcttttatttttccaaagaaaattttcttgtccctacctgaataagaaggaagtaacaagtatcttttatggcacggtttaataggcatttgtagacactataccaaaatattgataagtgacatcttaaaaatgttaccatttcatactttttgtgacattttcatgaaatagtgacatttaagcaaatgtaagatattctcgtgtcactaaaacctccaatgtcactatttcccatatattagtgacatttgaaactatcaataaatatttgaatttgttataaaagaattctaattttatttttaaaaatagaattagtgacattttgtaaatgttaatgtaatattgtagaaaaactattaaaagctataattaattattattattttttcttaaatttatatttgtatggtaaaaatactaattatttatatgacaactttgataatcaaattaagtagacaattaaataaacatatattattgaaatgaaaatagtaatttcacaaaagaatacaatctgtcttttaaatctatactaggtaacgatactgtgcctcacgcggttgtttaaattttttttatttatgttgtaaaaataaaatttatattatatatattaaaaaaa

SEQ ID NO: 330708 - DNA, 913 bp, Cannabis indica
taattatgaaaattttaattattcacgttttttcgttaaatctgttgattaaaaaagttaattaaattcacaataatgtgcctaatctaatagagcattacatgagtaaattaagttcttaataaaataaatctcaacaataacatcattaatcataactcatgatatatctttttgagcacaagttaatcatattacgaccaaagaggctcatcgcactgtaatataacatcaatcatcatttagatcaacagcttctcaataacatccttgagttgctatagttgggatttcagttggcttccttcattggtatatgctttgttgtatgcttaaattaattggcgtagtgtgataaatttttattgaataaaagtttgtgtgcttaattagctgatttttgagttgaaataattatgatttctatgttgggtttgctctatcaaatagaaaaaactagattttgatgcaattaaagtttgagtaaagtgtataattgtgaattatgatgatttacatatttccttaagccttgaaattgttttgaatactggactttgattcagtttatggtttaggttttagaaccctaaaataagatctttataattgagtttaattatttaaattacttgagctttatttttattgatgtgtttacatgtattgaattgtatattcgatatggcttagaaaccaagtttcaaagtgaaattaggtaccaaaattgtaggaacatagtagcctcttttgctctagtcgctatttgtgactatcaaatttaatcttagcaataatgatgaaaatagagactttgttctcaataaaagatatcataatcaaaaaattgtaaatatcttgctagatttttagacagcttgagtgactttattattttagtaagtaacggtat

SEQ ID NO: 330709 - DNA, 966 bp, Cannabis indica
ttttctctttttcttttttttttttttcctttgttcttctttcttctaccttctacccaggaaccctaaacacctatcccattgtttgtattgtaagaaatatattaaagctatcgatttggtaataaaactaaccatgcatgcatgataggatcttgccaagatcactatggagtcaccaaaacacgaacctcttttccagccattatgagaactcccactaaaacatacatttgctcaaaaatatctaatcgaaacacacaacaaaagaaagcaactattctgtaaagatttcattttgttcccatcgaacaatcgaaaacaaacaaagatttcaaattttcattatgtcgaagcctttcttagatctctgtcggaggtgctccctctggctttgagcagaaagaaagagagtgagggacaccgtggggagagagaaagggtgaggaagatttagatttaggggtcttcaagggcagggagcaacatatgaagtctgttttggccatagagagcagagttgctgcgtttggctccgagcagagagaagtcgagaaagaaaggaagagaaagtggagaactcgagggaagaaccaaatattggggttctcggaggctcgcgagtcttgcggtgtggtcctcgtccgtcgattgtggtcgggacggttcaccaagcatgggcaaggtgtcgcaccagaaaagaaagaagaagaagaaaaaaaagaaaaaataattttaaattatttttttatttttaaatattttatgtttttttaattattaaaaataggtagaccaataaaattttgcgaaggagttagagcaaaacgattgtaaaaattgagaagtataaacataatttttccaataaggagttagatcataccaaagtcaaaatttctaagaagttttaaccgcaaattaacctatacgacatatgcatacatacaaaaagaaaaaaaagaa

SEQ ID NO: 330710 - DNA, 955 bp, Cannabis indica
aatgtgatttgtgggaaaagaaagattgtaaagaaaaataaggaatgatatgattggtgtagttttaagtaaccaaatcagctgtcttttcttttcttttttcttaaaaaagacaataataaaaaataaaaaccagcataatttgatattaaaagtgtagggaaagaatttgaattaggtatataattattattattattattatgattattattattattagaaaacgtggtcctttgttctcatcttattgtttattctttacttggattttgtcctcaatacaaaatacaataacaaagcctcttttccctcccttacctgtattgctacaaaaaaaaaaaaacttttttaatacaaacaaaccaaaacagaacaatacacagcaagagcctattgcagcaggcagtagctcaaagagaaactaccaattcttaattacattataaaaacacaaatgtttcccttttagcttgttcaagttaacacaaaaaaacctcaacttaatagcatttttgatatccctactaacacaaaaaggagtgttacaacagagattaaaaacactaccgttcctatttagccacaaaaaataaatggcagcagccataactgagttcaaaatttaatcctgcaggttgtgaaggggcttcgaataccagtcaaataaactagagaaatcacagagccatggcagagcaccaaaccaattaccaatatcagccaccactttcttggtaaaacaacagtctatcaacaaatgttgatgagtctcactttcagcttcataaacagggcataaatcttaaggaataggcaaaattctgttaagatgatccttgtttaaaagttggttgttaattgcttccgaatatatgaaaggaatggcaaatggggcgggtctgccccgccccgccccgccccgacaagctattgccccgccccgccccgcccc

SEQ ID NO: 330711 - DNA, 727 bp, Cannabis indica
aaataacactcaaactaattaaagttaagcaaaataaacaccttttcattactctcctcacaatactttagtttaaaagcataaaaattaactctataccatagagttatcaaatagctagttacatcaaaatcaagtgaagtataagaaggcattttggaatcgtttaagtgttcctaagcatagatttatgctttggcaggctttaaactcccacgacaaaagacttattgtcaagattttatattcttataaactctcttgattgtccagttggtggcctggataaggagagttattgccatctattctttgactattctttctcaaataaagtggtgagttttatatttcattggttgggttttcaagcttggcctttaaatttcgatagttggaagatttggattaatactataagatcaagtcgtttggcttccgtagtgaatgcaatcgttgtagctacagtacatggtggtggcgacaacgtgatcacgaaagggctagagaaaaggagagcgagagaggctgggcttaggggttgaggattttcgataaataggacctgaggtccttttgaggtgagaggggggctagagattgtggctccagtctggttctagtgatgcacgagggaaaccaaaaagagagaggtatcgggagaggaagagagagagagattaggattttttgaattataaatatttgtttttttgtaactttatta

SEQ ID NO: 330712 - DNA, 661 bp, Cannabis indica
ttataagaaaaaaaccgaccaaactgatcgatgctcacccctagttaaattaatgaaacccgaactgagtttggtgggtaactgggtgtaacacgaactcggcctataattttttaaactcatttttggtgtattttttagtgtaaatgtgacgtcttggttattattttggactctgtgttttgaaaaaattattgattgatccttttgttttatcaattgataaaatagatcatgtattttctaaaatagtataaataagtctctgagctcaattttttaatataaccaacttaaagacaattcttaacacgaacaaatacaataaacgtagccagatttattataacacctctagatcgagttattattaaattttattttgattaaaaaaaaacagttcaagttactatttagtactattttagaaaatacatggttcaatttatcatttaccaaaacagagagtcaagttagaaatttttacaaatcacggggtccaaaataatgtttgaaccatccccaacacaacacttgggctacaaattacgccacatgtaacttttgttacaaagggaaatttgattttctatacttacatatacctaatattttatccctaaactaatacctatcactattgaaaatatatgatcacttt

SEQ ID NO: 330713 - DNA, 608 bp, Cannabis indica
acaatacttgttgtgactaaaactaaattagtgataacttgtgtttaaatactgtattttagtcacaaataattttttgttacgactaaaaattatatttagtgacaaaaatttatgttgtaactaaaaagttgttactaaaaatagtagttttttgtagtgactagtacccaatagtaatactaaaaaaagagagaataatttaataatgaatgtgatgattatgaagtgatggtgacttgagtgtgatgaaatgaggtgtataaagaggagcatatttatgtgaggaaaaacaggaggagaaagaggtgggggtgagtagtcagtcaaaaagaagttatagaagagagtgaagaagaaagagatgtgagtcagtagtagtagtaatgtattatataataagaaggggaagctttaggaaattaaagagactagctagtactactcatgacttcaatatttactcatggcaaaaactttttgtcactttaagatccaaaagacaactcaaaggactggttttgtgggccacattttccaactcctattgaccaatcaatcatgttgtatgatttttcgcgtgtttgaacgtggtcatatcatcatca

SEQ ID NO: 330714 - DNA, 1814 bp, Cannabis indica
caggtatgccgcgcttaatgatcataagactcatccggtttgaacggtcccacttctcataaatcctcctttgctcggaggtaccggtatctgtaagaggagcaggacgatccatccttaatgcaaggtcaagatccatgcagccaagaacaataaaaaaaattcattccaatccttaaagttattgccattaaggaccggtaccaaatgaaggttagcagatacagtagcaacagctgaaaagaacaatacaattacataaataacatgctcatattagaatccaaataaaactaaatttaaattatggttaatcccatcaccaagataccaaacacaccattaatattaagtctttggacagtaatattaattgtaagcgatactctcgttgtagtgatcaaacattgacaataaattatgtcaaacaatatacaatctttagactaacatattattcacacgaaataccttataatggttacacatttattaccacaaatatacataaaattcaaccaaatattaactcacctttgggttaattaataaatttattaattacatacacacaattatcttaatattttaactgaatcaatttacacaaaagagatcactttggtgatattttgtttcaattaattcaactaaaaatattaaatattcttaattaataaatttaaaaccataattaaaaatttattgttaatatattatttttattatttcttaaatagaaaaaaaaaatgtattgtactatgttattattataaacatagtaataagatatatattaaactgtgtacaataggatcaaataaaacaaaaccaatatatactatatatacattatgctgaaaatagttgaaatagaaacaactttcacccaattcaatgacatgcaatattgatataactaaaaaaatatatacacatatattcaacaatcactcaggcagaagcagaaaataaccaaatcgcaaatcgcataatagcagctttttatttctttttctttattaatcgcatatataacgattataacctcaaaaactcaaaccaatattagtattcaacaagttattagcaaatttaatccaaaaatatatatatatgactgcaaatatatattttcatagaagatcattataccatatatttctcaagaactaatttagggatgctcttgataccacatgttaagaatactgtaaaacttaatttagccctaattaattcatgagaataaaacaataagattaaggaatagcggaagagtaccagagtccattgaatcgcttgaagaagtgtatgatcttccaatttcgcatcaaaacctttgaaactttattttcctgatgatggtacttcaggaactttgaaaaatgacgatacgatgaaaaatggggatcaatacttcttatattaccaactgttacaacagctggtaatattcattaattatttctaagttggcccctcatcaaatcataaactatctaattggtatccacatattaaaatcatgacaattttgcccttaagtcataaactttattccaaaatagaccacataaatttgacttatttatttgatgaccccaacacacatttttatatatagttgtgaccccaattatttctaacatcgggatcccacaaatattttcacaaaatattacaagtcgattttacgtgccaacctaagcagcaaaatccgagttacaaaaatacatcactggtagaccccaacccgcttggtctagtgtggcccaaacatgtacaagcaccgccaagctctcgcactcatg

SEQ ID NO: 330715 - DNA, 621 bp, Cannabis indica
tacatacatatacatatataatatgatgaagtaagggtgaatagtccaaagtaagaaagaataagaggaagaagaagtaagtggtgtgatggagaatagaagaagaagaagaagaagaaatgacaaaagaggaaagcgttatttgatatttttatttattaaaataataataaataataaataatagaaaaagaaaggcgttgacagagtggagtcggagtgagttggaatgagttgagaaagatgactcggttattatttaagtaaagaatggttacaaaggccaaggcgtggtggtagtagtagtagtaggtttgctttttggtggaaagaaaggtggtggtagtgccttattaattgcgggacccttttctttaatgcctctgtggctcccaccatcttaactctctctctttttttatagcactcaatattaaaattctaaatatacacatctattttaagaaaaaagaaaatatttattagagatgtttgtttctttatttaatttatttaaaacatctcatacatatatattatatataaattgcggctatattaatttataaaaaattatcggagatttttttaaaataaaaaaaaaataacaaaattattaaa

SEQ ID NO: 330716 - DNA, 930 bp, Cannabis indica
tttagtcaaaactcaatttgaacgtaatataaaatctttttaatgtgacaatgacaaggaatatattaacgacactcttgagcagtttttcaatcgtcatggcttagtctttcatatttcttgtccacacacatcgtctcaaaatggtatagccaaaagacacataaaatctatcaataatatcatttggaccattctagctcatgcttcaatgccaccatcctgttggcatcatgctctatctatggcaacacatcttctaaatatatttccttctaaggtcttagattatttttcacccgcacaaatcctttatcaaagtgaccattcttacttggatttacgtgtttttagttgtttatattttctattgtttccctccaatagtattaacaaattacaggaacgatcttccccttgtgcctatcttggtctgatatgtctagttgaaattatgattttttgagtgataatattgatccatcaataaatgttatttctcagaatctagcaccaccaaatccacaacctaagccaacccaacgacccaactctccacctattcctcataatgggtcgcagtctcacacgagccaaaccacccccaattctcaagcttctcaatctcagcccactactcatgtagcccagacgctgcagcagtcccctccaacttcttctcctatctcgacctcacccacctctcatggcccagtacatggcccaaattcgtcacctgcatccatgtctacaccacactcctctcctaggcccaataacccacgctccaccgcatgaaaactcgtcctatcaatggcatttataagccaaatcctaagtactctaccaattgtcatgcaaccaccactaaggacatttctcctattccaaaaaaatcctattagtgcgctccgtgacccaaattggaat

SEQ ID NO: 330717 - DNA, 865 bp, Cannabis indica
cacatattgatttgttcttacctattgaacctaacactaataaagttactagtattaagatatatatatatatgttaccctcaattgtgaaccactttaggaagttttcgtctcatccctttaaaagtcttttccactagatctctagctggtggcttcgtaaacggatttgccaaattttaacttaatatcatataggatattgagataactcctatttgaatcaactcactcacatacccatgtcttagactaatatgtcttagactaatatgtctagacttctcattttatacttcactataagatctgccaatgttgcttggctaccataatgtatcaaaattgtaaatacattctctttgattattggtatctcaaccgaaatatcttttaactattcgacctcctttccaatggctgctagatttatgaactccgctgtgagatctcaatttttctcaaatagtcttgagagccaatgattacatgaatgcatagaatttcatattatgcgaagtgtgcattaatttattaattgtagttagatatattttatagttatatatgttattatgattaatttttacattcttaagtgtttgttttatagtgaaatgctcaaaagttgttccttggtacaagaattagatagtattaaactttatgaatttgtgtgatatatataaagtatatattattttgtaattaaaattttattagattgagaatatagtattattattatgtgaatttttcttgtaataagatttaaagaattaattaattaattgagaacaacttcgcagatttcaatgtctatgtagattgtatcaaaggaaaacagaccaaaactaagagatta

SEQ ID NO: 330718 - DNA, 1021 bp, Cannabis indica
tttaaatcaaattatatatttcttttaattttgaatttacatagaaaatattgtaattaaatttatttttaaaataataattatacttatagaaaattataacatatttaacttataataattttataataatcactcttaaaataattaaaatatcatgaattcaatattttgaaaataatatttgttttctttacttatatttaaattaagatttcaattaatttaatatttttaaaactctatcatattatattaaataattttatttttcatatttttgaatttaatctaatctccataaaaactcaatctaatccaatccataaaagtaaataatgaattggttattttggattggttattttttaatatttaattatttcaaaaaaaaaattattctttttcacataactaacaacaaaataaaataaattattagttttttatgtctctgttatactcatatttcgaccaacaatatggtgttgacacatgtaaagaaattagttcatgttagaaagcaattaatgcattcaataaacttaataactaccgaatgataagattggtgagatggacgattagaagatttatctcgggaaatacagaatacacaacagaatgataatacttggaaagggtagataataaatatttagagagcttgcagctcattgactcacatacccgcaagtatgctaagagtcacattttcagcatgattcatctcagaattattatactataatggtatcttgcgtttgtttcgcccaacactatggaaggacacgggaagtattactttaagtatacttaagccctgttaaccctcttcagaataaagtatcttgagaagattatttatattaaaaaaaatttaaaaaaaattatataagagtttttcttaaataacatgttcaattgatataatatcataaaattttaaaatagtttaattaattaaaattaatctcaaaattgaaaagaacattataaaaaattgaatcttgtaaaaact

SEQ ID NO: 330719 - DNA, 835 bp, Cannabis indica
gggttcatctacaaaagataagacacaagatgagtatttggctgagatatcgaataaaaaacaaacaaagcataccgatcaggtccaatcaaaagatcaaaaaaggaaaaatttcgcgtgattaaggttcataacctagattttcaaaaccttagattaagggttaatcttcactaaaccccgaatgggcaaagtaagaaccgaatatcgtgaaattaaagtcagaatatcacaacagccaagttacatggtcaattacaattgaagtttcacatttctaaacctaggttctctacagttttcctagaacaagttcaagattattgaattttctacaatgaaaacccagaaaattagagattcaaaagttaaagaagaaaaagatgaggaacttactcactgtttaaagctttgaggttgcttagatgacgctgatcggcactttttggaaattcctcgaaggatttgagagagaaaggtgttcttgctctaaaattactaaacaagaaaatgctaaaagtggtttattaggactttttgccctatttataatcaaattagtgaagagttgtaatcatttcgaattttaaatgcctcaattttccccaaaagtaaacgttgggaaatcaagtaatcaagaacctggacaagcgcaaccatcaaaagcatgaaaatttctgaaaaggttcgagttacgaatcaattagcatttattagccgaatattgaagagacctttggtcaaaatcacatcggataaccaacaggcgcatcgaacacgtgccacccgttcagacacaaattctgttggattttgtgctctaaataaaacccat

SEQ ID NO: 330720 - DNA, 522 bp, Cannabis indica
aaaattaaaataacattttgatattttctattttctaattttttaaaactcaattttaaaaaacagtttttaaaaatttttgccaaacgatccctattagtttttaaaaattgttttaagttttaaaaaacagaaaacaatttttaagttatgaagccaaataacctctaaatttccctatgctattactatataaatgctctaaactttgatggaaacactcaattgatcaaccatttaagcatatttatcttgaattgcaaaattgaaattgccaagtttggcataaaaaagaaaagaaataaataaagaaggaaggagagatgaataaattggcttgtgagttctaataatgcaccgagaatccattatgttttgttagtgactgagagttaattacaattttttagtcaacttctatacttaaaattacatgttaaaatagttttttttttttttttcacagcggtattcgttatatttacgatattattcttgtaattttttaaaaaattctgaata

SEQ ID NO: 330721 - DNA, 688 bp, Cannabis indica
taaaatattaaatgatgatcaataataatattatatttttttacttcttgtgtattggagtataatttttaatagtaggctaaatataatttatttttggtgataaatttaacacaaattttgaatcttacattaaaaatagtcttatatttggttgttttttgaatctcatttaaatattaaatgataccaaaatacttttaaaataaatgatgccaaaataaaagcatacgataaacaaaaaaaaaaaatgagtgaaatagtcagtgcgaattcacaatgcagttttcaagaatcatggtttgaattgaatcactcgtcataatttgtataatatattatattcttacgagcattaaatatctattgtgaaagaaaatattgtcaaaattatttgagatagtactatagacaacggaatatattcaccagaaaaaaaaaaagttcaaaaaacaaatcaaagatttttttttttagggtggaaacagtaacagaaccaaggaaaacaaatcaaagatctatagctcatgtttttcgaataattatgcaaaataggccattttttctcaagaaaatactataaacactctcaactcaattaaaattgggactaagagcatcacaatactaaggtcgtgtgttatatttaagttatttttttttaatgtagtaaaatataagtcaaata

SEQ ID NO: 330722 - DNA, 1113 bp, Cannabis indica
gacttagttgatagtattgcactatcaaagtggagtaactgctatggatcaaactgagataattgctatggattaatcaggtacgcatacctaattattatatattattattgtgttctatgttatatacaaattaatcttgggtttattattaatttatataacactgtcatcatacttttttcttgacgtactcctaccacgaaattctgatcttgttacaagaacttgatcagtatgagatatactaatcagttgcttgatactatttgtctccaaaagagcagttgacctctcatccacagttaaagtagtcttttcaacaaaaagtatagtcactagtgtttcatatgattttggtaaagaagctaacaaaataataaatttatcttcttcatcaattttgacatctacacttaataataaaattatgcacttataaatctatttatatgatgcctaacattatctcctttaatcatcttcaactcatataagtatttctttaaatataatctatttgttaaaaaaattcacaaataattttttttttttacttttttcaaaagtcatagtaacatatttcgttcattacactactttaatttaattaggagctaaatttaaatgaatagtgtttatcgctttcatttgcaactactttcaatcttcatcagtcatactcttatgatttttattttatagtgtttttatgagcttttgttgtacgtgctctgccataaactgaaattattattcccatcaaaaaactcaatctcaaattttgtagaagacaccatctttgacattttctatattgatctgaaccttgactatgataccacttgttggaaaaaaaaatgataaaattcaagcgcaacgaaataacaaagaaacaaagcaaagtaatttactcagtttggtaaaactaccaaacccacaaagagagatatatttcacttatcacttcaaaattacatatactctctatctcaatctctccacccaaatctcaatacaccctttgcttcttactcactctcaccacataacaaactcacacgcttctctttttcacaactcactattttttttctcacacacacctctcac

SEQ ID NO: 330723 - DNA, 923 bp, Cannabis indica
tgaagcttattaatccactcaattgccacagtagaatcactattagaattgagacattgaaaccaaatttacgcgcaagagtcaagcccagatgaatggcaagcagctccgccacattagcataaaactcacctaacacacctgatgaccacactaggcaaaccacactcgctgcatcctgtatcactcctccaaaacaacaaagcccctcccttaaaccactgaagcatctgtcactagagcaaaggaatggtggtggcatccaccgaataggtcggctttcaactgggtttacaaggctcaatggcaaatgaagacctatctgaccatactacttaaactccgcaagatggttatgggctaaatctagtataacatcctatcttgactgcttgttgctaaataatactgagtttctatcataccacaaccaccaaagagttgtcatcatcaattcaaaatcctcacgggatagcctgtcaaagagacatatgagaatttcctgtattggtccataaacacattgatggagcactgaccacacccccaacagatgccacactagaatcaaaccagaatagaaaaataaagcatgctcacactactacaaaattgactttttgcattggtcaacatgtcagtcaacactaaataccgacataaaaagtttggttctaaattttgcgtcagttgctatttgacgctactttgcatcagttgaaaatagacatttttagatattgcgttagttggaaactgacgcaaagtagcgtcagataaaattgacgcaaataaacttaaaaaaatctgtattatactaattaatgggtcagcccactacacatacctaaccctaacataccatatatcataaaattctaaaataaacgccgccttcagctctctatctctctctctctcac

SEQ ID NO: 330724 - DNA, 717 bp, Cannabis indica
ttgattccaaaagtagttctatcatcttatatatatatatatatatatgtacattgtttgttggagagaatcagaagcagcaaacaagtttttaaaataggaaattggcacaatcttcctcatccgtccagtacagtcataaccttgtcttctttataacgtcttatgagacaagtaagaccaaatgactaactaggggattctctcccatcctaattaataataattatcataaaaaaacttaatcaatattaatattgatatatatcattgcactttgtgaaattatcatatataaatactaaaatgtatgcactgcctatgttttaattaatgtaatatataaggcaaataatctcaattggtgtttgttctacattttgcttttagagttaaaatcttttccattacaaattggatacaacacttgtacaaaattcataagaggaaagaacaaagattggaacgcttactaggggtaaaaaagtctaaagatagagttggaaccctcttcagctaaaatccaattgtgaaaaatcaataattctaaaagtttgggacgtattttgtgaaattagtgggacaagtggactgactggaatgcttctctagctagcttacactacaagaaatgtcatttttgccagcacatttttgtgttggcaaaagttagtattacgctggtaaaatagaatttacttgtgctgtgttggcaaa

SEQ ID NO: 330725 - DNA, 2334 bp, Cannabis indica
actattgagaaaattcttaggatccccttatctttgtaatacgagttaagtagctcacctttaaactaagcttcattattattgatgatcttgtaaggtattctgaactgacatatgatgcatttgttgatgagtgaaaccacttgtttggtgattatctgcactgtaggggttccgcctctacccacttggtgtagtaatctactgccatgattgcatatatttttcactactatacctattggcaatgtgccatttctatctatcccctacatggtaaatggccaagggcttgtcaaattggtgagtttggtcggcgagtgtctgcttaagcttgcgtgcctctaacacttgtcacatcttttaggaaactcggtggcatccttctctagggttggccaatagtacccttgctctaaaattttgcgggtcatggatagccccagcatgcttaccacgttctccctcatgtatagcggaaaagactttttgtgcctctcctttgttgatgcagtctagaaggggagttgagaatcctctcttgtatagtctcccatcgactaagacgtaaagtgtttccttctataccacccagcgcaccaggtcatatgtcaacttgggcattgggtgctctttttggagctttcaagatgtcatttttatacttttgaagttcttgaaatcgagtacaaggcctcctacctcttttttgaccatgccattgcatttggatgactgaaaccaacacactaggttaattgtcaactaggcgtagggctcagctttcatgcccctgggattctcgttttctctccgagtttacttgtatcttcgttatttctaatgacaaaaaaatgcctggaatatttttctaggataatgattggaaacgacccaagttgacaaaatgtcaacctgggcgctaggtctagtttttggcacaaaatggctctgtttgattcctgaaaacacttgtatcttaattatctttgacaaaagtggagaatattcctggaaaaattctcagaaaaactcctcggaaaggatagaggttgaaaaaatgtcaacctggacactggatccccctttcggcctccagattaatcattttcttccctaaaagcacttgtttcctcatttttaatgaagatggacaaaattttcaagatagttcttcagtttgatgtttggaactgccgtaggttgaaaatatgtcaacctgggactaggtgcctaaggcacctggtgctctgggtgctaaaaaatgaaagtgcttcgaatctgattctgatacctcaaatatttttgtgacatgttaaattcatgtcccagtataaagtttgacccaattgcactaagacggtctcaaaaactgaaaccctagtaggggtgtcgacctgggcgctaggtgaaatcctaggctcctaggttgacttctgaggtgttgtttcgtgtattttcaacttgcgggccttggacttggatgcttcatggtacaaaatactgaaatatagtaaattggaaacaacttggtgcgatctaaacacccattccaaagtttccgaagtcaacctccccgcaagactaaggacccctcccaagtcgactgctatgactcgactactcaactccaggatattttttttcttgccatgtgtcaaacattaatgcatcagttgggtaagttattatatttaagtgttatataactaatgtacattttaatattgtagtttagaaagaagcaaaaatacgatgtggagacagagttgctactattgcaatatcaatggttatcgaaatatacacaacacatgtactagctagatttagacttttaattttaggcaatagtactttttttctgtttttattagtataaggacttattagcatgttataaagtatactttaactttgttataatataattaaattatattttgtaacctttaactttgaaatataattaaattgattttttttctttcaaaataaatatttattcttataattagtttttaattatttcaaaaaaattaatatattaaaattaaaattaaaataatattttgatttagacaaataattacaaaagaagaaaaacatacgagtagccctacgtcttcggttattacataataactaaagacaaaaaagaacctatctctttggttattatgtaataatcgaagacgtaggatcttccctgaggcaactttgaaatttagactccacctttgtctttgcttattttgtaataactgaagacataggcactctttaatttattccgaccctacatctttgcctcaaatgacttcagtagcgagt

SEQ ID NO: 330726 - DNA, 756 bp, Cannabis indica
caaatcttagttggtctaagtcattaaatttttattttttagacaaaaaataatttaaatatacaataagaaaatgacacgtagatattgacttgacatttaatggctaggtacctaaggagtttccaaaatataatttaaatatcattactactaaaaattaaacttaaacacttatttacaattgagaatatatttttactgtaaattattaaaattattaatgagtatgtaagaaaaaatcctcaccaatatagccagcaatacaacgatcgttgacatccgaagaagaatgtgaactctcattttgtaaactaattcatttgtttgcatttaataatagtcttactctgattgggtgagatttagactcatcaagagcatttgttttatattttcctaatccacactttttgggtcctaaaacatctgaccgaatcagatatataatataggcacttaaaaaattttcagacacatatatctattctatttcatttcttttctttccattttcgtttatttttgttgcaacatcacctcaatcacctcacatttcttctaacatgtatatattagaaagattctcattacaagagagaataagaggattacaatcaaaatactcaaaatacaaataaaagtatttcatcaagattacaagaaatctagagaagaagaaggataacacacaaaaagcttgaccaaggctcaaggacctttgtcctaaaagtcatttcctccctcatatagaca

SEQ ID NO: 330727 - DNA, 1493 bp, Cannabis indica
agtccagttttgggtttgagtctggggctggggtcgtggtccgagtctgggactgagaccggagctggagtccgtatctaaggccaggttgaggtcggagtccgtatcctaaggtctaggttgaggtcggagtttaaaatattgattaagaaaaaaaaactatttaaaaaattttaaaagtgatttttttaaaaaaataaaaaaactgattaaaaaagtattaccaaacgtactcttagttggcgtttagtaacacttgttttaaattttttaatcacaaaaataaaagtaaaattttgtttttaaaattttggtaagggtaggaaataatataattttttaaacttgtagttaacccagaaccgaaccataggcattttgtggtattaaaagttgaaagaaaagaaactatgctgaaatgagcataaaaaagaaaatgccctctttagacttgaaaatttttgaaatttgaatcgtgcacagaaaataagataagataactataaatagattaattcagaatactgtgggtaactttttgtttgggagaaagaaaatatttgcaaaagcaagctaagctgaagattggccccaacgtacatcttatatatgaattatgcggtcggcaaaaagaaaaagcgcggtaggactttaaaacgatgtcgtttgaactttgaaagaaaactgtagctaggtttgcacttagaccgatggttggtggcgacaaattaacacgttggcgaaagaggataaggacacaccgtcttcgaggctctgtacgcactacagctttgaatagtgctatctttaattttaacttttatgcttgatcagtattattgtaccttttatttgggaaatttagatagattactaatttttttcaatttattatatttgtacttaggcggtaatttttttttatacggcagtataactttttttatacaaaagttttttatttttttacttaccggtatctttataagattttcctacatcaaaatttaaatttttaattagaaaagttgagggatgtgacaaaagtgacacattttttactttggtttttttttttttaatttaaacggatataaaaattattctttactattatttaatatttaacaattattatataaatcctatttttcaatatgctcatcttcttattctaggtttttttttttttttttttcaatcagaaacttctccaacccttcaaggacttcacttaaatcctcattctctccttctctttctgcttgatttgaagttagaagagagatttagattgtttggctctctattttcacatgaggctaggcgatgagttagagctttagttaaggtcaaggattgagtatattatatattatatagatatgagtgcactcttaatgggtattacccaagaatgggtaaaattaaaaattttaaatttttatgcttaatttttctatctaattaaaaaaaatatcttatttttatat

SEQ ID NO: 330728 - DNA, 841 bp, Cannabis indica
tcactaatccgagccaacataatcgaaaatgtcactcaatacaatgtcccaatcccaactctctctctctctctctcagatatctctctcaatttttcactataacttctctttctactatgttgtgtctctctagttattactctccttattctcttgtgaaatgagatgagtagtcctctttatatagatcaaaggactcaaggatacttgctgtcatatttgatagttaagttagttaatgaacaactaactaactaactgaatcttagttggggatttaacgaataataccccaaattctaccttatttcttcaagccctaataagctaagcatatctatccaatggagatggtagtactttcatgtgtacctacttagcaactaaggttgagtaagttcaagaaatacttgaacttactaataagtaacaccttagtgccaatatcagcagggttttgttctgacttcactttctccaactcgattaattcttcttctatcttctcctttatccaaaataatcgaatatcaatgtatttttccttctcgtgataaattggattcttgcacaaatgaatcaaggattgactgtcaaaatataccattgcctttccaactagaagcttcaactcctttagaattccttgtagccatattgcttctttgaatgcctctgtggtcaccatgaattatgcctttgtagttgaaagtgctactgcagattggagctatgatttccaacgaatacaatctctattagtttaaaatacataagaggtagtagacctcctagtattcttacttgatgcataatcaacatcaacatatcctttcaa

SEQ ID NO: 330729 - DNA, 856 bp, Cannabis indica
gagagagagagagtgaaagagagggaaagacggaaagagagtgtgaataggaaaattaaatttgaggggtattttgggtacaaatgagtaatagtggaattaatttgtataaattagtggagggtatatattttgaaatggggtattttattagggtcaaaaattgaaatttccctttgagattctcccattccagtataattaattttttttttataatttataacatatatttacatggtgcgcgaagcgcggctccattttttaatttttctaataatgagatatatttataattttataaactgaaaatagaactccccctaaaaaaaaataaaaaacaccaacactttttatttgaattttgtatttgaggtaataaaatacgatttataatggtaaaaatggaaataaattctgcaagaccaagtagagaagattagacgtgaaatgactggagagagagagaaagtgaagggaaaaaggaaatagtaatcgtcttcgtcagtttcttttcatcataacatttttcccgccaaactcacaattccattttttccttctctttccggacgactgacctttcctttacttttcttcactctctcgctctttagcttcttctctttagggttttgtttctcccttattcttttaaccctagactagaagaagcacacctcagtcatgggggacaatggaacctcttcttttcggcaatccaaagcaggtaccgttagaaggattcgattggagaacttcatgtgccatagtaatttggttattgagctaattgaccgggtgaattttatcactggtcaaaatggaagtaaggctcttcctctctctctctctc

SEQ ID NO: 330730 - DNA, 1217 bp, Cannabis indica
gaaaaattactttttcaatttaaaaaaaatataacttatacttatcatatatttctagttataagtaggattgaattagttacagatcatttgaaataatatccgacatataattaaatctgatcatgcttaaaaactttgaatttatccaacggtcaccattcccttaatatatatgtatttggtggtataggggttagaaaatttattattattttgtaaaataatattttcgtttttcactccaatttttccttacaatttattttatcaatcttttttgttttgtttgtatggaagtttaagttacaacttttttgattgagggacaattttgaattcatattttttacaagttaaattatcaaatcaaaatctaatttctagtgaaatctattcctagaatccagttagctgagctaaggtgtttcatctcaaattctttgttcaacatatttttgattttgttcatctcctatatgtctttgcatgcaatgaacatgtcatcaacatagagaagaagataaacaatagttttggctttcttgacatatacacaactattataagagttctttttgaaaccattttttagtacaaattcatcaaatctcttgtatcattgttttgatgattgtttaaactatacaaggatctctttagctgacatacatagttctttttttccttttacttcatactcctttggttgcttcatcaggatatttttttctaaatctccatgtaaaaaaattgttttaacatctaattgcactaattttaggtcattaatggccacaatgctcaacattgaccttatgaatgtgtgttttaccactggagaaaatattttattgtattctatccattctctttgtgaaaaacccttagcaactagtcttgacctagggtaatttcaagatgggtgacctcctaggaagtttttccaagaaacgtgcaagtaagtacaaagcacgctgaaacactcgtgttggtctgtagggtttgtcatcagtccatgaagcagcgagagtgacgtgcttgtgtataagagtcatcattccgtgggtgtaagggcccaatagaggcttgaagcagggacgttacaatgtctgtatacccatttacatcttatgaccttatgaccttctgaccattaggcttcctcaaaagatagcaagtgttgttctcggtaagtgaatgttggaaattatttt

SEQ ID NO: 330731 - DNA, 1030 bp, Cannabis indica
acgtgattatttattgttcatatatctagaaacctatttgattaaaattaagattataagattaattaattgtgatttcttcctatacacataataataatctcacctaataactaataatatttttttttaatttttaattgtatcactttcaaataacataaaaaaaaattagcataaaatttaatatacgtgcctcgcacgtagcttcttgctagtatatatataaatgagaaacaccttactttgaattgtgtagttgagattaattacctattattgtatgtaaataatgtgtacaattttaatttatctcaatcattattctatttttgttttttgaaatttttatttgcatccaaaagattataaagacattcattttgttattttcaatttctatataaaaaaagataaatctctaatttgtacatatttatttttaccaatttttttttttcacttttttttggtttgaaggaagcactaagttaaattgaacaacatgggttttcacacattgtggttgagttggactacaagagtgctattaatgctctttatagttcaactcatagagtctctcttttaggttgaattatttctgattgtcggattttaatttttgtgataaataatatttgttgtgtttttgttaaacgatctgcgaacaaaaattgataacttttggtgactgttacttattcttttgttagtcataactatagtgggggtttgttcctgctcctttttagataattattacagatgatttgtctattaattaaattataattttcttgtgaaaaaatatatatcaaattaaatattttttaaataaacatatttctaaaatattaagacagacttagacaacaaaatctataaaatattattggaataaaaaacttttaaaatatatagataaacatctaaaaaaaaacttatattgaaattaacataaaagaatattaggagtaatttctaaaaattaatctaagtatttttatttaatattatatatatatat

SEQ ID NO: 330732 - DNA, 1016 bp, Cannabis indica
aattaaaaaataaaaataaattacctaatcaaaaaagtgtaacaataaaatttattcttttattgtacatacaaaatgagtatatatatataatcacatctaaagagcacaccaatgtagccgcaataacttaaaaaattctcaaagatcgaaatctcaaaccctatttcaaaaataaaaaaataaaaatatattacctaattaaaaaaattaaacatacatgtattgcacttaacattacttattaaacttaattaaaaagaaacgtggatgacacacaacattaatccagtatgtatattcatattgcttgattcattatatcattctcttataataatacatatttttcaattattcttattaccctaatttttcatttagaaattcttgattcactttcttttaacaataataataattttattatctaattaactttaaataataatatttttaatataataatttatcataaccaaaaaattaatagtaattgtttttcttacaaaagtaatagtaatcactttaggtaaagaaaatcttaaaaatatattatataatgtaaaaagaataatttgtggcataaatatatatgtttaattcctagttgcaaataaatatttaagtttaaatttttgcgatcaagttatatttctagaactttataagtatttgaccgttaaatatcaagtcattatcacatgtcattttcttattagtacattcaaatttttttaaaaaaaaataataaaaatttaatgatttagaccaattaggattgtcaggtgccaatccacttaacacttaaatacctacaaaagttctataattataatttaggtattattactgtcaaaaattaaacttagatatttatttgaaaccgaaaattaaatttaagtatttatgcagtcaattactcatgtaaaaattatttacatatattacacaaagagtaatttgcggaataaatacctaagttttatgtcgagtaacagataaatacctaagtc

SEQ ID NO: 330733 - DNA, 1147 bp, Cannabis indica
cataaatccaaacaactacattttaggtttttcgcagattttgaatttaaagttaaaaaaacaaagaacaaacctgggtattggacggaggtgtggaagttttgaaaatcgtggggatcgcaggtctcctcggtcgccgtgggttcgactggtcgtctgggtcgtctgggtggctgtgggttcgaggggacgtctaggttagactgcatttgggtggccgtgggttcgacgtctgggttcgtgggtggagccgattggttggggcgttcatttgggtggtcgtgggttcgaagggtggtctgggtttgtttgggtggccgtgggttcgaagggtggtctgggttttggtggtttgcgtccgtctgttcgtgggtctgggtgtgggttgtcgtgggggttcgtgggtttgggagagggaaagaagagagagaatgtagttagagggaatgtgagaagtttgaaatgacaagagtatttttggaagaaaaatgaaagattggtatattttttctatgtgttataattatgtataattaaacaccatgtctaattttttagcatggaatatcaaatttcccaaaaaaaaaaacaattgaaattactacaaaccgtactatataaaagtcttcttgaatataataataaaaccctaagcgtaataatataatacatccattatatttttctttgtcactgctctccacaactcaaaaaatgttgatagaaattattttccacaaagtaatatgattgatattgattttgcttgatttgtttcttagaatttgggtataatagcttttgtttcctacgttttatccaattataaaattcttatattatgtatttgtagaattagttcttaataatttgaatattttatatgagtttcggctagaacacttacaatattaagcatgtcactcatcatcataaacattattagaattaggagttttgcattgaacttattaaatttttgtatagaattatataacaagagataaacgatattctttttggtcaattactagatataaaaattaattattcaacatgcgttggtggaatgttcgtttgcaaaagttgcttggcatcacagcatagtggacgtcggggttggggctgctgttgggttttgtgccct

SEQ ID NO: 330734 - DNA, 698 bp, Cannabis indica
taatcttcttataatatatacactatttcatttttttcttttctttttagatccgagtacttctatttttaatatatttgataggccatatgagaccatttccttttaaacattaacgaagcatattgaaaacaaaaaacaatattagagaccgaagatttcatctctgaagttgatcgatactatactctagctatgatttttatttacacgactcccttaataaataaactattaatacaaatctctaatcaaggttagaagaggtaattagtataactaaatattgattgtagttttgttttttatgttaattacatatctttctatgtgcattggcattgtgtcaaataatatatatatattttaactaactttggaaatgttttgaaaaattgatatttttgttttaatttattaaacatcatatcatttatattataataaattgatatttttaaaataaagttttaataaatataaaagggaaatttgagtttctatgcattttttatacccaaattaattatctaaactaatacttataactcttgaaaaaataggactacttttacctaaaccccaaaataccccctcattattctcaaccatttctctctcttcctcctttctctctcaaatcaaacccaccaaaacacactgccgatccacctgccttccacccaaaaccaaccatc

SEQ ID NO: 330735 - DNA, 1092 bp, Cannabis indica
tgtcgtgaggagatggctcaccccatccttgagaagcatagaggatgaacatggcggataaatatttgatgccctttggtgtgaactgggtttggcaaagatgatagtagtccataatcttcttgaactacggaagccagggcagaattgcatcctacttagtatgggcacctgaccaagcatagtatccctgtcttggactagttgcccggtgatttggagaagggaaaaagcactcgacacgtcccaggtatccatccttctccaaactcctcatcttagctttggttactatagatggaggagacacccatcgagcccctaaggcaccttgccttctttgaggaaccacctcgacgtactcctcagtgacgtagtcatcaccctctaccaagacatcaccatcctcagacaacggttttcctgcttcattgtagcctccaaagcgcaatggccaagcaactccctcctcctcggcttcagatggactggcaagacggaccttgccctggtcctccatctctttgacttcaacgtcccctttgttatcctcctcctcagcagtaagtcaggcctattcagcgctcgacatcgtggcaagcggtgccacgtgaggatcagtagaggcaattctctgcattatttgattagtgtagaccatcatcctatccctggactggtgattggttggtatgcctagaaacagttacggcaaaagtggtgataggaatgccaaaggcagcagtacttggtcggcccacgggatagtatcaactatgtctggccaaacaatgtatgtccagctggacgacaagtatcatctccatccattcttgagttcccaaatgaagtgttcgtagccttcaccagtgatctgttcgagatagaaacaatgctacaccttgggttctagggaaggtgtaccttcactgcttatctcccagtccttgaaacttgaattggaatgcccgtcactcgattaggacgaactggcatagaaacgaggttgttcgtcatatagaatttgaagaagatcctggtcaatacgatgttctcctcccaaaactcaccagggttcatctacaaaagata

SEQ ID NO: 330736 - DNA, 817 bp, Cannabis indica
aaaagtatgtgttattataataatattatatggtgaaggtgatattttcctaatgagagagttgagagataacatggttggatttatacttttggaatcaattagcaccaatgatgtaatacccatgtggcagtggcgccaaacgaagactctttcctcgtcacatgggaatctttacccatacaagaaagaaagtattgcattatgttaggaatcaatatccctttttcttgctaaaaaaaatatccctttttcccttttgtagatcaataatctatttgttgataattatggggttctatctaagggatatgactctgataccatgttgagaattatggtgttttatctcaaaatcaattgtcaatgaatggagtagctcatattcttatatatggcttaatactttgtcattttcttccatgtaaaacaatgtccacaatactatttacaattataataaaaaaaaaatcacaattaagttgtacataattcttatacaaaataatatatatttaattttaacgatatgtaacttttaatttttattttttttattttttataaatgtttaaaattctatttttgtatagttaataatatagaatattaagttaagtggggatattgattacaatctattcaattactctttcaattttttttattaaattttttaattttgtagtacatagaaatttaagaaatttatacggagtttttaaattgctacagagggcctcgtttaaaaatacacaaaaataattaaaaaaaaattacaaaaacggttttatggaatttaaatatttttacgatt

SEQ ID NO: 330737 - DNA, 1441 bp, Cannabis indica
ctatctagattcatctgtgttatctttctaatttaatgtgtttgctgattttttagttcttgatttgtttgttttgatttaacatttgttcgtttaactgtgaacttaaagctggaattataaaagctaatccctatgtattagagctaaatttcctacaaatcagagcttggttctttactcatcaagagaaatttaaagatcacttgctttcgcaccaagaactcatcaagaatttatcaaggaattgtacaagaacatagattgaaggaggatgtcgatggctaggtttgaactagagatgtttgatggatcaactgatttcgcactatggcaagagagtttgaagggtatacttgcgcaccgaaaggagacaaaggtactcgaagatgaaaagttattggctgagaagaatcaagagaaaattgtagaaaaggaagagatgacatactacaccatcattatgtacttgtccaatggagttagaagaaagctaatccaataatagactgcgaaaggattgtggaacaaactagagtagctatacatggcaccatcaatctcgagcaaaattaatcttcttgaaagattatacggggttagaatgaactcttctctttccttagatgataatattgataaatttaatgaaataattgctggtttagctaatattaatcataaggtagttgaagaaagtcaagtaatcatattgctcggatcattgccaatgacatatcaagaagttaaagcaacaatcaagtatggcagggatgtgatctcgttagagggtgttcatgcgacattaaagttaaaggactttaatttgcaactcgagaaggagactaggaaagaaaaagcctatcttacaagaggaagaagtccaaagagaggatcatcaaggaatagttagtcaccatcaatatcaaagtcgaagatcaaagataatcgacaatgttaccaatgtgaaaagattggccacattaagagattctacagttaattgaagacacaatctggtttcaaaccaaactccaatgacaaaaatgaaccagaaaccagaaccagtactcaaaatataatgattatgaaaatcaaagaaaagattatgaagttgtggctgagagtagtggagatggacgtttagatggagaattattttcattttaaaaaataattattgacctcaaaatgtggccaaccgatagcgaattcctaagaatatggtattttccacgtgttacacaataagaacaataaaataaataagataaggattttcaaagaggttcgactcccttaggtagcgggtaatgacctactccacttttggtcgtattgatacctaaagatgatactattagatcactataggtgggatctaatatagctctctataaggttacaaaacatggataaagtaggcagatcactaatgaga

SEQ ID NO: 330738 - DNA, 856 bp, Cannabis indica
tatgtaattaaattaaatagaaaataaaaaaaaatttatttaatttttaaaaataatatataagattcctgtactcaaccaaacagtgtaatgtaattaacagtaatatgattacatattaccctacacagtcaaacacagtttacacatttccctataatcatattctccttcataatattctctataatcaaattattttgaacacctcataccaacgccccttagagttttattagaacagttttatatttaaactttattatttttgaaattttagtgtctatattagagaaacctaaaactttataaggtgtacgtacaattatattgaaaattttcagatttaaaaatatttctaacaaaatgggtaggggaaaaatattctatataattcttttgcgtgtggctcatgttgctgaaaattggatttccattttaattaattaatgattgttatcatgaatttgaacacaaaccaagtctttgtgagtggttcaccttcaccacgttattgtttatatatatattttcaattattgtttttgaaagaaaaagctttctgcttcagtttttgtttctacacttattaaaaggtcaaaaaaagacaaacattgattgcaaatcattatttgccaagacaaattaaaacaaatctataagcaacaataagtaacactaacatctatctttctatataagcgttaaaaccattaatattagagaaatttacatggtatattaacttttgccatttttttataaaaatactgtcaggcggttatttttactttttactgtgtttttttataagtttcatactgcagtatactgtgttaagtttcactggtgttct

SEQ ID NO: 330739 - DNA, 835 bp, Cannabis indica
cattggaacgcagtatttggccattagaattacattttagtattttagtagtagttgggcatagacattgcgaatgttgggttttacttgaggggttagaaatgaccattttatccctagaccattgtattagttaagcttatggggagggatatttttgtcatttccccttgggagtggtgtctgctttttaaagtggcatctggaaactattgatttaattaagttgggtttactttcatttttagaaaatatagaaactagaaagaaaaagaaaattttagagaaaaccatctttttctctttctctcttgttcgaatcctcaaggactaacagcaattggggtgttattttgctacaaatcagagtatttagaaagctcttagtgatctcaattcaaggtaaacccataagcctttctttaaatgatttcataagttataagttatacttttatgcaagattttggacttagggatgctattgttatgttctatttttagttgggtattatgatgttattatggtgttaattgagctgttttggtgttgattagtggcttggtgtgatgtttagacaaggtttgagctttagagctcaagctttgatcattaatggtgatttttgtatttgtgggtattctttggttttattgcatgaaatatgttcattgaggtataattagcaggtctagaggttatggtgaagtttgggattgatttgaggttgtggagtgagtttattgggtgtaacctgcactaaaccagtcgaccggttggtccccaagaaaccccacaaaacaggaattctggttgggaactagtctaccagtt

SEQ ID NO: 330740 - DNA, 1167 bp, Cannabis indica
ttttgtgactaatacttttagacacaaactttttagtcacaacataagtatactgatttataattaatcataatttttaactttagtcataaattttattgtgactagtaaaattttttatagtgtatattatacattgttatgtgaagttacatattttgaaggaaattattaagtttggtatatttgtgttagggttcggaggttgtctttttcctctgtccagggcatgtcacctttatttgggtttcggtgtgatttggttagggtttgtgattttgctactacgattagtgtctctgtgacatgatttaatttgagtgttttagtcttatccctgtgatatagttttgttttatttgttggttcgtcttctttgttttttgatgactcgctatcaaatcactgttgaaaataataagtgacctctacgactaaatggtgagattgtaagtgtggtgcagttacgtactttgcacgatagtcaagtgcttaaactacgagattgaatgagcctagtgcaataatgtcttctaagcggtggatgaaactaaatatataaatgtttttaaggtttaactgtaatgttgcaatcttttctatctggtttaattttaattttttttgtcaaacaatctggaaattagatggccaatcgattaattgatttttttttttttaattctaatcacacaatcatgtttccaacatgatatatgtttcgcttgaattacatgttattattttaaccgattgctattaataaaattgtatctttaatttctttaaaaaaatatattttgaacaattataattttttttattaatgttgtcttaaatataattaagtatatataatttacctatattatatatatatatttgtcttaattagtatatattatattattattgatgtataatggggtaaatattattttagattccgtattttgtaaaaattattgattggatcttatgttttgttaaataataaattaaacattgtattttttaaaacacatgaactaattttttgtcaaaataaaaattaataataagttctaaagttgttatgcttctatacttacgctagaaattattttcaagttgattatattaaaaataaaagttatcgaaaattcaatttattattttataaaatag

SEQ ID NO: 330741 - DNA, 836 bp, Cannabis indica
atctatgttcgatgtgttacagggcgtagagaagcagggttactcgggatgaatttgaagatacaatcaaagttctttgggcaatatgggagaatcgaaaccggcaatggaatcaacttccaagtatgaagggatatcagcttctcaattgggttttcaatgcctatccgaaggcctctacaatcgatctcacagctggccaacagaaggtggaaacttaccccaatccgaaacactggattcctcctgacagtgggtgtatttgtgttaatagtgatgcagcaatcaacgaaaatactactggtgtggggctcgatttcgtttggagaacaaccagtggcaaactgctttcagctgggatggtatatatgcccagcctgtgttctattaagatggctgaagcttgggccttgctggaagctttgaagaaacctcctgcgattgatacttctcagattgcagtccagactgattgcaaattgctggtggaagaaattaagactcaaggaaataccctcactgccgaaagaaacattatccacaagctcaatagggtgctggaaacttttaatagtgttcatatttttcatgtaaaaagaaccaataatgagtgtgcaaatttattagctaggaaatgtctagctgataaatctacccaattttttgacaattcttttcaggattggttagctaagttttgtaaggctgaccatcctcttgtggtgtagtttggttttggttctaataaattctttttcaaaaaaaaaaaaaaaattattaattgaattaaaaagttaagattataagattaattcaaattattgttcatatattga

SEQ ID NO: 330742 - DNA, 843 bp, Cannabis indica
aaaaaaataaatatattacttatggtcggttattcggttaaacccctttttgacagttaattcggttagtgactagttagacacctaggacgaagctataaatagctttgtattattcattgtaactagattttggtaatgaccccaaaactgtaaatatctctactgttatattcaataaaacgagctatactggtcaagatataatttcactttcggttcaatcatggtttgtagtgttcttggatcaatgttgttgattgcataggaatctatcattccttacaaactggtattagagccggacgggtttttgagcttcgaattagaggcaagctcagcgtggctgtgcgtgaagaacatccgaggcaacaatggagaatgcaaagttcgatttggagaagtttacaggtaagaacgatttcgagttatggagggtgaagatgagagctttgttagtgcaacaagggattcaggaagctctgcttggtgaagagaacatcaaggaaaggacagagaaggagaagactaagagaagtgtcgaaggagacaactgctgctggcctatggaagaagcttgaaagtctatacatgacaaagtcccttgctaatcgactgttcttgaagtagaagctgtatgcttttaagatgcaatctggaaaatctgttgaagatcacatggatgatttcaacaagataatcttgatcttgaaaacataggcatcaagattgagaatgaagatcaggccaaaattgtcttgaattcttcatcttcagacacctatgaacacttcgttgatacgatgatgtttgggagggactctcttgttggaaattatttta

SEQ ID NO: 330743 - DNA, 1353 bp, Cannabis indica
aaaaataataattataacaaataaataaacattattataaattttataataaattttcactacaaataaatagtattgatacatagtaacaatagtactaataactaattaataattaataacttaaatcactcaaactctaataactaataactaatatactttaataataaacaactaatgattttagtagtactaataatatctaccttataataaaaatacgaaagagaattataaactaatcttaataggctaatacaaaataatatacaataatttttcttaataactaactaaaagttaatttataaaaaggtagtgtagaaaacattaaatataataaaaatatcaaatacatataataaatctaaacttaaactagcttaaataattgtgcctgtatttaggtctgttgcagttttttagtttttaactgttcttttttttttaactacctttttacatatcttcttttgcttcgtgttcttcttcttgtccactgctttcaatttgtgactaccatatccgttcttgcccttgtgctttcccctatttcctgttttgtttctactaattttatagatttcttctcttcggttccggtctctaaaccaaaaatggaattgctcatgaacacaatacaaactaccttctctcttattgatgaggaaaggtccataaatgctctgtctgatgttccaaatccttatgttgttgctaaatcggcttttgtgttgctggcttgaattcttactacacgaacagtttataagcaaaaaatttatgaccaaatgtcgggacactagaagggacaatttttagtcataattactgactatacaagtgatattttttcatatttcttttggttgtgaaggcgataaacgccgggtccttaacaaagagccatgacactattaaaattatctaattgttctactcgcgccaaatgcttggcaaaatgcctcaatataggatatgatctacactgtattttgggttcaaatttaccgattacctttgttaattccatttttggcatatttaattgacaaaaatattttattatttcttattatttcggctggtatgttttaatatggtttcctattttgtgtattcaaacttggaaggaaagttgtctagctttcctatttttggaaaaaaggtaaaaatggtaagtttggttacccatttcttttttatctaaccagctgtataatctgatcctttgttgagtttcccattttctcagatcagatttcttgaagagaaaaccggagctaaactttccttttctataaaaggaaagttgtagttactgcccacgattctgtaggtacagaaacg

SEQ ID NO: 330744 - DNA, 921 bp, Cannabis indica
atttagttttttttttttttttttaaaaaaaaattagagcactaggcacgatttacctgtctactcctaaaatgggtcttgatttagactatatagtaataattatttaaaacaattatttaatgcgaaatagggaacttaacctatttaaaacaattaaatagtcaaactgtggtaagcaaagcctctttaaaccaccattataattgatttaaaaaattgaaaaagtagtagtagtattatttaatttaaattgtataatttctcattaatcaagtacaatgccccttccttttcaccaaaatttaaagcgtcttaatttacttatatcagtagtaattaattgtcagaatgtaggtgttgaaattacttatatattaattatatgtagccaattgctgcagagattgcgtatttgacggagttttgctaatctcagttgtcattaatatttttgttttgggtttgggtttgtattgtaagcacataataaagtatattaaagaatatgtccttacactgaacgtacgtacgccatgattgttataatgtaaatatatataggaccaataaaacacagttttagttaactctttacaagttcattataaacccgttttataaatatagaatctttaaggattaataacatttatgtataaataatgtttacgtactcaaaatatacaatctcatatataaactatttaaaatttttactacggtgtccctatgatatgtatcttacctattaaaaaaaggtcctcattagtgaggcattaaaatatgttggggctcacattatcaagtgaacttaatgacaagtacacattttaattggtggagtgtattgacctaggtctgtatagctatttaataattaatatttacagagactttttttttttttcctttttggaa

SEQ ID NO: 330745 - DNA, 895 bp, Cannabis indica
ctggatttttctgacaatgttttaatgagccaacttgcaaaaaattatgaatatgcaataagaattcagatcgagtgaagtccacttgcgaccaagaaggtcccgtcagacttggggggcaaatgttatcctattttttgcataatgatgtggcagaatactcgtcctacatttcctatatctggacggaagggaatgttccaaacagactccatattgtacatctgcatgtataacttttgattacccgagcagggtgaaaggcagatcatctgggcaggcatagatttggttttccgaactacttatcatgacttaactactttagaatgatctcgtgaagtccaggcacgaaggcaatccctacgatcgtgggattgaataagaaaaatatgacaacttgttctaattttctatttcgtgtatcataattatgtaataaatgtaatttcctattttatacattgttagcaaaatgaaaacatttcctcatgcattaagaccctataaatagtgacttagcctcactgtaaaaaggatcgaaagaattatttcagagagggatctaagagaatttctcagagattcattgtaagagctttgagagagaaaaacacttcgttctttatctcaagttaatacaatctaaggggagtaggctattaccatacccacggggccgaacctctttaaaatctggtgttctttattgcttatttgtttttgctctattttaattattttcttaatcgcttattcttatttgtttttgctctattttaattattttcttaatcgcttattaattgattcattgtcattggcttaaatcgaggtcaacaaaaatatatattgcactcttttttttagctcaggttttgtcccactgagtttt

SEQ ID NO: 330746 - DNA, 659 bp, Cannabis indica
atttaaaatatatgtatatttttaccgggtattacaatggaagccttatatagtgatgttacacaatagctaactaacttaactacccctcttactatcaaaagtagaactaatttgagcaaaaaaagattaaagaagctaacatacaaagctaacaacatattaacaactaacagttacgtttgaaagattgaacttcactaactacttaacttaattgaactaaactaattgatttttattaattattaattggatcggatcaggtagtaaaaatattaaattgaatgaagaatgtattattaattcactaaaattaaactcgaaaattgtactaatagttgagaaatgatttttagtattattggaaaatgaaatgatacattgtggatagatatttatttattattgaagcaaaataatttatagatatcatgctatacaaaatttttaaatatttaattggaatcattagtctttaatcattgattcattataataaataagtttatttgtttattcaatatatatagtttgcagaaatatgtataattttaaaattgatatgcatgttttgcaatgagaggaattgacttcagaagctttatttgtaagctttaataacaatgaacattgatttcaaaaaaaataaaaataaa

SEQ ID NO: 330747 - DNA, 584 bp, Cannabis indica
tcctccatcttggacttcaacgtccccagcaatatccctctcttcaatagcaggttgggcctattctgtcctaggcaaggtggcaaggcgagcaatgtgtgggtcagatagtggagattaccgtatagtctatttggtttgcgccatcatattatgcttagacagagttttatcaaacatgtgcctagctatagtcacggcaaaagtggccacaggcttatccacaacagcagggtttgggcggccctcgggcagagtgtcgactacatctaagcagactatgtacatccagtgggacagaagataacgtctccaccctttcctaagttcccaaatgaaacgatcatatccctgacctttaatttggtgaggatagaagtgatgttgcacctcgggttctggggaaggtgtgttgcttacttcccagtcttcaaagctagagttagaaagattgtcactggacaaagatgggatagcacagagacgaagatgatcctcgtacagaagttgaagcagatcctggtcgatacggtggttgcctccccaaaactcaccagggttcatctacaaaaggtaggagacaa

SEQ ID NO: 330748 - DNA, 722 bp, Cannabis indica
atattcaaatgtaaggtatcaagttacttttagaagtaatataaaatcctaagattgaactacaaggtgaactttttcaagatatgagagtttttttgttaataattacaatcaccgcacaacacattactatgagaaccaaaataaaaacctaaaattaaaattccttatcatttttcccaaatagcatgttaactacgtcaagaatgtaatcaacatcaatagtttcttaccttaatctattttgacttcaaattttattgatttttttgatcggcattaggaacatgaataataagatgaagaatgataatctcactagaggagaagcaaagaaatcagaagagaacaaagaaatctgaggagaatcaaagaaatcgcagagaagaatcaaagaatcacagaggagatcacaacccacgatagagaatagctgaatttggatattttgggtgtaaaatttataaatagaaatatccttttataggtattctattttttttttcattttttaagtttttttttttcaattttaagttttttcattaaatgtccattttttcaaaatgcatttaaaaaaatctatatttataaaaaagctcattagaaatggtctcttcttatcttttttttttgggtaagttaaaaaatatcacttttatgaatcaattgatcaaatttacctctaattttatatttaattgaaacatacctctttttat

SEQ ID NO: 330749 - DNA, 546 bp, Cannabis indica
taatatgacttccatctcccaccatccacaaagcactcgaatcaaaaagttctttactccaaagaatattcttctacacataagagcctctttttgacgaaatgatagaactaaaggacttgtttttatgatataaatcattcaacaccaaagtagctagagagttaggagcattataaagtctccacgcttgtttagccaagaaagcttggttaaaaagatgtaagtttaaaacccataccgccatcattcttgtgttaacaaaatttaaaaatttaacacagtatacagtatttttgaaaaaaaaaaattatttcataataaaaaaaaaaatgagtatgtggtgtgtataaccgtttttttaattgagatctcataatccatatctcaatgataagttgaaaaatacttcttttttgtatccattaatcaaaaatactctcatattatatttttttaaaattaataccaacttttttgtagtaggttgcctaatataccctcactctctacttaaggctagcatataatttgcattaacctaag

SEQ ID NO: 330750 - DNA, 757 bp, Cannabis indica
tacaagtcggtattatatgatgtgttatatgcttttcttagtgagtttgtcgactcacagttgtgcttatttcatgtgtaggtaaagcaaaggcgaaagctgaacaggagtgagcctggctgagatgaggttgtacatgtcgtggcggagcgacctggagtgttcggtctcgggacatctggcgtttagtattttgtagtcactgtgcgacctagttatgtattttggcatattttgtgtaaaagtttagaaacgggatcccggtgtttataaatgactatgtaaattgtaaactttaatatttattataaagttttaatttgacacatttttcaagaaaatttctttgattagcaaagaaagcactgtaaataaaaaagcactgcagcgtgccttagcattagggcgttcgaagaggagtggcaatggtggctacaaacaagttcagattgacttaacgaacgaggaagaagagaagtgatatacgaagaaactataaaatatggtaaaattagttttatttacaaaaatatggcatataaaaatcccacaaaaatgtaaataaaacacaaaactcatacaccgaatgcattatttaattatatcataaaaaagtaagcactaaaaaaaattccataattgatgtaatttctacattaatatattaattgagagttttgaaatggtaattttttttttttttgaaaggaaaccgatacaggttaaaataacaaggtaacaaagttacgcaaccaga

SEQ ID NO: 330751 - DNA, 565 bp, Cannabis indica
cttcttcttcctcttctttcatcccctattaaaatttatatttaatttcaagattatgatgataatttgagatatttttattagttaagattttagagtgtaattgattaatcgtttttctgggatattaagaatttgggtcgatattctagtactcatcataatagtgatgatgatgttgttgatatttttgattccgtacatttttttaaatttgttggcacaaacaaacaattgtctttatgtgtacgtgtgtgtggcacgtacgtattttgattcatgtggcaaccaaacaagattcaaacacatattaaaattcattttcaaaacaaagaaagaaggtaaagatttaaaaaagaaatagaataaatagaatttttacttttcaaatatgatttttgtaaagttttgcccaataaagtttagtcttttgcaaaaaaaaaaaaaaaaaaaaattaaataagttattatgtgttgtgcctctattgaaaaaaaagagaaaaatgacatgtgataatttcttcttgagaatcaattgtgaacaatggggtaggcacataggaaa

SEQ ID NO: 330752 - DNA, 1477 bp, Cannabis indica
agatagaatctgacaccaccccggagatgctttgctgcaatcttactctctgggagcatacgagacaaatatgccttctcccgggaggcatgtctaaggtaatcctgcgcgttaaggagacttagctgttttattcaaatgctaacctttttccatccacgtgtcatcatccggtcggtccacgtattttgggcaaaatcaggggcaacaatatacaatatagaagcaccctatctaaatggaaaattcaagaaaatgcacattttcaaggatattatgcaaccttatctatttcggtatttataaataaataaaattaatctattttttttttttttttatgattatatatgttatatttattcaagtcattcagcaaaattttaaaatatttaaaaaatataacacgcaaaaaataaaatttaaaaaatctattattgtacacgtgatttatttatcttatacgtgtgtaaaatagacaatttgaatattaattctaattataaattattttaaatttcttaaaattttacaagatatcttaaataactatttcttaaaattttacaagatattttaaataactataacgtacacgactataaaaaaaaatagactgaaaaattcaacaaaacagttaaaagttgcacaaatacacctattttaataaagtaggttttaaaagcactctctatatattatagatataaaaaagaaaaataagcggcgactaaataatttaaaagaaaatttgcggcaaaagtctttaaaaagttaactatgatacagattaatccctaacctcgaaaaatagcgacaatagtcctcaaggtcacattttttgtgagtccgttagtcttaaatttgacggatccattaagttattcaacatgccacgtgttgagtcatcattggtcaaaataataattttaataaaaaataattaaaaattaaaacatattttaaaatataattttgttttcttttcttatttttttctccttcgtcttctacctccagcagtccaccccaccaccacctcataatcattttctttctccaaccacaccaccttaacttgtcttcttcctctagccacaccctaaccccgaccctcctctatctctagccacactccgatctctgagttaaccggagttccaccgcgcacggtggccatctaccgtcgaagacgaagcttgcaaaaactattgacgagatctaaaaaatctttacgaatagaatacatttttgaaagtcgttttactcaatggatctcggatacaactagattggactcaaaaaattttactccaacaagcttttgacgacgactgaacggcaaaaggagctacgggaacctcggagctcgtgatttgaaactcgacaaaagccatggtggccttgcctccaaagaacgacgtcgaggcccgtggtggcctccatttttgaccgcaagacttcgtcgacagtgaaa

SEQ ID NO: 330753 - DNA, 827 bp, Cannabis indica
ttttttttattattatattaaaaaaataataatattatgaacgagtatgcacatacattggagcattacacataaaagatgagaggtgaagtgcaaagttctaaagctttcttttggcggtgtaaagtattcccttcttcttaaaaggtaaatataaataattaaatataaccaacgactttcgacttattcttccttgtattttttgttttccgaaattctaactaattcttctttttgcaactgcacaattataatcttaattgtttgacatattcttgtcattttatcaatttcttactgttgctgtattattgtgtataggcaatacttcctatgatggattatatgtttgtgctcctgagtataatatgatggattttagtttagaaataggaggtttagtatttacagtagttgaaatttttgtctgctgtaataatactttggtaaaagataaaagcagtagcggaaccagacgatgaaataagaaggggccaaataaaatatattttcacctaattcttttaatatgtagtattttataaatcaatataaaaagttaataagctttatacaacgtatataaataatgagaaataataaatgacaccttatagtgccaagtacggtaaaaagtggcatatcgttatgtgtaaaataatatcaagtcctaaatattttaatttaataaataatataaaaaaccgctaactgtttgtaaagtgacatattaatatggtattggataacataagaatacatatataaagactcatataaatatatataaaacaataacataagaatacatatatatatatata

SEQ ID NO: 330754 - DNA, 1076 bp, Cannabis indica
acccatcggacccacatgaaaattggaccccaaaagaaactaaaccccatcggaccccatagcatcggaccatcggaccatcggacgggacccatcgggaccattggatcagactgtcttcttccccaaaaaaatttcggttcggttcggcgtggatctacctttgacatggtttcggtttggcgtggatctccggtggtgttcggccggttttcgtggttcgtcgtgcgtggtgatcggcgtgggtgcgtggtgaacgtcgtgcgtgggtggttcgaggaggaagagagggataggcgttgatgacggtgggtgtgggatttcgggttgggtcggaggggttgggatcggactggggttgctccgatgggggtttcgggtggtggtgggatgtgggtgtggtgctttcgtggtcgtcagagagaggcttgagtctagggatttcaaatatgaggagtatttttgggaaattaacaatgtggtcatatatgaccaattttaataattatgcatttaggaaaataattttaaggtattgtaagtatgaaaattcaaattttccaaataatataggcaaaaagatgtatatgatgatgacacatgtgctcttttactatttacttttaaccgctttaataatttttgtttagcagtaaaattagccaaagttattgtaattgatcatctattaatctctgtcttttaactttcgttaagaagtgattaggatgacacatgtcatcatctaattaggccacctcatatgtatttatgttaatgtgctttcaaaaaaagctggcctgaacaagaaagtattgacttggaatgaagggtggctttgggacatataaataaagtgaggcttatatctacatactaatagggaaatttgagtttccatgcattttttatacccaaattaattatctaaactaatacttataactcttgaaaaataggactacttttacctaaaccccaaaataccccctcattattctcaaccatttctctctcttcctcctttctctctcaaatcaaacccaccaaaacacactgccgatccacctgccttc

SEQ ID NO: 330755 - DNA, 690 bp, Cannabis indica
agagagagagagagctttagagacttagtattcaggtccattttataagttcctccccagatcgtggagacaatttctctccaaattgtggacttatattgttcgggacggtgtgcctgacacgttgcccactggttggacaactctttcagttggagatttccgtgcagctgagactactatcactgttaccagacactccgagccaaatcctaccatggctaggacaaaaaatgtgttgtagggaacctcctcaaaaccctcatattgttgagttgatgacaagagggagggtctgtcatgtcgaggaggctaaatagccttaagttgaagagccagaggccgaccgggaagagaacctgtggccgagcaacccatggtcgaccggggtgaggagacttcagccaatccaggtagtgaatctgaagtcgagcaggccgaatcttttaccaggccaattactttcaagagccagtataaggcttacattgtgatcttgggcaatcccttgggctcttattgttgaaacttattttaccaagatctagatttactaacatgtatgtttgattataaatctaatatcttaaatatgaattccctaaaacaatgaaataaacacataaaagattaagaaattcttacaatgatggcaacagaataatatgactcattccattcagatctcta

SEQ ID NO: 330756 - DNA, 1121 bp, Cannabis indica
ttttaccaagtgtaaaaagtgtgtacacgtggacagtccaccgcggtacttaactgtggatttttggacggaaggatacagagcaaacgaaatgggagtttaggtagtttttgcccctaaaaatcaatttttgtggttaaagtgttaaaaaatttaaaatttaagtagtttagccgccaatatccctttagaaaatgtataacataaatgatttgattacatataattaggaatgtatattttctctatggagatggaccctgtgggaacccgctcctaatgaagcagggattccccgtttaaatagggaatgagatggagatttggggatggggatcacactcattatctcgacgcagacccgtttaataatttattttatatttctaataataataatttatgtttgtattttttaatatattagtattatttttataatttttaagttgtattttagataataattaatctgtaatgttttaatttttatgtaattaatattttttatatatataaatttttattataaacatttttttattgaggaattttccgttctgttcccgtctctattaggagattttccgtcctaggtccaataaaaaataagcaaagacgaaaattaaaatttttaacaaaaatagaaacagacaagcactcaccgctaattttccgcctataatataagttgacaaagaagaaaataaaagcatatttaataattaaagttgaattgaatctttgaattcatgcatctgagattccaaaccaaaccaaaaccccaccaccacctgaccagtatcgcagtcaaatcaacatttaactttaaaatatacagaatcagaacaaaataaaccctaattttagaaaaaaataaaataatcgtaaagtctcaatataataagaggaacggaatcttctacaaaagtagtgtcagattgtcagaatcaacggtcaggattactgcttctgctgactatatatacacacatccaagagatcccgcagccttctccattttcatttcatactcacacccagcttcgtcttcttcttcctcacttgtacacagagagagagagagagagagagagagagagagagagagagacgtacgt

SEQ ID NO: 330757 - DNA, 872 bp, Cannabis indica
aaaaagggtattttagtattttacttttatttaatatttgtgatgtaattctcattacataacttctctaatgtaataaagattttattacataatgtaattatcattacattgtaatcccattacatcactttaaaataaatcaaagattaaaatagtaattttgatactattacaatctccattacatcaaactaaatatgatcttacatgtgatattaatctttcgatgttttattagtatatgctggtggacaaagtcatggacttacatttaaacagtatgacagatgatacactttattttcaagaagcgagcatgtatcacactatgtgcttgtttaaacgtaattgatgaaaataagatatattaatctacaagttttgataagggttacgttgctctgacatgtctccacactagtatatgtataaagataaagaagaacaataacataaaatggcatcaattcttaaaaaaataaacattatcacatgtattgggcttaatccaaattcccaactcccaacactaccaatgacaacattctaatttttaggttaccgcacccaaatatctctaatggttatctctcttattaggctagcacacccaaagatctctaaaaggttagcttccttatcatttaactcagcaatcaaaattaatttatttgttccgcagatccttaaattataggtttttggcaagttggtcctcaaatattatttttggcaaattggtcccaaatttttattttcttagaaacataaagtcctcactcttaaataatggtattttatttatttatttattaattttaaatagttttatattaatatattaccaaaataaataaatatatttttta

SEQ ID NO: 330758 - DNA, 1197 bp, Cannabis indica
acaaacaattattagatattcagcatcaagaccacttagcacatttgaaatgaggtgagcttcaggatagagatcccctgcaatagcaaggttgtcagaccaagttcttttctatcaaagatactcagccatggtagtgcttcccttgcatattgtctgaatcttggttcgagtatcgtccatttttgcttgtgaatgtgctccataaagactctccaaagttgtccataaagtccttgttgaagagcacctcgtaacctctacagctatggcttctatcatagatccatagagccaacccattaaaaattggtcacaaattatccacttctcatactcgaggttcaacataagagttggatctgatgtatcttcagatatagctctaggtgatggtacaaactcaggtggacaggtccttgatccattgacatagccttcgagacaatgacccctgattatagtagagacaacatttctctagagagtaaaattgtttctatcaagtttgatagaaaatggttgagtaagagtattcccaaactgtgagtttttgaaacctccaaatccagagtgaaatccttgttgtgagcctccattaatggtctgaggggagcagagttgtccaggagtttgttagtctgtaccatctccatcatcttgatttcctccgtgtggagtctagctgattgtagacatggcgtgagccaatgaatgctctattaccaagagaaaatagaagcttctaaggatcttctcaacccaatacacaataaaggctaatccattgtattactctgttaattgttagacatgtttattgtctaaaactaaaaatatgtatatttgagacatgcttggtaagtgtaactttgagatgtttggtgtctaaagttaagtgtgtaatttagaaatgttttgtgtctaaattagtgtttaattttgatatgctttgtatcaaaattattgagaatttgagtagtgtgaaaattaatcttttatgattaatcttttagagaatttgagaattagtggacactatatttggctagcatgtttcgcttggaattaaaagtgtgaagttaacaaatcgcttaatcttcatacaagattaaaacatgaattttgagggatgggacctaatctttcttagtgttttactcattgatggtaacctatcttaacactagtaaaaat

SEQ ID NO: 330759 - DNA, 981 bp, Cannabis indica
aattaatgtgggataatggtattaaaaccttttgatatggaatgatccttcactttttccctctcatttttcgtttctctcttcctttctctctgattttttaaacctttgaaaacctctttcacaattctccttttttatttttgaaaagtacttggaagcttctgattctaacagaatttactgaagaatatcgacactttcaaggttagtgtaaaattatttgcaaccattttccttttattttgaaaatcaatctttattttgcgctttaggaggtagaaaacgcatgagacaataggaaatatatatggaaccttattttctttctaacaaaactaggcatttctctagaaaatatggacctaaaacttgactaatcacgggtttcaggaagaacaccttgagtgttcgcattttttttattgaatattctaaatactcgcgacgttcgtgatgaacatcttgaatactcgcatacacttctgaatattttagcaaatctgaaatttagctattttaatccctgttagaacttagggtttatttttagccttctaatttatatatgcttttgttgcgaagactggctgagtcttttgaattgtgggtgtgtcacagtaaattaatgttcatgcaagtgtatgcatgttccttgggtcactgtgatacacccagccatttgagacatgcggccaaatttttacttttcttgctttttagtcgcatgttggaactgaccaagtttctcgaaatggtgggggtgtcccagtaactctatggtcatgctagaaacacatgccccttggatcatggggaaactcccagtcatttttttgacacatactgttagttacacatgtgcgacttataccttgggaggattggctgagttcttgaaatggtgggtgtgtctcactaccttaattctcatgtagcgacatgatcattatgttattgagatactgttggaaattattt

SEQ ID NO: 330760 - DNA, 779 bp, Cannabis indica
tcaaagttcgagagaaaaaaattcctaattagcctattaaattacactaataaaaatattatacttcataagagttttagatattatgcgtgtcctttagcgagaaatattaaaaggtattggtggtgtgtagtacttttttacttgttaatatcgttgttggtgtaattaaatattgatttaatgtaataactttttaaagaatatttttaactaattataaagtgacatatttaaaaagtgctaaatatttgagattgaggttgaagtggggaggtcctcatttgtcaccatatttatttatatattattctaaattattactaagaggacaaagattaaggtgtttattaccataattgacttttattattattaacttttatgttttaacaaggaaaggaatatttgctgtgcttttcaaaattagagtggacacaactcactttctttcaaatatggaatatggtaaaattggacatttgtaatcactttcaaattggtagaactttttttttttttttttgtaaaataaaaaaaattaaacatattaatttgttggtaagtattgaaaatttgtaagtggatctaaattaattataacaatagactgaaaaattttaactaatagctgaaatataaaaagtagactaaaacaccgagcaccttgaaataaagaacaatttctatttgggcaggaaaattttttttactttatatttataatattatttatttggagttttttattgaaagattaaaaataaaataaattattt

SEQ ID NO: 330761 - DNA, 997 bp, Cannabis indica
  modified_base (949)..(949): a, c, t, g, unknown or other
cataagcttaataccataaacacaatcattaactatgtgtctaatatttactcactaccataatgggatgattaataattaataaatgtattagaggcacatgagagcaccctaaaactataattgacccattaaattatagtccaccactaattatactcattagcccaataagcctaataaaaccccttagggttaggtgttggatataaaaatggttaatatgtgttagtataaggtgtgaaggtgtgtggtgatgagtataagggttttgctctcataggctcctcttctactatcttgggatacattgaagaatttggtgtcatagtaaaatggaaaatgcaaacatgggaggtatgtggttttatattgtttgtgatgctctaaataaagtattgatcttggttcataatctgtagtagttcaacataacgccctcaaatagcataccagaagagttgaagatttaacttgtgtaacactgaaaaactacttgaaaggtctcaaaacaacaaccagaaaataaattaattagaatgtctatttacaaagaaaaaaaagatataaaaaaactaaatttttagactctaccacttgattaaatcaagtaaaatataaactaataaaaaatttcaaaatagcatgagcccaatttaacataaaattttgcacaaaatttagcacatcattgctattgaaaaacaaattttcttataagttctaaaatattatataacactacactattattttagcactcaattatacataaatataccatgcactaaatttacaccataataaatatcattgcttttatttatttattttgcttaatgtattggtcaattcagggccggcccaagcattgggcagcttgggccattgcacaaggtctccatttttttaaggcccaatttttttttttttttttaaaagggcctangtgttttttttttttctattatttattcataaataaataaaaaattaa

SEQ ID NO: 330762 - DNA, 1391 bp, Cannabis indica
ttactgtgtttttttataagtttcatactgcagtatactgtgttaagtttttactggtgttctactggtgttttactggtgttctactattgttttgagttattctgctttgtgttttactggtgttttataaaaacacagtatttttgaaaatatttccgtgtgacagtatttttgtaaaagttaaccaaaattccagtatttttgtaaatttcccttaaattatgggtaagaactataatagtaataggtttggtttgtggaatgtaactgtaatagtaattgatggaataagaatagtaatggaaattgattaagatgtttggtttattattagaatgaatattggaataaatgataaattgacaaaattacccttactttaatttttatatttttataaaaaatggtattagaattattttagttttattttatttaatcttttgtaatgtaattctcattacgtagcttttataatgtaatggagattctcttgtatgatgcaattatgattacaatgtaatcctattacatcattttttaaaacaaagcaaacattgtaatggataatttgattccattacaattctcattacaacaaaccaaacatgcgaacgaacatagacaaaatttgtgtattttttggaaaaagtatatggcacgtagttgtttaaaagttaaactaaaacttgtacaagagaaagttttctagccttatagaattattcttaaaaatataatggagttgtaattgttataaaataatgtagaataacaataaaaagaaaagaagttatttcaatggggtgaatccctatttatacaaaaatgtgactaaaagaataggaaactaaatcaatttaataaagaaaaatacaaccaagcattaataatgataattaatttggtaatttagacatccataaataatatttcataacaccccccttgatgtccataaaaactgtctcactaaaaatctcaaaaacttggtcaaaagaaaagaagtgcaatgtaaactaactccctttcatttaggcattcgtggagatctttaaatcgatgaatgctaatcttgagctatcttctcaaatgttgatgttggtaatgactttgtgaataagtctgcaagattgatacttgattgaatttattgaacaccaatgtgtattttcttaaaatgtataaggaaaaatttggtgaaacgtgttttaattctatctctttcaatgtaccatccttttagtttagcgatgcaatcagtattatcttcatagagaactggttgtgttgatatttctttattgagtgtaatctttatgtttcccaaatattttatgtcaataatctcactcccacacactctacttgcttcataaaatgcaagt

SEQ ID NO: 330763 - DNA, 1031 bp, Cannabis indica
ttagtcaagaagaaggacggtagttggcgattttgtgtggactatcgtgcgctgaatagagagactgtggcggacaagttcccaattcctgtgatcgacgaacttttggatgagctctacggagcaaaggtgttctctaaactggaccttaaatccgggtaccatcaaattggaatggcagccaaagactgagctaaaacggcctttcgaacacatgaaggacactatgagttcttgttgatgccgttcaagttaacaaatgctcccgccacttttcaggcccttatgaatgaaatctttcgagatctccttcggcgaactgtgcttgtattctttgatgatatcttggttttcagcgcaacggtagaggaacatgttggccatttggaagaagtgttgaaacgcctacaacaacaccagttgtaggccaaccgcaagaagtgcttatttggacagtccaggttggagtatttggggcacatcatttcgggtgaaggggtttcggctgatcctcacaaggttgctgcaatggttcaatggccggttccaaagactcttaaggagctacggggcttccttggcctcacagggtactaccgcaagtttgtcaaaaactatggtacgattgctcgccctttaacagatcaactcaaggacgcttttggttggacacaagaggctcaacaagcttttgaacacctaaaatcagctatgtgtactgtccccgtcctcgctcttccggatttttccaagccttttgtggtggaggcagatgcttcgggggtcggattgggtgctgtcctaatgcaagagcagcgaccaatagcatactatagtcaggttttgtcgcacagatcccattccaaatccgtttatgagcgtgagttaatggccatcttgcttgctatccaaaagtggggtccttatttattgggacgcaaattcctggttcgaacggccaaaaagagcttgaagtcttgctagagcagggatggtggctgctgagcaccaaaaatggctgactaagattc

SEQ ID NO: 330764 - DNA, 623 bp, Cannabis indica
aaagttcaggggacataattttgtacatgtcaaagttcgggggacaaaaattctaattagcctaaatttattatttgtaattttccattaaaaaaatattattggtaattttaaatagaaaaattgataacgtacacatggtagttatgccgcacaagattacttttttgataattaataatgttaaaagtatgattttgggcttgtttgatccaccatgacttattttattgtatagattgtattggactttattagtattataatactatatttggtattgacttgtattaataaattgcgtaaaattatactacttttaccataaactcgacctcaaccccaacctcggccctagacttggatcccatctcccgcttggggctgcaaaccccaacctagacccatccccaaaccttgactcagggtccaggtcggtgtttggagtacaagttcaggtaagggtccaaggccgggtccagtctcaggtgttcaggtttcggggtcccaagggtcggagtcctgggaatcaaggtctggatccccaacgttagaccctttgtaaaaatactataatacaaactaatacagatcattttttatgtattaattaaataaagtga

SEQ ID NO: 330765 - DNA, 1588 bp, Cannabis indica
aagtctatttcttttgaaatagggaggcttaattctttgtagaactgaccagctaccaagtttgccttggttgtcaaggcgcatgtggctaatcgagtgagtgcgtctgctgttgtgtcatctttaggggcttgtcgtttagtacagcctttgagcggtcttaatagctcaggtaggccatcatcttcttgtattgagttgtatattcaccgaggacataacctacgactagttgagagtcgtggtgtatgtctaggtggtcagcctgcgcttcgtgtgctagtctgaggccaacatttgaagcttcatgttcagcctcgttgttagaagctttgaaactgaccttgttgcttcgtgcctcagttgcatcgggcaggtggtcaatgcatctcttgggttcttactctcacttcttctctggctcctgtttttctctcaaactttgaaagatttaggaagacatgcttctatgattagccatgaagctggtgagagcttggcctttgttggacatgcttggttgacaggtggccttatattggtagagtctcagtagttcacttaagtggtcggcctgatgcttcaaggttttgtggaacctgtgtcaatggttgattggtgtacacctttatagggtgtgtttggaagtatggccttagttttgtggaagccaagagcaagctgtgggttagcttctccatgagtgggtaccgactttcagcatcgatcagtctcttgctgatgtagtacacagggtgttatactttgcctttttctcttctgaagatagcactcacagcatgttctgtgattgctaggtacacgcttagctcttctttgtctaggggtttgggcaacacaggtggctgagccaattgtttcttcagctcttggaatatgtttttacattcctttgtccactcaaattttttgttgtctctaagaatgttgaagaagggtacacatttgttcatagacttggacacaaatttgctttgtgcagtaatgtgtcatgtttggctttgtacttgcttgatagttgtggacgaattcatacccaaaagggcttggatcttgtctgggtttgagcttcatgttataacagcggaggattttgaagcattcgtctaggtcctccatatgccccctcctttttggacttgataaacatgttgtccacatacacctccatgctacggccgataagatcattgaacattttgtttacaagcctttgatatgtggcccctgcattcttcagccctgaagggcatgactttgcagcagtaaaagcctaagtctgtcatgaagcttgtatgctcctgatctggtggatgcatcttcttttcttgactttagacaaaggccaagttgtaacagtgacgacatattattgatctcctctcgacatctacctcatgtcttttggggaatttcaagcaaaagtagtagatggatgttatcgcttcaggttgtatagggctggttaacctatcatggcgttgaaagccgaggcaatgttgagtatgatgaactgtaccattagagttctagtagttggattttctccaacaatgaggggtaatct

SEQ ID NO: 330766 - DNA, 1011 bp, Cannabis indica
tcgcacttgataaccaccataatctcggagcttaaattaaattcacttcatgtacagattctaggtctttcacctacaggtaagtgcacgcctgatctacctatgatgacacagagactaggtcgtaaaacaacaatatacacaaatcatgatcaacatggctctcatcaatatatacaaaaatagacaaataataagaataacaaaaaaatatattctcttttattttagaaaatctgacagcataacagatgtattttgaataaacttaaaaattataacctgcatagatatttttacaaaaatatgtttggcactcaatgccctagaaagtccaaaaaaaaaatatgcagaataaatttttaatttttcaaacaatttgtaaatcataaaaattggaatatgtctaatgctattcaaagcatataaaatcaattccaataatcaacttgagtccctaccctcccaagtcattaaactttgtccgaaaaagaggatcttaagctctcgagtcctaagctccaattgtttagttcaatcttagatatcactctctcctataccatcaaatagctaaataattatcatcattgtattctacattcaaaattgagtccaacaacatataacaagactatatttaaagtttggagttctgaaatctcacctaagttgtacaggttaactatcggtggcaataaaagtagtgtataagaaatgtcaccaaaaataggagcagtatatatcaaattgacaacctcgataattagatcacaactattccaaccatttgtcgaaacgatacacaatactgctggaaagtcgttggaaatgggctgagctacaaaaacatcaccagaaaaagtagcgggctaggcgaaatggcttagtgtagattgttctccttgacgatctgagtctagtgatgaaaacgactcgtcaaacggataccagaggtggccaaaaaattcattcaaagtttgaacctcaaactttgacttgcgattccgg

SEQ ID NO: 330767 - DNA, 835 bp, Cannabis indica
atcaaaatttatttatatattaaatcattaatttctttttcttaaagttgtcgttcctttttttcttgaattttgccctttatttataggtgtataaggtagcagttattttcattaatggggatctaattatttataactattcatgaaacgtggacattccccacgtttcatttttatgcacatgagataatacttaataactactcaactgctcttttgtctttatccttaaacgattatattgactatgaaggttgtttgtcgctaagtgtgagttgtccttttttaccatctttttataaaaaatactaagtattggtatattgctccttccagtcttctcttaccatgatggtattagcaaggtagttattccatcatacagagggcgagatggatgaacatagttattctctccatgtacagctatgtgagttaatgagttgcaagctcttactcccaagtatgtgggtcaatgagctgcaagctctttgttatgttgtctagaacacttctattataaactctgtctatcccgagatggacatatatattgtctcatgagttatacctattaatagttattattcttatcttgcatatgcttatgtagcagcgagtttgaatacttctatcatctataatttattgaaacgagttatttaggccacatttaataatgaatttaatattataatcattgagcttattcatatcccttttgtagtacatgtttcagcttctggttgatagtcgatttgtagcgcgctacttgttgattttatatgtttttggcctaaaagagtattttttttgccaaactttctcattt

SEQ ID NO: 330768 - DNA, 1224 bp, Cannabis indica
agttttttttgattgaagttttttcttttgatgtgagctatcctaattaacttattttaaaaaaatatatatttaataaataacatatgacatagtcattaatttaatattggagttaattcttaaagtgatcaattgcaaaaaaaaaaagaaaatggatgactaggcatgctttcatcacaaatctctttctggagtttaatatgatctttattttcagttaattttccatttttggcactacaaatgtacttttattttatgttcttgttttattccgtagatttcattaattaatacacctcatcaagttaacaaacacctaataaaataagtatgaaaataatctgtggatgctatttttaagaaaaaaataatgttgtcttgtcttttgacatgagtaaaaagttgtgagaattttaaagtattctgattgtttttttgtttgttcttgtcctatggcttctactagtcaacaagttaattcactaaatgaaaggtataactcagtgcaactggaggaagaagaagaaggagaactactgtgcgatttcatagaagatgtgggtcagcctatagatgataagtggtgtcttgtggggaaattcttgacgaggagatcgattgatgttgatgcgatgaaacacacactggcctcactctggcagccaggaaaaggggtattcgtcaaagagctagagcctaatctctacatctttcagttttaccacgaaattgatattcagagggtgatggatggcagtccctggacctttaataggaaccaattgatctttgagcgcctcaagaaaggagaagaccctaggagtattaccttaaatcgtcttgacttatgggttcaattacacaatctcaggacagggttcatgacagatacagtagtcaagaatgtggccaattacattggtacttttgttaagacagaccctaagaatttcatgggcatttggcgtgactatctacgtgttagagttgcgattaatatcgagaaaccattaaagagaaggatgaaactgaagaagacaaatggagaatggatatggtgtaattttaaatatgaattcatccctacattctgtttcatatgtggatttataggacattccgagaggttttgttctcgattgtttgataaatccttggaggaaatagagaaaccatatggcatatggatgaaagctgaaccaaggagaagacacaatc

SEQ ID NO: 330769 - DNA, 1040 bp, Cannabis indica
tttggatatcattttaaaagaaaaattgtgagtaaaagatgaattatataaattattttaaatttaaaaataacttctcaaaagttattttaggagaagttgcaaatcctaacttctcccaaaatgatttttcttttttaattctaaaagctaaaaaagagcgtagagaagcttagccaaaccggtgtagctttccatatagtggtgcacatcgagcaagtttgttagatttaattttgtagtttttcctattttagactaaaataacctaaagtaaacatttctactatactatctcaaagacaaataaacaatttatactatttactagtgtcaaaaaatactatttacaatgttttttattacaaaaatacgtgagggagatgaatcccaggtgcagaaagagagagtgagacacacgtgaataatacggcaagtgagactcacacgtgagtagatggtaaagctaactcagtggctgccatgtggtaatttcgatgaaattagcttgggctgctttttctcaatgcaacaattatgcaacacaaaaacgacttaataatcaaacttttaaaaaattatcaaacaataacaatattttaaaaatttcgtgtggcggtaaaattgtaaactttgactcaaaatccagtatttttgtaaaaatcctaaaaaaaaaactaattagcaacacaaaaacgacttaacaatcaaactttaaaaaaattattaaacaataacatattgcattaagacaattaaaatttataaataatacaataataccgtgaaaaaaaaaacaaataactaattgaacatatagaaagatattttaaaattctttacaataaatataaaaaattatgaaacacttaaactaaatatttttaaaaaattacacaaaaaaaataatttaggaaaacttaaattaattgataaaaaatatatatgaaacactttttaatgggtattacccatgaatggttattaaataaatttaactataaatattaattttaaaaatatcaaactatcgaattttg

SEQ ID NO: 330770 - DNA, 605 bp, Cannabis indica
acgctgtctatggattacatctttcgtaggaactctgtctaaaagttagatcctacctaggatgtaacaccttactagattaagcatgttaccaagatttcttaatttctgtgcacacctttgctaataaaagggtttattgaaaaatagggatagttaaaattttcttaaacaacttaaacattaaaaataaatataatttacataattccaggatcctgttaaaattcacataagtctacaaaatacttgcgttacaaaagttatattcatatgactcttaaaaaggtgagcctaaactttcccgaagaccctgaatactccagacctaaccgtcttgatatgtacacttttcaccattaattttagactcattcctattcatttctagctcttacctgcatatacacataataactatgagtagacagactaagtaagaaaagcgaaatcataaacataaacatatatcttagctgtaacaaggtgtccaaacacctactcacaatttgataatttggtctggaacgttctcgaaaaagtctgagcaactacgaatccagcctatactcggactctagtcatacatgttggaaatattttac

SEQ ID NO: 330771 - DNA, 992 bp, Cannabis indica
aaaaaatgacattttttttaaaaaatgaaaacaaaatgacgtgacacatacaaagagagtgtgttttaaaaaattgggccgaaaaaaccgggattacaagcccaatatacaaatcgttaaaaatataaaattaccataaaaacgtcaactacatatacgtaaacttaacataacaaaaataacatcatttttgaaaataattgccaaaataaggtggcccatgaaaatttccctaaaagaataccgttttctttgaatgcttaaaactatgagaaatttatgctatttttagtaaaattttaacacttttacattaaaatgtatatatatatttatatttttatattgttttttaaaaataatacgaaaataacataaagtaacagaacaataatatataaataacaaaaaataaaaacaacaaaacaacaataaaataataagaatacaacataaaaataatatgaaaacattaaatactaaattttctaaataaaattttaaaaaccgtaaaaatatttaaaattacgtgcaaccatattttaataatttttttgtttttatttgtttatgaaataatctctaaaaatatactatataaaatttttaggccttgagtttgggtgagtcataatcacggacctaacccaccttaactcaagattgggtcttactacaaaaagttttacttttagtcacaataaattaaaataaaaaattagtgactaattaattatcattcctatgttgtgactaaaagtatcagtcataaaaattacaatttattgtgactaaatgtatttattgtgactaaactaaaattagtaacaacatgtagctgaatactatattttagttacaagtaagttttattaaaaaattaatattgtgataacacgttatcactaaaagtagtaatttttgttagtgcctaatgtcacgggctcaccttttcaggcagcggaatacccgtgcggcgaccttgacttctc

SEQ ID NO: 330772 - DNA, 767 bp, Cannabis indica
agacggttgagtgttagttattttcaccttgcttgtgtacgtgagtcatcgattcataagaccatgaatatcttgtcttgtacaattttaatactatgtttcatcccgaggcggacatattgtctcacatttagtaaatgagttaatagttattattcttatctcgcatttgcctgtgtagttagcgagtttgaatatttctatcaacttcacttcattagaatgagttatttaaatttatgcattgtcattattatactccttgagttgattcatattccttctgtagaacacgtgtcaacttctagtgcatagccgaatttcgagtataacacatgtaggatttttgaccaatttaacctacaccaacaaaacacttattatcagtatccaaggtcaattttgacctttccttagtctaagtaatattagacaaaaacggcaatattttaaccacacgacaccaaaccctgtgtcatttaatccttcagcttaaagacttctcaagaaaagtctagaagccgtaactcacacactcagcctctctgattcgaaaactagaaaccctagcagagcaagttcttcacaagaacttgctcgatcctaagtagaaaccctaggatcttcacccaaacacacacagattagtttaatcaaatgaaaaacaagagaaagggagataaaacactagaattatttcagaattcacccaaaaatttgggctacgtctctgtgaagctcatctcagagatctagcttgatatcca

SEQ ID NO: 330773 - DNA, 573 bp, Cannabis indica
tatattaattgtagctgaatattcttttcttagagtaaatgacatttgtgtttctttagagttaatgacatttatgcactcaaattttaaatagtaggcctttaaaggggtgttttagtggtatagatgtgtgttcggcctatatatatattttttttgtgcttttcaaaatatgggatgtgtcctgctctataaaaacatgggtctggtggtcgtgccactatttgcccgacacggcccgtactcataggtccagtatttttgtcgtgttggtccggtttttgtttttttccttttaaatagactagctcgtttttaaatctgtggtcgaattggtgctttattttttcaataatattatatagattcatataaaaaattattaaaatttaaatattttcttataaatacttaaattttaaattatatactataaataaatatttagttttaaaattttttaataaatttttagaaaaattacgattaaatgtgcaaaataaaaacaactaaactttaaacaatccaaacaattagtaatgataaaattatcaaaccaagaacaataatcga

SEQ ID NO: 330774 - DNA, 522 bp, Cannabis indica
agcataagtatgaaagtatccatgaaatacattcttccacaaccataatgcaagctatttttgtgttgtttttcttttcatttgaaaaaagatgaaatattaaaagtaaaatgagttattaaaaattttcttaacagtgtgtttgatagaggggaaaaatgggaggatggagagatatggagggaaaaaacaatccattatatggttgaatagaatagattagtgttgtaagttcgtgtatgtcatgctagcctgactcatatttattcgtgttttttaaaaaataggccgtgtcatgcggtgccacagaaaaatatgagttgtactgtactgtaccgtgtcaatatttttaaaggtaggccagtattttcgtgcagtgctcggattcgtacagtactttgcttgtgtcgacctatatttcttaaacagaccaactcatcttcatattcgggcttgaattcatgttttacttttccatattttttttcataactattgaaatatatgtatatttgatagctt

SEQ ID NO: 330775 - DNA, 728 bp, Cannabis indica
tttccatgccttgtaaggagactttgtcctgctattgacaaggtcatattctacgtgttctcaatcttgacttatgtggacatgacacgtcaaatagataaaatttgggataacaataataattataatattagtttatatataggtaagatttacttcactactaagaaacgtaatataatatgtataatataataactagtataagaattgtaccaacttaaattaaagtaatttttcttcttgcagttctccagtaacggcaccaagaatttcttcataccaaaatagtaagtataacatgtatcaactcgcaagcacacaaatttttattgtgatgtagaaatcgtgaagatcgaggtcgaacttatgggacttgcgtgagattgaagaaaatacttctttaatctaaattattaaaactcttacctactttcgaaaatattgagatttttagtaaaaaaaataaaataaaataaaacgtttaacggtaaaaatgacaacaacacatattttaaatgatatttaggagaattattaaggtttcaaaatttacttaagtgtatataaaaatatttatgtttatattgattgtcataatttaattagtaatcaaactaattagtttttagcagaaaaatagattttcacttcctttaaaattataacttataagcattaaatgtgaaacaatttaatgtaaatacataaaattaaataatattatt

SEQ ID NO: 330776 - DNA, 830 bp, Cannabis indica
ggttttaattagattttgagattgacatccaataaccgatcaaatccaatcagaattcaacttttaggatccaattgggttggattggattggattggattggattggatcagttcagttcaatagattggatgttgcccacccctaaatgcacatatgcacatgtttagtatgcatgtttcagttgccatcagattaacatatcggggtattagtatggtgtacacagagttgcaccgtgataccaacaaatatatattaggaaaaacagaaagccatcatattaacatatcaaggtatcggtatggtgtacacgaagttgtaccgaaataccaacaaatatatgttaggctttacagaaagtatggactaattctaccaacactagtacgcctagagtattgagtgcatgtggtattatggttagttgtacttatagtatggattgatattaccaacactagtacgcctagagtactgagtgcatatggtattatggtcaatcgtactatagtcaagaacgttcgagactcaatcatacgcgttgcacgcaggttttagactgcatggtaattaagtgtatggacgctaattacaagtgaaataaatatttatattttatattttttcttattgagtctataaactcacaattatgttttcatgtgtggtaaaggcaaggccaaggttgaacagtagtgagtttggagctaagtgaagattgtacatatctagatggttagacttggattttccgaatctttggtgtaacgtccccgcttcaagcctccattgggtctttacacttacggaatgatggctcttataca

SEQ ID NO: 330777 - DNA, 1192 bp, Cannabis indica
agggtataaatatctttttttttttttcaattaaaataaatacttatgcatattatgaaataatggaaagacatggaccacctatgtattcgattgttttataataattgaagacataagttcttgtatgtctttggtgtttcaaaacttatgttttgaccttaatacttttgggtagtgagatttttttaaatgaaaatagaccagaaaaaaatcgatgataaaatctaattttatagtacttataatgattacagaagttgttaatattattattattatcattattaattggaaggaagtatataagttgttggaaaaatggttgcacactcacaaaaaacagttttcctttatttgaaaaaaaaaaaacaaaaatagattaatttataagaaagaaaccacatacaactttgtcttattacaacaacaacaacaacaataatctacactaacaaaaaaaaaaaaaaaaaaaacaacaacaacaataatgttgttgttattattattgttgctatatttaaattataagtttcttttgacagataatgtagtactaaatatatatagttataattttagcaataaaaaatattatatgtatggtaaaatatagttgttgtttgaaaaaaatagtatggttgttaagtcaacgagtcaaaggatgtgtacacatgctaccagaaaagaatatgaagatgataataatacaaatggtgtaagcataacttcaccaatccccttattacccaaattggtatatttcaattgctaattcttaagtttttttctcacatatgtgtggttgttgaccaactttgtaatctctattgagaattaatgaaatattagagataaagttatctgaagcatatgaattgtgatacttaatcttataaattaatttttcgattgtaaaatttttaaaattcacattcaattttacattttactccactataaatatgaaattacacgctttgataatataaagtatatttatagaattttacttgtagtgtattgatataatcaatataagttgttcgccttcaataattagagttggtcaaaattattgttttacccttttaattatctattcactccttatgtacaattaattcaatgtgagcagttaatctataacttattatagatttggatctaactgttagcactcccagaatta

SEQ ID NO: 330778 - DNA, 1105 bp, Cannabis indica
ccttaaactctttactttacaagtttgattatttgctttcaatataggcttcaatgaatgacaattatgaattctagccttaaggaattattttacctggttgctaatcctcttcactgaacaacaagcatcttcgaacacacacctattacggtacaccaaattaaataaacaacagcagcaatgatagccgaaattaccatattctcctttaaagttgttgtattcaaccaatcactaaggcaagcaggccaatcaaagccaccaaaccaggaagaaatctcagccaacaccctttgcaaataaatgcaactaaagaagatatgaggatgagattcagaatcaagctcacaaattgagcaaaggacagaatccattataattaatctagctaattgatcttaggttaaaagattctcattgacaacttgccaaagaataaatcagtgtttcaccatcttcaatttgtgccaaactatcttttgataagtccctttcccagttgaaatgagcaagataaaattttttagctttaaatttcccagaactaccagttgcaattaatttgtctttatcaatcgtgttctcagcttcatgagttttctaaaataccagcttgtgtcaattcttgggttgaatgtccataagtctcaattctttaaatagatataattaatccactcgacccaaagacaatcctgtttggaagctatggcccaaatgaacttggccatgagaaaaatattccactttttatctttcctaaaattgatacctccatagtcctttggcaggcagacttgaattcaaaatgtaaagtgtaaattgctcctatttcctgtcttgccccatagaaaatcacgacataacttgtcaatttcagctgtaaaattttgcgggaatgagaatacccatccagtaattcctaattcctaataagatcgattggaccaaaagggctctaccagcaaaagagaggtggcgactattcatccatgtaacttcttacagatcttctccacaatcagagtctttcaatttggttggcctcaagttgactccaaggtacttcagcaaaaaataaccttcagtcaacttagaggaa

SEQ ID NO: 330779 - DNA, 2169 bp, Cannabis indica
ccaaatcaagtttctagacttgtgttaatgataaaaagtctacttatgagattatgactctgggggtggaacaataatttttggagaagtgtaaaaacttatccagagtttctaactctaccaatgagtctgaatattaaagtggcctagaaggctagtagatgattattcagcctatagaaaattctatacaatttttaaaattattccagtaatgaattaactactagtgttacttcctgacaacacagatttatttgtcaaacagtaaagaatccaataccctaagatgattaaatatttagataggaatttcataacattaatgattttgtgactaataagatgtaatggtggagaagattaatactgaatacaacctgtcaggtgctattacactgataatactacatactacatttgatatggacatcaaggtgttaagattaattgaaatgcacttttagttttacattagtgatagtgggagtttgttgggattttatgccctaaataaaactcatttcaatataatcagaattattaattaataaaagatcagaaattattttatgttacatggttcacatgactactttcatgcttatatgtttaatgtataaattctatcaaattcataacatatagttattcatgattatagtgttgtctacacagtggaacataatcatgattgtatttctcaaaagttagtcccataatttgtcagtacactagatttccactgacgtgataatcaacgataatgtttacttacacattgatatgtggtatgtcctttcaagggtattggcaaagtatgctagtataggatgtatggagtatacatcggactggaccgatattgacattggataagatatcataaacttacagttatatctttcaaagtcaggtcaatagatcttaatcatgtgatggggttaggttctgacttaaatgtattattcatgttctttgacttgttcgttaaagttgaccaagtagatatttccaatacatacatcttgggaatatgatagtgcaattgagtgggagctctaatcatgaatatagaatttatagcttcaataacttattagaagtgaaacgataatttcttttgagtttggcttaacgctataaataattgagcactcatttcagtaattatattagtttactgaaatataatttataaatagttgaagtgttttaaggaaaaaatacattgaaggacaaaacggtaaatttgtccctactcgatgtagatcatctatagaggatctttgattatttggattgaaataatgagtaattcaaagcgcatctatttttggcatatagagcgttctatgtaattaggagttcaattctaaatctacttattgagagcttgattacataagattatggtccccacactaattataataatattattttgtagtcttaattaattaattttaattaattaattagaattctaaataagactatgtcttgtttgtaaatttttcactaagcaatgacttatttgagaagaaaagaggatttaagatttatttattaattaatagactttacaaggtctaattaataaataagttaaatgacaattttatttgataattaattatcattattaaatagatagatttgacatttataggattataattaaaatatggtatttgtgaaagaaaagataagttattaaataaatgacaaaattaaaacttatggggcccacatatatggccaacaacttaaggttaatttaagctattatttcatcttttttaattcatataatttaaatcctaaccctatatgaaattctatataaagaaagagatgactcttattttcataacctacatcagactcttttgtcagaaaattagaaaataaagagagcttctcttctattcgaaattccctcttattcctcctcaaattttcgaagcctatggtgaattgagagtatgcccactcatgtcaaagcaatacctaacatagtgaggaagactgtgtctaaccaaattgaaggagagaagatccaagttcagattgataatgctctgttacagacaagaatcaagggctagatatctaaatggaaggagtcattattattctactcccatcaatgtaaggatttcttaa

SEQ ID NO: 330780 - DNA, 625 bp, Cannabis indica
atacgacactaatttttttttttcaaattttaatatatattattcatttcaaacatacaatattaatttcacacgtatttttcgtataaaaaataatattaaaatctaaagtatttaataaaatgtatttagagcaaagaacaataatctataaatatagaacatgaataaatttttttttaaaaaaatatttaaaataaaggagtttaaagttgtagcgcgtttttagcttaaattcgccaattatgagttgggcgctttaattatttagccatgaatgcttagcggggatcttcgtacatttaaatattttaaaaatcttttattttaggattaattgcggcaaaccctcccgtaattttactttacttgcaattaacccctaaaatctaaattttagcagtaaaacccccaaaattaaaataccgttagcaaattacaactttcatccaaatttaactgttaactgccaggttggattgtccacgtggacacaatatacacgtggcataattttattggccaacgtaaataattatattaaaaataacaaaatcatttaaaaaaaaaatctttttcttttttttttttcttttcctttgttttctttttcattttcttaaat

SEQ ID NO: 330781 - DNA, 761 bp, Cannabis indica
ttatattttattatagtcaattttataatttaattttattaaatattgaagtccacataatatataagagtaagttattacgcaccataatttttagtactaccatgaagtcacgccctacaaatagttattagttttctataatcattattaaaggtaaaataagtgagatttaatattaaattgcaccaatagcttatgacacttcataaagggtgctaggcaccatagatgacccacttaaattttatttctaacttcgtccctggttagtgatacacaatttttactgcaatcgtacaatattattatagcaaagtttcaattctaagaagattgtcgaacccatagagattaattattacattttacaaattactatattttttttggtttatgctttaattagacaattaaaagtaaataataattaagaattgaataataaaataactaaaaagtaaacagacatacaatgattttaatcagaaaataaaaacctagagcaatgatttttctatttcaaactatgaatattagtttaccaattattttaatttattctataatttttagtttcaagaatcttaatgtaatctattaacctctctcgagtgatgaaagaactaacttaattaattaacacaatatctcttcaatattaaatcaatcagacaataatcaagcaatataattctttttaaatgaaactcataaaattagtggaatatctgaatctcacatttttcctatgtcatgca

SEQ ID NO: 330782 - DNA, 679 bp, Cannabis indica
aaagataatataattttgcacaaactataaatacaagtcaatactaaacatattattgtattaaataatattaatacaatataatataatccaatacaatactatactatacaatataacacgatgtaccaaataagcctttttaaagagtaataaggctcttatttcattagatcatgaaattcgcactatttttttaagcatataaattgaaaatatatatatattttttaaaagtaatattttataaattagagttttcttattaaattttttgttatttccaaaaatgcgaaaccaattttaaaatagaatttttctattagcttttagtgtacatttgactagtggtaatacaaagattttgtggctggtcataatacaaatattttgtggtttgttgtaatacaaaaatgttatattttgtggtttgttgtaatacaaaaatgttatgactagtcgtaatataaagatcttgtagttgatctaaattttgtattgtctttattttttttttattttaaggttcatatgtctaaatttttaaaattaattagggaattttattgtaaatatattaataatttctaactatttaataactataataattattaaataatattgttcatttattcatatttattaatttgtaaccatacaaagtaatcataattaa

SEQ ID NO: 330783 - DNA, 604 bp, Cannabis indica
ccaaaatgcttgggccagccctggctgtgttgggcctaccctataaaattattacacgacacaatacaacctatattttttatggcacgacagacacgacccatatttttttataggtcagcacaacatgatctgtattttaaaaatccaaaaaatatgaatcaagctagtacgacacacacatatttacaactacgattctgacttcaaacaacctctaatcaacattcgaatcacttgttaaatagaaacaactatctaattgttatcactctctcaccatcatcacaccatcaccatctcgacccaaagggagcctcacccctccatcatctcggcccaaatggggcatcatgcctccatcacctcgaaccaaatggcgatcatcacgcctccatcacctcggaccaaaatggtcatctcgacttcaacgtcatcttggcccaaaagggaacctcgttacctcgacccaaagaggcctcacacgtccatcaccttggcccaaagagggcctcaacatgtttgtctttacgacgtaaggaaatgcaacgccctaaataattaggcacgctacccaaaaagcttatgaaaccctaatccccta

SEQ ID NO: 330784 - DNA, 523 bp, Cannabis indica
taggcatacttgagtttgagtgttttataggtgggtggggaaatggaaccagctttagatttgggttttttttttatgccttttcagatgttttattctattattactttaattcattattttctattttacctcaaatttttacattataccacattaccatacatcaccttctttgaaatacatcactattttttttctttcaaattttattatatttttttcattttaaacatataatattaatatttacacatatccccatatgaaaagtaaaattaaaaccccaaacaattgataaaatatatttagagcaatgaataataatattctataaatatagagcatgaaaagtgaattttaaagaaattttaaaatagagaaagaatttaaagcatctaatatagcgtgttttcagtttaaatctttaaatattttaaagattatctattttaaagcatctaatctgagtgttcttaggcctctttttagtaatttttttttttgcttaatggtctatttt

SEQ ID NO: 330785 - DNA, 573 bp, Cannabis indica
aaaggaaagtttcataaaagttatatagttaaatccgattctacaattgcaatttgcaagaagaaaaaaaccttcaatgatatgttatattatcaaataaataaataaataaataacactactacatatatccaccacttatgtttctttacttttcaaacgataaaaaacaaataatcataattgcactaatattttcttaatccattttgactaataatagatacacgaatctaatctacaaccatgcataagaagataaatattaaaagatatgaattagatatgaggagtgctgttatcaattttttattataagtttttagttaatttctgtatctaaaaatatatattgaaatattttttttaatattttctcgtgacggtgttcgttatgcttacaatatcatctctgtaaaagtttgaaattttttgtataatttacagtaccgaaaatacgtttgaagtttttgtaaacacgcgtagtaactaaaatatcaaaaactctgttttcagcattataaactattaagattttttcaaaaatttacagggataatactgtaactataa

SEQ ID NO: 330786 - DNA, 638 bp, Cannabis indica
ttttttattattttgcttaatgtaaaacaagcaggcggtatgatagttctcttagattcactctcctttggataaagtttagatttaatacccataacttttaaatcaagatgcacattcaaattatctttatttttcgaatctaaactcaataaagtctcaatcaaacattcacatacattcttttcaatatgcatcacatcaagattgtatcttaatacattatccttctaatatggtaattcaaaaaatatactccttttcttccaaccatatggaaattgaggattaacaactgttttcccaaatttaatttagtagccttctaacatatatatccaatatcattaaaccaattaaaagtgttggagccattcttttctattttgtgccattaaaatacttttcatcgtttctaaatgagcggttattttctaaccaacgacagtgacccatatagcaatatttttttactgtacttcaaccacaaagaataagtgtcttgatgacaacatgtgcatgcatattttccttttgtgccttatcctgataagttcgcatatgctggaaaatcattgatagtccataatagtgatgcccgtaaattaaagtgttttttttttgtagaagcatcaaaa

SEQ ID NO: 330787 - DNA, 1127 bp, Cannabis indica
aataataataaatatttattagttaattaattttctctcatggccagcttatatatgcatgagcaatgacacaaaattcaactgggtgatgttgaaaatgaacactcatttgccggtgatataataattgttgtctttataacactctcaaccaccttgaaagtacattataaccaatcacccttgaccaagtctgatcatatatatcatcatacgctatacactatatacaacagtagtaacagtacctagttatatctcatcgtgtggagctgccgcgcgcaccttcattcccactctcaccaatgctccaattaattatatcttatatattggtttctattttcttttcacatggaaataaagaaaaaaaatatcctccaatcaattaagtttattcactttgaatgtatacataactaatttacaagaaattaccaaataaaaatgctttagaaaaattgtaactcgtaaaatcatctaatcatcatacatcgatataagggctatgaaagtggtcttgtgacccctccaaaaatttaaaaaaaaaatcatctataaatataaaaatacgggtaaatactattttagacaatatgttttacaaaagttaccaattggactcttactttgtattttttaaaattgtagaaataggactctaaacttattttttatcaaaataaaatttaataataatccgatctaaaggtgttatgacaaaaatatttacattttttatatttgtccgtgttaggaattattttcaaattggttatattgaaaaaaaaaaaagaagttttcaaaaattaagctcaagtcctatttttaccattttaaaaaataaatggtccattttatcatttaacaaaacagatagtctaatcgataatttttataaaacacatgatataaaatagtatttaccctaaaaaatatatatgtttggcccatgctaaaataaattaacttagttccgccactaaagtaaaataaaaaagtaaaactcaatactaatttacaattaattttaaactgtacgattaatgtagaccaacaaagagttgctttaggtctatctcccaactatagaatctaacatatttttcatttaataaataatataa

SEQ ID NO: 330788 - DNA, 814 bp, Cannabis indica
aaaaaaaaaaaaaagagagattgagaaactaaaccaacatattacacaaattaattagaagtgtgatttaacataaatctgaaaattaacttgttaattatacttacaagaagtctaatacttacaaaaacaaaacacccactacaaaaaatcttacttttaagttgtgactaaaagtaaaatagtcgtgcctaattataaatcatcattcttatgttgtgactaaaaggtccgcgactaaatgtattagttataaaaatcacaatttgttgtgactaaatgtgtttttagtcacaatatacttgttgtgactaaaattaaattagtgacaacttgtatctaaatactgtattttagtcattaacataaatattttgtgactaaattatcactgaaggtagctatttttttttgtagtgatcctataacaacctacaagttttaatgaacacataattgcattcatcttttactactccttcaactagggttaggttgagacaaatgaagagagcgatcgaattagggttgagcacggtgaatctccgaggaaacgttaagttagtggctctcaaaccatttctattaggggtggcaaaacgggtttcgatacggcacatgaacacgaacacgacacgaattttacgggttaggtcgagaaaattagactcgagtcgaaaatgggtcgacacaacttgacacgaaatagaaacgggtcaaacacgacacgacccgcttaacacgaatgtgacacgtttgatacgatttttttaaatataataaagtaaaaaattaataataataatataattat

SEQ ID NO: 330789 - DNA, 837 bp, Cannabis indica
aatttttattttatttttaaatacttatttatgtgggccaattatattgtgtcacgtgaacactgtgtccacgttggctgaactgaactgagccacgttggcaaataacggagtcgagggaacggaagtgtgtttttgctaacagaatgctaattttgggggttttaccgccaaaatttgagttttggaagttaattgcaagtaaattgaaactattagggcttttgccacaattaactcttaattttattattttatttatttagtaaatatatacattttaaaaaaaaattaaaaatgatctttaactttttttttttaaaataattaaattatgtgaactcataataaaaattgtgacacgtgtatactgtgtccacatggatatgctcacacggcatttaagctaaaatttgatggaaatggctaaatgctaacaaaaattttgatggaaatggctaaatgctaacaaaaatttcgctgcaatttactctattttttaatctcatatctttttacattatttatttatacaatataaaagaaaactctattaaagtattccatatttatgaaaagacccccaaagataataaagagagactgcaaactttgttcaaaaatggtatttctacaaaaaaatattttatggcaaaagataaacgtgtggttatattaaaaaggggaatttgcggctaaattaatttcttatacttttatgtttgttatggttaaacccctttactcgaaaaattatggctatacttcctgcacccaacaatcattttgctctatagtctttttgtccactttagtatgttaagtactaaagtggag

SEQ ID NO: 330790 - DNA, 976 bp, Cannabis indica
aaaactaaaaagtaaaaaaaaaattaaaatccaaaatcggattggtcagtttaattgggcaggttggaccttttttttaccccaccaaattaatagattgggcggtttgtaattttttcaggttattcagcagcacgtggttcttcaaataggcatgcatggcctacagcttccctgagtttggtcaacttaaggtcttctcccaagcctagtctcgtctcgtctctcgtgcatagtatagggagtgaaacccgattgttcttgggaggtgacccccaaggattcttccttcagtcggaggcgccaatggtgggtctactcttggaggcatgggcctaccacttggatctaccaaggtgcatgtatcagtctagcaactatagagtcctaccaggtagtctcagccacccataaagctacatgggaggtttggtctgccaaggtgtgtagggtttagccggacaaggcctataggatctggtaggacaagggttgcaggacttggtaggtcaagggctgcaacacatagaaggtcactatagctctatttagaggagactagactcgtggcacctattgtggtgataggattcaccacatcagcagtgttcatcgagattctggttgtcattggaacctgagtatctgaatctacagtttgtgggtcttgagggagacccaaagatgcaaatgttggattttgtgctctaattaaaacccatttcaatataatcagatttactaattaataaagatcaaaaatcacattttatattgcatggttcacatgatttatttcatgattatatgtataaattctattaagttcagaacatatatttttgtacatgattatagagttgtcagcacagtggaatataatcatgtttatatgttcgaaagtttcattccctaatttgtcagttcactggatttagactggcatgatattcagcgataggtatacttacacctt
